United States Patent Application Publication US 2026/0375177 A1, published November 26, 2026 (application 19/205,950).

The application's sequence listing, which the Patent Office published only in electronic form, follows.

SEQUENCE LISTING (16529 sequences)

SEQ ID NO: 1 - protein, 3685 aa, Homo sapiens
MLWWEEVEDCYEREDVQKKTFTKWVNAQFSKFGKQHIENLFSDLQDGRRLLDLLEGLTGQKLPKEKGSTRVHALNNVNKALRVLQNNNVDLVNIGSTDIVDGNHKLTLGLIWNIILHWQVKNVMKNIMAGLQQTNSEKILLSWVRQSTRNYPQVNVINFTTSWSDGLALNALIHSHRPDLFDWNSVVCQQSATQRLEHAFNIARYQLGIEKLLDPEDVDTTYPDKKSILMYITSLFQVLPQQVSIEAIQEVEMLPRPPKVTKEEHFQLHHQMHYSQQITVSLAQGYERTSSPKPRFKSYAYTQAAYVTTSDPTRSPFPSQHLEAPEDKSFGSSLMESEVNLDRYQTALEEVLSWLLSAEDTLQAQGEISNDVEVVKDQFHTHEGYMMDLTAHQGRVGNILQLGSKLIGTGKLSEDEETEVQEQMNLLNSRWECLRVASMEKQSNLHRVLMDLQNQKLKELNDWLTKTEERTRKMEEEPLGPDLEDLKRQVQQHKVLQEDLEQEQVRVNSLTHMVVVVDESSGDHATAALEEQLKVLGDRWANICRWTEDRWVLLQDILLKWQRLTEEQCLFSAWLSEKEDAVNKIHTTGFKDQNEMLSSLQKLAVLKADLEKKKQSMGKLYSLKQDLLSTLKNKSVTQKTEAWLDNFARCWDNLVQKLEKSTAQISQAVTTTQPSLTQTTVMETVTTVTTREQILVKHAQEELPPPPPQKKRQITVDSEIRKRLDVDITELHSWITRSEAVLQSPEFAIFRKEGNFSDLKEKVNAIEREKAEKFRKLQDASRSAQALVEQMVNEGVNADSIKQASEQLNSRWIEFCQLLSERLNWLEYQNNIIAFYNQLQQLEQMTTTAENWLKIQPTTPSEPTAIKSQLKICKDEVNRLSGLQPQIERLKIQSIALKEKGQGPMFLDADFVAFTNHFKQVFSDVQAREKELQTIFDTLPPMRYQETMSAIRTWVQQSETKLSIPQLSVTDYEIMEQRLGELQALQSSLQEQQSGLYYLSTTVKEMSKKAPSEISRKYQSEFEEIEGRWKKLSSQLVEHCQKLEEQMNKLRKIQNHIQTLKKWMAEVDVFLKEEWPALGDSEILKKQLKQCRLLVSDIQTIQPSLNSVNEGGQKIKNEAEPEFASRLETELKELNTQWDHMCQQVYARKEALKGGLEKTVSLQKDLSEMHEWMTQAEEEYLERDFEYKTPDELQKAVEEMKRAKEEAQQKEAKVKLLTESVNSVIAQAPPVAQEALKKELETLTTNYQWLCTRLNGKCKTLEEVWACWHELLSYLEKANKWLNEVEFKLKTTENIPGGAEEISEVLDSLENLMRHSEDNPNQIRILAQTLTDGGVMDELINEELETFNSRWRELHEEAVRRQKLLEQSIQSAQETEKSLHLIQESLTFIDKQLAAYIADKVDAAQMPQEAQKIQSDLTSHEISLEEMKKHNQGKEAAQRVLSQIDVAQKKLQDVSMKFRLFQKPANFEQRLQESKMILDEVKMHLPALETKSVEQEVVQSQLNHCVNLYKSLSEVKSEVEMVIKTGRQIVQKKQTENPKELDERVTALKLHYNELGAKVTERKQQLEKCLKLSRKMRKEMNVLTEWLAATDMELTKRSAVEGMPSNLDSEVAWGKATQKEIEKQKVHLKSITEVGEALKTVLGKKETLVEDKLSLLNSNWIAVTSRAEEWLNLLLEYQKHMETFDQNVDHITKWIIQADTLLDESEKKKPQQKEDVLKRLKAELNDIRPKVDSTRDQAANLMANRGDHCRKLVEPQISELNHRFAAISHRIKTGKASIPLKELEQFNSDIQKLLEPLEAEIQQGVNLKEEDFNKDMNEDNEGTVKELLQRGDNLQQRITDERKREEIKIKQQLLQTKHNALKDLRSQRRKKALEISHQWYQYKRQADDLLKCLDDIEKKLASLPEPRDERKIKEIDRELQKKKEELNAVRRQAEGLSEDGAAMAVEPTQIQLSKRWREIESKFAQFRRLNFAQIHTVREETMMVMTEDMPLEISYVPSTYLTEITHVSQALLEVEQLLNAPDLCAKDFEDLFKQEESLKNIKDSLQQSSGRIDIIHSKKTAALQSATPVERVKLQEALSQLDFQWEKVNKMYKDRQGRFDRSVEKWRRFHYDIKIFNQWLTEAEQFLRKTQIPENWEHAKYKWYLKELQDGIGQRQTVVRTLNATGEEIIQQSSKTDASILQEKLGSLNLRWQEVCKQLSDRKKRLEEQKNILSEFQRDLNEFVLWLEEADNIASIPLEPGKEQQLKEKLEQVKLLVEELPLRQGILKQLNETGGPVLVSAPISPEEQDKLENKLKQTNLQWIKVSRALPEKQGEIEAQIKDLGQLEKKLEDLEEQLNHLLLWLSPIRNQLEIYNQPNQEGPFDVQETEIAVQAKQPDVEEILSKGQHLYKEKPATQPVKRKLEDLSSEWKAVNRLLQELRAKQPDLAPGLTTIGASPTQTVTLVTQPVVTKETAISKLEMPSSLMLEVPALADFNRAWTELTDWLSLLDQVIKSQRVMVGDLEDINEMIIKQKATMQDLEQRRPQLEELITAAQNLKNKTSNQEARTIITDRIERIQNQWDEVQEHLQNRRQQLNEMLKDSTQWLEAKEEAEQVLGQARAKLESWKEGPYTVDAIQKKITETKQLAKDLRQWQTNVDVANDLALKLLRDYSADDTRKVHMITENINASWRSIHKRVSEREAALEETHRLLQQFPLDLEKFLAWLTEAETTANVLQDATRKERLLEDSKGVKELMKQWQDLQGEIEAHTDVYHNLDENSQKILRSLEGSDDAVLLQRRLDNMNFKWSELRKKSLNIRSHLEASSDQWKRLHLSLQELLVWLQLKDDELSRQAPIGGDFPAVQKQNDVHRAFKRELKTKEPVIMSTLETVRIFLTEQPLEGLEKLYQEPRELPPEERAQNVTRLLRKQAEEVNTEWEKLNLHSADWQRKIDETLERLQELQEATDELDLKLRQAEVIKGSWQPVGDLLIDSLQDHLEKVKALRGEIAPLKENVSHVNDLARQLTTLGIQLSPYNLSTLEDLNTRWKLLQVAVEDRVRQLHEAHRDFGPASQHFLSTSVQGPWERAISPNKVPYYINHETQTTCWDHPKMTELYQSLADLNNVRFSAYRTAMKLRRLQKALCLDLLSLSAACDALDQHNLKQNDQPMDILQIINCLTTIYDRLEQEHNNLVNVPLCVDMCLNWLLNVYDTGRTGRIRVLSFKTGIISLCKAHLEDKYRYLFKQVASSTGFCDQRRLGLLLHDSIQIPRQLGEVASFGGSNIEPSVRSCFQFANNKPEIEAALFLDWMRLEPQSMVWLPVLHRVAAAETAKHQAKCNICKECPIIGFRYRSLKHFNYDICQSCFFSGRVAKGHKMHYPMVEYCTPTTSGEDVRDFAKVLKNKFRTKRYFAKHPRMGYLPVQTVLEGDNMETPVTLINFWPVDSAPASSPQLSHDDTHSRIEHYASRLAEMENSNGSYLNDSISPNESIDDEHLLIQHYCQSLNQDSPLSQPRSPAQILISLESEERGELERILADLEEENRNLQAEYDRLKQQHEHKGLSPLPSPPEMMPTSPQSPRDAELIAEAKLLRQHKGRLEARMQILEDHNKQLESQLHRLRQLLEQPQAEAKVNGTTVSSPSTSLQRSDSSQPMLLRVVGSQTSDSMGEEDLLSPPQDTSTGLEEVMEQLNNSFPSSRGRNTPGKPMREDTM

SEQ ID NO: 2 - RNA, 233 nt, Homo sapiens
  misc_feature 1..233: note = Exon 51
  source 1..233: mol_type = unassigned RNA
ctcctactcagactgttactctggtgacacaacctgtggttactaaggaaactgccatctccaaactagaaatgccatcttccttgatgttggaggtacctgctctggcagatttcaaccgggcttggacagaacttaccgactggctttctctgcttgatcaagttataaaatcacagagggtgatggtgggtgaccttgaggatatcaacgagatgatcatcaagcagaag

SEQ ID NO: 3 - RNA, 11 nt, Homo sapiens
  misc_feature 1..11: note = Exon Splicing Enhancer
  source 1..11: mol_type = unassigned RNA
ggacagaactt

SEQ ID NO: 4 - skipped

SEQ ID NO: 5 - RNA, 11 nt, Homo sapiens
  misc_feature 1..11: note = Exon Splicing Enhancer
  source 1..11: mol_type = unassigned RNA
aagttctgtcc

SEQ ID NO: 6 - skipped

SEQ ID NO: 7 - RNA, 20 nt, synthetic construct
  misc_feature 1..20: note = Description of Artificial Sequence: Synthetic Drisapersen
  source 1..20: mol_type = other RNA
tcaaggaagatggcatttct

SEQ ID NO: 8 - DNA, 30 bp, synthetic construct
  misc_feature 1..30: note = Description of Artificial Sequence: Synthetic Eteplirsen
  source 1..30: mol_type = other DNA
ctccaacatcaaggaagatggcatttctag

SEQ ID NO: 9 - DNA, 26 bp, synthetic construct
  misc_feature 1..26: note = Description of Artificial Sequence: Synthetic Primer
  source 1..26: mol_type = other DNA
tgaaaataagctcaagcagacaaatc

SEQ ID NO: 10 - DNA, 20 bp, synthetic construct
  misc_feature 1..20: note = Description of Artificial Sequence: Synthetic Primer
  source 1..20: mol_type = other DNA
gacgcctctgttccaaatcc

SEQ ID NO: 11 - DNA, 18 bp, synthetic construct
  misc_feature 1..18: note = Description of Artificial Sequence: Synthetic Primer
  source 1..18: mol_type = other DNA
cagtggataaaggcaaca

SEQ ID NO: 12 - DNA, 21 bp, synthetic construct
  misc_feature 1..21: note = Description of Artificial Sequence: Synthetic Primer
  source 1..21: mol_type = other DNA
gtgatggtgggtgaccttgag

SEQ ID NO: 13 - DNA, 17 bp, synthetic construct
  misc_feature 1..17: note = Description of Artificial Sequence: Synthetic Primer
  source 1..17: mol_type = other DNA
caagcagaaggcaacaa

SEQ ID NO: 14 - RNA, 18 nt, synthetic construct
  misc_feature 1..18: note = Description of Artificial Sequence: Synthetic Antisense oligonucleotide
  source 1..18: mol_type = other RNA
ggtaagttctgtccaagc

SEQ ID NO: 15 - RNA, 18 nt, synthetic construct
  misc_feature 1..18: note = Description of Artificial Sequence: Synthetic Antisense oligonucleotide
  source 1..18: mol_type = other RNA
gtaagttctgtccaagcc

SEQ ID NO: 16 - RNA, 18 nt, synthetic construct
  misc_feature 1..18: note = Description of Artificial Sequence: Synthetic Antisense oligonucleotide
  source 1..18: mol_type = other RNA
agtcggtaagttctgtcc

SEQ ID NO: 17 - RNA, 18 nt, synthetic construct
  misc_feature 1..18: note = Description of Artificial Sequence: Synthetic Antisense oligonucleotide
  source 1..18: mol_type = other RNA
ctgtccaagcccggttga

SEQ ID NO: 18 - RNA, 15 nt, synthetic construct
  misc_feature 1..15: note = Description of Artificial Sequence: Synthetic Antisense oligonucleotide
  source 1..15: mol_type = other RNA
taagttctgtccaag

SEQ ID NO: 19 - RNA, 20 nt, synthetic construct
  misc_feature 1..20: note = Description of Artificial Sequence: Synthetic Antisense oligonucleotide
  source 1..20: mol_type = other RNA
ttctgtccaagcccggttga

SEQ ID NO: 20 - RNA, 19 nt, synthetic construct
  misc_feature 1..19: note = Description of Artificial Sequence: Synthetic Antisense oligonucleotide
  source 1..19: mol_type = other RNA
ttctgtccaagcccggttg

SEQ ID NO: 21 - RNA, 18 nt, synthetic construct
  misc_feature 1..18: note = Description of Artificial Sequence: Synthetic Antisense oligonucleotide
  source 1..18: mol_type = other RNA
ttctgtccaagcccggtt

SEQ ID NO: 22 - RNA, 17 nt, synthetic construct
  misc_feature 1..17: note = Description of Artificial Sequence: Synthetic Antisense oligonucleotide
  source 1..17: mol_type = other RNA
ttctgtccaagcccggt

SEQ ID NO: 23 - RNA, 16 nt, synthetic construct
  misc_feature 1..16: note = Description of Artificial Sequence: Synthetic Antisense oligonucleotide
  source 1..16: mol_type = other RNA
ttctgtccaagcccgg

SEQ ID NO: 24 - RNA, 15 nt, synthetic construct
  misc_feature 1..15: note = Description of Artificial Sequence: Synthetic Antisense oligonucleotide
  source 1..15: mol_type = other RNA
ttctgtccaagcccg

SEQ ID NO: 25 - RNA, 14 nt, synthetic construct
  misc_feature 1..14: note = Description of Artificial Sequence: Synthetic Antisense oligonucleotide
  source 1..14: mol_type = other RNA
ttctgtccaagccc

SEQ ID NO: 26 - RNA, 13 nt, synthetic construct
  misc_feature 1..13: note = Description of Artificial Sequence: Synthetic Antisense oligonucleotide
  source 1..13: mol_type = other RNA
ttctgtccaagcc

SEQ ID NO: 27 - RNA, 12 nt, synthetic construct
  misc_feature 1..12: note = Description of Artificial Sequence: Synthetic Antisense oligonucleotide
  source 1..12: mol_type = other RNA
ttctgtccaagc

SEQ ID NO: 28 - RNA, 11 nt, synthetic construct
  misc_feature 1..11: note = Description of Artificial Sequence: Synthetic Antisense oligonucleotide
  source 1..11: mol_type = other RNA
ttctgtccaag

SEQ ID NO: 29 - RNA, 10 nt, synthetic construct
  misc_feature 1..10: note = Description of Artificial Sequence: Synthetic Antisense oligonucleotide
  source 1..10: mol_type = other RNA
ttctgtccaa

SEQ ID NO: 30-31 - skipped (2 entries)

SEQ ID NO: 32 - RNA, 19 nt, synthetic construct
  misc_feature 1..19: note = Description of Artificial Sequence: Synthetic Antisense oligonucleotide
  source 1..19: mol_type = other RNA
tctgtccaagcccggttga

SEQ ID NO: 33 - RNA, 18 nt, synthetic construct
  misc_feature 1..18: note = Description of Artificial Sequence: Synthetic Antisense oligonucleotide
  source 1..18: mol_type = other RNA
tctgtccaagcccggttg

SEQ ID NO: 34 - RNA, 17 nt, synthetic construct
  misc_feature 1..17: note = Description of Artificial Sequence: Synthetic Antisense oligonucleotide
  source 1..17: mol_type = other RNA
tctgtccaagcccggtt

SEQ ID NO: 35 - RNA, 16 nt, synthetic construct
  misc_feature 1..16: note = Description of Artificial Sequence: Synthetic Antisense oligonucleotide
  source 1..16: mol_type = other RNA
tctgtccaagcccggt

SEQ ID NO: 36 - RNA, 15 nt, synthetic construct
  misc_feature 1..15: note = Description of Artificial Sequence: Synthetic Antisense oligonucleotide
  source 1..15: mol_type = other RNA
tctgtccaagcccgg

SEQ ID NO: 37 - RNA, 14 nt, synthetic construct
  misc_feature 1..14: note = Description of Artificial Sequence: Synthetic Antisense oligonucleotide
  source 1..14: mol_type = other RNA
tctgtccaagcccg

SEQ ID NO: 38 - RNA, 13 nt, synthetic construct
  misc_feature 1..13: note = Description of Artificial Sequence: Synthetic Antisense oligonucleotide
  source 1..13: mol_type = other RNA
tctgtccaagccc

SEQ ID NO: 39 - RNA, 12 nt, synthetic construct
  misc_feature 1..12: note = Description of Artificial Sequence: Synthetic Antisense oligonucleotide
  source 1..12: mol_type = other RNA
tctgtccaagcc

SEQ ID NO: 40 - RNA, 11 nt, synthetic construct
  misc_feature 1..11: note = Description of Artificial Sequence: Synthetic Antisense oligonucleotide
  source 1..11: mol_type = other RNA
tctgtccaagc

SEQ ID NO: 41 - RNA, 10 nt, synthetic construct
  misc_feature 1..10: note = Description of Artificial Sequence: Synthetic Antisense oligonucleotide
  source 1..10: mol_type = other RNA
tctgtccaag

SEQ ID NO: 42-43 - skipped (2 entries)

SEQ ID NO: 44 - RNA, 17 nt, synthetic construct
  misc_feature 1..17: note = Description of Artificial Sequence: Synthetic Antisense oligonucleotide
  source 1..17: mol_type = other RNA
ctgtccaagcccggttg

SEQ ID NO: 45 - RNA, 16 nt, synthetic construct
  misc_feature 1..16: note = Description of Artificial Sequence: Synthetic Antisense oligonucleotide
  source 1..16: mol_type = other RNA
ctgtccaagcccggtt

SEQ ID NO: 46 - RNA, 15 nt, synthetic construct
  misc_feature 1..15: note = Description of Artificial Sequence: Synthetic Antisense oligonucleotide
  source 1..15: mol_type = other RNA
ctgtccaagcccggt

SEQ ID NO: 47 - RNA, 14 nt, synthetic construct
  misc_feature 1..14: note = Description of Artificial Sequence: Synthetic Antisense oligonucleotide
  source 1..14: mol_type = other RNA
ctgtccaagcccgg

SEQ ID NO: 48 - RNA, 13 nt, synthetic construct
  misc_feature 1..13: note = Description of Artificial Sequence: Synthetic Antisense oligonucleotide
  source 1..13: mol_type = other RNA
ctgtccaagcccg

SEQ ID NO: 49 - RNA, 12 nt, synthetic construct
  misc_feature 1..12: note = Description of Artificial Sequence: Synthetic Antisense oligonucleotide
  source 1..12: mol_type = other RNA
ctgtccaagccc

SEQ ID NO: 50 - RNA, 11 nt, synthetic construct
  misc_feature 1..11: note = Description of Artificial Sequence: Synthetic Antisense oligonucleotide
  source 1..11: mol_type = other RNA
ctgtccaagcc

SEQ ID NO: 51 - RNA, 10 nt, synthetic construct
  misc_feature 1..10: note = Description of Artificial Sequence: Synthetic Antisense oligonucleotide
  source 1..10: mol_type = other RNA
ctgtccaagc

SEQ ID NO: 52-53 - skipped (2 entries)

SEQ ID NO: 54 - RNA, 20 nt, synthetic construct
  misc_feature 1..20: note = Description of Artificial Sequence: Synthetic Antisense oligonucleotide
  source 1..20: mol_type = other RNA
gttctgtccaagcccggttg

SEQ ID NO: 55 - RNA, 19 nt, synthetic construct
  misc_feature 1..19: note = Description of Artificial Sequence: Synthetic Antisense oligonucleotide
  source 1..19: mol_type = other RNA
gttctgtccaagcccggtt

SEQ ID NO: 56 - RNA, 18 nt, synthetic construct
  misc_feature 1..18: note = Description of Artificial Sequence: Synthetic Antisense oligonucleotide
  source 1..18: mol_type = other RNA
gttctgtccaagcccggt

SEQ ID NO: 57 - RNA, 17 nt, synthetic construct
  misc_feature 1..17: note = Description of Artificial Sequence: Synthetic Antisense oligonucleotide
  source 1..17: mol_type = other RNA
gttctgtccaagcccgg

SEQ ID NO: 58 - RNA, 16 nt, synthetic construct
  misc_feature 1..16: note = Description of Artificial Sequence: Synthetic Antisense oligonucleotide
  source 1..16: mol_type = other RNA
gttctgtccaagcccg

SEQ ID NO: 59 - RNA, 15 nt, synthetic construct
  misc_feature 1..15: note = Description of Artificial Sequence: Synthetic Antisense oligonucleotide
  source 1..15: mol_type = other RNA
gttctgtccaagccc

SEQ ID NO: 60 - RNA, 14 nt, synthetic construct
  misc_feature 1..14: note = Description of Artificial Sequence: Synthetic Antisense oligonucleotide
  source 1..14: mol_type = other RNA
gttctgtccaagcc

SEQ ID NO: 61 - RNA, 13 nt, synthetic construct
  misc_feature 1..13: note = Description of Artificial Sequence: Synthetic Antisense oligonucleotide
  source 1..13: mol_type = other RNA
gttctgtccaagc

SEQ ID NO: 62 - RNA, 12 nt, synthetic construct
  misc_feature 1..12: note = Description of Artificial Sequence: Synthetic Antisense oligonucleotide
  source 1..12: mol_type = other RNA
gttctgtccaag

SEQ ID NO: 63 - RNA, 11 nt, synthetic construct
  misc_feature 1..11: note = Description of Artificial Sequence: Synthetic Antisense oligonucleotide
  source 1..11: mol_type = other RNA
gttctgtccaa

SEQ ID NO: 64 - RNA, 10 nt, synthetic construct
  misc_feature 1..10: note = Description of Artificial Sequence: Synthetic Antisense oligonucleotide
  source 1..10: mol_type = other RNA
gttctgtcca

SEQ ID NO: 65-66 - skipped (2 entries)

SEQ ID NO: 67 - RNA, 20 nt, synthetic construct
  misc_feature 1..20: note = Description of Artificial Sequence: Synthetic Antisense oligonucleotide
  source 1..20: mol_type = other RNA
agttctgtccaagcccggtt

SEQ ID NO: 68 - RNA, 19 nt, synthetic construct
  misc_feature 1..19: note = Description of Artificial Sequence: Synthetic Antisense oligonucleotide
  source 1..19: mol_type = other RNA
agttctgtccaagcccggt

SEQ ID NO: 69 - RNA, 18 nt, synthetic construct
  misc_feature 1..18: note = Description of Artificial Sequence: Synthetic Antisense oligonucleotide
  source 1..18: mol_type = other RNA
agttctgtccaagcccgg

SEQ ID NO: 70 - RNA, 17 nt, synthetic construct
  misc_feature 1..17: note = Description of Artificial Sequence: Synthetic Antisense oligonucleotide
  source 1..17: mol_type = other RNA
agttctgtccaagcccg

SEQ ID NO: 71 - RNA, 16 nt, synthetic construct
  misc_feature 1..16: note = Description of Artificial Sequence: Synthetic Antisense oligonucleotide
  source 1..16: mol_type = other RNA
agttctgtccaagccc

SEQ ID NO: 72 - RNA, 15 nt, synthetic construct
  misc_feature 1..15: note = Description of Artificial Sequence: Synthetic Antisense oligonucleotide
  source 1..15: mol_type = other RNA
agttctgtccaagcc

SEQ ID NO: 73 - RNA, 14 nt, synthetic construct
  misc_feature 1..14: note = Description of Artificial Sequence: Synthetic Antisense oligonucleotide
  source 1..14: mol_type = other RNA
agttctgtccaagc

SEQ ID NO: 74 - RNA, 13 nt, synthetic construct
  misc_feature 1..13: note = Description of Artificial Sequence: Synthetic Antisense oligonucleotide
  source 1..13: mol_type = other RNA
agttctgtccaag

SEQ ID NO: 75 - RNA, 12 nt, synthetic construct
  misc_feature 1..12: note = Description of Artificial Sequence: Synthetic Antisense oligonucleotide
  source 1..12: mol_type = other RNA
agttctgtccaa

SEQ ID NO: 76 - RNA, 11 nt, synthetic construct
  misc_feature 1..11: note = Description of Artificial Sequence: Synthetic Antisense oligonucleotide
  source 1..11: mol_type = other RNA
agttctgtcca

SEQ ID NO: 77 - RNA, 10 nt, synthetic construct
  misc_feature 1..10: note = Description of Artificial Sequence: Synthetic Antisense oligonucleotide
  source 1..10: mol_type = other RNA
agttctgtcc

SEQ ID NO: 78-79 - skipped (2 entries)

SEQ ID NO: 80 - RNA, 20 nt, synthetic construct
  misc_feature 1..20: note = Description of Artificial Sequence: Synthetic Antisense oligonucleotide
  source 1..20: mol_type = other RNA
aagttctgtccaagcccggt

SEQ ID NO: 81 - RNA, 19 nt, synthetic construct
  misc_feature 1..19: note = Description of Artificial Sequence: Synthetic Antisense oligonucleotide
  source 1..19: mol_type = other RNA
aagttctgtccaagcccgg

SEQ ID NO: 82 - RNA, 18 nt, synthetic construct
  misc_feature 1..18: note = Description of Artificial Sequence: Synthetic Antisense oligonucleotide
  source 1..18: mol_type = other RNA
aagttctgtccaagcccg

SEQ ID NO: 83 - RNA, 17 nt, synthetic construct
  misc_feature 1..17: note = Description of Artificial Sequence: Synthetic Antisense oligonucleotide
  source 1..17: mol_type = other RNA
aagttctgtccaagccc

SEQ ID NO: 84 - RNA, 16 nt, synthetic construct
  misc_feature 1..16: note = Description of Artificial Sequence: Synthetic Antisense oligonucleotide
  source 1..16: mol_type = other RNA
aagttctgtccaagcc

SEQ ID NO: 85 - RNA, 15 nt, synthetic construct
  misc_feature 1..15: note = Description of Artificial Sequence: Synthetic Antisense oligonucleotide
  source 1..15: mol_type = other RNA
aagttctgtccaagc

SEQ ID NO: 86 - RNA, 14 nt, synthetic construct
  misc_feature 1..14: note = Description of Artificial Sequence: Synthetic Antisense oligonucleotide
  source 1..14: mol_type = other RNA
aagttctgtccaag

SEQ ID NO: 87 - RNA, 13 nt, synthetic construct
  misc_feature 1..13: note = Description of Artificial Sequence: Synthetic Antisense oligonucleotide
  source 1..13: mol_type = other RNA
aagttctgtccaa

SEQ ID NO: 88 - RNA, 12 nt, synthetic construct
  misc_feature 1..12: note = Description of Artificial Sequence: Synthetic Antisense oligonucleotide
  source 1..12: mol_type = other RNA
aagttctgtcca

SEQ ID NO: 89 - RNA, 11 nt, synthetic construct
  misc_feature 1..11: note = Description of Artificial Sequence: Synthetic Antisense oligonucleotide
  source 1..11: mol_type = other RNA
aagttctgtcc

SEQ ID NO: 90 - RNA, 10 nt, synthetic construct
  misc_feature 1..10: note = Description of Artificial Sequence: Synthetic Antisense oligonucleotide
  source 1..10: mol_type = other RNA
aagttctgtc

SEQ ID NO: 91-92 - skipped (2 entries)

SEQ ID NO: 93 - RNA, 20 nt, synthetic construct
  misc_feature 1..20: note = Description of Artificial Sequence: Synthetic Antisense oligonucleotide
  source 1..20: mol_type = other RNA
taagttctgtccaagcccgg

SEQ ID NO: 94 - RNA, 19 nt, synthetic construct
  misc_feature 1..19: note = Description of Artificial Sequence: Synthetic Antisense oligonucleotide
  source 1..19: mol_type = other RNA
taagttctgtccaagcccg

SEQ ID NO: 95 - RNA, 18 nt, synthetic construct
  misc_feature 1..18: note = Description of Artificial Sequence: Synthetic Antisense oligonucleotide
  source 1..18: mol_type = other RNA
taagttctgtccaagccc

SEQ ID NO: 96 - RNA, 17 nt, synthetic construct
  misc_feature 1..17: note = Description of Artificial Sequence: Synthetic Antisense oligonucleotide
  source 1..17: mol_type = other RNA
taagttctgtccaagcc

SEQ ID NO: 97 - RNA, 16 nt, synthetic construct
  misc_feature 1..16: note = Description of Artificial Sequence: Synthetic Antisense oligonucleotide
  source 1..16: mol_type = other RNA
taagttctgtccaagc

SEQ ID NO: 98 - RNA, 14 nt, synthetic construct
  misc_feature 1..14: note = Description of Artificial Sequence: Synthetic Antisense oligonucleotide
  source 1..14: mol_type = other RNA
taagttctgtccaa

SEQ ID NO: 99 - RNA, 13 nt, synthetic construct
  misc_feature 1..13: note = Description of Artificial Sequence: Synthetic Antisense oligonucleotide
  source 1..13: mol_type = other RNA
taagttctgtcca

SEQ ID NO: 100 - RNA, 12 nt, synthetic construct
  misc_feature 1..12: note = Description of Artificial Sequence: Synthetic Antisense oligonucleotide
  source 1..12: mol_type = other RNA
taagttctgtcc

SEQ ID NO: 101 - RNA, 11 nt, synthetic construct
  misc_feature 1..11: note = Description of Artificial Sequence: Synthetic Antisense oligonucleotide
  source 1..11: mol_type = other RNA
taagttctgtc

SEQ ID NO: 102 - RNA, 10 nt, synthetic construct
  misc_feature 1..10: note = Description of Artificial Sequence: Synthetic Antisense oligonucleotide
  source 1..10: mol_type = other RNA
taagttctgt

SEQ ID NO: 103-104 - skipped (2 entries)

SEQ ID NO: 105 - RNA, 20 nt, synthetic construct
  misc_feature 1..20: note = Description of Artificial Sequence: Synthetic Antisense oligonucleotide
  source 1..20: mol_type = other RNA
gtaagttctgtccaagcccg

SEQ ID NO: 106 - RNA, 19 nt, synthetic construct
  misc_feature 1..19: note = Description of Artificial Sequence: Synthetic Antisense oligonucleotide
  source 1..19: mol_type = other RNA
gtaagttctgtccaagccc

SEQ ID NO: 107 - RNA, 17 nt, synthetic construct
  misc_feature 1..17: note = Description of Artificial Sequence: Synthetic Antisense oligonucleotide
  source 1..17: mol_type = other RNA
gtaagttctgtccaagc

SEQ ID NO: 108 - RNA, 16 nt, synthetic construct
  misc_feature 1..16: note = Description of Artificial Sequence: Synthetic Antisense oligonucleotide
  source 1..16: mol_type = other RNA
gtaagttctgtccaag

SEQ ID NO: 109 - RNA, 15 nt, synthetic construct
  misc_feature 1..15: note = Description of Artificial Sequence: Synthetic Antisense oligonucleotide
  source 1..15: mol_type = other RNA
gtaagttctgtccaa

SEQ ID NO: 110 - RNA, 14 nt, synthetic construct
  misc_feature 1..14: note = Description of Artificial Sequence: Synthetic Antisense oligonucleotide
  source 1..14: mol_type = other RNA
gtaagttctgtcca

SEQ ID NO: 111 - RNA, 13 nt, synthetic construct
  misc_feature 1..13: note = Description of Artificial Sequence: Synthetic Antisense oligonucleotide
  source 1..13: mol_type = other RNA
gtaagttctgtcc

SEQ ID NO: 112 - RNA, 12 nt, synthetic construct
  misc_feature 1..12: note = Description of Artificial Sequence: Synthetic Antisense oligonucleotide
  source 1..12: mol_type = other RNA
gtaagttctgtc

SEQ ID NO: 113 - RNA, 11 nt, synthetic construct
  misc_feature 1..11: note = Description of Artificial Sequence: Synthetic Antisense oligonucleotide
  source 1..11: mol_type = other RNA
gtaagttctgt

SEQ ID NO: 114 - RNA, 10 nt, synthetic construct
  misc_feature 1..10: note = Description of Artificial Sequence: Synthetic Antisense oligonucleotide
  source 1..10: mol_type = other RNA
gtaagttctg

SEQ ID NO: 115-116 - skipped (2 entries)

SEQ ID NO: 117 - RNA, 20 nt, synthetic construct
  misc_feature 1..20: note = Description of Artificial Sequence: Synthetic Antisense oligonucleotide
  source 1..20: mol_type = other RNA
ggtaagttctgtccaagccc

SEQ ID NO: 118 - RNA, 19 nt, synthetic construct
  misc_feature 1..19: note = Description of Artificial Sequence: Synthetic Antisense oligonucleotide
  source 1..19: mol_type = other RNA
ggtaagttctgtccaagcc

SEQ ID NO: 119 - RNA, 17 nt, synthetic construct
  misc_feature 1..17: note = Description of Artificial Sequence: Synthetic Antisense oligonucleotide
  source 1..17: mol_type = other RNA
ggtaagttctgtccaag

SEQ ID NO: 120 - RNA, 16 nt, synthetic construct
  misc_feature 1..16: note = Description of Artificial Sequence: Synthetic Antisense oligonucleotide
  source 1..16: mol_type = other RNA
ggtaagttctgtccaa

SEQ ID NO: 121 - RNA, 15 nt, synthetic construct
  misc_feature 1..15: note = Description of Artificial Sequence: Synthetic Antisense oligonucleotide
  source 1..15: mol_type = other RNA
ggtaagttctgtcca

SEQ ID NO: 122 - RNA, 14 nt, synthetic construct
  misc_feature 1..14: note = Description of Artificial Sequence: Synthetic Antisense oligonucleotide
  source 1..14: mol_type = other RNA
ggtaagttctgtcc

SEQ ID NO: 123 - RNA, 13 nt, synthetic construct
  misc_feature 1..13: note = Description of Artificial Sequence: Synthetic Antisense oligonucleotide
  source 1..13: mol_type = other RNA
ggtaagttctgtc

SEQ ID NO: 124 - RNA, 12 nt, synthetic construct
  misc_feature 1..12: note = Description of Artificial Sequence: Synthetic Antisense oligonucleotide
  source 1..12: mol_type = other RNA
ggtaagttctgt

SEQ ID NO: 125 - RNA, 11 nt, synthetic construct
  misc_feature 1..11: note = Description of Artificial Sequence: Synthetic Antisense oligonucleotide
  source 1..11: mol_type = other RNA
ggtaagttctg

SEQ ID NO: 126 - RNA, 10 nt, synthetic construct
  misc_feature 1..10: note = Description of Artificial Sequence: Synthetic Antisense oligonucleotide
  source 1..10: mol_type = other RNA
ggtaagttct

SEQ ID NO: 127-128 - skipped (2 entries)

SEQ ID NO: 129 - RNA, 20 nt, synthetic construct
  misc_feature 1..20: note = Description of Artificial Sequence: Synthetic Antisense oligonucleotide
  source 1..20: mol_type = other RNA
cggtaagttctgtccaagcc

SEQ ID NO: 130 - RNA, 19 nt, synthetic construct
  misc_feature 1..19: note = Description of Artificial Sequence: Synthetic Antisense oligonucleotide
  source 1..19: mol_type = other RNA
cggtaagttctgtccaagc

SEQ ID NO: 131 - RNA, 18 nt, synthetic construct
  misc_feature 1..18: note = Description of Artificial Sequence: Synthetic Antisense oligonucleotide
  source 1..18: mol_type = other RNA
cggtaagttctgtccaag

SEQ ID NO: 132 - RNA, 17 nt, synthetic construct
  misc_feature 1..17: note = Description of Artificial Sequence: Synthetic Antisense oligonucleotide
  source 1..17: mol_type = other RNA
cggtaagttctgtccaa

SEQ ID NO: 133 - RNA, 16 nt, synthetic construct
  misc_feature 1..16: note = Description of Artificial Sequence: Synthetic Antisense oligonucleotide
  source 1..16: mol_type = other RNA
cggtaagttctgtcca

SEQ ID NO: 134 - RNA, 15 nt, synthetic construct
  misc_feature 1..15: note = Description of Artificial Sequence: Synthetic Antisense oligonucleotide
  source 1..15: mol_type = other RNA
cggtaagttctgtcc

SEQ ID NO: 135 - RNA, 14 nt, synthetic construct
  misc_feature 1..14: note = Description of Artificial Sequence: Synthetic Antisense oligonucleotide
  source 1..14: mol_type = other RNA
cggtaagttctgtc

SEQ ID NO: 136 - RNA, 13 nt, synthetic construct
  misc_feature 1..13: note = Description of Artificial Sequence: Synthetic Antisense oligonucleotide
  source 1..13: mol_type = other RNA
cggtaagttctgt

SEQ ID NO: 137 - RNA, 12 nt, synthetic construct
  misc_feature 1..12: note = Description of Artificial Sequence: Synthetic Antisense oligonucleotide
  source 1..12: mol_type = other RNA
cggtaagttctg

SEQ ID NO: 138 - RNA, 11 nt, synthetic construct
  misc_feature 1..11: note = Description of Artificial Sequence: Synthetic Antisense oligonucleotide
  source 1..11: mol_type = other RNA
cggtaagttct

SEQ ID NO: 139 - RNA, 10 nt, synthetic construct
  misc_feature 1..10: note = Description of Artificial Sequence: Synthetic Antisense oligonucleotide
  source 1..10: mol_type = other RNA
cggtaagttc

SEQ ID NO: 140-141 - skipped (2 entries)

SEQ ID NO: 142 - RNA, 20 nt, synthetic construct
  misc_feature 1..20: note = Description of Artificial Sequence: Synthetic Antisense oligonucleotide
  source 1..20: mol_type = other RNA
tcggtaagttctgtccaagc

SEQ ID NO: 143 - RNA, 19 nt, synthetic construct
  misc_feature 1..19: note = Description of Artificial Sequence: Synthetic Antisense oligonucleotide
  source 1..19: mol_type = other RNA
tcggtaagttctgtccaag

SEQ ID NO: 144 - RNA, 18 nt, synthetic construct
  misc_feature 1..18: note = Description of Artificial Sequence: Synthetic Antisense oligonucleotide
  source 1..18: mol_type = other RNA
tcggtaagttctgtccaa

SEQ ID NO: 145 - RNA, 17 nt, synthetic construct
  misc_feature 1..17: note = Description of Artificial Sequence: Synthetic Antisense oligonucleotide
  source 1..17: mol_type = other RNA
tcggtaagttctgtcca

SEQ ID NO: 146 - RNA, 16 nt, synthetic construct
  misc_feature 1..16: note = Description of Artificial Sequence: Synthetic Antisense oligonucleotide
  source 1..16: mol_type = other RNA
tcggtaagttctgtcc

SEQ ID NO: 147 - RNA, 15 nt, synthetic construct
  misc_feature 1..15: note = Description of Artificial Sequence: Synthetic Antisense oligonucleotide
  source 1..15: mol_type = other RNA
tcggtaagttctgtc

SEQ ID NO: 148 - RNA, 14 nt, synthetic construct
  misc_feature 1..14: note = Description of Artificial Sequence: Synthetic Antisense oligonucleotide
  source 1..14: mol_type = other RNA
tcggtaagttctgt

SEQ ID NO: 149 - RNA, 13 nt, synthetic construct
  misc_feature 1..13: note = Description of Artificial Sequence: Synthetic Antisense oligonucleotide
  source 1..13: mol_type = other RNA
tcggtaagttctg

SEQ ID NO: 150 - RNA, 12 nt, synthetic construct
  misc_feature 1..12: note = Description of Artificial Sequence: Synthetic Antisense oligonucleotide
  source 1..12: mol_type = other RNA
tcggtaagttct

SEQ ID NO: 151 - RNA, 11 nt, synthetic construct
  misc_feature 1..11: note = Description of Artificial Sequence: Synthetic Antisense oligonucleotide
  source 1..11: mol_type = other RNA
tcggtaagttc

SEQ ID NO: 152 - RNA, 10 nt, synthetic construct
  misc_feature 1..10: note = Description of Artificial Sequence: Synthetic Antisense oligonucleotide
  source 1..10: mol_type = other RNA
tcggtaagtt

SEQ ID NO: 153 - skipped

SEQ ID NO: 154 - RNA, 20 nt, synthetic construct
  misc_feature 1..20: note = Description of Artificial Sequence: Synthetic Antisense oligonucleotide
  source 1..20: mol_type = other RNA
gtcggtaagttctgtccaag

SEQ ID NO: 155 - RNA, 19 nt, synthetic construct
  misc_feature 1..19: note = Description of Artificial Sequence: Synthetic Antisense oligonucleotide
  source 1..19: mol_type = other RNA
gtcggtaagttctgtccaa

SEQ ID NO: 156 - RNA, 18 nt, synthetic construct
  misc_feature 1..18: note = Description of Artificial Sequence: Synthetic Antisense oligonucleotide
  source 1..18: mol_type = other RNA
gtcggtaagttctgtcca

SEQ ID NO: 157 - RNA, 17 nt, synthetic construct
  misc_feature 1..17: note = Description of Artificial Sequence: Synthetic Antisense oligonucleotide
  source 1..17: mol_type = other RNA
gtcggtaagttctgtcc

SEQ ID NO: 158 - RNA, 16 nt, synthetic construct
  misc_feature 1..16: note = Description of Artificial Sequence: Synthetic Antisense oligonucleotide
  source 1..16: mol_type = other RNA
gtcggtaagttctgtc

SEQ ID NO: 159 - RNA, 15 nt, synthetic construct
  misc_feature 1..15: note = Description of Artificial Sequence: Synthetic Antisense oligonucleotide
  source 1..15: mol_type = other RNA
gtcggtaagttctgt

SEQ ID NO: 160 - RNA, 14 nt, synthetic construct
  misc_feature 1..14: note = Description of Artificial Sequence: Synthetic Antisense oligonucleotide
  source 1..14: mol_type = other RNA
gtcggtaagttctg

SEQ ID NO: 161 - RNA, 13 nt, synthetic construct
  misc_feature 1..13: note = Description of Artificial Sequence: Synthetic Antisense oligonucleotide
  source 1..13: mol_type = other RNA
gtcggtaagttct

SEQ ID NO: 162 - RNA, 12 nt, synthetic construct
  misc_feature 1..12: note = Description of Artificial Sequence: Synthetic Antisense oligonucleotide
  source 1..12: mol_type = other RNA
gtcggtaagttc

SEQ ID NO: 163 - RNA, 11 nt, synthetic construct
  misc_feature 1..11: note = Description of Artificial Sequence: Synthetic Antisense oligonucleotide
  source 1..11: mol_type = other RNA
gtcggtaagtt

SEQ ID NO: 164 - RNA, 10 nt, synthetic construct
  misc_feature 1..10: note = Description of Artificial Sequence: Synthetic Antisense oligonucleotide
  source 1..10: mol_type = other RNA
gtcggtaagt

SEQ ID NO: 165 - RNA, 20 nt, synthetic construct
  misc_feature 1..20: note = Description of Artificial Sequence: Synthetic Antisense oligonucleotide
  source 1..20: mol_type = other RNA
agtcggtaagttctgtccaa

SEQ ID NO: 166 - RNA, 19 nt, synthetic construct
  misc_feature 1..19: note = Description of Artificial Sequence: Synthetic Antisense oligonucleotide
  source 1..19: mol_type = other RNA
agtcggtaagttctgtcca

SEQ ID NO: 167 - RNA, 17 nt, synthetic construct
  misc_feature 1..17: note = Description of Artificial Sequence: Synthetic Antisense oligonucleotide
  source 1..17: mol_type = other RNA
agtcggtaagttctgtc

SEQ ID NO: 168 - RNA, 16 nt, synthetic construct
  misc_feature 1..16: note = Description of Artificial Sequence: Synthetic Antisense oligonucleotide
  source 1..16: mol_type = other RNA
agtcggtaagttctgt

SEQ ID NO: 169 - RNA, 15 nt, synthetic construct
  misc_feature 1..15: note = Description of Artificial Sequence: Synthetic Antisense oligonucleotide
  source 1..15: mol_type = other RNA
agtcggtaagttctg

SEQ ID NO: 170 - RNA, 14 nt, synthetic construct
  misc_feature 1..14: note = Description of Artificial Sequence: Synthetic Antisense oligonucleotide
  source 1..14: mol_type = other RNA
agtcggtaagttct

SEQ ID NO: 171 - RNA, 13 nt, synthetic construct
  misc_feature 1..13: note = Description of Artificial Sequence: Synthetic Antisense oligonucleotide
  source 1..13: mol_type = other RNA
agtcggtaagttc

SEQ ID NO: 172 - RNA, 12 nt, synthetic construct
  misc_feature 1..12: note = Description of Artificial Sequence: Synthetic Antisense oligonucleotide
  source 1..12: mol_type = other RNA
agtcggtaagtt

SEQ ID NO: 173 - RNA, 11 nt, synthetic construct
  misc_feature 1..11: note = Description of Artificial Sequence: Synthetic Antisense oligonucleotide
  source 1..11: mol_type = other RNA
agtcggtaagt

SEQ ID NO: 174 - RNA, 20 nt, synthetic construct
  misc_feature 1..20: note = Description of Artificial Sequence: Synthetic Antisense oligonucleotide
  source 1..20: mol_type = other RNA
cagtcggtaagttctgtcca

SEQ ID NO: 175 - RNA, 19 nt, synthetic construct
  misc_feature 1..19: note = Description of Artificial Sequence: Synthetic Antisense oligonucleotide
  source 1..19: mol_type = other RNA
cagtcggtaagttctgtcc

SEQ ID NO: 176 - RNA, 18 nt, synthetic construct
  misc_feature 1..18: note = Description of Artificial Sequence: Synthetic Antisense oligonucleotide
  source 1..18: mol_type = other RNA
cagtcggtaagttctgtc

SEQ ID NO: 177 - RNA, 17 nt, synthetic construct
  misc_feature 1..17: note = Description of Artificial Sequence: Synthetic Antisense oligonucleotide
  source 1..17: mol_type = other RNA
cagtcggtaagttctgt

SEQ ID NO: 178 - RNA, 16 nt, synthetic construct
  misc_feature 1..16: note = Description of Artificial Sequence: Synthetic Antisense oligonucleotide
  source 1..16: mol_type = other RNA
cagtcggtaagttctg

SEQ ID NO: 179 - RNA, 15 nt, synthetic construct
  misc_feature 1..15: note = Description of Artificial Sequence: Synthetic Antisense oligonucleotide
  source 1..15: mol_type = other RNA
cagtcggtaagttct

SEQ ID NO: 180 - RNA, 14 nt, synthetic construct
  misc_feature 1..14: note = Description of Artificial Sequence: Synthetic Antisense oligonucleotide
  source 1..14: mol_type = other RNA
cagtcggtaagttc

SEQ ID NO: 181 - RNA, 13 nt, synthetic construct
  misc_feature 1..13: note = Description of Artificial Sequence: Synthetic Antisense oligonucleotide
  source 1..13: mol_type = other RNA
cagtcggtaagtt

SEQ ID NO: 182 - RNA, 12 nt, synthetic construct
  misc_feature 1..12: note = Description of Artificial Sequence: Synthetic Antisense oligonucleotide
  source 1..12: mol_type = other RNA
cagtcggtaagt

SEQ ID NO: 183 - RNA, 20 nt, synthetic construct
  misc_feature 1..20: note = Description of Artificial Sequence: Synthetic Antisense oligonucleotide
  source 1..20: mol_type = other RNA
ccagtcggtaagttctgtcc

SEQ ID NO: 184 - RNA, 19 nt, synthetic construct
  misc_feature 1..19: note = Description of Artificial Sequence: Synthetic Antisense oligonucleotide
  source 1..19: mol_type = other RNA
ccagtcggtaagttctgtc

SEQ ID NO: 185 - RNA, 18 nt, synthetic construct
  misc_feature 1..18: note = Description of Artificial Sequence: Synthetic Antisense oligonucleotide
  source 1..18: mol_type = other RNA
ccagtcggtaagttctgt

SEQ ID NO: 186 - RNA, 17 nt, synthetic construct
  misc_feature 1..17: note = Description of Artificial Sequence: Synthetic Antisense oligonucleotide
  source 1..17: mol_type = other RNA
ccagtcggtaagttctg

SEQ ID NO: 187 - RNA, 16 nt, synthetic construct
  misc_feature 1..16: note = Description of Artificial Sequence: Synthetic Antisense oligonucleotide
  source 1..16: mol_type = other RNA
ccagtcggtaagttct

SEQ ID NO: 188 - RNA, 15 nt, synthetic construct
  misc_feature 1..15: note = Description of Artificial Sequence: Synthetic Antisense oligonucleotide
  source 1..15: mol_type = other RNA
ccagtcggtaagttc

SEQ ID NO: 189 - RNA, 14 nt, synthetic construct
  misc_feature 1..14: note = Description of Artificial Sequence: Synthetic Antisense oligonucleotide
  source 1..14: mol_type = other RNA
ccagtcggtaagtt

SEQ ID NO: 190 - RNA, 13 nt, synthetic construct
  misc_feature 1..13: note = Description of Artificial Sequence: Synthetic Antisense oligonucleotide
  source 1..13: mol_type = other RNA
ccagtcggtaagt

SEQ ID NO: 191 - RNA, 20 nt, synthetic construct
  misc_feature 1..20: note = Description of Artificial Sequence: Synthetic Antisense oligonucleotide
  source 1..20: mol_type = other RNA
gccagtcggtaagttctgtc

SEQ ID NO: 192 - RNA, 19 nt, synthetic construct
  misc_feature 1..19: note = Description of Artificial Sequence: Synthetic Antisense oligonucleotide
  source 1..19: mol_type = other RNA
gccagtcggtaagttctgt

SEQ ID NO: 193 - RNA, 18 nt, synthetic construct
  misc_feature 1..18: note = Description of Artificial Sequence: Synthetic Antisense oligonucleotide
  source 1..18: mol_type = other RNA
gccagtcggtaagttctg

SEQ ID NO: 194 - RNA, 17 nt, synthetic construct
  misc_feature 1..17: note = Description of Artificial Sequence: Synthetic Antisense oligonucleotide
  source 1..17: mol_type = other RNA
gccagtcggtaagttct

SEQ ID NO: 195 - RNA, 16 nt, synthetic construct
  misc_feature 1..16: note = Description of Artificial Sequence: Synthetic Antisense oligonucleotide
  source 1..16: mol_type = other RNA
gccagtcggtaagttc

SEQ ID NO: 196 - RNA, 15 nt, synthetic construct
  misc_feature 1..15: note = Description of Artificial Sequence: Synthetic Antisense oligonucleotide
  source 1..15: mol_type = other RNA
gccagtcggtaagtt

SEQ ID NO: 197 - RNA, 14 nt, synthetic construct
  misc_feature 1..14: note = Description of Artificial Sequence: Synthetic Antisense oligonucleotide
  source 1..14: mol_type = other RNA
gccagtcggtaagt

SEQ ID NO: 198 - RNA, 20 nt, synthetic construct
  misc_feature 1..20: note = Description of Artificial Sequence: Synthetic Antisense oligonucleotide
  source 1..20: mol_type = other RNA
tcaaggaagatggcatttct

SEQ ID NO: 199 - RNA, 22 nt, synthetic construct
  misc_feature 1..22: note = Description of Artificial Sequence: Synthetic Antisense oligonucleotide
  source 1..22: mol_type = other RNA
tcaaggaagatggcatttctag

SEQ ID NO: 200 - RNA, 16 nt, synthetic construct
  misc_feature 1..16: note = Description of Artificial Sequence: Synthetic Antisense oligonucleotide
  source 1..16: mol_type = other RNA
tcaaggaagatggcat

SEQ ID NO: 201 - RNA, 15 nt, synthetic construct
  misc_feature 1..15: note = Description of Artificial Sequence: Synthetic Antisense oligonucleotide
  source 1..15: mol_type = other RNA
gaagatggcatttct

SEQ ID NO: 202 - RNA, 21 nt, synthetic construct
  misc_feature 1..21: note = Description of Artificial Sequence: Synthetic Antisense oligonucleotide
  source 1..21: mol_type = other RNA
tcaaggaagatggcatttcta

SEQ ID NO: 203 - RNA, 19 nt, synthetic construct
  misc_feature 1..19: note = Description of Artificial Sequence: Synthetic Antisense oligonucleotide
  source 1..19: mol_type = other RNA
tcaaggaagatggcatttc

SEQ ID NO: 204 - RNA, 18 nt, synthetic construct
  misc_feature 1..18: note = Description of Artificial Sequence: Synthetic Antisense oligonucleotide
  source 1..18: mol_type = other RNA
tcaaggaagatggcattt

SEQ ID NO: 205 - RNA, 17 nt, synthetic construct
  misc_feature 1..17: note = Description of Artificial Sequence: Synthetic Antisense oligonucleotide
  source 1..17: mol_type = other RNA
tcaaggaagatggcatt

SEQ ID NO: 206 - RNA, 15 nt, synthetic construct
  misc_feature 1..15: note = Description of Artificial Sequence: Synthetic Antisense oligonucleotide
  source 1..15: mol_type = other RNA
tcaaggaagatggca

SEQ ID NO: 207 - RNA, 14 nt, synthetic construct
  misc_feature 1..14: note = Description of Artificial Sequence: Synthetic Antisense oligonucleotide
  source 1..14: mol_type = other RNA
tcaaggaagatggc

SEQ ID NO: 208 - RNA, 13 nt, synthetic construct
  misc_feature 1..13: note = Description of Artificial Sequence: Synthetic Antisense oligonucleotide
  source 1..13: mol_type = other RNA
tcaaggaagatgg

SEQ ID NO: 209 - RNA, 12 nt, synthetic construct
  misc_feature 1..12: note = Description of Artificial Sequence: Synthetic Antisense oligonucleotide
  source 1..12: mol_type = other RNA
tcaaggaagatg

SEQ ID NO: 210 - RNA, 11 nt, synthetic construct
  misc_feature 1..11: note = Description of Artificial Sequence: Synthetic Antisense oligonucleotide
  source 1..11: mol_type = other RNA
tcaaggaagat

SEQ ID NO: 211 - RNA, 10 nt, synthetic construct
  misc_feature 1..10: note = Description of Artificial Sequence: Synthetic Antisense oligonucleotide
  source 1..10: mol_type = other RNA
tcaaggaaga

SEQ ID NO: 212 - skipped

SEQ ID NO: 213 - RNA, 21 nt, synthetic construct
  misc_feature 1..21: note = Description of Artificial Sequence: Synthetic Antisense oligonucleotide
  source 1..21: mol_type = other RNA
caaggaagatggcatttctag

SEQ ID NO: 214 - RNA, 20 nt, synthetic construct
  misc_feature 1..20: note = Description of Artificial Sequence: Synthetic Antisense oligonucleotide
  source 1..20: mol_type = other RNA
caaggaagatggcatttcta

SEQ ID NO: 215 - RNA, 19 nt, synthetic construct
  misc_feature 1..19: note = Description of Artificial Sequence: Synthetic Antisense oligonucleotide
  source 1..19: mol_type = other RNA
caaggaagatggcatttct

SEQ ID NO: 216 - RNA, 18 nt, synthetic construct
  misc_feature 1..18: note = Description of Artificial Sequence: Synthetic Antisense oligonucleotide
  source 1..18: mol_type = other RNA
caaggaagatggcatttc

SEQ ID NO: 217 - RNA, 17 nt, synthetic construct
  misc_feature 1..17: note = Description of Artificial Sequence: Synthetic Antisense oligonucleotide
  source 1..17: mol_type = other RNA
caaggaagatggcattt

SEQ ID NO: 218 - RNA, 16 nt, synthetic construct
  misc_feature 1..16: note = Description of Artificial Sequence: Synthetic Antisense oligonucleotide
  source 1..16: mol_type = other RNA
caaggaagatggcatt

SEQ ID NO: 219 - RNA, 15 nt, synthetic construct
  misc_feature 1..15: note = Description of Artificial Sequence: Synthetic Antisense oligonucleotide
  source 1..15: mol_type = other RNA
caaggaagatggcat

SEQ ID NO: 220 - RNA, 14 nt, synthetic construct
  misc_feature 1..14: note = Description of Artificial Sequence: Synthetic Antisense oligonucleotide
  source 1..14: mol_type = other RNA
caaggaagatggca

SEQ ID NO: 221 - RNA, 13 nt, synthetic construct
  misc_feature 1..13: note = Description of Artificial Sequence: Synthetic Antisense oligonucleotide
  source 1..13: mol_type = other RNA
caaggaagatggc

SEQ ID NO: 222 - RNA, 12 nt, synthetic construct
  misc_feature 1..12: note = Description of Artificial Sequence: Synthetic Antisense oligonucleotide
  source 1..12: mol_type = other RNA
caaggaagatgg

SEQ ID NO: 223 - RNA, 11 nt, synthetic construct
  misc_feature 1..11: note = Description of Artificial Sequence: Synthetic Antisense oligonucleotide
  source 1..11: mol_type = other RNA
caaggaagatg

SEQ ID NO: 224 - RNA, 10 nt, synthetic construct
  misc_feature 1..10: note = Description of Artificial Sequence: Synthetic Antisense oligonucleotide
  source 1..10: mol_type = other RNA
caaggaagat

SEQ ID NO: 225-226 - skipped (2 entries)

SEQ ID NO: 227 - RNA, 20 nt, synthetic construct
  misc_feature 1..20: note = Description of Artificial Sequence: Synthetic Antisense oligonucleotide
  source 1..20: mol_type = other RNA
aaggaagatggcatttctag

SEQ ID NO: 228 - RNA, 19 nt, synthetic construct
  misc_feature 1..19: note = Description of Artificial Sequence: Synthetic Antisense oligonucleotide
  source 1..19: mol_type = other RNA
aaggaagatggcatttcta

SEQ ID NO: 229 - RNA, 18 nt, synthetic construct
  misc_feature 1..18: note = Description of Artificial Sequence: Synthetic Antisense oligonucleotide
  source 1..18: mol_type = other RNA
aaggaagatggcatttct

SEQ ID NO: 230 - RNA, 17 nt, synthetic construct
  misc_feature 1..17: note = Description of Artificial Sequence: Synthetic Antisense oligonucleotide
  source 1..17: mol_type = other RNA
aaggaagatggcatttc

SEQ ID NO: 231 - RNA, 16 nt, synthetic construct
  misc_feature 1..16: note = Description of Artificial Sequence: Synthetic Antisense oligonucleotide
  source 1..16: mol_type = other RNA
aaggaagatggcattt

SEQ ID NO: 232 - RNA, 15 nt, synthetic construct
  misc_feature 1..15: note = Description of Artificial Sequence: Synthetic Antisense oligonucleotide
  source 1..15: mol_type = other RNA
aaggaagatggcatt

SEQ ID NO: 233 - RNA, 14 nt, synthetic construct
  misc_feature 1..14: note = Description of Artificial Sequence: Synthetic Antisense oligonucleotide
  source 1..14: mol_type = other RNA
aaggaagatggcat

SEQ ID NO: 234 - RNA, 13 nt, synthetic construct
  misc_feature 1..13: note = Description of Artificial Sequence: Synthetic Antisense oligonucleotide
  source 1..13: mol_type = other RNA
aaggaagatggca

SEQ ID NO: 235 - RNA, 12 nt, synthetic construct
  misc_feature 1..12: note = Description of Artificial Sequence: Synthetic Antisense oligonucleotide
  source 1..12: mol_type = other RNA
aaggaagatggc

SEQ ID NO: 236 - RNA, 11 nt, synthetic construct
  misc_feature 1..11: note = Description of Artificial Sequence: Synthetic Antisense oligonucleotide
  source 1..11: mol_type = other RNA
aaggaagatgg

SEQ ID NO: 237 - RNA, 10 nt, synthetic construct
  misc_feature 1..10: note = Description of Artificial Sequence: Synthetic Antisense oligonucleotide
  source 1..10: mol_type = other RNA
aaggaagatg

SEQ ID NO: 238-239 - skipped (2 entries)

SEQ ID NO: 240 - RNA, 19 nt, synthetic construct
  misc_feature 1..19: note = Description of Artificial Sequence: Synthetic Antisense oligonucleotide
  source 1..19: mol_type = other RNA
aggaagatggcatttctag

SEQ ID NO: 241 - RNA, 18 nt, synthetic construct
  misc_feature 1..18: note = Description of Artificial Sequence: Synthetic Antisense oligonucleotide
  source 1..18: mol_type = other RNA
aggaagatggcatttcta

SEQ ID NO: 242 - RNA, 17 nt, synthetic construct
  misc_feature 1..17: note = Description of Artificial Sequence: Synthetic Antisense oligonucleotide
  source 1..17: mol_type = other RNA
aggaagatggcatttct

SEQ ID NO: 243 - RNA, 16 nt, synthetic construct
  misc_feature 1..16: note = Description of Artificial Sequence: Synthetic Antisense oligonucleotide
  source 1..16: mol_type = other RNA
aggaagatggcatttc

SEQ ID NO: 244 - RNA, 15 nt, synthetic construct
  misc_feature 1..15: note = Description of Artificial Sequence: Synthetic Antisense oligonucleotide
  source 1..15: mol_type = other RNA
aggaagatggcattt

SEQ ID NO: 245 - RNA, 14 nt, synthetic construct
  misc_feature 1..14: note = Description of Artificial Sequence: Synthetic Antisense oligonucleotide
  source 1..14: mol_type = other RNA
aggaagatggcatt

SEQ ID NO: 246 - RNA, 13 nt, synthetic construct
  misc_feature 1..13: note = Description of Artificial Sequence: Synthetic Antisense oligonucleotide
  source 1..13: mol_type = other RNA
aggaagatggcat

SEQ ID NO: 247 - RNA, 12 nt, synthetic construct
  misc_feature 1..12: note = Description of Artificial Sequence: Synthetic Antisense oligonucleotide
  source 1..12: mol_type = other RNA
aggaagatggca

SEQ ID NO: 248 - RNA, 10 nt, synthetic construct
  misc_feature 1..10: note = Description of Artificial Sequence: Synthetic Antisense oligonucleotide
  source 1..10: mol_type = other RNA
aggaagatgg

SEQ ID NO: 249-250 - skipped (2 entries)

SEQ ID NO: 251 - RNA, 18 nt, synthetic construct
  misc_feature 1..18: note = Description of Artificial Sequence: Synthetic Antisense oligonucleotide
  source 1..18: mol_type = other RNA
ggaagatggcatttctag

SEQ ID NO: 252 - RNA, 17 nt, synthetic construct
  misc_feature 1..17: note = Description of Artificial Sequence: Synthetic Antisense oligonucleotide
  source 1..17: mol_type = other RNA
ggaagatggcatttcta

SEQ ID NO: 253 - RNA, 16 nt, synthetic construct
  misc_feature 1..16: note = Description of Artificial Sequence: Synthetic Antisense oligonucleotide
  source 1..16: mol_type = other RNA
ggaagatggcatttct

SEQ ID NO: 254 - RNA, 15 nt, synthetic construct
  misc_feature 1..15: note = Description of Artificial Sequence: Synthetic Antisense oligonucleotide
  source 1..15: mol_type = other RNA
ggaagatggcatttc

SEQ ID NO: 255 - RNA, 14 nt, synthetic construct
  misc_feature 1..14: note = Description of Artificial Sequence: Synthetic Antisense oligonucleotide
  source 1..14: mol_type = other RNA
ggaagatggcattt

SEQ ID NO: 256 - RNA, 13 nt, synthetic construct
  misc_feature 1..13: note = Description of Artificial Sequence: Synthetic Antisense oligonucleotide
  source 1..13: mol_type = other RNA
ggaagatggcatt

SEQ ID NO: 257 - RNA, 12 nt, synthetic construct
  misc_feature 1..12: note = Description of Artificial Sequence: Synthetic Antisense oligonucleotide
  source 1..12: mol_type = other RNA
ggaagatggcat

SEQ ID NO: 258 - RNA, 11 nt, synthetic construct
  misc_feature 1..11: note = Description of Artificial Sequence: Synthetic Antisense oligonucleotide
  source 1..11: mol_type = other RNA
ggaagatggca

SEQ ID NO: 259 - RNA, 10 nt, synthetic construct
  misc_feature 1..10: note = Description of Artificial Sequence: Synthetic Antisense oligonucleotide
  source 1..10: mol_type = other RNA
ggaagatggc

SEQ ID NO: 260 - skipped

SEQ ID NO: 261 - RNA, 17 nt, synthetic construct
  misc_feature 1..17: note = Description of Artificial Sequence: Synthetic Antisense oligonucleotide
  source 1..17: mol_type = other RNA
gaagatggcatttctag

SEQ ID NO: 262 - RNA, 16 nt, synthetic construct
  misc_feature 1..16: note = Description of Artificial Sequence: Synthetic Antisense oligonucleotide
  source 1..16: mol_type = other RNA
gaagatggcatttcta

SEQ ID NO: 263 - RNA, 14 nt, synthetic construct
  misc_feature 1..14: note = Description of Artificial Sequence: Synthetic Antisense oligonucleotide
  source 1..14: mol_type = other RNA
gaagatggcatttc

SEQ ID NO: 264 - RNA, 13 nt, synthetic construct
  misc_feature 1..13: note = Description of Artificial Sequence: Synthetic Antisense oligonucleotide
  source 1..13: mol_type = other RNA
gaagatggcattt

SEQ ID NO: 265 - RNA, 12 nt, synthetic construct
  misc_feature 1..12: note = Description of Artificial Sequence: Synthetic Antisense oligonucleotide
  source 1..12: mol_type = other RNA
gaagatggcatt

SEQ ID NO: 266 - RNA, 11 nt, synthetic construct
  misc_feature 1..11: note = Description of Artificial Sequence: Synthetic Antisense oligonucleotide
  source 1..11: mol_type = other RNA
gaagatggcat

SEQ ID NO: 267 - RNA, 10 nt, synthetic construct
  misc_feature 1..10: note = Description of Artificial Sequence: Synthetic Antisense oligonucleotide
  source 1..10: mol_type = other RNA
gaagatggca

SEQ ID NO: 268-269 - skipped (2 entries)

SEQ ID NO: 270 - RNA, 16 nt, synthetic construct
  misc_feature 1..16: note = Description of Artificial Sequence: Synthetic Antisense oligonucleotide
  source 1..16: mol_type = other RNA
aagatggcatttctag

SEQ ID NO: 271 - RNA, 15 nt, synthetic construct
  misc_feature 1..15: note = Description of Artificial Sequence: Synthetic Antisense oligonucleotide
  source 1..15: mol_type = other RNA
aagatggcatttcta

SEQ ID NO: 272 - RNA, 14 nt, synthetic construct
  misc_feature 1..14: note = Description of Artificial Sequence: Synthetic Antisense oligonucleotide
  source 1..14: mol_type = other RNA
aagatggcatttct

SEQ ID NO: 273 - RNA, 13 nt, synthetic construct
  misc_feature 1..13: note = Description of Artificial Sequence: Synthetic Antisense oligonucleotide
  source 1..13: mol_type = other RNA
aagatggcatttc

SEQ ID NO: 274 - RNA, 12 nt, synthetic construct
  misc_feature 1..12: note = Description of Artificial Sequence: Synthetic Antisense oligonucleotide
  source 1..12: mol_type = other RNA
aagatggcattt

SEQ ID NO: 275 - RNA, 11 nt, synthetic construct
  misc_feature 1..11: note = Description of Artificial Sequence: Synthetic Antisense oligonucleotide
  source 1..11: mol_type = other RNA
aagatggcatt

SEQ ID NO: 276 - RNA, 10 nt, synthetic construct
  misc_feature 1..10: note = Description of Artificial Sequence: Synthetic Antisense oligonucleotide
  source 1..10: mol_type = other RNA
aagatggcat

SEQ ID NO: 277-278 - skipped (2 entries)

SEQ ID NO: 279 - RNA, 15 nt, synthetic construct
  misc_feature 1..15: note = Description of Artificial Sequence: Synthetic Antisense oligonucleotide
  source 1..15: mol_type = other RNA
agatggcatttctag

SEQ ID NO: 280 - RNA, 14 nt, synthetic construct
  misc_feature 1..14: note = Description of Artificial Sequence: Synthetic Antisense oligonucleotide
  source 1..14: mol_type = other RNA
agatggcatttcta

SEQ ID NO: 281 - RNA, 13 nt, synthetic construct
  misc_feature 1..13: note = Description of Artificial Sequence: Synthetic Antisense oligonucleotide
  source 1..13: mol_type = other RNA
agatggcatttct

SEQ ID NO: 282 - RNA, 12 nt, synthetic construct
  misc_feature 1..12: note = Description of Artificial Sequence: Synthetic Antisense oligonucleotide
  source 1..12: mol_type = other RNA
agatggcatttc

SEQ ID NO: 283 - RNA, 11 nt, synthetic construct
  misc_feature 1..11: note = Description of Artificial Sequence: Synthetic Antisense oligonucleotide
  source 1..11: mol_type = other RNA
agatggcattt

SEQ ID NO: 284 - RNA, 10 nt, synthetic construct
  misc_feature 1..10: note = Description of Artificial Sequence: Synthetic Antisense oligonucleotide
  source 1..10: mol_type = other RNA
agatggcatt

SEQ ID NO: 285-286 - skipped (2 entries)

SEQ ID NO: 287 - RNA, 30 nt, synthetic construct
  misc_feature 1..30: note = Description of Artificial Sequence: Synthetic Antisense oligonucleotide
  source 1..30: mol_type = other RNA
ctccaacatcaaggaagatggcatttctag

SEQ ID NO: 288 - RNA, 29 nt, synthetic construct
  misc_feature 1..29: note = Description of Artificial Sequence: Synthetic Antisense oligonucleotide
  source 1..29: mol_type = other RNA
ctccaacatcaaggaagatggcatttcta

SEQ ID NO: 289 - RNA, 28 nt, synthetic construct
  misc_feature 1..28: note = Description of Artificial Sequence: Synthetic Antisense oligonucleotide
  source 1..28: mol_type = other RNA
ctccaacatcaaggaagatggcatttct

SEQ ID NO: 290 - RNA, 27 nt, synthetic construct
  misc_feature 1..27: note = Description of Artificial Sequence: Synthetic Antisense oligonucleotide
  source 1..27: mol_type = other RNA
ctccaacatcaaggaagatggcatttc

SEQ ID NO: 291 - RNA, 26 nt, synthetic construct
  misc_feature 1..26: note = Description of Artificial Sequence: Synthetic Antisense oligonucleotide
  source 1..26: mol_type = other RNA
ctccaacatcaaggaagatggcattt

SEQ ID NO: 292 - RNA, 25 nt, synthetic construct
  misc_feature 1..25: note = Description of Artificial Sequence: Synthetic Antisense oligonucleotide
  source 1..25: mol_type = other RNA
ctccaacatcaaggaagatggcatt

SEQ ID NO: 293 - RNA, 24 nt, synthetic construct
  misc_feature 1..24: note = Description of Artificial Sequence: Synthetic Antisense oligonucleotide
  source 1..24: mol_type = other RNA
ctccaacatcaaggaagatggcat

SEQ ID NO: 294 - RNA, 23 nt, synthetic construct
  misc_feature 1..23: note = Description of Artificial Sequence: Synthetic Antisense oligonucleotide
  source 1..23: mol_type = other RNA
ctccaacatcaaggaagatggca

SEQ ID NO: 295 - RNA, 22 nt, synthetic construct
  misc_feature 1..22: note = Description of Artificial Sequence: Synthetic Antisense oligonucleotide
  source 1..22: mol_type = other RNA
ctccaacatcaaggaagatggc

SEQ ID NO: 296 - RNA, 21 nt, synthetic construct
  misc_feature 1..21: note = Description of Artificial Sequence: Synthetic Antisense oligonucleotide
  source 1..21: mol_type = other RNA
ctccaacatcaaggaagatgg

SEQ ID NO: 297 - RNA, 20 nt, synthetic construct
  misc_feature 1..20: note = Description of Artificial Sequence: Synthetic Antisense oligonucleotide
  source 1..20: mol_type = other RNA
ctccaacatcaaggaagatg

SEQ ID NO: 298 - RNA, 19 nt, synthetic construct
  misc_feature 1..19: note = Description of Artificial Sequence: Synthetic Antisense oligonucleotide
  source 1..19: mol_type = other RNA
ctccaacatcaaggaagat

SEQ ID NO: 299 - RNA, 18 nt, synthetic construct
  misc_feature 1..18: note = Description of Artificial Sequence: Synthetic Antisense oligonucleotide
  source 1..18: mol_type = other RNA
ctccaacatcaaggaaga

SEQ ID NO: 300 - RNA, 17 nt, synthetic construct
  misc_feature 1..17: note = Description of Artificial Sequence: Synthetic Antisense oligonucleotide
  source 1..17: mol_type = other RNA
ctccaacatcaaggaag

SEQ ID NO: 301 - RNA, 29 nt, synthetic construct
  misc_feature 1..29: note = Description of Artificial Sequence: Synthetic Antisense oligonucleotide
  source 1..29: mol_type = other RNA
tccaacatcaaggaagatggcatttctag

SEQ ID NO: 302 - RNA, 28 nt, synthetic construct
  misc_feature 1..28: note = Description of Artificial Sequence: Synthetic Antisense oligonucleotide
  source 1..28: mol_type = other RNA
tccaacatcaaggaagatggcatttcta

SEQ ID NO: 303 - RNA, 27 nt, synthetic construct
  misc_feature 1..27: note = Description of Artificial Sequence: Synthetic Antisense oligonucleotide
  source 1..27: mol_type = other RNA
tccaacatcaaggaagatggcatttct

SEQ ID NO: 304 - RNA, 26 nt, synthetic construct
  misc_feature 1..26: note = Description of Artificial Sequence: Synthetic Antisense oligonucleotide
  source 1..26: mol_type = other RNA
tccaacatcaaggaagatggcatttc

SEQ ID NO: 305 - RNA, 25 nt, synthetic construct
  misc_feature 1..25: note = Description of Artificial Sequence: Synthetic Antisense oligonucleotide
  source 1..25: mol_type = other RNA
tccaacatcaaggaagatggcattt

SEQ ID NO: 306 - RNA, 24 nt, synthetic construct
  misc_feature 1..24: note = Description of Artificial Sequence: Synthetic Antisense oligonucleotide
  source 1..24: mol_type = other RNA
tccaacatcaaggaagatggcatt

SEQ ID NO: 307 - RNA, 23 nt, synthetic construct
  misc_feature 1..23: note = Description of Artificial Sequence: Synthetic Antisense oligonucleotide
  source 1..23: mol_type = other RNA
tccaacatcaaggaagatggcat

SEQ ID NO: 308 - RNA, 22 nt, synthetic construct
  misc_feature 1..22: note = Description of Artificial Sequence: Synthetic Antisense oligonucleotide
  source 1..22: mol_type = other RNA
tccaacatcaaggaagatggca

SEQ ID NO: 309 - RNA, 21 nt, synthetic construct
  misc_feature 1..21: note = Description of Artificial Sequence: Synthetic Antisense oligonucleotide
  source 1..21: mol_type = other RNA
tccaacatcaaggaagatggc

SEQ ID NO: 310 - RNA, 20 nt, synthetic construct
  misc_feature 1..20: note = Description of Artificial Sequence: Synthetic Antisense oligonucleotide
  source 1..20: mol_type = other RNA
tccaacatcaaggaagatgg

SEQ ID NO: 311 - RNA, 19 nt, synthetic construct
  misc_feature 1..19: note = Description of Artificial Sequence: Synthetic Antisense oligonucleotide
  source 1..19: mol_type = other RNA
tccaacatcaaggaagatg

SEQ ID NO: 312 - RNA, 18 nt, synthetic construct
  misc_feature 1..18: note = Description of Artificial Sequence: Synthetic Antisense oligonucleotide
  source 1..18: mol_type = other RNA
tccaacatcaaggaagat

SEQ ID NO: 313 - RNA, 17 nt, synthetic construct
  misc_feature 1..17: note = Description of Artificial Sequence: Synthetic Antisense oligonucleotide
  source 1..17: mol_type = other RNA
tccaacatcaaggaaga

SEQ ID NO: 314 - RNA, 16 nt, synthetic construct
  misc_feature 1..16: note = Description of Artificial Sequence: Synthetic Antisense oligonucleotide
  source 1..16: mol_type = other RNA
tccaacatcaaggaag

SEQ ID NO: 315 - RNA, 28 nt, synthetic construct
  misc_feature 1..28: note = Description of Artificial Sequence: Synthetic Antisense oligonucleotide
  source 1..28: mol_type = other RNA
ccaacatcaaggaagatggcatttctag

SEQ ID NO: 316 - RNA, 27 nt, synthetic construct
  misc_feature 1..27: note = Description of Artificial Sequence: Synthetic Antisense oligonucleotide
  source 1..27: mol_type = other RNA
ccaacatcaaggaagatggcatttcta

SEQ ID NO: 317 - RNA, 26 nt, synthetic construct
  misc_feature 1..26: note = Description of Artificial Sequence: Synthetic Antisense oligonucleotide
  source 1..26: mol_type = other RNA
ccaacatcaaggaagatggcatttct

SEQ ID NO: 318 - RNA, 25 nt, synthetic construct
  misc_feature 1..25: note = Description of Artificial Sequence: Synthetic Antisense oligonucleotide
  source 1..25: mol_type = other RNA
ccaacatcaaggaagatggcatttc

SEQ ID NO: 319 - RNA, 24 nt, synthetic construct
  misc_feature 1..24: note = Description of Artificial Sequence: Synthetic Antisense oligonucleotide
  source 1..24: mol_type = other RNA
ccaacatcaaggaagatggcattt

SEQ ID NO: 320 - RNA, 23 nt, synthetic construct
  misc_feature 1..23: note = Description of Artificial Sequence: Synthetic Antisense oligonucleotide
  source 1..23: mol_type = other RNA
ccaacatcaaggaagatggcatt

SEQ ID NO: 321 - RNA, 22 nt, synthetic construct
  misc_feature 1..22: note = Description of Artificial Sequence: Synthetic Antisense oligonucleotide
  source 1..22: mol_type = other RNA
ccaacatcaaggaagatggcat

SEQ ID NO: 322 - RNA, 21 nt, synthetic construct
  misc_feature 1..21: note = Description of Artificial Sequence: Synthetic Antisense oligonucleotide
  source 1..21: mol_type = other RNA
ccaacatcaaggaagatggca

SEQ ID NO: 323 - RNA, 20 nt, synthetic construct
  misc_feature 1..20: note = Description of Artificial Sequence: Synthetic Antisense oligonucleotide
  source 1..20: mol_type = other RNA
ccaacatcaaggaagatggc

SEQ ID NO: 324 - RNA, 19 nt, synthetic construct
  misc_feature 1..19: note = Description of Artificial Sequence: Synthetic Antisense oligonucleotide
  source 1..19: mol_type = other RNA
ccaacatcaaggaagatgg

SEQ ID NO: 325 - RNA, 18 nt, synthetic construct
  misc_feature 1..18: note = Description of Artificial Sequence: Synthetic Antisense oligonucleotide
  source 1..18: mol_type = other RNA
ccaacatcaaggaagatg

SEQ ID NO: 326 - RNA, 17 nt, synthetic construct
  misc_feature 1..17: note = Description of Artificial Sequence: Synthetic Antisense oligonucleotide
  source 1..17: mol_type = other RNA
ccaacatcaaggaagat

SEQ ID NO: 327 - RNA, 16 nt, synthetic construct
  misc_feature 1..16: note = Description of Artificial Sequence: Synthetic Antisense oligonucleotide
  source 1..16: mol_type = other RNA
ccaacatcaaggaaga

SEQ ID NO: 328 - RNA, 15 nt, synthetic construct
  misc_feature 1..15: note = Description of Artificial Sequence: Synthetic Antisense oligonucleotide
  source 1..15: mol_type = other RNA
ccaacatcaaggaag

SEQ ID NO: 329 - RNA, 27 nt, synthetic construct
  misc_feature 1..27: note = Description of Artificial Sequence: Synthetic Antisense oligonucleotide
  source 1..27: mol_type = other RNA
caacatcaaggaagatggcatttctag

SEQ ID NO: 330 - RNA, 26 nt, synthetic construct
  misc_feature 1..26: note = Description of Artificial Sequence: Synthetic Antisense oligonucleotide
  source 1..26: mol_type = other RNA
caacatcaaggaagatggcatttcta

SEQ ID NO: 331 - RNA, 25 nt, synthetic construct
  misc_feature 1..25: note = Description of Artificial Sequence: Synthetic Antisense oligonucleotide
  source 1..25: mol_type = other RNA
caacatcaaggaagatggcatttct

SEQ ID NO: 332 - RNA, 24 nt, synthetic construct
  misc_feature 1..24: note = Description of Artificial Sequence: Synthetic Antisense oligonucleotide
  source 1..24: mol_type = other RNA
caacatcaaggaagatggcatttc

SEQ ID NO: 333 - RNA, 23 nt, synthetic construct
  misc_feature 1..23: note = Description of Artificial Sequence: Synthetic Antisense oligonucleotide
  source 1..23: mol_type = other RNA
caacatcaaggaagatggcattt

SEQ ID NO: 334 - RNA, 22 nt, synthetic construct
  misc_feature 1..22: note = Description of Artificial Sequence: Synthetic Antisense oligonucleotide
  source 1..22: mol_type = other RNA
caacatcaaggaagatggcatt

SEQ ID NO: 335 - RNA, 21 nt, synthetic construct
  misc_feature 1..21: note = Description of Artificial Sequence: Synthetic Antisense oligonucleotide
  source 1..21: mol_type = other RNA
caacatcaaggaagatggcat

SEQ ID NO: 336 - RNA, 20 nt, synthetic construct
  misc_feature 1..20: note = Description of Artificial Sequence: Synthetic Antisense oligonucleotide
  source 1..20: mol_type = other RNA
caacatcaaggaagatggca

SEQ ID NO: 337 - RNA, 19 nt, synthetic construct
  misc_feature 1..19: note = Description of Artificial Sequence: Synthetic Antisense oligonucleotide
  source 1..19: mol_type = other RNA
caacatcaaggaagatggc

SEQ ID NO: 338 - RNA, 18 nt, synthetic construct
  misc_feature 1..18: note = Description of Artificial Sequence: Synthetic Antisense oligonucleotide
  source 1..18: mol_type = other RNA
caacatcaaggaagatgg

SEQ ID NO: 339 - RNA, 17 nt, synthetic construct
  misc_feature 1..17: note = Description of Artificial Sequence: Synthetic Antisense oligonucleotide
  source 1..17: mol_type = other RNA
caacatcaaggaagatg

SEQ ID NO: 340 - RNA, 16 nt, synthetic construct
  misc_feature 1..16: note = Description of Artificial Sequence: Synthetic Antisense oligonucleotide
  source 1..16: mol_type = other RNA
caacatcaaggaagat

SEQ ID NO: 341 - RNA, 15 nt, synthetic construct
  misc_feature 1..15: note = Description of Artificial Sequence: Synthetic Antisense oligonucleotide
  source 1..15: mol_type = other RNA
caacatcaaggaaga

SEQ ID NO: 342 - RNA, 14 nt, synthetic construct
  misc_feature 1..14: note = Description of Artificial Sequence: Synthetic Antisense oligonucleotide
  source 1..14: mol_type = other RNA
caacatcaaggaag

SEQ ID NO: 343 - RNA, 26 nt, synthetic construct
  misc_feature 1..26: note = Description of Artificial Sequence: Synthetic Antisense oligonucleotide
  source 1..26: mol_type = other RNA
aacatcaaggaagatggcatttctag

SEQ ID NO: 344 - RNA, 25 nt, synthetic construct
  misc_feature 1..25: note = Description of Artificial Sequence: Synthetic Antisense oligonucleotide
  source 1..25: mol_type = other RNA
aacatcaaggaagatggcatttcta

SEQ ID NO: 345 - RNA, 24 nt, synthetic construct
  misc_feature 1..24: note = Description of Artificial Sequence: Synthetic Antisense oligonucleotide
  source 1..24: mol_type = other RNA
aacatcaaggaagatggcatttct

SEQ ID NO: 346 - RNA, 23 nt, synthetic construct
  misc_feature 1..23: note = Description of Artificial Sequence: Synthetic Antisense oligonucleotide
  source 1..23: mol_type = other RNA
aacatcaaggaagatggcatttc

SEQ ID NO: 347 - RNA, 22 nt, synthetic construct
  misc_feature 1..22: note = Description of Artificial Sequence: Synthetic Antisense oligonucleotide
  source 1..22: mol_type = other RNA
aacatcaaggaagatggcattt

SEQ ID NO: 348 - RNA, 21 nt, synthetic construct
  misc_feature 1..21: note = Description of Artificial Sequence: Synthetic Antisense oligonucleotide
  source 1..21: mol_type = other RNA
aacatcaaggaagatggcatt

SEQ ID NO: 349 - RNA, 20 nt, synthetic construct
  misc_feature 1..20: note = Description of Artificial Sequence: Synthetic Antisense oligonucleotide
  source 1..20: mol_type = other RNA
aacatcaaggaagatggcat

SEQ ID NO: 350 - RNA, 19 nt, synthetic construct
  misc_feature 1..19: note = Description of Artificial Sequence: Synthetic Antisense oligonucleotide
  source 1..19: mol_type = other RNA
aacatcaaggaagatggca

SEQ ID NO: 351 - RNA, 18 nt, synthetic construct
  misc_feature 1..18: note = Description of Artificial Sequence: Synthetic Antisense oligonucleotide
  source 1..18: mol_type = other RNA
aacatcaaggaagatggc

SEQ ID NO: 352 - RNA, 17 nt, synthetic construct
  misc_feature 1..17: note = Description of Artificial Sequence: Synthetic Antisense oligonucleotide
  source 1..17: mol_type = other RNA
aacatcaaggaagatgg

SEQ ID NO: 353 - RNA, 16 nt, synthetic construct
  misc_feature 1..16: note = Description of Artificial Sequence: Synthetic Antisense oligonucleotide
  source 1..16: mol_type = other RNA
aacatcaaggaagatg

SEQ ID NO: 354 - RNA, 15 nt, synthetic construct
  misc_feature 1..15: note = Description of Artificial Sequence: Synthetic Antisense oligonucleotide
  source 1..15: mol_type = other RNA
aacatcaaggaagat

SEQ ID NO: 355 - RNA, 14 nt, synthetic construct
  misc_feature 1..14: note = Description of Artificial Sequence: Synthetic Antisense oligonucleotide
  source 1..14: mol_type = other RNA
aacatcaaggaaga

SEQ ID NO: 356 - RNA, 13 nt, synthetic construct
  misc_feature 1..13: note = Description of Artificial Sequence: Synthetic Antisense oligonucleotide
  source 1..13: mol_type = other RNA
aacatcaaggaag

SEQ ID NO: 357 - RNA, 25 nt, synthetic construct
  misc_feature 1..25: note = Description of Artificial Sequence: Synthetic Antisense oligonucleotide
  source 1..25: mol_type = other RNA
acatcaaggaagatggcatttctag

SEQ ID NO: 358 - RNA, 24 nt, synthetic construct
  misc_feature 1..24: note = Description of Artificial Sequence: Synthetic Antisense oligonucleotide
  source 1..24: mol_type = other RNA
acatcaaggaagatggcatttcta

SEQ ID NO: 359 - RNA, 23 nt, synthetic construct
  misc_feature 1..23: note = Description of Artificial Sequence: Synthetic Antisense oligonucleotide
  source 1..23: mol_type = other RNA
acatcaaggaagatggcatttct

SEQ ID NO: 360 - RNA, 22 nt, synthetic construct
  misc_feature 1..22: note = Description of Artificial Sequence: Synthetic Antisense oligonucleotide
  source 1..22: mol_type = other RNA
acatcaaggaagatggcatttc

SEQ ID NO: 361 - RNA, 21 nt, synthetic construct
  misc_feature 1..21: note = Description of Artificial Sequence: Synthetic Antisense oligonucleotide
  source 1..21: mol_type = other RNA
acatcaaggaagatggcattt

SEQ ID NO: 362 - RNA, 20 nt, synthetic construct
  misc_feature 1..20: note = Description of Artificial Sequence: Synthetic Antisense oligonucleotide
  source 1..20: mol_type = other RNA
acatcaaggaagatggcatt

SEQ ID NO: 363 - RNA, 19 nt, synthetic construct
  misc_feature 1..19: note = Description of Artificial Sequence: Synthetic Antisense oligonucleotide
  source 1..19: mol_type = other RNA
acatcaaggaagatggcat

SEQ ID NO: 364 - RNA, 18 nt, synthetic construct
  misc_feature 1..18: note = Description of Artificial Sequence: Synthetic Antisense oligonucleotide
  source 1..18: mol_type = other RNA
acatcaaggaagatggca

SEQ ID NO: 365 - RNA, 17 nt, synthetic construct
  misc_feature 1..17: note = Description of Artificial Sequence: Synthetic Antisense oligonucleotide
  source 1..17: mol_type = other RNA
acatcaaggaagatggc

SEQ ID NO: 366 - RNA, 16 nt, synthetic construct
  misc_feature 1..16: note = Description of Artificial Sequence: Synthetic Antisense oligonucleotide
  source 1..16: mol_type = other RNA
acatcaaggaagatgg

SEQ ID NO: 367 - RNA, 15 nt, synthetic construct
  misc_feature 1..15: note = Description of Artificial Sequence: Synthetic Antisense oligonucleotide
  source 1..15: mol_type = other RNA
acatcaaggaagatg

SEQ ID NO: 368 - RNA, 14 nt, synthetic construct
  misc_feature 1..14: note = Description of Artificial Sequence: Synthetic Antisense oligonucleotide
  source 1..14: mol_type = other RNA
acatcaaggaagat

SEQ ID NO: 369 - RNA, 13 nt, synthetic construct
  misc_feature 1..13: note = Description of Artificial Sequence: Synthetic Antisense oligonucleotide
  source 1..13: mol_type = other RNA
acatcaaggaaga

SEQ ID NO: 370 - RNA, 12 nt, synthetic construct
  misc_feature 1..12: note = Description of Artificial Sequence: Synthetic Antisense oligonucleotide
  source 1..12: mol_type = other RNA
acatcaaggaag

SEQ ID NO: 371 - RNA, 24 nt, synthetic construct
  misc_feature 1..24: note = Description of Artificial Sequence: Synthetic Antisense oligonucleotide
  source 1..24: mol_type = other RNA
catcaaggaagatggcatttctag

SEQ ID NO: 372 - RNA, 23 nt, synthetic construct
  misc_feature 1..23: note = Description of Artificial Sequence: Synthetic Antisense oligonucleotide
  source 1..23: mol_type = other RNA
catcaaggaagatggcatttcta

SEQ ID NO: 373 - RNA, 22 nt, synthetic construct
  misc_feature 1..22: note = Description of Artificial Sequence: Synthetic Antisense oligonucleotide
  source 1..22: mol_type = other RNA
catcaaggaagatggcatttct

SEQ ID NO: 374 - RNA, 21 nt, synthetic construct
  misc_feature 1..21: note = Description of Artificial Sequence: Synthetic Antisense oligonucleotide
  source 1..21: mol_type = other RNA
catcaaggaagatggcatttc

SEQ ID NO: 375 - RNA, 20 nt, synthetic construct
  misc_feature 1..20: note = Description of Artificial Sequence: Synthetic Antisense oligonucleotide
  source 1..20: mol_type = other RNA
catcaaggaagatggcattt

SEQ ID NO: 376 - RNA, 19 nt, synthetic construct
  misc_feature 1..19: note = Description of Artificial Sequence: Synthetic Antisense oligonucleotide
  source 1..19: mol_type = other RNA
catcaaggaagatggcatt

SEQ ID NO: 377 - RNA, 18 nt, synthetic construct
  misc_feature 1..18: note = Description of Artificial Sequence: Synthetic Antisense oligonucleotide
  source 1..18: mol_type = other RNA
catcaaggaagatggcat

SEQ ID NO: 378 - RNA, 17 nt, synthetic construct
  misc_feature 1..17: note = Description of Artificial Sequence: Synthetic Antisense oligonucleotide
  source 1..17: mol_type = other RNA
catcaaggaagatggca

SEQ ID NO: 379 - RNA, 16 nt, synthetic construct
  misc_feature 1..16: note = Description of Artificial Sequence: Synthetic Antisense oligonucleotide
  source 1..16: mol_type = other RNA
catcaaggaagatggc

SEQ ID NO: 380 - RNA, 15 nt, synthetic construct
  misc_feature 1..15: note = Description of Artificial Sequence: Synthetic Antisense oligonucleotide
  source 1..15: mol_type = other RNA
catcaaggaagatgg

SEQ ID NO: 381 - RNA, 14 nt, synthetic construct
  misc_feature 1..14: note = Description of Artificial Sequence: Synthetic Antisense oligonucleotide
  source 1..14: mol_type = other RNA
catcaaggaagatg

SEQ ID NO: 382 - RNA, 13 nt, synthetic construct
  misc_feature 1..13: note = Description of Artificial Sequence: Synthetic Antisense oligonucleotide
  source 1..13: mol_type = other RNA
catcaaggaagat

SEQ ID NO: 383 - RNA, 12 nt, synthetic construct
  misc_feature 1..12: note = Description of Artificial Sequence: Synthetic Antisense oligonucleotide
  source 1..12: mol_type = other RNA
catcaaggaaga

SEQ ID NO: 384 - RNA, 11 nt, synthetic construct
  misc_feature 1..11: note = Description of Artificial Sequence: Synthetic Antisense oligonucleotide
  source 1..11: mol_type = other RNA
catcaaggaag

SEQ ID NO: 385 - RNA, 23 nt, synthetic construct
  misc_feature 1..23: note = Description of Artificial Sequence: Synthetic Antisense oligonucleotide
  source 1..23: mol_type = other RNA
atcaaggaagatggcatttctag

SEQ ID NO: 386 - RNA, 22 nt, synthetic construct
  misc_feature 1..22: note = Description of Artificial Sequence: Synthetic Antisense oligonucleotide
  source 1..22: mol_type = other RNA
atcaaggaagatggcatttcta

SEQ ID NO: 387 - RNA, 21 nt, synthetic construct
  misc_feature 1..21: note = Description of Artificial Sequence: Synthetic Antisense oligonucleotide
  source 1..21: mol_type = other RNA
atcaaggaagatggcatttct

SEQ ID NO: 388 - RNA, 20 nt, synthetic construct
  misc_feature 1..20: note = Description of Artificial Sequence: Synthetic Antisense oligonucleotide
  source 1..20: mol_type = other RNA
atcaaggaagatggcatttc

SEQ ID NO: 389 - RNA, 19 nt, synthetic construct
  misc_feature 1..19: note = Description of Artificial Sequence: Synthetic Antisense oligonucleotide
  source 1..19: mol_type = other RNA
atcaaggaagatggcattt

SEQ ID NO: 390 - RNA, 18 nt, synthetic construct
  misc_feature 1..18: note = Description of Artificial Sequence: Synthetic Antisense oligonucleotide
  source 1..18: mol_type = other RNA
atcaaggaagatggcatt

SEQ ID NO: 391 - RNA, 17 nt, synthetic construct
  misc_feature 1..17: note = Description of Artificial Sequence: Synthetic Antisense oligonucleotide
  source 1..17: mol_type = other RNA
atcaaggaagatggcat

SEQ ID NO: 392 - RNA, 16 nt, synthetic construct
  misc_feature 1..16: note = Description of Artificial Sequence: Synthetic Antisense oligonucleotide
  source 1..16: mol_type = other RNA
atcaaggaagatggca

SEQ ID NO: 393 - RNA, 15 nt, synthetic construct
  misc_feature 1..15: note = Description of Artificial Sequence: Synthetic Antisense oligonucleotide
  source 1..15: mol_type = other RNA
atcaaggaagatggc

SEQ ID NO: 394 - RNA, 14 nt, synthetic construct
  misc_feature 1..14: note = Description of Artificial Sequence: Synthetic Antisense oligonucleotide
  source 1..14: mol_type = other RNA
atcaaggaagatgg

SEQ ID NO: 395 - RNA, 13 nt, synthetic construct
  misc_feature 1..13: note = Description of Artificial Sequence: Synthetic Antisense oligonucleotide
  source 1..13: mol_type = other RNA
atcaaggaagatg

SEQ ID NO: 396 - RNA, 12 nt, synthetic construct
  misc_feature 1..12: note = Description of Artificial Sequence: Synthetic Antisense oligonucleotide
  source 1..12: mol_type = other RNA
atcaaggaagat

SEQ ID NO: 397 - RNA, 11 nt, synthetic construct
  misc_feature 1..11: note = Description of Artificial Sequence: Synthetic Antisense oligonucleotide
  source 1..11: mol_type = other RNA
atcaaggaaga

SEQ ID NO: 398 - RNA, 10 nt, synthetic construct
  misc_feature 1..10: note = Description of Artificial Sequence: Synthetic Antisense oligonucleotide
  source 1..10: mol_type = other RNA
atcaaggaag

SEQ ID NO: 399 - RNA, 18 nt, synthetic construct
  misc_feature 1..18: note = Description of Artificial Sequence: Synthetic Antisense oligonucleotide
  modified_base 9: mod_base = OTHER; note = 5-methyl
  modified_base 13..14: mod_base = OTHER; note = 5-methyl
  modified_base 18: mod_base = OTHER; note = 5-methyl
  source 1..18: mol_type = other RNA
ggtaagttctgtccaagc

SEQ ID NO: 400 - RNA, 18 nt, synthetic construct
  misc_feature 1..18: note = Description of Artificial Sequence: Synthetic Antisense oligonucleotide
  modified_base 8: mod_base = OTHER; note = 5-methyl
  modified_base 12..13: mod_base = OTHER; note = 5-methyl
  modified_base 17..18: mod_base = OTHER; note = 5-methyl
  source 1..18: mol_type = other RNA
gtaagttctgtccaagcc

SEQ ID NO: 401 - RNA, 18 nt, synthetic construct
  misc_feature 1..18: note = Description of Artificial Sequence: Synthetic Antisense oligonucleotide
  modified_base 4: mod_base = OTHER; note = 5-methyl
  modified_base 13: mod_base = OTHER; note = 5-methyl
  modified_base 17..18: mod_base = OTHER; note = 5-methyl
  source 1..18: mol_type = other RNA
agtcggtaagttctgtcc

SEQ ID NO: 402 - RNA, 18 nt, synthetic construct
  misc_feature 1..18: note = Description of Artificial Sequence: Synthetic Antisense oligonucleotide
  modified_base 1: mod_base = OTHER; note = 5-methyl
  modified_base 5..6: mod_base = OTHER; note = 5-methyl
  modified_base 10..12: mod_base = OTHER; note = 5-methyl
  source 1..18: mol_type = other RNA
ctgtccaagcccggttga

SEQ ID NO: 403 - RNA, 15 nt, synthetic construct
  misc_feature 1..15: note = Description of Artificial Sequence: Synthetic Antisense oligonucleotide
  modified_base 7: mod_base = OTHER; note = 5-methyl
  modified_base 11..12: mod_base = OTHER; note = 5-methyl
  source 1..15: mol_type = other RNA
taagttctgtccaag

SEQ ID NO: 404 - RNA, 20 nt, synthetic construct
  misc_feature 1..20: note = Description of Artificial Sequence: Synthetic Antisense oligonucleotide
  modified_base 3: mod_base = OTHER; note = 5-methyl
  modified_base 7..8: mod_base = OTHER; note = 5-methyl
  modified_base 12..14: mod_base = OTHER; note = 5-methyl
  source 1..20: mol_type = other RNA
ttctgtccaagcccggttga

SEQ ID NO: 405 - RNA, 19 nt, synthetic construct
  misc_feature 1..19: note = Description of Artificial Sequence: Synthetic Antisense oligonucleotide
  modified_base 3: mod_base = OTHER; note = 5-methyl
  modified_base 7..8: mod_base = OTHER; note = 5-methyl
  modified_base 12..14: mod_base = OTHER; note = 5-methyl
  source 1..19: mol_type = other RNA
ttctgtccaagcccggttg

SEQ ID NO: 406 - RNA, 18 nt, synthetic construct
  misc_feature 1..18: note = Description of Artificial Sequence: Synthetic Antisense oligonucleotide
  modified_base 3: mod_base = OTHER; note = 5-methyl
  modified_base 7..8: mod_base = OTHER; note = 5-methyl
  modified_base 12..14: mod_base = OTHER; note = 5-methyl
  source 1..18: mol_type = other RNA
ttctgtccaagcccggtt

SEQ ID NO: 407 - RNA, 17 nt, synthetic construct
  misc_feature 1..17: note = Description of Artificial Sequence: Synthetic Antisense oligonucleotide
  modified_base 3: mod_base = OTHER; note = 5-methyl
  modified_base 7..8: mod_base = OTHER; note = 5-methyl
  modified_base 12..14: mod_base = OTHER; note = 5-methyl
  source 1..17: mol_type = other RNA
ttctgtccaagcccggt

SEQ ID NO: 408 - RNA, 16 nt, synthetic construct
  misc_feature 1..16: note = Description of Artificial Sequence: Synthetic Antisense oligonucleotide
  modified_base 3: mod_base = OTHER; note = 5-methyl
  modified_base 7..8: mod_base = OTHER; note = 5-methyl
  modified_base 12..14: mod_base = OTHER; note = 5-methyl
  source 1..16: mol_type = other RNA
ttctgtccaagcccgg

SEQ ID NO: 409 - RNA, 15 nt, synthetic construct
  misc_feature 1..15: note = Description of Artificial Sequence: Synthetic Antisense oligonucleotide
  modified_base 3: mod_base = OTHER; note = 5-methyl
  modified_base 7..8: mod_base = OTHER; note = 5-methyl
  modified_base 12..14: mod_base = OTHER; note = 5-methyl
  source 1..15: mol_type = other RNA
ttctgtccaagcccg

SEQ ID NO: 410 - RNA, 14 nt, synthetic construct
  misc_feature 1..14: note = Description of Artificial Sequence: Synthetic Antisense oligonucleotide
  modified_base 3: mod_base = OTHER; note = 5-methyl
  modified_base 7..8: mod_base = OTHER; note = 5-methyl
  modified_base 12..14: mod_base = OTHER; note = 5-methyl
  source 1..14: mol_type = other RNA
ttctgtccaagccc

SEQ ID NO: 411 - RNA, 13 nt, synthetic construct
  misc_feature 1..13: note = Description of Artificial Sequence: Synthetic Antisense oligonucleotide
  modified_base 3: mod_base = OTHER; note = 5-methyl
  modified_base 7..8: mod_base = OTHER; note = 5-methyl
  modified_base 12..13: mod_base = OTHER; note = 5-methyl
  source 1..13: mol_type = other RNA
ttctgtccaagcc

SEQ ID NO: 412 - RNA, 12 nt, synthetic construct
  misc_feature 1..12: note = Description of Artificial Sequence: Synthetic Antisense oligonucleotide
  modified_base 3: mod_base = OTHER; note = 5-methyl
  modified_base 7..8: mod_base = OTHER; note = 5-methyl
  modified_base 12: mod_base = OTHER; note = 5-methyl
  source 1..12: mol_type = other RNA
ttctgtccaagc

SEQ ID NO: 413 - RNA, 11 nt, synthetic construct
  misc_feature 1..11: note = Description of Artificial Sequence: Synthetic Antisense oligonucleotide
  modified_base 3: mod_base = OTHER; note = 5-methyl
  modified_base 7..8: mod_base = OTHER; note = 5-methyl
  source 1..11: mol_type = other RNA
ttctgtccaag

SEQ ID NO: 414 - RNA, 10 nt, synthetic construct
  misc_feature 1..10: note = Description of Artificial Sequence: Synthetic Antisense oligonucleotide
  modified_base 3: mod_base = OTHER; note = 5-methyl
  modified_base 7..8: mod_base = OTHER; note = 5-methyl
  source 1..10: mol_type = other RNA
ttctgtccaa

SEQ ID NO: 415-416 - skipped (2 entries)

SEQ ID NO: 417 - RNA, 19 nt, synthetic construct
  misc_feature 1..19: note = Description of Artificial Sequence: Synthetic Antisense oligonucleotide
  modified_base 2: mod_base = OTHER; note = 5-methyl
  modified_base 6..7: mod_base = OTHER; note = 5-methyl
  modified_base 11..13: mod_base = OTHER; note = 5-methyl
  source 1..19: mol_type = other RNA
tctgtccaagcccggttga

SEQ ID NO: 418 - RNA, 18 nt, synthetic construct
  misc_feature 1..18: note = Description of Artificial Sequence: Synthetic Antisense oligonucleotide
  modified_base 2: mod_base = OTHER; note = 5-methyl
  modified_base 6..7: mod_base = OTHER; note = 5-methyl
  modified_base 11..13: mod_base = OTHER; note = 5-methyl
  source 1..18: mol_type = other RNA
tctgtccaagcccggttg

SEQ ID NO: 419 - RNA, 17 nt, synthetic construct
  misc_feature 1..17: note = Description of Artificial Sequence: Synthetic Antisense oligonucleotide
  modified_base 2: mod_base = OTHER; note = 5-methyl
  modified_base 6..7: mod_base = OTHER; note = 5-methyl
  modified_base 11..13: mod_base = OTHER; note = 5-methyl
  source 1..17: mol_type = other RNA
tctgtccaagcccggtt

SEQ ID NO: 420 - RNA, 16 nt, synthetic construct
  misc_feature 1..16: note = Description of Artificial Sequence: Synthetic Antisense oligonucleotide
  modified_base 2: mod_base = OTHER; note = 5-methyl
  modified_base 6..7: mod_base = OTHER; note = 5-methyl
  modified_base 11..13: mod_base = OTHER; note = 5-methyl
  source 1..16: mol_type = other RNA
tctgtccaagcccggt

SEQ ID NO: 421 - RNA, 15 nt, synthetic construct
  misc_feature 1..15: note = Description of Artificial Sequence: Synthetic Antisense oligonucleotide
  modified_base 2: mod_base = OTHER; note = 5-methyl
  modified_base 6..7: mod_base = OTHER; note = 5-methyl
  modified_base 11..13: mod_base = OTHER; note = 5-methyl
  source 1..15: mol_type = other RNA
tctgtccaagcccgg

SEQ ID NO: 422 - RNA, 14 nt, synthetic construct
  misc_feature 1..14: note = Description of Artificial Sequence: Synthetic Antisense oligonucleotide
  modified_base 2: mod_base = OTHER; note = 5-methyl
  modified_base 6..7: mod_base = OTHER; note = 5-methyl
  modified_base 11..13: mod_base = OTHER; note = 5-methyl
  source 1..14: mol_type = other RNA
tctgtccaagcccg

SEQ ID NO: 423 - RNA, 13 nt, synthetic construct
  misc_feature 1..13: note = Description of Artificial Sequence: Synthetic Antisense oligonucleotide
  modified_base 2: mod_base = OTHER; note = 5-methyl
  modified_base 6..7: mod_base = OTHER; note = 5-methyl
  modified_base 11..13: mod_base = OTHER; note = 5-methyl
  source 1..13: mol_type = other RNA
tctgtccaagccc

SEQ ID NO: 424 - RNA, 12 nt, synthetic construct
  misc_feature 1..12: note = Description of Artificial Sequence: Synthetic Antisense oligonucleotide
  modified_base 2: mod_base = OTHER; note = 5-methyl
  modified_base 6..7: mod_base = OTHER; note = 5-methyl
  modified_base 11..12: mod_base = OTHER; note = 5-methyl
  source 1..12: mol_type = other RNA
tctgtccaagcc

SEQ ID NO: 425 - RNA, 11 nt, synthetic construct
  misc_feature 1..11: note = Description of Artificial Sequence: Synthetic Antisense oligonucleotide
  modified_base 2: mod_base = OTHER; note = 5-methyl
  modified_base 6..7: mod_base = OTHER; note = 5-methyl
  modified_base 11: mod_base = OTHER; note = 5-methyl
  source 1..11: mol_type = other RNA
tctgtccaagc

SEQ ID NO: 426 - RNA, 10 nt, synthetic construct
  misc_feature 1..10: note = Description of Artificial Sequence: Synthetic Antisense oligonucleotide
  modified_base 2: mod_base = OTHER; note = 5-methyl
  modified_base 6..7: mod_base = OTHER; note = 5-methyl
  source 1..10: mol_type = other RNA
tctgtccaag

SEQ ID NO: 427-428 - skipped (2 entries)

SEQ ID NO: 429 - RNA, 17 nt, synthetic construct
  misc_feature 1..17: note = Description of Artificial Sequence: Synthetic Antisense oligonucleotide
  modified_base 1: mod_base = OTHER; note = 5-methyl
  modified_base 5..6: mod_base = OTHER; note = 5-methyl
  modified_base 10..12: mod_base = OTHER; note = 5-methyl
  source 1..17: mol_type = other RNA
ctgtccaagcccggttg

SEQ ID NO: 430 - RNA, 16 nt, synthetic construct
  misc_feature 1..16: note = Description of Artificial Sequence: Synthetic Antisense oligonucleotide
  modified_base 1: mod_base = OTHER; note = 5-methyl
  modified_base 5..6: mod_base = OTHER; note = 5-methyl
  modified_base 10..12: mod_base = OTHER; note = 5-methyl
  source 1..16: mol_type = other RNA
ctgtccaagcccggtt

SEQ ID NO: 431 - RNA, 15 nt, synthetic construct
  misc_feature 1..15: note = Description of Artificial Sequence: Synthetic Antisense oligonucleotide
  modified_base 1: mod_base = OTHER; note = 5-methyl
  modified_base 5..6: mod_base = OTHER; note = 5-methyl
  modified_base 10..12: mod_base = OTHER; note = 5-methyl
  source 1..15: mol_type = other RNA
ctgtccaagcccggt

SEQ ID NO: 432 - RNA, 14 nt, synthetic construct
  misc_feature 1..14: note = Description of Artificial Sequence: Synthetic Antisense oligonucleotide
  modified_base 1: mod_base = OTHER; note = 5-methyl
  modified_base 5..6: mod_base = OTHER; note = 5-methyl
  modified_base 10..12: mod_base = OTHER; note = 5-methyl
  source 1..14: mol_type = other RNA
ctgtccaagcccgg

SEQ ID NO: 433 - RNA, 13 nt, synthetic construct
  misc_feature 1..13: note = Description of Artificial Sequence: Synthetic Antisense oligonucleotide
  modified_base 1: mod_base = OTHER; note = 5-methyl
  modified_base 5..6: mod_base = OTHER; note = 5-methyl
  modified_base 10..12: mod_base = OTHER; note = 5-methyl
  source 1..13: mol_type = other RNA
ctgtccaagcccg

SEQ ID NO: 434 - RNA, 12 nt, synthetic construct
  misc_feature 1..12: note = Description of Artificial Sequence: Synthetic Antisense oligonucleotide
  modified_base 1: mod_base = OTHER; note = 5-methyl
  modified_base 5..6: mod_base = OTHER; note = 5-methyl
  modified_base 10..12: mod_base = OTHER; note = 5-methyl
  source 1..12: mol_type = other RNA
ctgtccaagccc

SEQ ID NO: 435 - RNA, 11 nt, synthetic construct
  misc_feature 1..11: note = Description of Artificial Sequence: Synthetic Antisense oligonucleotide
  modified_base 1: mod_base = OTHER; note = 5-methyl
  modified_base 5..6: mod_base = OTHER; note = 5-methyl
  modified_base 10..11: mod_base = OTHER; note = 5-methyl
  source 1..11: mol_type = other RNA
ctgtccaagcc

SEQ ID NO: 436 - RNA, 10 nt, synthetic construct
  misc_feature 1..10: note = Description of Artificial Sequence: Synthetic Antisense oligonucleotide
  modified_base 1: mod_base = OTHER; note = 5-methyl
  modified_base 5..6: mod_base = OTHER; note = 5-methyl
  modified_base 10: mod_base = OTHER; note = 5-methyl
  source 1..10: mol_type = other RNA
ctgtccaagc

SEQ ID NO: 437-438 - skipped (2 entries)

SEQ ID NO: 439 - RNA, 20 nt, synthetic construct
  misc_feature 1..20: note = Description of Artificial Sequence: Synthetic Antisense oligonucleotide
  modified_base 4: mod_base = OTHER; note = 5-methyl
  modified_base 8..9: mod_base = OTHER; note = 5-methyl
  modified_base 13..15: mod_base = OTHER; note = 5-methyl
  source 1..20: mol_type = other RNA
gttctgtccaagcccggttg

SEQ ID NO: 440 - RNA, 19 nt, synthetic construct
  misc_feature 1..19: note = Description of Artificial Sequence: Synthetic Antisense oligonucleotide
  modified_base 4: mod_base = OTHER; note = 5-methyl
  modified_base 8..9: mod_base = OTHER; note = 5-methyl
  modified_base 13..15: mod_base = OTHER; note = 5-methyl
  source 1..19: mol_type = other RNA
gttctgtccaagcccggtt

SEQ ID NO: 441 - RNA, 18 nt, synthetic construct
  misc_feature 1..18: note = Description of Artificial Sequence: Synthetic Antisense oligonucleotide
  modified_base 4: mod_base = OTHER; note = 5-methyl
  modified_base 8..9: mod_base = OTHER; note = 5-methyl
  modified_base 13..15: mod_base = OTHER; note = 5-methyl
  source 1..18: mol_type = other RNA
gttctgtccaagcccggt

SEQ ID NO: 442 - RNA, 17 nt, synthetic construct
  misc_feature 1..17: note = Description of Artificial Sequence: Synthetic Antisense oligonucleotide
  modified_base 4: mod_base = OTHER; note = 5-methyl
  modified_base 8..9: mod_base = OTHER; note = 5-methyl
  modified_base 13..15: mod_base = OTHER; note = 5-methyl
  source 1..17: mol_type = other RNA
gttctgtccaagcccgg

SEQ ID NO: 443 - RNA, 16 nt, synthetic construct
  misc_feature 1..16: note = Description of Artificial Sequence: Synthetic Antisense oligonucleotide
  modified_base 4: mod_base = OTHER; note = 5-methyl
  modified_base 8..9: mod_base = OTHER; note = 5-methyl
  modified_base 13..15: mod_base = OTHER; note = 5-methyl
  source 1..16: mol_type = other RNA
gttctgtccaagcccg

SEQ ID NO: 444 - RNA, 15 nt, synthetic construct
  misc_feature 1..15: note = Description of Artificial Sequence: Synthetic Antisense oligonucleotide
  modified_base 4: mod_base = OTHER; note = 5-methyl
  modified_base 8..9: mod_base = OTHER; note = 5-methyl
  modified_base 13..15: mod_base = OTHER; note = 5-methyl
  source 1..15: mol_type = other RNA
gttctgtccaagccc

SEQ ID NO: 445 - RNA, 14 nt, synthetic construct
  misc_feature 1..14: note = Description of Artificial Sequence: Synthetic Antisense oligonucleotide
  modified_base 4: mod_base = OTHER; note = 5-methyl
  modified_base 8..9: mod_base = OTHER; note = 5-methyl
  modified_base 13..14: mod_base = OTHER; note = 5-methyl
  source 1..14: mol_type = other RNA
gttctgtccaagcc

SEQ ID NO: 446 - RNA, 13 nt, synthetic construct
  misc_feature 1..13: note = Description of Artificial Sequence: Synthetic Antisense oligonucleotide
  modified_base 4: mod_base = OTHER; note = 5-methyl
  modified_base 8..9: mod_base = OTHER; note = 5-methyl
  modified_base 13: mod_base = OTHER; note = 5-methyl
  source 1..13: mol_type = other RNA
gttctgtccaagc

SEQ ID NO: 447 - RNA, 12 nt, synthetic construct
  misc_feature 1..12: note = Description of Artificial Sequence: Synthetic Antisense oligonucleotide
  modified_base 4: mod_base = OTHER; note = 5-methyl
  modified_base 8..9: mod_base = OTHER; note = 5-methyl
  source 1..12: mol_type = other RNA
gttctgtccaag

SEQ ID NO: 448 - RNA, 11 nt, synthetic construct
  misc_feature 1..11: note = Description of Artificial Sequence: Synthetic Antisense oligonucleotide
  modified_base 4: mod_base = OTHER; note = 5-methyl
  modified_base 8..9: mod_base = OTHER; note = 5-methyl
  source 1..11: mol_type = other RNA
gttctgtccaa

SEQ ID NO: 449 - RNA, 10 nt, synthetic construct
  misc_feature 1..10: note = Description of Artificial Sequence: Synthetic Antisense oligonucleotide
  modified_base 4: mod_base = OTHER; note = 5-methyl
  modified_base 8..9: mod_base = OTHER; note = 5-methyl
  source 1..10: mol_type = other RNA
gttctgtcca

SEQ ID NO: 450-451 - skipped (2 entries)

SEQ ID NO: 452 - RNA, 20 nt, synthetic construct
  misc_feature 1..20: note = Description of Artificial Sequence: Synthetic Antisense oligonucleotide
  modified_base 5: mod_base = OTHER; note = 5-methyl
  modified_base 9..10: mod_base = OTHER; note = 5-methyl
  modified_base 14..16: mod_base = OTHER; note = 5-methyl
  source 1..20: mol_type = other RNA
agttctgtccaagcccggtt

SEQ ID NO: 453 - RNA, 19 nt, synthetic construct
  misc_feature 1..19: note = Description of Artificial Sequence: Synthetic Antisense oligonucleotide
  modified_base 5: mod_base = OTHER; note = 5-methyl
  modified_base 9..10: mod_base = OTHER; note = 5-methyl
  modified_base 14..16: mod_base = OTHER; note = 5-methyl
  source 1..19: mol_type = other RNA
agttctgtccaagcccggt

SEQ ID NO: 454 - RNA, 18 nt, synthetic construct
  misc_feature 1..18: note = Description of Artificial Sequence: Synthetic Antisense oligonucleotide
  modified_base 5: mod_base = OTHER; note = 5-methyl
  modified_base 9..10: mod_base = OTHER; note = 5-methyl
  modified_base 14..16: mod_base = OTHER; note = 5-methyl
  source 1..18: mol_type = other RNA
agttctgtccaagcccgg

SEQ ID NO: 455 - RNA, 17 nt, synthetic construct
  misc_feature 1..17: note = Description of Artificial Sequence: Synthetic Antisense oligonucleotide
  modified_base 5: mod_base = OTHER; note = 5-methyl
  modified_base 9..10: mod_base = OTHER; note = 5-methyl
  modified_base 14..16: mod_base = OTHER; note = 5-methyl
  source 1..17: mol_type = other RNA
agttctgtccaagcccg

SEQ ID NO: 456 - RNA, 16 nt, synthetic construct
  misc_feature 1..16: note = Description of Artificial Sequence: Synthetic Antisense oligonucleotide
  modified_base 5: mod_base = OTHER; note = 5-methyl
  modified_base 9..10: mod_base = OTHER; note = 5-methyl
  modified_base 14..16: mod_base = OTHER; note = 5-methyl
  source 1..16: mol_type = other RNA
agttctgtccaagccc

SEQ ID NO: 457 - RNA, 15 nt, synthetic construct
  misc_feature 1..15: note = Description of Artificial Sequence: Synthetic Antisense oligonucleotide
  modified_base 5: mod_base = OTHER; note = 5-methyl
  modified_base 9..10: mod_base = OTHER; note = 5-methyl
  modified_base 14..15: mod_base = OTHER; note = 5-methyl
  source 1..15: mol_type = other RNA
agttctgtccaagcc

SEQ ID NO: 458 - RNA, 14 nt, synthetic construct
  misc_feature 1..14: note = Description of Artificial Sequence: Synthetic Antisense oligonucleotide
  modified_base 5: mod_base = OTHER; note = 5-methyl
  modified_base 9..10: mod_base = OTHER; note = 5-methyl
  modified_base 14: mod_base = OTHER; note = 5-methyl
  source 1..14: mol_type = other RNA
agttctgtccaagc

SEQ ID NO: 459 - RNA, 13 nt, synthetic construct
  misc_feature 1..13: note = Description of Artificial Sequence: Synthetic Antisense oligonucleotide
  modified_base 5: mod_base = OTHER; note = 5-methyl
  modified_base 9..10: mod_base = OTHER; note = 5-methyl
  source 1..13: mol_type = other RNA
agttctgtccaag

SEQ ID NO: 460 - RNA, 12 nt, synthetic construct
  misc_feature 1..12: note = Description of Artificial Sequence: Synthetic Antisense oligonucleotide
  modified_base 5: mod_base = OTHER; note = 5-methyl
  modified_base 9..10: mod_base = OTHER; note = 5-methyl
  source 1..12: mol_type = other RNA
agttctgtccaa

SEQ ID NO: 461 - RNA, 11 nt, synthetic construct
  misc_feature 1..11: note = Description of Artificial Sequence: Synthetic Antisense oligonucleotide
  modified_base 5: mod_base = OTHER; note = 5-methyl
  modified_base 9..10: mod_base = OTHER; note = 5-methyl
  source 1..11: mol_type = other RNA
agttctgtcca

SEQ ID NO: 462 - RNA, 10 nt, synthetic construct
  misc_feature 1..10: note = Description of Artificial Sequence: Synthetic Antisense oligonucleotide
  modified_base 5: mod_base = OTHER; note = 5-methyl
  modified_base 9..10: mod_base = OTHER; note = 5-methyl
  source 1..10: mol_type = other RNA
agttctgtcc

SEQ ID NO: 463-464 - skipped (2 entries)

SEQ ID NO: 465 - RNA, 20 nt, synthetic construct
  misc_feature 1..20: note = Description of Artificial Sequence: Synthetic Antisense oligonucleotide
  modified_base 6: mod_base = OTHER; note = 5-methyl
  modified_base 10..11: mod_base = OTHER; note = 5-methyl
  modified_base 15..17: mod_base = OTHER; note = 5-methyl
  source 1..20: mol_type = other RNA
aagttctgtccaagcccggt

SEQ ID NO: 466 - RNA, 19 nt, synthetic construct
  misc_feature 1..19: note = Description of Artificial Sequence: Synthetic Antisense oligonucleotide
  modified_base 6: mod_base = OTHER; note = 5-methyl
  modified_base 10..11: mod_base = OTHER; note = 5-methyl
  modified_base 15..17: mod_base = OTHER; note = 5-methyl
  source 1..19: mol_type = other RNA
aagttctgtccaagcccgg

SEQ ID NO: 467 - RNA, 18 nt, synthetic construct
  misc_feature 1..18: note = Description of Artificial Sequence: Synthetic Antisense oligonucleotide
  modified_base 6: mod_base = OTHER; note = 5-methyl
  modified_base 10..11: mod_base = OTHER; note = 5-methyl
  modified_base 15..17: mod_base = OTHER; note = 5-methyl
  source 1..18: mol_type = other RNA
aagttctgtccaagcccg

SEQ ID NO: 468 - RNA, 17 nt, synthetic construct
  misc_feature 1..17: note = Description of Artificial Sequence: Synthetic Antisense oligonucleotide
  modified_base 6: mod_base = OTHER; note = 5-methyl
  modified_base 10..11: mod_base = OTHER; note = 5-methyl
  modified_base 15..17: mod_base = OTHER; note = 5-methyl
  source 1..17: mol_type = other RNA
aagttctgtccaagccc

SEQ ID NO: 469 - RNA, 16 nt, synthetic construct
  misc_feature 1..16: note = Description of Artificial Sequence: Synthetic Antisense oligonucleotide
  modified_base 6: mod_base = OTHER; note = 5-methyl
  modified_base 10..11: mod_base = OTHER; note = 5-methyl
  modified_base 15..16: mod_base = OTHER; note = 5-methyl
  source 1..16: mol_type = other RNA
aagttctgtccaagcc

SEQ ID NO: 470 - RNA, 15 nt, synthetic construct
  misc_feature 1..15: note = Description of Artificial Sequence: Synthetic Antisense oligonucleotide
  modified_base 6: mod_base = OTHER; note = 5-methyl
  modified_base 10..11: mod_base = OTHER; note = 5-methyl
  modified_base 15: mod_base = OTHER; note = 5-methyl
  source 1..15: mol_type = other RNA
aagttctgtccaagc

SEQ ID NO: 471 - RNA, 14 nt, synthetic construct
  misc_feature 1..14: note = Description of Artificial Sequence: Synthetic Antisense oligonucleotide
  modified_base 6: mod_base = OTHER; note = 5-methyl
  modified_base 10..11: mod_base = OTHER; note = 5-methyl
  source 1..14: mol_type = other RNA
aagttctgtccaag

SEQ ID NO: 472 - RNA, 13 nt, synthetic construct
  misc_feature 1..13: note = Description of Artificial Sequence: Synthetic Antisense oligonucleotide
  modified_base 6: mod_base = OTHER; note = 5-methyl
  modified_base 10..11: mod_base = OTHER; note = 5-methyl
  source 1..13: mol_type = other RNA
aagttctgtccaa

SEQ ID NO: 473 - RNA, 12 nt, synthetic construct
  misc_feature 1..12: note = Description of Artificial Sequence: Synthetic Antisense oligonucleotide
  modified_base 6: mod_base = OTHER; note = 5-methyl
  modified_base 10..11: mod_base = OTHER; note = 5-methyl
  source 1..12: mol_type = other RNA
aagttctgtcca

SEQ ID NO: 474 - RNA, 11 nt, synthetic construct
  misc_feature 1..11: note = Description of Artificial Sequence: Synthetic Antisense oligonucleotide
  modified_base 6: mod_base = OTHER; note = 5-methyl
  modified_base 10..11: mod_base = OTHER; note = 5-methyl
  source 1..11: mol_type = other RNA
aagttctgtcc

SEQ ID NO: 475 - RNA, 10 nt, synthetic construct
  misc_feature 1..10: note = Description of Artificial Sequence: Synthetic Antisense oligonucleotide
  modified_base 6: mod_base = OTHER; note = 5-methyl
  modified_base 10: mod_base = OTHER; note = 5-methyl
  source 1..10: mol_type = other RNA
aagttctgtc

SEQ ID NO: 476-477 - skipped (2 entries)

SEQ ID NO: 478 - RNA, 20 nt, synthetic construct
  misc_feature 1..20: note = Description of Artificial Sequence: Synthetic Antisense oligonucleotide
  modified_base 7: mod_base = OTHER; note = 5-methyl
  modified_base 11..12: mod_base = OTHER; note = 5-methyl
  modified_base 16..18: mod_base = OTHER; note = 5-methyl
  source 1..20: mol_type = other RNA
taagttctgtccaagcccgg

SEQ ID NO: 479 - RNA, 19 nt, synthetic construct
  misc_feature 1..19: note = Description of Artificial Sequence: Synthetic Antisense oligonucleotide
  modified_base 7: mod_base = OTHER; note = 5-methyl
  modified_base 11..12: mod_base = OTHER; note = 5-methyl
  modified_base 16..18: mod_base = OTHER; note = 5-methyl
  source 1..19: mol_type = other RNA
taagttctgtccaagcccg

SEQ ID NO: 480 - RNA, 18 nt, synthetic construct
  misc_feature 1..18: note = Description of Artificial Sequence: Synthetic Antisense oligonucleotide
  modified_base 7: mod_base = OTHER; note = 5-methyl
  modified_base 11..12: mod_base = OTHER; note = 5-methyl
  modified_base 16..18: mod_base = OTHER; note = 5-methyl
  source 1..18: mol_type = other RNA
taagttctgtccaagccc

SEQ ID NO: 481 - RNA, 17 nt, synthetic construct
  misc_feature 1..17: note = Description of Artificial Sequence: Synthetic Antisense oligonucleotide
  modified_base 7: mod_base = OTHER; note = 5-methyl
  modified_base 11..12: mod_base = OTHER; note = 5-methyl
  modified_base 16..17: mod_base = OTHER; note = 5-methyl
  source 1..17: mol_type = other RNA
taagttctgtccaagcc

SEQ ID NO: 482 - RNA, 16 nt, synthetic construct
  misc_feature 1..16: note = Description of Artificial Sequence: Synthetic Antisense oligonucleotide
  modified_base 7: mod_base = OTHER; note = 5-methyl
  modified_base 11..12: mod_base = OTHER; note = 5-methyl
  modified_base 16: mod_base = OTHER; note = 5-methyl
  source 1..16: mol_type = other RNA
taagttctgtccaagc

SEQ ID NO: 483 - RNA, 14 nt, synthetic construct
  misc_feature 1..14: note = Description of Artificial Sequence: Synthetic Antisense oligonucleotide
  modified_base 7: mod_base = OTHER; note = 5-methyl
  modified_base 11..12: mod_base = OTHER; note = 5-methyl
  source 1..14: mol_type = other RNA
taagttctgtccaa

SEQ ID NO: 484 - RNA, 13 nt, synthetic construct
  misc_feature 1..13: note = Description of Artificial Sequence: Synthetic Antisense oligonucleotide
  modified_base 7: mod_base = OTHER; note = 5-methyl
  modified_base 11..12: mod_base = OTHER; note = 5-methyl
  source 1..13: mol_type = other RNA
taagttctgtcca

SEQ ID NO: 485 - RNA, 12 nt, synthetic construct
  misc_feature 1..12: note = Description of Artificial Sequence: Synthetic Antisense oligonucleotide
  modified_base 7: mod_base = OTHER; note = 5-methyl
  modified_base 11..12: mod_base = OTHER; note = 5-methyl
  source 1..12: mol_type = other RNA
taagttctgtcc

SEQ ID NO: 486 - RNA, 11 nt, synthetic construct
  misc_feature 1..11: note = Description of Artificial Sequence: Synthetic Antisense oligonucleotide
  modified_base 7: mod_base = OTHER; note = 5-methyl
  modified_base 11: mod_base = OTHER; note = 5-methyl
  source 1..11: mol_type = other RNA
taagttctgtc

SEQ ID NO: 487 - RNA, 10 nt, synthetic construct
  misc_feature 1..10: note = Description of Artificial Sequence: Synthetic Antisense oligonucleotide
  modified_base 7: mod_base = OTHER; note = 5-methyl
  source 1..10: mol_type = other RNA
taagttctgt

SEQ ID NO: 488-489 - skipped (2 entries)

SEQ ID NO: 490 - RNA, 20 nt, synthetic construct
  misc_feature 1..20: note = Description of Artificial Sequence: Synthetic Antisense oligonucleotide
  modified_base 8: mod_base = OTHER; note = 5-methyl
  modified_base 12..13: mod_base = OTHER; note = 5-methyl
  modified_base 17..19: mod_base = OTHER; note = 5-methyl
  source 1..20: mol_type = other RNA
gtaagttctgtccaagcccg

SEQ ID NO: 491 - RNA, 19 nt, synthetic construct
  misc_feature 1..19: note = Description of Artificial Sequence: Synthetic Antisense oligonucleotide
  modified_base 8: mod_base = OTHER; note = 5-methyl
  modified_base 12..13: mod_base = OTHER; note = 5-methyl
  modified_base 17..19: mod_base = OTHER; note = 5-methyl
  source 1..19: mol_type = other RNA
gtaagttctgtccaagccc

SEQ ID NO: 492 - RNA, 17 nt, synthetic construct
  misc_feature 1..17: note = Description of Artificial Sequence: Synthetic Antisense oligonucleotide
  modified_base 8: mod_base = OTHER; note = 5-methyl
  modified_base 12..13: mod_base = OTHER; note = 5-methyl
  modified_base 17: mod_base = OTHER; note = 5-methyl
  source 1..17: mol_type = other RNA
gtaagttctgtccaagc

SEQ ID NO: 493 - RNA, 16 nt, synthetic construct
  misc_feature 1..16: note = Description of Artificial Sequence: Synthetic Antisense oligonucleotide
  modified_base 8: mod_base = OTHER; note = 5-methyl
  modified_base 12..13: mod_base = OTHER; note = 5-methyl
  source 1..16: mol_type = other RNA
gtaagttctgtccaag

SEQ ID NO: 494 - RNA, 15 nt, synthetic construct
  misc_feature 1..15: note = Description of Artificial Sequence: Synthetic Antisense oligonucleotide
  modified_base 8: mod_base = OTHER; note = 5-methyl
  modified_base 12..13: mod_base = OTHER; note = 5-methyl
  source 1..15: mol_type = other RNA
gtaagttctgtccaa

SEQ ID NO: 495 - RNA, 14 nt, synthetic construct
  misc_feature 1..14: note = Description of Artificial Sequence: Synthetic Antisense oligonucleotide
  modified_base 8: mod_base = OTHER; note = 5-methyl
  modified_base 12..13: mod_base = OTHER; note = 5-methyl
  source 1..14: mol_type = other RNA
gtaagttctgtcca

SEQ ID NO: 496 - RNA, 13 nt, synthetic construct
  misc_feature 1..13: note = Description of Artificial Sequence: Synthetic Antisense oligonucleotide
  modified_base 8: mod_base = OTHER; note = 5-methyl
  modified_base 12..13: mod_base = OTHER; note = 5-methyl
  source 1..13: mol_type = other RNA
gtaagttctgtcc

SEQ ID NO: 497 - RNA, 12 nt, synthetic construct
  misc_feature 1..12: note = Description of Artificial Sequence: Synthetic Antisense oligonucleotide
  modified_base 8: mod_base = OTHER; note = 5-methyl
  modified_base 12: mod_base = OTHER; note = 5-methyl
  source 1..12: mol_type = other RNA
gtaagttctgtc

SEQ ID NO: 498 - RNA, 11 nt, synthetic construct
  misc_feature 1..11: note = Description of Artificial Sequence: Synthetic Antisense oligonucleotide
  modified_base 8: mod_base = OTHER; note = 5-methyl
  source 1..11: mol_type = other RNA
gtaagttctgt

SEQ ID NO: 499 - RNA, 10 nt, synthetic construct
  misc_feature 1..10: note = Description of Artificial Sequence: Synthetic Antisense oligonucleotide
  modified_base 8: mod_base = OTHER; note = 5-methyl
  source 1..10: mol_type = other RNA
gtaagttctg

SEQ ID NO: 500-501 - skipped (2 entries)

SEQ ID NO: 502 - RNA, 20 nt, synthetic construct
  misc_feature 1..20: note = Description of Artificial Sequence: Synthetic Antisense oligonucleotide
  modified_base 9: mod_base = OTHER; note = 5-methyl
  modified_base 13..14: mod_base = OTHER; note = 5-methyl
  modified_base 18..20: mod_base = OTHER; note = 5-methyl
  source 1..20: mol_type = other RNA
ggtaagttctgtccaagccc

SEQ ID NO: 503 - RNA, 19 nt, synthetic construct
  misc_feature 1..19: note = Description of Artificial Sequence: Synthetic Antisense oligonucleotide
  modified_base 9: mod_base = OTHER; note = 5-methyl
  modified_base 13..14: mod_base = OTHER; note = 5-methyl
  modified_base 18..19: mod_base = OTHER; note = 5-methyl
  source 1..19: mol_type = other RNA
ggtaagttctgtccaagcc

SEQ ID NO: 504 - RNA, 17 nt, synthetic construct
  misc_feature 1..17: note = Description of Artificial Sequence: Synthetic Antisense oligonucleotide
  modified_base 9: mod_base = OTHER; note = 5-methyl
  modified_base 13..14: mod_base = OTHER; note = 5-methyl
  source 1..17: mol_type = other RNA
ggtaagttctgtccaag

SEQ ID NO: 505 - RNA, 16 nt, synthetic construct
  misc_feature 1..16: note = Description of Artificial Sequence: Synthetic Antisense oligonucleotide
  modified_base 9: mod_base = OTHER; note = 5-methyl
  modified_base 13..14: mod_base = OTHER; note = 5-methyl
  source 1..16: mol_type = other RNA
ggtaagttctgtccaa

SEQ ID NO: 506 - RNA, 15 nt, synthetic construct
  misc_feature 1..15: note = Description of Artificial Sequence: Synthetic Antisense oligonucleotide
  modified_base 9: mod_base = OTHER; note = 5-methyl
  modified_base 13..14: mod_base = OTHER; note = 5-methyl
  source 1..15: mol_type = other RNA
ggtaagttctgtcca

SEQ ID NO: 507 - RNA, 14 nt, synthetic construct
  misc_feature 1..14: note = Description of Artificial Sequence: Synthetic Antisense oligonucleotide
  modified_base 9: mod_base = OTHER; note = 5-methyl
  modified_base 13..14: mod_base = OTHER; note = 5-methyl
  source 1..14: mol_type = other RNA
ggtaagttctgtcc

SEQ ID NO: 508 - RNA, 13 nt, synthetic construct
  misc_feature 1..13: note = Description of Artificial Sequence: Synthetic Antisense oligonucleotide
  modified_base 9: mod_base = OTHER; note = 5-methyl
  modified_base 13: mod_base = OTHER; note = 5-methyl
  source 1..13: mol_type = other RNA
ggtaagttctgtc

SEQ ID NO: 509 - RNA, 12 nt, synthetic construct
  misc_feature 1..12: note = Description of Artificial Sequence: Synthetic Antisense oligonucleotide
  modified_base 9: mod_base = OTHER; note = 5-methyl
  source 1..12: mol_type = other RNA
ggtaagttctgt

SEQ ID NO: 510 - RNA, 11 nt, synthetic construct
  misc_feature 1..11: note = Description of Artificial Sequence: Synthetic Antisense oligonucleotide
  modified_base 9: mod_base = OTHER; note = 5-methyl
  source 1..11: mol_type = other RNA
ggtaagttctg

SEQ ID NO: 511 - RNA, 10 nt, synthetic construct
  misc_feature 1..10: note = Description of Artificial Sequence: Synthetic Antisense oligonucleotide
  modified_base 9: mod_base = OTHER; note = 5-methyl
  source 1..10: mol_type = other RNA
ggtaagttct

SEQ ID NO: 512 - skipped

SEQ ID NO: 513 - RNA, 20 nt, synthetic construct
  misc_feature 1..20: note = Description of Artificial Sequence: Synthetic Antisense oligonucleotide
  modified_base 1: mod_base = OTHER; note = 5-methyl
  modified_base 10: mod_base = OTHER; note = 5-methyl
  modified_base 14..15: mod_base = OTHER; note = 5-methyl
  modified_base 19..20: mod_base = OTHER; note = 5-methyl
  source 1..20: mol_type = other RNA
cggtaagttctgtccaagcc

SEQ ID NO: 514 - RNA, 19 nt, synthetic construct
  misc_feature 1..19: note = Description of Artificial Sequence: Synthetic Antisense oligonucleotide
  modified_base 1: mod_base = OTHER; note = 5-methyl
  modified_base 10: mod_base = OTHER; note = 5-methyl
  modified_base 14..15: mod_base = OTHER; note = 5-methyl
  modified_base 19: mod_base = OTHER; note = 5-methyl
  source 1..19: mol_type = other RNA
cggtaagttctgtccaagc

SEQ ID NO: 515 - RNA, 18 nt, synthetic construct
  misc_feature 1..18: note = Description of Artificial Sequence: Synthetic Antisense oligonucleotide
  modified_base 1: mod_base = OTHER; note = 5-methyl
  modified_base 10: mod_base = OTHER; note = 5-methyl
  modified_base 14..15: mod_base = OTHER; note = 5-methyl
  source 1..18: mol_type = other RNA
cggtaagttctgtccaag

SEQ ID NO: 516 - RNA, 17 nt, synthetic construct
  misc_feature 1..17: note = Description of Artificial Sequence: Synthetic Antisense oligonucleotide
  modified_base 1: mod_base = OTHER; note = 5-methyl
  modified_base 10: mod_base = OTHER; note = 5-methyl
  modified_base 14..15: mod_base = OTHER; note = 5-methyl
  source 1..17: mol_type = other RNA
cggtaagttctgtccaa

SEQ ID NO: 517 - RNA, 16 nt, synthetic construct
  misc_feature 1..16: note = Description of Artificial Sequence: Synthetic Antisense oligonucleotide
  modified_base 1: mod_base = OTHER; note = 5-methyl
  modified_base 10: mod_base = OTHER; note = 5-methyl
  modified_base 14..15: mod_base = OTHER; note = 5-methyl
  source 1..16: mol_type = other RNA
cggtaagttctgtcca

SEQ ID NO: 518 - RNA, 15 nt, synthetic construct
  misc_feature 1..15: note = Description of Artificial Sequence: Synthetic Antisense oligonucleotide
  modified_base 1: mod_base = OTHER; note = 5-methyl
  modified_base 10: mod_base = OTHER; note = 5-methyl
  modified_base 14..15: mod_base = OTHER; note = 5-methyl
  source 1..15: mol_type = other RNA
cggtaagttctgtcc

SEQ ID NO: 519 - RNA, 14 nt, synthetic construct
  misc_feature 1..14: note = Description of Artificial Sequence: Synthetic Antisense oligonucleotide
  modified_base 1: mod_base = OTHER; note = 5-methyl
  modified_base 10: mod_base = OTHER; note = 5-methyl
  modified_base 14: mod_base = OTHER; note = 5-methyl
  source 1..14: mol_type = other RNA
cggtaagttctgtc

SEQ ID NO: 520 - RNA, 13 nt, synthetic construct
  misc_feature 1..13: note = Description of Artificial Sequence: Synthetic Antisense oligonucleotide
  modified_base 1: mod_base = OTHER; note = 5-methyl
  modified_base 10: mod_base = OTHER; note = 5-methyl
  source 1..13: mol_type = other RNA
cggtaagttctgt

SEQ ID NO: 521 - RNA, 12 nt, synthetic construct
  misc_feature 1..12: note = Description of Artificial Sequence: Synthetic Antisense oligonucleotide
  modified_base 1: mod_base = OTHER; note = 5-methyl
  modified_base 10: mod_base = OTHER; note = 5-methyl
  source 1..12: mol_type = other RNA
cggtaagttctg

SEQ ID NO: 522 - RNA, 11 nt, synthetic construct
  misc_feature 1..11: note = Description of Artificial Sequence: Synthetic Antisense oligonucleotide
  modified_base 1: mod_base = OTHER; note = 5-methyl
  modified_base 10: mod_base = OTHER; note = 5-methyl
  source 1..11: mol_type = other RNA
cggtaagttct

SEQ ID NO: 523 - RNA, 10 nt, synthetic construct
  misc_feature 1..10: note = Description of Artificial Sequence: Synthetic Antisense oligonucleotide
  modified_base 1: mod_base = OTHER; note = 5-methyl
  modified_base 10: mod_base = OTHER; note = 5-methyl
  source 1..10: mol_type = other RNA
cggtaagttc

SEQ ID NO: 524-525 - skipped (2 entries)

SEQ ID NO: 526 - RNA, 20 nt, synthetic construct
  misc_feature 1..20: note = Description of Artificial Sequence: Synthetic Antisense oligonucleotide
  modified_base 2: mod_base = OTHER; note = 5-methyl
  modified_base 11: mod_base = OTHER; note = 5-methyl
  modified_base 15..16: mod_base = OTHER; note = 5-methyl
  modified_base 20: mod_base = OTHER; note = 5-methyl
  source 1..20: mol_type = other RNA
tcggtaagttctgtccaagc

SEQ ID NO: 527 - RNA, 19 nt, synthetic construct
  misc_feature 1..19: note = Description of Artificial Sequence: Synthetic Antisense oligonucleotide
  modified_base 2: mod_base = OTHER; note = 5-methyl
  modified_base 11: mod_base = OTHER; note = 5-methyl
  modified_base 15..16: mod_base = OTHER; note = 5-methyl
  source 1..19: mol_type = other RNA
tcggtaagttctgtccaag

SEQ ID NO: 528 - RNA, 18 nt, synthetic construct
  misc_feature 1..18: note = Description of Artificial Sequence: Synthetic Antisense oligonucleotide
  modified_base 2: mod_base = OTHER; note = 5-methyl
  modified_base 11: mod_base = OTHER; note = 5-methyl
  modified_base 15..16: mod_base = OTHER; note = 5-methyl
  source 1..18: mol_type = other RNA
tcggtaagttctgtccaa

SEQ ID NO: 529 - RNA, 17 nt, synthetic construct
  misc_feature 1..17: note = Description of Artificial Sequence: Synthetic Antisense oligonucleotide
  modified_base 2: mod_base = OTHER; note = 5-methyl
  modified_base 11: mod_base = OTHER; note = 5-methyl
  modified_base 15..16: mod_base = OTHER; note = 5-methyl
  source 1..17: mol_type = other RNA
tcggtaagttctgtcca

SEQ ID NO: 530 - RNA, 16 nt, synthetic construct
  misc_feature 1..16: note = Description of Artificial Sequence: Synthetic Antisense oligonucleotide
  modified_base 2: mod_base = OTHER; note = 5-methyl
  modified_base 11: mod_base = OTHER; note = 5-methyl
  modified_base 15..16: mod_base = OTHER; note = 5-methyl
  source 1..16: mol_type = other RNA
tcggtaagttctgtcc

SEQ ID NO: 531 - RNA, 15 nt, synthetic construct
  misc_feature 1..15: note = Description of Artificial Sequence: Synthetic Antisense oligonucleotide
  modified_base 2: mod_base = OTHER; note = 5-methyl
  modified_base 11: mod_base = OTHER; note = 5-methyl
  modified_base 15: mod_base = OTHER; note = 5-methyl
  source 1..15: mol_type = other RNA
tcggtaagttctgtc

SEQ ID NO: 532 - RNA, 14 nt, synthetic construct
  misc_feature 1..14: note = Description of Artificial Sequence: Synthetic Antisense oligonucleotide
  modified_base 2: mod_base = OTHER; note = 5-methyl
  modified_base 11: mod_base = OTHER; note = 5-methyl
  source 1..14: mol_type = other RNA
tcggtaagttctgt

SEQ ID NO: 533 - RNA, 13 nt, synthetic construct
  misc_feature 1..13: note = Description of Artificial Sequence: Synthetic Antisense oligonucleotide
  modified_base 2: mod_base = OTHER; note = 5-methyl
  modified_base 11: mod_base = OTHER; note = 5-methyl
  source 1..13: mol_type = other RNA
tcggtaagttctg

SEQ ID NO: 534 - RNA, 12 nt, synthetic construct
  misc_feature 1..12: note = Description of Artificial Sequence: Synthetic Antisense oligonucleotide
  modified_base 2: mod_base = OTHER; note = 5-methyl
  modified_base 11: mod_base = OTHER; note = 5-methyl
  source 1..12: mol_type = other RNA
tcggtaagttct

SEQ ID NO: 535 - RNA, 11 nt, synthetic construct
  misc_feature 1..11: note = Description of Artificial Sequence: Synthetic Antisense oligonucleotide
  modified_base 2: mod_base = OTHER; note = 5-methyl
  modified_base 11: mod_base = OTHER; note = 5-methyl
  source 1..11: mol_type = other RNA
tcggtaagttc

SEQ ID NO: 536 - RNA, 10 nt, synthetic construct
  misc_feature 1..10: note = Description of Artificial Sequence: Synthetic Antisense oligonucleotide
  modified_base 2: mod_base = OTHER; note = 5-methyl
  source 1..10: mol_type = other RNA
tcggtaagtt

SEQ ID NO: 537 - skipped

SEQ ID NO: 538 - RNA, 20 nt, synthetic construct
  misc_feature 1..20: note = Description of Artificial Sequence: Synthetic Antisense oligonucleotide
  modified_base 3: mod_base = OTHER; note = 5-methyl
  modified_base 12: mod_base = OTHER; note = 5-methyl
  modified_base 16..17: mod_base = OTHER; note = 5-methyl
  source 1..20: mol_type = other RNA
gtcggtaagttctgtccaag

SEQ ID NO: 539 - RNA, 19 nt, synthetic construct
  misc_feature 1..19: note = Description of Artificial Sequence: Synthetic Antisense oligonucleotide
  modified_base 3: mod_base = OTHER; note = 5-methyl
  modified_base 12: mod_base = OTHER; note = 5-methyl
  modified_base 16..17: mod_base = OTHER; note = 5-methyl
  source 1..19: mol_type = other RNA
gtcggtaagttctgtccaa

SEQ ID NO: 540 - RNA, 18 nt, synthetic construct
  misc_feature 1..18: note = Description of Artificial Sequence: Synthetic Antisense oligonucleotide
  modified_base 3: mod_base = OTHER; note = 5-methyl
  modified_base 12: mod_base = OTHER; note = 5-methyl
  modified_base 16..17: mod_base = OTHER; note = 5-methyl
  source 1..18: mol_type = other RNA
gtcggtaagttctgtcca

SEQ ID NO: 541 - RNA, 17 nt, synthetic construct
  misc_feature 1..17: note = Description of Artificial Sequence: Synthetic Antisense oligonucleotide
  modified_base 3: mod_base = OTHER; note = 5-methyl
  modified_base 12: mod_base = OTHER; note = 5-methyl
  modified_base 16..17: mod_base = OTHER; note = 5-methyl
  source 1..17: mol_type = other RNA
gtcggtaagttctgtcc

SEQ ID NO: 542 - RNA, 16 nt, synthetic construct
  misc_feature 1..16: note = Description of Artificial Sequence: Synthetic Antisense oligonucleotide
  modified_base 3: mod_base = OTHER; note = 5-methyl
  modified_base 12: mod_base = OTHER; note = 5-methyl
  modified_base 16: mod_base = OTHER; note = 5-methyl
  source 1..16: mol_type = other RNA
gtcggtaagttctgtc

SEQ ID NO: 543 - RNA, 15 nt, synthetic construct
  misc_feature 1..15: note = Description of Artificial Sequence: Synthetic Antisense oligonucleotide
  modified_base 3: mod_base = OTHER; note = 5-methyl
  modified_base 12: mod_base = OTHER; note = 5-methyl
  source 1..15: mol_type = other RNA
gtcggtaagttctgt

SEQ ID NO: 544 - RNA, 14 nt, synthetic construct
  misc_feature 1..14: note = Description of Artificial Sequence: Synthetic Antisense oligonucleotide
  modified_base 3: mod_base = OTHER; note = 5-methyl
  modified_base 12: mod_base = OTHER; note = 5-methyl
  source 1..14: mol_type = other RNA
gtcggtaagttctg

SEQ ID NO: 545 - RNA, 13 nt, synthetic construct
  misc_feature 1..13: note = Description of Artificial Sequence: Synthetic Antisense oligonucleotide
  modified_base 3: mod_base = OTHER; note = 5-methyl
  modified_base 12: mod_base = OTHER; note = 5-methyl
  source 1..13: mol_type = other RNA
gtcggtaagttct

SEQ ID NO: 546 - RNA, 12 nt, synthetic construct
  misc_feature 1..12: note = Description of Artificial Sequence: Synthetic Antisense oligonucleotide
  modified_base 3: mod_base = OTHER; note = 5-methyl
  modified_base 12: mod_base = OTHER; note = 5-methyl
  source 1..12: mol_type = other RNA
gtcggtaagttc

SEQ ID NO: 547 - RNA, 11 nt, synthetic construct
  misc_feature 1..11: note = Description of Artificial Sequence: Synthetic Antisense oligonucleotide
  modified_base 3: mod_base = OTHER; note = 5-methyl
  source 1..11: mol_type = other RNA
gtcggtaagtt

SEQ ID NO: 548 - RNA, 10 nt, synthetic construct
  misc_feature 1..10: note = Description of Artificial Sequence: Synthetic Antisense oligonucleotide
  modified_base 3: mod_base = OTHER; note = 5-methyl
  source 1..10: mol_type = other RNA
gtcggtaagt

SEQ ID NO: 549 - RNA, 20 nt, synthetic construct
  misc_feature 1..20: note = Description of Artificial Sequence: Synthetic Antisense oligonucleotide
  modified_base 4: mod_base = OTHER; note = 5-methyl
  modified_base 13: mod_base = OTHER; note = 5-methyl
  modified_base 17..18: mod_base = OTHER; note = 5-methyl
  source 1..20: mol_type = other RNA
agtcggtaagttctgtccaa

SEQ ID NO: 550 - RNA, 19 nt, synthetic construct
  misc_feature 1..19: note = Description of Artificial Sequence: Synthetic Antisense oligonucleotide
  modified_base 4: mod_base = OTHER; note = 5-methyl
  modified_base 13: mod_base = OTHER; note = 5-methyl
  modified_base 17..18: mod_base = OTHER; note = 5-methyl
  source 1..19: mol_type = other RNA
agtcggtaagttctgtcca

SEQ ID NO: 551 - RNA, 17 nt, synthetic construct
  misc_feature 1..17: note = Description of Artificial Sequence: Synthetic Antisense oligonucleotide
  modified_base 4: mod_base = OTHER; note = 5-methyl
  modified_base 13: mod_base = OTHER; note = 5-methyl
  modified_base 17: mod_base = OTHER; note = 5-methyl
  source 1..17: mol_type = other RNA
agtcggtaagttctgtc

SEQ ID NO: 552 - RNA, 16 nt, synthetic construct
  misc_feature 1..16: note = Description of Artificial Sequence: Synthetic Antisense oligonucleotide
  modified_base 4: mod_base = OTHER; note = 5-methyl
  modified_base 13: mod_base = OTHER; note = 5-methyl
  source 1..16: mol_type = other RNA
agtcggtaagttctgt

SEQ ID NO: 553 - RNA, 15 nt, synthetic construct
  misc_feature 1..15: note = Description of Artificial Sequence: Synthetic Antisense oligonucleotide
  modified_base 4: mod_base = OTHER; note = 5-methyl
  modified_base 13: mod_base = OTHER; note = 5-methyl
  source 1..15: mol_type = other RNA
agtcggtaagttctg

SEQ ID NO: 554 - RNA, 14 nt, synthetic construct
  misc_feature 1..14: note = Description of Artificial Sequence: Synthetic Antisense oligonucleotide
  modified_base 4: mod_base = OTHER; note = 5-methyl
  modified_base 13: mod_base = OTHER; note = 5-methyl
  source 1..14: mol_type = other RNA
agtcggtaagttct

SEQ ID NO: 555 - RNA, 13 nt, synthetic construct
  misc_feature 1..13: note = Description of Artificial Sequence: Synthetic Antisense oligonucleotide
  modified_base 4: mod_base = OTHER; note = 5-methyl
  modified_base 13: mod_base = OTHER; note = 5-methyl
  source 1..13: mol_type = other RNA
agtcggtaagttc

SEQ ID NO: 556 - RNA, 12 nt, synthetic construct
  misc_feature 1..12: note = Description of Artificial Sequence: Synthetic Antisense oligonucleotide
  modified_base 4: mod_base = OTHER; note = 5-methyl
  source 1..12: mol_type = other RNA
agtcggtaagtt

SEQ ID NO: 557 - RNA, 11 nt, synthetic construct
  misc_feature 1..11: note = Description of Artificial Sequence: Synthetic Antisense oligonucleotide
  modified_base 4: mod_base = OTHER; note = 5-methyl
  source 1..11: mol_type = other RNA
agtcggtaagt

SEQ ID NO: 558 - RNA, 20 nt, synthetic construct
  misc_feature 1..20: note = Description of Artificial Sequence: Synthetic Antisense oligonucleotide
  modified_base 1: mod_base = OTHER; note = 5-methyl
  modified_base 5: mod_base = OTHER; note = 5-methyl
  modified_base 14: mod_base = OTHER; note = 5-methyl
  modified_base 18..19: mod_base = OTHER; note = 5-methyl
  source 1..20: mol_type = other RNA
cagtcggtaagttctgtcca

SEQ ID NO: 559 - RNA, 19 nt, synthetic construct
  misc_feature 1..19: note = Description of Artificial Sequence: Synthetic Antisense oligonucleotide
  modified_base 1: mod_base = OTHER; note = 5-methyl
  modified_base 5: mod_base = OTHER; note = 5-methyl
  modified_base 14: mod_base = OTHER; note = 5-methyl
  modified_base 18..19: mod_base = OTHER; note = 5-methyl
  source 1..19: mol_type = other RNA
cagtcggtaagttctgtcc

SEQ ID NO: 560 - RNA, 18 nt, synthetic construct
  misc_feature 1..18: note = Description of Artificial Sequence: Synthetic Antisense oligonucleotide
  modified_base 1: mod_base = OTHER; note = 5-methyl
  modified_base 5: mod_base = OTHER; note = 5-methyl
  modified_base 14: mod_base = OTHER; note = 5-methyl
  modified_base 18: mod_base = OTHER; note = 5-methyl
  source 1..18: mol_type = other RNA
cagtcggtaagttctgtc

SEQ ID NO: 561 - RNA, 17 nt, synthetic construct
  misc_feature 1..17: note = Description of Artificial Sequence: Synthetic Antisense oligonucleotide
  modified_base 1: mod_base = OTHER; note = 5-methyl
  modified_base 5: mod_base = OTHER; note = 5-methyl
  modified_base 14: mod_base = OTHER; note = 5-methyl
  source 1..17: mol_type = other RNA
cagtcggtaagttctgt

SEQ ID NO: 562 - RNA, 16 nt, synthetic construct
  misc_feature 1..16: note = Description of Artificial Sequence: Synthetic Antisense oligonucleotide
  modified_base 1: mod_base = OTHER; note = 5-methyl
  modified_base 5: mod_base = OTHER; note = 5-methyl
  modified_base 14: mod_base = OTHER; note = 5-methyl
  source 1..16: mol_type = other RNA
cagtcggtaagttctg

SEQ ID NO: 563 - RNA, 15 nt, synthetic construct
  misc_feature 1..15: note = Description of Artificial Sequence: Synthetic Antisense oligonucleotide
  modified_base 1: mod_base = OTHER; note = 5-methyl
  modified_base 5: mod_base = OTHER; note = 5-methyl
  modified_base 14: mod_base = OTHER; note = 5-methyl
  source 1..15: mol_type = other RNA
cagtcggtaagttct

SEQ ID NO: 564 - RNA, 14 nt, synthetic construct
  misc_feature 1..14: note = Description of Artificial Sequence: Synthetic Antisense oligonucleotide
  modified_base 1: mod_base = OTHER; note = 5-methyl
  modified_base 5: mod_base = OTHER; note = 5-methyl
  modified_base 14: mod_base = OTHER; note = 5-methyl
  source 1..14: mol_type = other RNA
cagtcggtaagttc

SEQ ID NO: 565 - RNA, 13 nt, synthetic construct
  misc_feature 1..13: note = Description of Artificial Sequence: Synthetic Antisense oligonucleotide
  modified_base 1: mod_base = OTHER; note = 5-methyl
  modified_base 5: mod_base = OTHER; note = 5-methyl
  source 1..13: mol_type = other RNA
cagtcggtaagtt

SEQ ID NO: 566 - RNA, 12 nt, synthetic construct
  misc_feature 1..12: note = Description of Artificial Sequence: Synthetic Antisense oligonucleotide
  modified_base 1: mod_base = OTHER; note = 5-methyl
  modified_base 5: mod_base = OTHER; note = 5-methyl
  source 1..12: mol_type = other RNA
cagtcggtaagt

SEQ ID NO: 567 - RNA, 20 nt, synthetic construct
  misc_feature 1..20: note = Description of Artificial Sequence: Synthetic Antisense oligonucleotide
  modified_base 1..2: mod_base = OTHER; note = 5-methyl
  modified_base 6: mod_base = OTHER; note = 5-methyl
  modified_base 15: mod_base = OTHER; note = 5-methyl
  modified_base 19..20: mod_base = OTHER; note = 5-methyl
  source 1..20: mol_type = other RNA
ccagtcggtaagttctgtcc

SEQ ID NO: 568 - RNA, 19 nt, synthetic construct
  misc_feature 1..19: note = Description of Artificial Sequence: Synthetic Antisense oligonucleotide
  modified_base 1..2: mod_base = OTHER; note = 5-methyl
  modified_base 6: mod_base = OTHER; note = 5-methyl
  modified_base 15: mod_base = OTHER; note = 5-methyl
  modified_base 19: mod_base = OTHER; note = 5-methyl
  source 1..19: mol_type = other RNA
ccagtcggtaagttctgtc

SEQ ID NO: 569 - RNA, 18 nt, synthetic construct
  misc_feature 1..18: note = Description of Artificial Sequence: Synthetic Antisense oligonucleotide
  modified_base 1..2: mod_base = OTHER; note = 5-methyl
  modified_base 6: mod_base = OTHER; note = 5-methyl
  modified_base 15: mod_base = OTHER; note = 5-methyl
  source 1..18: mol_type = other RNA
ccagtcggtaagttctgt

SEQ ID NO: 570 - RNA, 17 nt, synthetic construct
  misc_feature 1..17: note = Description of Artificial Sequence: Synthetic Antisense oligonucleotide
  modified_base 1..2: mod_base = OTHER; note = 5-methyl
  modified_base 6: mod_base = OTHER; note = 5-methyl
  modified_base 15: mod_base = OTHER; note = 5-methyl
  source 1..17: mol_type = other RNA
ccagtcggtaagttctg

SEQ ID NO: 571 - RNA, 16 nt, synthetic construct
  misc_feature 1..16: note = Description of Artificial Sequence: Synthetic Antisense oligonucleotide
  modified_base 1..2: mod_base = OTHER; note = 5-methyl
  modified_base 6: mod_base = OTHER; note = 5-methyl
  modified_base 15: mod_base = OTHER; note = 5-methyl
  source 1..16: mol_type = other RNA
ccagtcggtaagttct

SEQ ID NO: 572 - RNA, 15 nt, synthetic construct
  misc_feature 1..15: note = Description of Artificial Sequence: Synthetic Antisense oligonucleotide
  modified_base 1..2: mod_base = OTHER; note = 5-methyl
  modified_base 6: mod_base = OTHER; note = 5-methyl
  modified_base 15: mod_base = OTHER; note = 5-methyl
  source 1..15: mol_type = other RNA
ccagtcggtaagttc

SEQ ID NO: 573 - RNA, 14 nt, synthetic construct
  misc_feature 1..14: note = Description of Artificial Sequence: Synthetic Antisense oligonucleotide
  modified_base 1..2: mod_base = OTHER; note = 5-methyl
  modified_base 6: mod_base = OTHER; note = 5-methyl
  source 1..14: mol_type = other RNA
ccagtcggtaagtt

SEQ ID NO: 574 - RNA, 13 nt, synthetic construct
  misc_feature 1..13: note = Description of Artificial Sequence: Synthetic Antisense oligonucleotide
  modified_base 1..2: mod_base = OTHER; note = 5-methyl
  modified_base 6: mod_base = OTHER; note = 5-methyl
  source 1..13: mol_type = other RNA
ccagtcggtaagt

SEQ ID NO: 575 - RNA, 20 nt, synthetic construct
  misc_feature 1..20: note = Description of Artificial Sequence: Synthetic Antisense oligonucleotide
  modified_base 2..3: mod_base = OTHER; note = 5-methyl
  modified_base 7: mod_base = OTHER; note = 5-methyl
  modified_base 16: mod_base = OTHER; note = 5-methyl
  modified_base 20: mod_base = OTHER; note = 5-methyl
  source 1..20: mol_type = other RNA
gccagtcggtaagttctgtc

SEQ ID NO: 576 - RNA, 19 nt, synthetic construct
  misc_feature 1..19: note = Description of Artificial Sequence: Synthetic Antisense oligonucleotide
  modified_base 2..3: mod_base = OTHER; note = 5-methyl
  modified_base 7: mod_base = OTHER; note = 5-methyl
  modified_base 16: mod_base = OTHER; note = 5-methyl
  source 1..19: mol_type = other RNA
gccagtcggtaagttctgt

SEQ ID NO: 577 - RNA, 18 nt, synthetic construct
  misc_feature 1..18: note = Description of Artificial Sequence: Synthetic Antisense oligonucleotide
  modified_base 2..3: mod_base = OTHER; note = 5-methyl
  modified_base 7: mod_base = OTHER; note = 5-methyl
  modified_base 16: mod_base = OTHER; note = 5-methyl
  source 1..18: mol_type = other RNA
gccagtcggtaagttctg

SEQ ID NO: 578 - RNA, 17 nt, synthetic construct
  misc_feature 1..17: note = Description of Artificial Sequence: Synthetic Antisense oligonucleotide
  modified_base 2..3: mod_base = OTHER; note = 5-methyl
  modified_base 7: mod_base = OTHER; note = 5-methyl
  modified_base 16: mod_base = OTHER; note = 5-methyl
  source 1..17: mol_type = other RNA
gccagtcggtaagttct

SEQ ID NO: 579 - RNA, 16 nt, synthetic construct
  misc_feature 1..16: note = Description of Artificial Sequence: Synthetic Antisense oligonucleotide
  modified_base 2..3: mod_base = OTHER; note = 5-methyl
  modified_base 7: mod_base = OTHER; note = 5-methyl
  modified_base 16: mod_base = OTHER; note = 5-methyl
  source 1..16: mol_type = other RNA
gccagtcggtaagttc

SEQ ID NO: 580 - RNA, 15 nt, synthetic construct
  misc_feature 1..15: note = Description of Artificial Sequence: Synthetic Antisense oligonucleotide
  modified_base 2..3: mod_base = OTHER; note = 5-methyl
  modified_base 7: mod_base = OTHER; note = 5-methyl
  source 1..15: mol_type = other RNA
gccagtcggtaagtt

SEQ ID NO: 581 - RNA, 14 nt, synthetic construct
  misc_feature 1..14: note = Description of Artificial Sequence: Synthetic Antisense oligonucleotide
  modified_base 2..3: mod_base = OTHER; note = 5-methyl
  modified_base 7: mod_base = OTHER; note = 5-methyl
  source 1..14: mol_type = other RNA
gccagtcggtaagt

SEQ ID NO: 582 - RNA, 20 nt, synthetic construct
  misc_feature 1..20: note = Description of Artificial Sequence: Synthetic Antisense oligonucleotide
  modified_base 2: mod_base = OTHER; note = 5-methyl
  modified_base 14: mod_base = OTHER; note = 5-methyl
  modified_base 19: mod_base = OTHER; note = 5-methyl
  source 1..20: mol_type = other RNA
tcaaggaagatggcatttct

SEQ ID NO: 583 - RNA, 22 nt, synthetic construct
  misc_feature 1..22: note = Description of Artificial Sequence: Synthetic Antisense oligonucleotide
  modified_base 2: mod_base = OTHER; note = 5-methyl
  modified_base 14: mod_base = OTHER; note = 5-methyl
  modified_base 19: mod_base = OTHER; note = 5-methyl
  source 1..22: mol_type = other RNA
tcaaggaagatggcatttctag

SEQ ID NO: 584 - RNA, 16 nt, synthetic construct
  misc_feature 1..16: note = Description of Artificial Sequence: Synthetic Antisense oligonucleotide
  modified_base 2: mod_base = OTHER; note = 5-methyl
  modified_base 14: mod_base = OTHER; note = 5-methyl
  source 1..16: mol_type = other RNA
tcaaggaagatggcat

SEQ ID NO: 585 - RNA, 15 nt, synthetic construct
  misc_feature 1..15: note = Description of Artificial Sequence: Synthetic Antisense oligonucleotide
  modified_base 9: mod_base = OTHER; note = 5-methyl
  modified_base 14: mod_base = OTHER; note = 5-methyl
  source 1..15: mol_type = other RNA
gaagatggcatttct

SEQ ID NO: 586 - RNA, 21 nt, synthetic construct
  misc_feature 1..21: note = Description of Artificial Sequence: Synthetic Antisense oligonucleotide
  modified_base 2: mod_base = OTHER; note = 5-methyl
  modified_base 14: mod_base = OTHER; note = 5-methyl
  modified_base 19: mod_base = OTHER; note = 5-methyl
  source 1..21: mol_type = other RNA
tcaaggaagatggcatttcta

SEQ ID NO: 587 - RNA, 19 nt, synthetic construct
  misc_feature 1..19: note = Description of Artificial Sequence: Synthetic Antisense oligonucleotide
  modified_base 2: mod_base = OTHER; note = 5-methyl
  modified_base 14: mod_base = OTHER; note = 5-methyl
  modified_base 19: mod_base = OTHER; note = 5-methyl
  source 1..19: mol_type = other RNA
tcaaggaagatggcatttc

SEQ ID NO: 588 - RNA, 18 nt, synthetic construct
  misc_feature 1..18: note = Description of Artificial Sequence: Synthetic Antisense oligonucleotide
  modified_base 2: mod_base = OTHER; note = 5-methyl
  modified_base 14: mod_base = OTHER; note = 5-methyl
  source 1..18: mol_type = other RNA
tcaaggaagatggcattt

SEQ ID NO: 589 - RNA, 17 nt, synthetic construct
  misc_feature 1..17: note = Description of Artificial Sequence: Synthetic Antisense oligonucleotide
  modified_base 2: mod_base = OTHER; note = 5-methyl
  modified_base 14: mod_base = OTHER; note = 5-methyl
  source 1..17: mol_type = other RNA
tcaaggaagatggcatt

SEQ ID NO: 590 - RNA, 15 nt, synthetic construct
  misc_feature 1..15: note = Description of Artificial Sequence: Synthetic Antisense oligonucleotide
  modified_base 2: mod_base = OTHER; note = 5-methyl
  modified_base 14: mod_base = OTHER; note = 5-methyl
  source 1..15: mol_type = other RNA
tcaaggaagatggca

SEQ ID NO: 591 - RNA, 14 nt, synthetic construct
  misc_feature 1..14: note = Description of Artificial Sequence: Synthetic Antisense oligonucleotide
  modified_base 2: mod_base = OTHER; note = 5-methyl
  modified_base 14: mod_base = OTHER; note = 5-methyl
  source 1..14: mol_type = other RNA
tcaaggaagatggc

SEQ ID NO: 592 - RNA, 13 nt, synthetic construct
  misc_feature 1..13: note = Description of Artificial Sequence: Synthetic Antisense oligonucleotide
  modified_base 2: mod_base = OTHER; note = 5-methyl
  source 1..13: mol_type = other RNA
tcaaggaagatgg

SEQ ID NO: 593 - RNA, 12 nt, synthetic construct
  misc_feature 1..12: note = Description of Artificial Sequence: Synthetic Antisense oligonucleotide
  modified_base 2: mod_base = OTHER; note = 5-methyl
  source 1..12: mol_type = other RNA
tcaaggaagatg

SEQ ID NO: 594 - RNA, 11 nt, synthetic construct
  misc_feature 1..11: note = Description of Artificial Sequence: Synthetic Antisense oligonucleotide
  modified_base 2: mod_base = OTHER; note = 5-methyl
  source 1..11: mol_type = other RNA
tcaaggaagat

SEQ ID NO: 595 - RNA, 10 nt, synthetic construct
  misc_feature 1..10: note = Description of Artificial Sequence: Synthetic Antisense oligonucleotide
  modified_base 2: mod_base = OTHER; note = 5-methyl
  source 1..10: mol_type = other RNA
tcaaggaaga

SEQ ID NO: 596 - skipped

SEQ ID NO: 597 - RNA, 21 nt, synthetic construct
  misc_feature 1..21: note = Description of Artificial Sequence: Synthetic Antisense oligonucleotide
  modified_base 1: mod_base = OTHER; note = 5-methyl
  modified_base 13: mod_base = OTHER; note = 5-methyl
  modified_base 18: mod_base = OTHER; note = 5-methyl
  source 1..21: mol_type = other RNA
caaggaagatggcatttctag

SEQ ID NO: 598 - RNA, 20 nt, synthetic construct
  misc_feature 1..20: note = Description of Artificial Sequence: Synthetic Antisense oligonucleotide
  modified_base 1: mod_base = OTHER; note = 5-methyl
  modified_base 13: mod_base = OTHER; note = 5-methyl
  modified_base 18: mod_base = OTHER; note = 5-methyl
  source 1..20: mol_type = other RNA
caaggaagatggcatttcta

SEQ ID NO: 599 - RNA, 19 nt, synthetic construct
  misc_feature 1..19: note = Description of Artificial Sequence: Synthetic Antisense oligonucleotide
  modified_base 1: mod_base = OTHER; note = 5-methyl
  modified_base 13: mod_base = OTHER; note = 5-methyl
  modified_base 18: mod_base = OTHER; note = 5-methyl
  source 1..19: mol_type = other RNA
caaggaagatggcatttct

SEQ ID NO: 600 - RNA, 18 nt, synthetic construct
  misc_feature 1..18: note = Description of Artificial Sequence: Synthetic Antisense oligonucleotide
  modified_base 1: mod_base = OTHER; note = 5-methyl
  modified_base 13: mod_base = OTHER; note = 5-methyl
  modified_base 18: mod_base = OTHER; note = 5-methyl
  source 1..18: mol_type = other RNA
caaggaagatggcatttc

SEQ ID NO: 601 - RNA, 17 nt, synthetic construct
  misc_feature 1..17: note = Description of Artificial Sequence: Synthetic Antisense oligonucleotide
  modified_base 1: mod_base = OTHER; note = 5-methyl
  modified_base 13: mod_base = OTHER; note = 5-methyl
  source 1..17: mol_type = other RNA
caaggaagatggcattt

SEQ ID NO: 602 - RNA, 16 nt, synthetic construct
  misc_feature 1..16: note = Description of Artificial Sequence: Synthetic Antisense oligonucleotide
  modified_base 1: mod_base = OTHER; note = 5-methyl
  modified_base 13: mod_base = OTHER; note = 5-methyl
  source 1..16: mol_type = other RNA
caaggaagatggcatt

SEQ ID NO: 603 - RNA, 15 nt, synthetic construct
  misc_feature 1..15: note = Description of Artificial Sequence: Synthetic Antisense oligonucleotide
  modified_base 1: mod_base = OTHER; note = 5-methyl
  modified_base 13: mod_base = OTHER; note = 5-methyl
  source 1..15: mol_type = other RNA
caaggaagatggcat

SEQ ID NO: 604 - RNA, 14 nt, synthetic construct
  misc_feature 1..14: note = Description of Artificial Sequence: Synthetic Antisense oligonucleotide
  modified_base 1: mod_base = OTHER; note = 5-methyl
  modified_base 13: mod_base = OTHER; note = 5-methyl
  source 1..14: mol_type = other RNA
caaggaagatggca

SEQ ID NO: 605 - RNA, 13 nt, synthetic construct
  misc_feature 1..13: note = Description of Artificial Sequence: Synthetic Antisense oligonucleotide
  modified_base 1: mod_base = OTHER; note = 5-methyl
  modified_base 13: mod_base = OTHER; note = 5-methyl
  source 1..13: mol_type = other RNA
caaggaagatggc

SEQ ID NO: 606 - RNA, 12 nt, synthetic construct
  misc_feature 1..12: note = Description of Artificial Sequence: Synthetic Antisense oligonucleotide
  modified_base 1: mod_base = OTHER; note = 5-methyl
  source 1..12: mol_type = other RNA
caaggaagatgg

SEQ ID NO: 607 - RNA, 11 nt, synthetic construct
  misc_feature 1..11: note = Description of Artificial Sequence: Synthetic Antisense oligonucleotide
  modified_base 1: mod_base = OTHER; note = 5-methyl
  source 1..11: mol_type = other RNA
caaggaagatg

SEQ ID NO: 608 - RNA, 10 nt, synthetic construct
  misc_feature 1..10: note = Description of Artificial Sequence: Synthetic Antisense oligonucleotide
  modified_base 1: mod_base = OTHER; note = 5-methyl
  source 1..10: mol_type = other RNA
caaggaagat

SEQ ID NO: 609-610 - skipped (2 entries)

SEQ ID NO: 611 - RNA, 20 nt, synthetic construct
  misc_feature 1..20: note = Description of Artificial Sequence: Synthetic Antisense oligonucleotide
  modified_base 12: mod_base = OTHER; note = 5-methyl
  modified_base 17: mod_base = OTHER; note = 5-methyl
  source 1..20: mol_type = other RNA
aaggaagatggcatttctag

SEQ ID NO: 612 - RNA, 19 nt, synthetic construct
  misc_feature 1..19: note = Description of Artificial Sequence: Synthetic Antisense oligonucleotide
  modified_base 12: mod_base = OTHER; note = 5-methyl
  modified_base 17: mod_base = OTHER; note = 5-methyl
  source 1..19: mol_type = other RNA
aaggaagatggcatttcta

SEQ ID NO: 613 - RNA, 18 nt, synthetic construct
  misc_feature 1..18: note = Description of Artificial Sequence: Synthetic Antisense oligonucleotide
  modified_base 12: mod_base = OTHER; note = 5-methyl
  modified_base 17: mod_base = OTHER; note = 5-methyl
  source 1..18: mol_type = other RNA
aaggaagatggcatttct

SEQ ID NO: 614 - RNA, 17 nt, synthetic construct
  misc_feature 1..17: note = Description of Artificial Sequence: Synthetic Antisense oligonucleotide
  modified_base 12: mod_base = OTHER; note = 5-methyl
  modified_base 17: mod_base = OTHER; note = 5-methyl
  source 1..17: mol_type = other RNA
aaggaagatggcatttc

SEQ ID NO: 615 - RNA, 16 nt, synthetic construct
  misc_feature 1..16: note = Description of Artificial Sequence: Synthetic Antisense oligonucleotide
  modified_base 12: mod_base = OTHER; note = 5-methyl
  source 1..16: mol_type = other RNA
aaggaagatggcattt

SEQ ID NO: 616 - RNA, 15 nt, synthetic construct
  misc_feature 1..15: note = Description of Artificial Sequence: Synthetic Antisense oligonucleotide
  modified_base 12: mod_base = OTHER; note = 5-methyl
  source 1..15: mol_type = other RNA
aaggaagatggcatt

SEQ ID NO: 617 - RNA, 14 nt, synthetic construct
  misc_feature 1..14: note = Description of Artificial Sequence: Synthetic Antisense oligonucleotide
  modified_base 12: mod_base = OTHER; note = 5-methyl
  source 1..14: mol_type = other RNA
aaggaagatggcat

SEQ ID NO: 618 - RNA, 13 nt, synthetic construct
  misc_feature 1..13: note = Description of Artificial Sequence: Synthetic Antisense oligonucleotide
  modified_base 12: mod_base = OTHER; note = 5-methyl
  source 1..13: mol_type = other RNA
aaggaagatggca

SEQ ID NO: 619 - RNA, 12 nt, synthetic construct
  misc_feature 1..12: note = Description of Artificial Sequence: Synthetic Antisense oligonucleotide
  modified_base 12: mod_base = OTHER; note = 5-methyl
  source 1..12: mol_type = other RNA
aaggaagatggc

SEQ ID NO: 620 - RNA, 19 nt, synthetic construct
  misc_feature 1..19: note = Description of Artificial Sequence: Synthetic Antisense oligonucleotide
  modified_base 11: mod_base = OTHER; note = 5-methyl
  modified_base 16: mod_base = OTHER; note = 5-methyl
  source 1..19: mol_type = other RNA
aggaagatggcatttctag

SEQ ID NO: 621 - RNA, 18 nt, synthetic construct
  misc_feature 1..18: note = Description of Artificial Sequence: Synthetic Antisense oligonucleotide
  modified_base 11: mod_base = OTHER; note = 5-methyl
  modified_base 16: mod_base = OTHER; note = 5-methyl
  source 1..18: mol_type = other RNA
aggaagatggcatttcta

SEQ ID NO: 622 - RNA, 17 nt, synthetic construct
  misc_feature 1..17: note = Description of Artificial Sequence: Synthetic Antisense oligonucleotide
  modified_base 11: mod_base = OTHER; note = 5-methyl
  modified_base 16: mod_base = OTHER; note = 5-methyl
  source 1..17: mol_type = other RNA
aggaagatggcatttct

SEQ ID NO: 623 - RNA, 16 nt, synthetic construct
  misc_feature 1..16: note = Description of Artificial Sequence: Synthetic Antisense oligonucleotide
  modified_base 11: mod_base = OTHER; note = 5-methyl
  modified_base 16: mod_base = OTHER; note = 5-methyl
  source 1..16: mol_type = other RNA
aggaagatggcatttc

SEQ ID NO: 624 - RNA, 15 nt, synthetic construct
  misc_feature 1..15: note = Description of Artificial Sequence: Synthetic Antisense oligonucleotide
  modified_base 11: mod_base = OTHER; note = 5-methyl
  source 1..15: mol_type = other RNA
aggaagatggcattt

SEQ ID NO: 625 - RNA, 14 nt, synthetic construct
  misc_feature 1..14: note = Description of Artificial Sequence: Synthetic Antisense oligonucleotide
  modified_base 11: mod_base = OTHER; note = 5-methyl
  source 1..14: mol_type = other RNA
aggaagatggcatt

SEQ ID NO: 626 - RNA, 13 nt, synthetic construct
  misc_feature 1..13: note = Description of Artificial Sequence: Synthetic Antisense oligonucleotide
  modified_base 11: mod_base = OTHER; note = 5-methyl
  source 1..13: mol_type = other RNA
aggaagatggcat

SEQ ID NO: 627 - RNA, 12 nt, synthetic construct
  misc_feature 1..12: note = Description of Artificial Sequence: Synthetic Antisense oligonucleotide
  modified_base 11: mod_base = OTHER; note = 5-methyl
  source 1..12: mol_type = other RNA
aggaagatggca

SEQ ID NO: 628 - RNA, 18 nt, synthetic construct
  misc_feature 1..18: note = Description of Artificial Sequence: Synthetic Antisense oligonucleotide
  modified_base 10: mod_base = OTHER; note = 5-methyl
  modified_base 15: mod_base = OTHER; note = 5-methyl
  source 1..18: mol_type = other RNA
ggaagatggcatttctag

SEQ ID NO: 629 - RNA, 17 nt, synthetic construct
  misc_feature 1..17: note = Description of Artificial Sequence: Synthetic Antisense oligonucleotide
  modified_base 10: mod_base = OTHER; note = 5-methyl
  modified_base 15: mod_base = OTHER; note = 5-methyl
  source 1..17: mol_type = other RNA
ggaagatggcatttcta

SEQ ID NO: 630 - RNA, 16 nt, synthetic construct
  misc_feature 1..16: note = Description of Artificial Sequence: Synthetic Antisense oligonucleotide
  modified_base 10: mod_base = OTHER; note = 5-methyl
  modified_base 15: mod_base = OTHER; note = 5-methyl
  source 1..16: mol_type = other RNA
ggaagatggcatttct

SEQ ID NO: 631 - RNA, 15 nt, synthetic construct
  misc_feature 1..15: note = Description of Artificial Sequence: Synthetic Antisense oligonucleotide
  modified_base 10: mod_base = OTHER; note = 5-methyl
  modified_base 15: mod_base = OTHER; note = 5-methyl
  source 1..15: mol_type = other RNA
ggaagatggcatttc

SEQ ID NO: 632 - RNA, 14 nt, synthetic construct
  misc_feature 1..14: note = Description of Artificial Sequence: Synthetic Antisense oligonucleotide
  modified_base 10: mod_base = OTHER; note = 5-methyl
  source 1..14: mol_type = other RNA
ggaagatggcattt

SEQ ID NO: 633 - RNA, 13 nt, synthetic construct
  misc_feature 1..13: note = Description of Artificial Sequence: Synthetic Antisense oligonucleotide
  modified_base 10: mod_base = OTHER; note = 5-methyl
  source 1..13: mol_type = other RNA
ggaagatggcatt

SEQ ID NO: 634 - RNA, 12 nt, synthetic construct
  misc_feature 1..12: note = Description of Artificial Sequence: Synthetic Antisense oligonucleotide
  modified_base 10: mod_base = OTHER; note = 5-methyl
  source 1..12: mol_type = other RNA
ggaagatggcat

SEQ ID NO: 635 - RNA, 11 nt, synthetic construct
  misc_feature 1..11: note = Description of Artificial Sequence: Synthetic Antisense oligonucleotide
  modified_base 10: mod_base = OTHER; note = 5-methyl
  source 1..11: mol_type = other RNA
ggaagatggca

SEQ ID NO: 636 - RNA, 10 nt, synthetic construct
  misc_feature 1..10: note = Description of Artificial Sequence: Synthetic Antisense oligonucleotide
  modified_base 10: mod_base = OTHER; note = 5-methyl
  source 1..10: mol_type = other RNA
ggaagatggc

SEQ ID NO: 637 - RNA, 17 nt, synthetic construct
  misc_feature 1..17: note = Description of Artificial Sequence: Synthetic Antisense oligonucleotide
  modified_base 9: mod_base = OTHER; note = 5-methyl
  modified_base 14: mod_base = OTHER; note = 5-methyl
  source 1..17: mol_type = other RNA
gaagatggcatttctag

SEQ ID NO: 638 - RNA, 16 nt, synthetic construct
  misc_feature 1..16: note = Description of Artificial Sequence: Synthetic Antisense oligonucleotide
  modified_base 9: mod_base = OTHER; note = 5-methyl
  modified_base 14: mod_base = OTHER; note = 5-methyl
  source 1..16: mol_type = other RNA
gaagatggcatttcta

SEQ ID NO: 639 - RNA, 14 nt, synthetic construct
  misc_feature 1..14: note = Description of Artificial Sequence: Synthetic Antisense oligonucleotide
  modified_base 9: mod_base = OTHER; note = 5-methyl
  modified_base 14: mod_base = OTHER; note = 5-methyl
  source 1..14: mol_type = other RNA
gaagatggcatttc

SEQ ID NO: 640 - RNA, 13 nt, synthetic construct
  misc_feature 1..13: note = Description of Artificial Sequence: Synthetic Antisense oligonucleotide
  modified_base 9: mod_base = OTHER; note = 5-methyl
  source 1..13: mol_type = other RNA
gaagatggcattt

SEQ ID NO: 641 - RNA, 12 nt, synthetic construct
  misc_feature 1..12: note = Description of Artificial Sequence: Synthetic Antisense oligonucleotide
  modified_base 9: mod_base = OTHER; note = 5-methyl
  source 1..12: mol_type = other RNA
gaagatggcatt

SEQ ID NO: 642 - RNA, 11 nt, synthetic construct
  misc_feature 1..11: note = Description of Artificial Sequence: Synthetic Antisense oligonucleotide
  modified_base 9: mod_base = OTHER; note = 5-methyl
  source 1..11: mol_type = other RNA
gaagatggcat

SEQ ID NO: 643 - RNA, 10 nt, synthetic construct
  misc_feature 1..10: note = Description of Artificial Sequence: Synthetic Antisense oligonucleotide
  modified_base 9: mod_base = OTHER; note = 5-methyl
  source 1..10: mol_type = other RNA
gaagatggca

SEQ ID NO: 644 - skipped

SEQ ID NO: 645 - RNA, 16 nt, synthetic construct
  misc_feature 1..16: note = Description of Artificial Sequence: Synthetic Antisense oligonucleotide
  modified_base 8: mod_base = OTHER; note = 5-methyl
  modified_base 13: mod_base = OTHER; note = 5-methyl
  source 1..16: mol_type = other RNA
aagatggcatttctag

SEQ ID NO: 646 - RNA, 15 nt, synthetic construct
  misc_feature 1..15: note = Description of Artificial Sequence: Synthetic Antisense oligonucleotide
  modified_base 8: mod_base = OTHER; note = 5-methyl
  modified_base 13: mod_base = OTHER; note = 5-methyl
  source 1..15: mol_type = other RNA
aagatggcatttcta

SEQ ID NO: 647 - RNA, 14 nt, synthetic construct
  misc_feature 1..14: note = Description of Artificial Sequence: Synthetic Antisense oligonucleotide
  modified_base 8: mod_base = OTHER; note = 5-methyl
  modified_base 13: mod_base = OTHER; note = 5-methyl
  source 1..14: mol_type = other RNA
aagatggcatttct

SEQ ID NO: 648 - RNA, 13 nt, synthetic construct
  misc_feature 1..13: note = Description of Artificial Sequence: Synthetic Antisense oligonucleotide
  modified_base 8: mod_base = OTHER; note = 5-methyl
  modified_base 13: mod_base = OTHER; note = 5-methyl
  source 1..13: mol_type = other RNA
aagatggcatttc

SEQ ID NO: 649 - RNA, 12 nt, synthetic construct
  misc_feature 1..12: note = Description of Artificial Sequence: Synthetic Antisense oligonucleotide
  modified_base 8: mod_base = OTHER; note = 5-methyl
  source 1..12: mol_type = other RNA
aagatggcattt

SEQ ID NO: 650 - RNA, 11 nt, synthetic construct
  misc_feature 1..11: note = Description of Artificial Sequence: Synthetic Antisense oligonucleotide
  modified_base 8: mod_base = OTHER; note = 5-methyl
  source 1..11: mol_type = other RNA
aagatggcatt

SEQ ID NO: 651 - RNA, 10 nt, synthetic construct
  misc_feature 1..10: note = Description of Artificial Sequence: Synthetic Antisense oligonucleotide
  modified_base 8: mod_base = OTHER; note = 5-methyl
  source 1..10: mol_type = other RNA
aagatggcat

SEQ ID NO: 652-653 - skipped (2 entries)

SEQ ID NO: 654 - RNA, 15 nt, synthetic construct
  misc_feature 1..15: note = Description of Artificial Sequence: Synthetic Antisense oligonucleotide
  modified_base 7: mod_base = OTHER; note = 5-methyl
  modified_base 12: mod_base = OTHER; note = 5-methyl
  source 1..15: mol_type = other RNA
agatggcatttctag

SEQ ID NO: 655 - RNA, 14 nt, synthetic construct
  misc_feature 1..14: note = Description of Artificial Sequence: Synthetic Antisense oligonucleotide
  modified_base 7: mod_base = OTHER; note = 5-methyl
  modified_base 12: mod_base = OTHER; note = 5-methyl
  source 1..14: mol_type = other RNA
agatggcatttcta

SEQ ID NO: 656 - RNA, 13 nt, synthetic construct
  misc_feature 1..13: note = Description of Artificial Sequence: Synthetic Antisense oligonucleotide
  modified_base 7: mod_base = OTHER; note = 5-methyl
  modified_base 12: mod_base = OTHER; note = 5-methyl
  source 1..13: mol_type = other RNA
agatggcatttct

SEQ ID NO: 657 - RNA, 12 nt, synthetic construct
  misc_feature 1..12: note = Description of Artificial Sequence: Synthetic Antisense oligonucleotide
  modified_base 7: mod_base = OTHER; note = 5-methyl
  modified_base 12: mod_base = OTHER; note = 5-methyl
  source 1..12: mol_type = other RNA
agatggcatttc

SEQ ID NO: 658 - RNA, 11 nt, synthetic construct
  misc_feature 1..11: note = Description of Artificial Sequence: Synthetic Antisense oligonucleotide
  modified_base 7: mod_base = OTHER; note = 5-methyl
  source 1..11: mol_type = other RNA
agatggcattt

SEQ ID NO: 659 - RNA, 10 nt, synthetic construct
  misc_feature 1..10: note = Description of Artificial Sequence: Synthetic Antisense oligonucleotide
  modified_base 7: mod_base = OTHER; note = 5-methyl
  source 1..10: mol_type = other RNA
agatggcatt

SEQ ID NO: 660-661 - skipped (2 entries)

SEQ ID NO: 662 - RNA, 30 nt, synthetic construct; identical to SEQ ID NO: 287
  misc_feature 1..30: note = Description of Artificial Sequence: Synthetic Antisense oligonucleotide
  modified_base 1: mod_base = OTHER; note = 5-methyl
  modified_base 3..4: mod_base = OTHER; note = 5-methyl
  modified_base 7: mod_base = OTHER; note = 5-methyl
  modified_base 10: mod_base = OTHER; note = 5-methyl
  modified_base 22: mod_base = OTHER; note = 5-methyl
  modified_base 27: mod_base = OTHER; note = 5-methyl
  source 1..30: mol_type = other RNA

SEQ ID NO: 663 - RNA, 29 nt, synthetic construct
  misc_feature 1..29: note = Description of Artificial Sequence: Synthetic Antisense oligonucleotide
  modified_base 1: mod_base = OTHER; note = 5-methyl
  modified_base 3..4: mod_base = OTHER; note = 5-methyl
  modified_base 7: mod_base = OTHER; note = 5-methyl
  modified_base 10: mod_base = OTHER; note = 5-methyl
  modified_base 22: mod_base = OTHER; note = 5-methyl
  modified_base 27: mod_base = OTHER; note = 5-methyl
  source 1..29: mol_type = other RNA
ctccaacatcaaggaagatggcatttcta

SEQ ID NO: 664 - RNA, 28 nt, synthetic construct
  misc_feature 1..28: note = Description of Artificial Sequence: Synthetic Antisense oligonucleotide
  modified_base 1: mod_base = OTHER; note = 5-methyl
  modified_base 3..4: mod_base = OTHER; note = 5-methyl
  modified_base 7: mod_base = OTHER; note = 5-methyl
  modified_base 10: mod_base = OTHER; note = 5-methyl
  modified_base 22: mod_base = OTHER; note = 5-methyl
  modified_base 27: mod_base = OTHER; note = 5-methyl
  source 1..28: mol_type = other RNA
ctccaacatcaaggaagatggcatttct

SEQ ID NO: 665 - RNA, 27 nt, synthetic construct
  misc_feature 1..27: note = Description of Artificial Sequence: Synthetic Antisense oligonucleotide
  modified_base 1: mod_base = OTHER; note = 5-methyl
  modified_base 3..4: mod_base = OTHER; note = 5-methyl
  modified_base 7: mod_base = OTHER; note = 5-methyl
  modified_base 10: mod_base = OTHER; note = 5-methyl
  modified_base 22: mod_base = OTHER; note = 5-methyl
  modified_base 27: mod_base = OTHER; note = 5-methyl
  source 1..27: mol_type = other RNA
ctccaacatcaaggaagatggcatttc

SEQ ID NO: 666 - RNA, 26 nt, synthetic construct
  misc_feature 1..26: note = Description of Artificial Sequence: Synthetic Antisense oligonucleotide
  modified_base 1: mod_base = OTHER; note = 5-methyl
  modified_base 3..4: mod_base = OTHER; note = 5-methyl
  modified_base 7: mod_base = OTHER; note = 5-methyl
  modified_base 10: mod_base = OTHER; note = 5-methyl
  modified_base 22: mod_base = OTHER; note = 5-methyl
  source 1..26: mol_type = other RNA
ctccaacatcaaggaagatggcattt

SEQ ID NO: 667 - RNA, 25 nt, synthetic construct
  misc_feature 1..25: note = Description of Artificial Sequence: Synthetic Antisense oligonucleotide
  modified_base 1: mod_base = OTHER; note = 5-methyl
  modified_base 3..4: mod_base = OTHER; note = 5-methyl
  modified_base 7: mod_base = OTHER; note = 5-methyl
  modified_base 10: mod_base = OTHER; note = 5-methyl
  modified_base 22: mod_base = OTHER; note = 5-methyl
  source 1..25: mol_type = other RNA
ctccaacatcaaggaagatggcatt

SEQ ID NO: 668 - RNA, 24 nt, synthetic construct
  misc_feature 1..24: note = Description of Artificial Sequence: Synthetic Antisense oligonucleotide
  modified_base 1: mod_base = OTHER; note = 5-methyl
  modified_base 3..4: mod_base = OTHER; note = 5-methyl
  modified_base 7: mod_base = OTHER; note = 5-methyl
  modified_base 10: mod_base = OTHER; note = 5-methyl
  modified_base 22: mod_base = OTHER; note = 5-methyl
  source 1..24: mol_type = other RNA
ctccaacatcaaggaagatggcat

SEQ ID NO: 669 - RNA, 23 nt, synthetic construct
  misc_feature 1..23: note = Description of Artificial Sequence: Synthetic Antisense oligonucleotide
  modified_base 1: mod_base = OTHER; note = 5-methyl
  modified_base 3..4: mod_base = OTHER; note = 5-methyl
  modified_base 7: mod_base = OTHER; note = 5-methyl
  modified_base 10: mod_base = OTHER; note = 5-methyl
  modified_base 22: mod_base = OTHER; note = 5-methyl
  source 1..23: mol_type = other RNA
ctccaacatcaaggaagatggca

SEQ ID NO: 670 - RNA, 22 nt, synthetic construct
  misc_feature 1..22: note = Description of Artificial Sequence: Synthetic Antisense oligonucleotide
  modified_base 1: mod_base = OTHER; note = 5-methyl
  modified_base 3..4: mod_base = OTHER; note = 5-methyl
  modified_base 7: mod_base = OTHER; note = 5-methyl
  modified_base 10: mod_base = OTHER; note = 5-methyl
  modified_base 22: mod_base = OTHER; note = 5-methyl
  source 1..22: mol_type = other RNA
ctccaacatcaaggaagatggc

SEQ ID NO: 671 - RNA, 21 nt, synthetic construct
  misc_feature 1..21: note = Description of Artificial Sequence: Synthetic Antisense oligonucleotide
  modified_base 1: mod_base = OTHER; note = 5-methyl
  modified_base 3..4: mod_base = OTHER; note = 5-methyl
  modified_base 7: mod_base = OTHER; note = 5-methyl
  modified_base 10: mod_base = OTHER; note = 5-methyl
  source 1..21: mol_type = other RNA
ctccaacatcaaggaagatgg

SEQ ID NO: 672 - RNA, 20 nt, synthetic construct
  misc_feature 1..20: note = Description of Artificial Sequence: Synthetic Antisense oligonucleotide
  modified_base 1: mod_base = OTHER; note = 5-methyl
  modified_base 3..4: mod_base = OTHER; note = 5-methyl
  modified_base 7: mod_base = OTHER; note = 5-methyl
  modified_base 10: mod_base = OTHER; note = 5-methyl
  source 1..20: mol_type = other RNA
ctccaacatcaaggaagatg

SEQ ID NO: 673 - RNA, 19 nt, synthetic construct
  misc_feature 1..19: note = Description of Artificial Sequence: Synthetic Antisense oligonucleotide
  modified_base 1: mod_base = OTHER; note = 5-methyl
  modified_base 3..4: mod_base = OTHER; note = 5-methyl
  modified_base 7: mod_base = OTHER; note = 5-methyl
  modified_base 10: mod_base = OTHER; note = 5-methyl
  source 1..19: mol_type = other RNA
ctccaacatcaaggaagat

SEQ ID NO: 674 - RNA, 18 nt, synthetic construct
  misc_feature 1..18: note = Description of Artificial Sequence: Synthetic Antisense oligonucleotide
  modified_base 1: mod_base = OTHER; note = 5-methyl
  modified_base 3..4: mod_base = OTHER; note = 5-methyl
  modified_base 7: mod_base = OTHER; note = 5-methyl
  modified_base 10: mod_base = OTHER; note = 5-methyl
  source 1..18: mol_type = other RNA
ctccaacatcaaggaaga

SEQ ID NO: 675 - RNA, 17 nt, synthetic construct
  misc_feature 1..17: note = Description of Artificial Sequence: Synthetic Antisense oligonucleotide
  modified_base 1: mod_base = OTHER; note = 5-methyl
  modified_base 3..4: mod_base = OTHER; note = 5-methyl
  modified_base 7: mod_base = OTHER; note = 5-methyl
  modified_base 10: mod_base = OTHER; note = 5-methyl
  source 1..17: mol_type = other RNA
ctccaacatcaaggaag

SEQ ID NO: 676 - RNA, 29 nt, synthetic construct
  misc_feature 1..29: note = Description of Artificial Sequence: Synthetic Antisense oligonucleotide
  modified_base 2..3: mod_base = OTHER; note = 5-methyl
  modified_base 6: mod_base = OTHER; note = 5-methyl
  modified_base 9: mod_base = OTHER; note = 5-methyl
  modified_base 21: mod_base = OTHER; note = 5-methyl
  modified_base 26: mod_base = OTHER; note = 5-methyl
  source 1..29: mol_type = other RNA
tccaacatcaaggaagatggcatttctag

SEQ ID NO: 677 - RNA, 28 nt, synthetic construct
  misc_feature 1..28: note = Description of Artificial Sequence: Synthetic Antisense oligonucleotide
  modified_base 2..3: mod_base = OTHER; note = 5-methyl
  modified_base 6: mod_base = OTHER; note = 5-methyl
  modified_base 9: mod_base = OTHER; note = 5-methyl
  modified_base 21: mod_base = OTHER; note = 5-methyl
  modified_base 26: mod_base = OTHER; note = 5-methyl
  source 1..28: mol_type = other RNA
tccaacatcaaggaagatggcatttcta

SEQ ID NO: 678 - RNA, 27 nt, synthetic construct
  misc_feature 1..27: note = Description of Artificial Sequence: Synthetic Antisense oligonucleotide
  modified_base 2..3: mod_base = OTHER; note = 5-methyl
  modified_base 6: mod_base = OTHER; note = 5-methyl
  modified_base 9: mod_base = OTHER; note = 5-methyl
  modified_base 21: mod_base = OTHER; note = 5-methyl
  modified_base 26: mod_base = OTHER; note = 5-methyl
  source 1..27: mol_type = other RNA
tccaacatcaaggaagatggcatttct

SEQ ID NO: 679 - RNA, 26 nt, synthetic construct
  misc_feature 1..26: note = Description of Artificial Sequence: Synthetic Antisense oligonucleotide
  modified_base 2..3: mod_base = OTHER; note = 5-methyl
  modified_base 6: mod_base = OTHER; note = 5-methyl
  modified_base 9: mod_base = OTHER; note = 5-methyl
  modified_base 21: mod_base = OTHER; note = 5-methyl
  modified_base 26: mod_base = OTHER; note = 5-methyl
  source 1..26: mol_type = other RNA
tccaacatcaaggaagatggcatttc

SEQ ID NO: 680 - RNA, 25 nt, synthetic construct
  misc_feature 1..25: note = Description of Artificial Sequence: Synthetic Antisense oligonucleotide
  modified_base 2..3: mod_base = OTHER; note = 5-methyl
  modified_base 6: mod_base = OTHER; note = 5-methyl
  modified_base 9: mod_base = OTHER; note = 5-methyl
  modified_base 21: mod_base = OTHER; note = 5-methyl
  source 1..25: mol_type = other RNA
tccaacatcaaggaagatggcattt

SEQ ID NO: 681 - RNA, 24 nt, synthetic construct
  misc_feature 1..24: note = Description of Artificial Sequence: Synthetic Antisense oligonucleotide
  modified_base 2..3: mod_base = OTHER; note = 5-methyl
  modified_base 6: mod_base = OTHER; note = 5-methyl
  modified_base 9: mod_base = OTHER; note = 5-methyl
  modified_base 21: mod_base = OTHER; note = 5-methyl
  source 1..24: mol_type = other RNA
tccaacatcaaggaagatggcatt

SEQ ID NO: 682 - RNA, 23 nt, synthetic construct
  misc_feature 1..23: note = Description of Artificial Sequence: Synthetic Antisense oligonucleotide
  modified_base 2..3: mod_base = OTHER; note = 5-methyl
  modified_base 6: mod_base = OTHER; note = 5-methyl
  modified_base 9: mod_base = OTHER; note = 5-methyl
  modified_base 21: mod_base = OTHER; note = 5-methyl
  source 1..23: mol_type = other RNA
tccaacatcaaggaagatggcat

SEQ ID NO: 683 - RNA, 22 nt, synthetic construct
  misc_feature 1..22: note = Description of Artificial Sequence: Synthetic Antisense oligonucleotide
  modified_base 2..3: mod_base = OTHER; note = 5-methyl
  modified_base 6: mod_base = OTHER; note = 5-methyl
  modified_base 9: mod_base = OTHER; note = 5-methyl
  modified_base 21: mod_base = OTHER; note = 5-methyl
  source 1..22: mol_type = other RNA
tccaacatcaaggaagatggca

SEQ ID NO: 684 - RNA, 21 nt, synthetic construct
  misc_feature 1..21: note = Description of Artificial Sequence: Synthetic Antisense oligonucleotide
  modified_base 2..3: mod_base = OTHER; note = 5-methyl
  modified_base 6: mod_base = OTHER; note = 5-methyl
  modified_base 9: mod_base = OTHER; note = 5-methyl
  modified_base 21: mod_base = OTHER; note = 5-methyl
  source 1..21: mol_type = other RNA
tccaacatcaaggaagatggc

SEQ ID NO: 685 - RNA, 20 nt, synthetic construct
  misc_feature 1..20: note = Description of Artificial Sequence: Synthetic Antisense oligonucleotide
  modified_base 2..3: mod_base = OTHER; note = 5-methyl
  modified_base 6: mod_base = OTHER; note = 5-methyl
  modified_base 9: mod_base = OTHER; note = 5-methyl
  source 1..20: mol_type = other RNA
tccaacatcaaggaagatgg

SEQ ID NO: 686 - RNA, 19 nt, synthetic construct
  misc_feature 1..19: note = Description of Artificial Sequence: Synthetic Antisense oligonucleotide
  modified_base 2..3: mod_base = OTHER; note = 5-methyl
  modified_base 6: mod_base = OTHER; note = 5-methyl
  modified_base 9: mod_base = OTHER; note = 5-methyl
  source 1..19: mol_type = other RNA
tccaacatcaaggaagatg

SEQ ID NO: 687 - RNA, 18 nt, synthetic construct
  misc_feature 1..18: note = Description of Artificial Sequence: Synthetic Antisense oligonucleotide
  modified_base 2..3: mod_base = OTHER; note = 5-methyl
  modified_base 6: mod_base = OTHER; note = 5-methyl
  modified_base 9: mod_base = OTHER; note = 5-methyl
  source 1..18: mol_type = other RNA
tccaacatcaaggaagat

SEQ ID NO: 688 - RNA, 17 nt, synthetic construct
  misc_feature 1..17: note = Description of Artificial Sequence: Synthetic Antisense oligonucleotide
  modified_base 2..3: mod_base = OTHER; note = 5-methyl
  modified_base 6: mod_base = OTHER; note = 5-methyl
  modified_base 9: mod_base = OTHER; note = 5-methyl
  source 1..17: mol_type = other RNA
tccaacatcaaggaaga

SEQ ID NO: 689 - RNA, 16 nt, synthetic construct
  misc_feature 1..16: note = Description of Artificial Sequence: Synthetic Antisense oligonucleotide
  modified_base 2..3: mod_base = OTHER; note = 5-methyl
  modified_base 6: mod_base = OTHER; note = 5-methyl
  modified_base 9: mod_base = OTHER; note = 5-methyl
  source 1..16: mol_type = other RNA
tccaacatcaaggaag

SEQ ID NO: 690 - RNA, 28 nt, synthetic construct
  misc_feature 1..28: note = Description of Artificial Sequence: Synthetic Antisense oligonucleotide
  modified_base 1..2: mod_base = OTHER; note = 5-methyl
  modified_base 5: mod_base = OTHER; note = 5-methyl
  modified_base 8: mod_base = OTHER; note = 5-methyl
  modified_base 20: mod_base = OTHER; note = 5-methyl
  modified_base 25: mod_base = OTHER; note = 5-methyl
  source 1..28: mol_type = other RNA
ccaacatcaaggaagatggcatttctag

SEQ ID NO: 691 - RNA, 27 nt, synthetic construct
  misc_feature 1..27: note = Description of Artificial Sequence: Synthetic Antisense oligonucleotide
  modified_base 1..2: mod_base = OTHER; note = 5-methyl
  modified_base 5: mod_base = OTHER; note = 5-methyl
  modified_base 8: mod_base = OTHER; note = 5-methyl
  modified_base 20: mod_base = OTHER; note = 5-methyl
  modified_base 25: mod_base = OTHER; note = 5-methyl
  source 1..27: mol_type = other RNA
ccaacatcaaggaagatggcatttcta

SEQ ID NO: 692 - RNA, 26 nt, synthetic construct
  misc_feature 1..26: note = Description of Artificial Sequence: Synthetic Antisense oligonucleotide
  modified_base 1..2: mod_base = OTHER; note = 5-methyl
  modified_base 5: mod_base = OTHER; note = 5-methyl
  modified_base 8: mod_base = OTHER; note = 5-methyl
  modified_base 20: mod_base = OTHER; note = 5-methyl
  modified_base 25: mod_base = OTHER; note = 5-methyl
  source 1..26: mol_type = other RNA
ccaacatcaaggaagatggcatttct

SEQ ID NO: 693 - RNA, 25 nt, synthetic construct
  misc_feature 1..25: note = Description of Artificial Sequence: Synthetic Antisense oligonucleotide
  modified_base 1..2: mod_base = OTHER; note = 5-methyl
  modified_base 5: mod_base = OTHER; note = 5-methyl
  modified_base 8: mod_base = OTHER; note = 5-methyl
  modified_base 20: mod_base = OTHER; note = 5-methyl
  modified_base 25: mod_base = OTHER; note = 5-methyl
  source 1..25: mol_type = other RNA
ccaacatcaaggaagatggcatttc

SEQ ID NO: 694 - RNA, 24 nt, synthetic construct
  misc_feature 1..24: note = Description of Artificial Sequence: Synthetic Antisense oligonucleotide
  modified_base 1..2: mod_base = OTHER; note = 5-methyl
  modified_base 5: mod_base = OTHER; note = 5-methyl
  modified_base 8: mod_base = OTHER; note = 5-methyl
  modified_base 20: mod_base = OTHER; note = 5-methyl
  source 1..24: mol_type = other RNA
ccaacatcaaggaagatggcattt

SEQ ID NO: 695 - RNA, 23 nt, synthetic construct
  misc_feature 1..23: note = Description of Artificial Sequence: Synthetic Antisense oligonucleotide
  modified_base 1..2: mod_base = OTHER; note = 5-methyl
  modified_base 5: mod_base = OTHER; note = 5-methyl
  modified_base 8: mod_base = OTHER; note = 5-methyl
  modified_base 20: mod_base = OTHER; note = 5-methyl
  source 1..23: mol_type = other RNA
ccaacatcaaggaagatggcatt

SEQ ID NO: 696 - RNA, 22 nt, synthetic construct
  misc_feature 1..22: note = Description of Artificial Sequence: Synthetic Antisense oligonucleotide
  modified_base 1..2: mod_base = OTHER; note = 5-methyl
  modified_base 5: mod_base = OTHER; note = 5-methyl
  modified_base 8: mod_base = OTHER; note = 5-methyl
  modified_base 20: mod_base = OTHER; note = 5-methyl
  source 1..22: mol_type = other RNA
ccaacatcaaggaagatggcat

SEQ ID NO: 697 - RNA, 21 nt, synthetic construct
  misc_feature 1..21: note = Description of Artificial Sequence: Synthetic Antisense oligonucleotide
  modified_base 1..2: mod_base = OTHER; note = 5-methyl
  modified_base 5: mod_base = OTHER; note = 5-methyl
  modified_base 8: mod_base = OTHER; note = 5-methyl
  modified_base 20: mod_base = OTHER; note = 5-methyl
  source 1..21: mol_type = other RNA
ccaacatcaaggaagatggca

SEQ ID NO: 698 - RNA, 20 nt, synthetic construct
  misc_feature 1..20: note = Description of Artificial Sequence: Synthetic Antisense oligonucleotide
  modified_base 1..2: mod_base = OTHER; note = 5-methyl
  modified_base 5: mod_base = OTHER; note = 5-methyl
  modified_base 8: mod_base = OTHER; note = 5-methyl
  modified_base 20: mod_base = OTHER; note = 5-methyl
  source 1..20: mol_type = other RNA
ccaacatcaaggaagatggc

SEQ ID NO: 699 - RNA, 19 nt, synthetic construct
  misc_feature 1..19: note = Description of Artificial Sequence: Synthetic Antisense oligonucleotide
  modified_base 1..2: mod_base = OTHER; note = 5-methyl
  modified_base 5: mod_base = OTHER; note = 5-methyl
  modified_base 8: mod_base = OTHER; note = 5-methyl
  source 1..19: mol_type = other RNA
ccaacatcaaggaagatgg

SEQ ID NO: 700 - RNA, 18 nt, synthetic construct
  misc_feature 1..18: note = Description of Artificial Sequence: Synthetic Antisense oligonucleotide
  modified_base 1..2: mod_base = OTHER; note = 5-methyl
  modified_base 5: mod_base = OTHER; note = 5-methyl
  modified_base 8: mod_base = OTHER; note = 5-methyl
  source 1..18: mol_type = other RNA
ccaacatcaaggaagatg

SEQ ID NO: 701 - RNA, 17 nt, synthetic construct
  misc_feature 1..17: note = Description of Artificial Sequence: Synthetic Antisense oligonucleotide
  modified_base 1..2: mod_base = OTHER; note = 5-methyl
  modified_base 5: mod_base = OTHER; note = 5-methyl
  modified_base 8: mod_base = OTHER; note = 5-methyl
  source 1..17: mol_type = other RNA
ccaacatcaaggaagat

SEQ ID NO: 702 - RNA, 16 nt, synthetic construct
  misc_feature 1..16: note = Description of Artificial Sequence: Synthetic Antisense oligonucleotide
  modified_base 1..2: mod_base = OTHER; note = 5-methyl
  modified_base 5: mod_base = OTHER; note = 5-methyl
  modified_base 8: mod_base = OTHER; note = 5-methyl
  source 1..16: mol_type = other RNA
ccaacatcaaggaaga

SEQ ID NO: 703 - RNA, 15 nt, synthetic construct
  misc_feature 1..15: note = Description of Artificial Sequence: Synthetic Antisense oligonucleotide
  modified_base 1..2: mod_base = OTHER; note = 5-methyl
  modified_base 5: mod_base = OTHER; note = 5-methyl
  modified_base 8: mod_base = OTHER; note = 5-methyl
  source 1..15: mol_type = other RNA
ccaacatcaaggaag

SEQ ID NO: 704 - RNA, 27 nt, synthetic construct
  misc_feature 1..27: note = Description of Artificial Sequence: Synthetic Antisense oligonucleotide
  modified_base 1: mod_base = OTHER; note = 5-methyl
  modified_base 4: mod_base = OTHER; note = 5-methyl
  modified_base 7: mod_base = OTHER; note = 5-methyl
  modified_base 19: mod_base = OTHER; note = 5-methyl
  modified_base 24: mod_base = OTHER; note = 5-methyl
  source 1..27: mol_type = other RNA
caacatcaaggaagatggcatttctag

SEQ ID NO: 705 - RNA, 26 nt, synthetic construct
  misc_feature 1..26: note = Description of Artificial Sequence: Synthetic Antisense oligonucleotide
  modified_base 1: mod_base = OTHER; note = 5-methyl
  modified_base 4: mod_base = OTHER; note = 5-methyl
  modified_base 7: mod_base = OTHER; note = 5-methyl
  modified_base 19: mod_base = OTHER; note = 5-methyl
  modified_base 24: mod_base = OTHER; note = 5-methyl
  source 1..26: mol_type = other RNA
caacatcaaggaagatggcatttcta

SEQ ID NO: 706 - RNA, 25 nt, synthetic construct
  misc_feature 1..25: note = Description of Artificial Sequence: Synthetic Antisense oligonucleotide
  modified_base 1: mod_base = OTHER; note = 5-methyl
  modified_base 4: mod_base = OTHER; note = 5-methyl
  modified_base 7: mod_base = OTHER; note = 5-methyl
  modified_base 19: mod_base = OTHER; note = 5-methyl
  modified_base 24: mod_base = OTHER; note = 5-methyl
  source 1..25: mol_type = other RNA
caacatcaaggaagatggcatttct

SEQ ID NO: 707 - RNA, 24 nt, synthetic construct
  misc_feature 1..24: note = Description of Artificial Sequence: Synthetic Antisense oligonucleotide
  modified_base 1: mod_base = OTHER; note = 5-methyl
  modified_base 4: mod_base = OTHER; note = 5-methyl
  modified_base 7: mod_base = OTHER; note = 5-methyl
  modified_base 19: mod_base = OTHER; note = 5-methyl
  modified_base 24: mod_base = OTHER; note = 5-methyl
  source 1..24: mol_type = other RNA
caacatcaaggaagatggcatttc

SEQ ID NO: 708 - RNA, 23 nt, synthetic construct
  misc_feature 1..23: note = Description of Artificial Sequence: Synthetic Antisense oligonucleotide
  modified_base 1: mod_base = OTHER; note = 5-methyl
  modified_base 4: mod_base = OTHER; note = 5-methyl
  modified_base 7: mod_base = OTHER; note = 5-methyl
  modified_base 19: mod_base = OTHER; note = 5-methyl
  source 1..23: mol_type = other RNA
caacatcaaggaagatggcattt

SEQ ID NO: 709 - RNA, 22 nt, synthetic construct
  misc_feature 1..22: note = Description of Artificial Sequence: Synthetic Antisense oligonucleotide
  modified_base 1: mod_base = OTHER; note = 5-methyl
  modified_base 4: mod_base = OTHER; note = 5-methyl
  modified_base 7: mod_base = OTHER; note = 5-methyl
  modified_base 19: mod_base = OTHER; note = 5-methyl
  source 1..22: mol_type = other RNA
caacatcaaggaagatggcatt

SEQ ID NO: 710 - RNA, 21 nt, synthetic construct
  misc_feature 1..21: note = Description of Artificial Sequence: Synthetic Antisense oligonucleotide
  modified_base 1: mod_base = OTHER; note = 5-methyl
  modified_base 4: mod_base = OTHER; note = 5-methyl
  modified_base 7: mod_base = OTHER; note = 5-methyl
  modified_base 19: mod_base = OTHER; note = 5-methyl
  source 1..21: mol_type = other RNA
caacatcaaggaagatggcat

SEQ ID NO: 711 - RNA, 20 nt, synthetic construct
  misc_feature 1..20: note = Description of Artificial Sequence: Synthetic Antisense oligonucleotide
  modified_base 1: mod_base = OTHER; note = 5-methyl
  modified_base 4: mod_base = OTHER; note = 5-methyl
  modified_base 7: mod_base = OTHER; note = 5-methyl
  modified_base 19: mod_base = OTHER; note = 5-methyl
  source 1..20: mol_type = other RNA
caacatcaaggaagatggca

SEQ ID NO: 712 - RNA, 19 nt, synthetic construct
  misc_feature 1..19: note = Description of Artificial Sequence: Synthetic Antisense oligonucleotide
  modified_base 1: mod_base = OTHER; note = 5-methyl
  modified_base 4: mod_base = OTHER; note = 5-methyl
  modified_base 7: mod_base = OTHER; note = 5-methyl
  modified_base 19: mod_base = OTHER; note = 5-methyl
  source 1..19: mol_type = other RNA
caacatcaaggaagatggc

SEQ ID NO: 713 - RNA, 18 nt, synthetic construct
  misc_feature 1..18: note = Description of Artificial Sequence: Synthetic Antisense oligonucleotide
  modified_base 1: mod_base = OTHER; note = 5-methyl
  modified_base 4: mod_base = OTHER; note = 5-methyl
  modified_base 7: mod_base = OTHER; note = 5-methyl
  source 1..18: mol_type = other RNA
caacatcaaggaagatgg

SEQ ID NO: 714 - RNA, 17 nt, synthetic construct
  misc_feature 1..17: note = Description of Artificial Sequence: Synthetic Antisense oligonucleotide
  modified_base 1: mod_base = OTHER; note = 5-methyl
  modified_base 4: mod_base = OTHER; note = 5-methyl
  modified_base 7: mod_base = OTHER; note = 5-methyl
  source 1..17: mol_type = other RNA
caacatcaaggaagatg

SEQ ID NO: 715 - RNA, 16 nt, synthetic construct
  misc_feature 1..16: note = Description of Artificial Sequence: Synthetic Antisense oligonucleotide
  modified_base 1: mod_base = OTHER; note = 5-methyl
  modified_base 4: mod_base = OTHER; note = 5-methyl
  modified_base 7: mod_base = OTHER; note = 5-methyl
  source 1..16: mol_type = other RNA
caacatcaaggaagat

SEQ ID NO: 716 - RNA, 15 nt, synthetic construct
  misc_feature 1..15: note = Description of Artificial Sequence: Synthetic Antisense oligonucleotide
  modified_base 1: mod_base = OTHER; note = 5-methyl
  modified_base 4: mod_base = OTHER; note = 5-methyl
  modified_base 7: mod_base = OTHER; note = 5-methyl
  source 1..15: mol_type = other RNA
caacatcaaggaaga

SEQ ID NO: 717 - RNA, 14 nt, synthetic construct
  misc_feature 1..14: note = Description of Artificial Sequence: Synthetic Antisense oligonucleotide
  modified_base 1: mod_base = OTHER; note = 5-methyl
  modified_base 4: mod_base = OTHER; note = 5-methyl
  modified_base 7: mod_base = OTHER; note = 5-methyl
  source 1..14: mol_type = other RNA
caacatcaaggaag

SEQ ID NO: 718 - RNA, 26 nt, synthetic construct
  misc_feature 1..26: note = Description of Artificial Sequence: Synthetic Antisense oligonucleotide
  modified_base 3: mod_base = OTHER; note = 5-methyl
  modified_base 6: mod_base = OTHER; note = 5-methyl
  modified_base 18: mod_base = OTHER; note = 5-methyl
  modified_base 23: mod_base = OTHER; note = 5-methyl
  source 1..26: mol_type = other RNA
aacatcaaggaagatggcatttctag

SEQ ID NO: 719 - RNA, 25 nt, synthetic construct
  misc_feature 1..25: note = Description of Artificial Sequence: Synthetic Antisense oligonucleotide
  modified_base 3: mod_base = OTHER; note = 5-methyl
  modified_base 6: mod_base = OTHER; note = 5-methyl
  modified_base 18: mod_base = OTHER; note = 5-methyl
  modified_base 23: mod_base = OTHER; note = 5-methyl
  source 1..25: mol_type = other RNA
aacatcaaggaagatggcatttcta

SEQ ID NO: 720 - RNA, 24 nt, synthetic construct
  misc_feature 1..24: note = Description of Artificial Sequence: Synthetic Antisense oligonucleotide
  modified_base 3: mod_base = OTHER; note = 5-methyl
  modified_base 6: mod_base = OTHER; note = 5-methyl
  modified_base 18: mod_base = OTHER; note = 5-methyl
  modified_base 23: mod_base = OTHER; note = 5-methyl
  source 1..24: mol_type = other RNA
aacatcaaggaagatggcatttct

SEQ ID NO: 721 - RNA, 23 nt, synthetic construct
  misc_feature 1..23: note = Description of Artificial Sequence: Synthetic Antisense oligonucleotide
  modified_base 3: mod_base = OTHER; note = 5-methyl
  modified_base 6: mod_base = OTHER; note = 5-methyl
  modified_base 18: mod_base = OTHER; note = 5-methyl
  modified_base 23: mod_base = OTHER; note = 5-methyl
  source 1..23: mol_type = other RNA
aacatcaaggaagatggcatttc

SEQ ID NO: 722 - RNA, 22 nt, synthetic construct
  misc_feature 1..22: note = Description of Artificial Sequence: Synthetic Antisense oligonucleotide
  modified_base 3: mod_base = OTHER; note = 5-methyl
  modified_base 6: mod_base = OTHER; note = 5-methyl
  modified_base 18: mod_base = OTHER; note = 5-methyl
  source 1..22: mol_type = other RNA
aacatcaaggaagatggcattt

SEQ ID NO: 723 - RNA, 21 nt, synthetic construct
  misc_feature 1..21: note = Description of Artificial Sequence: Synthetic Antisense oligonucleotide
  modified_base 3: mod_base = OTHER; note = 5-methyl
  modified_base 6: mod_base = OTHER; note = 5-methyl
  modified_base 18: mod_base = OTHER; note = 5-methyl
  source 1..21: mol_type = other RNA
aacatcaaggaagatggcatt

SEQ ID NO: 724 - RNA, 20 nt, synthetic construct
  misc_feature 1..20: note = Description of Artificial Sequence: Synthetic Antisense oligonucleotide
  modified_base 3: mod_base = OTHER; note = 5-methyl
  modified_base 6: mod_base = OTHER; note = 5-methyl
  modified_base 18: mod_base = OTHER; note = 5-methyl
  source 1..20: mol_type = other RNA
aacatcaaggaagatggcat

SEQ ID NO: 725 - RNA, 19 nt, synthetic construct
  misc_feature 1..19: note = Description of Artificial Sequence: Synthetic Antisense oligonucleotide
  modified_base 3: mod_base = OTHER; note = 5-methyl
  modified_base 6: mod_base = OTHER; note = 5-methyl
  modified_base 18: mod_base = OTHER; note = 5-methyl
  source 1..19: mol_type = other RNA
aacatcaaggaagatggca

SEQ ID NO: 726 - RNA, 18 nt, synthetic construct
  misc_feature 1..18: note = Description of Artificial Sequence: Synthetic Antisense oligonucleotide
  modified_base 3: mod_base = OTHER; note = 5-methyl
  modified_base 6: mod_base = OTHER; note = 5-methyl
  modified_base 18: mod_base = OTHER; note = 5-methyl
  source 1..18: mol_type = other RNA
aacatcaaggaagatggc

SEQ ID NO: 727 - RNA, 17 nt, synthetic construct
  misc_feature 1..17: note = Description of Artificial Sequence: Synthetic Antisense oligonucleotide
  modified_base 3: mod_base = OTHER; note = 5-methyl
  modified_base 6: mod_base = OTHER; note = 5-methyl
  source 1..17: mol_type = other RNA
aacatcaaggaagatgg

SEQ ID NO: 728 - RNA, 16 nt, synthetic construct
  misc_feature 1..16: note = Description of Artificial Sequence: Synthetic Antisense oligonucleotide
  modified_base 3: mod_base = OTHER; note = 5-methyl
  modified_base 6: mod_base = OTHER; note = 5-methyl
  source 1..16: mol_type = other RNA
aacatcaaggaagatg

SEQ ID NO: 729 - RNA, 15 nt, synthetic construct
  misc_feature 1..15: note = Description of Artificial Sequence: Synthetic Antisense oligonucleotide
  modified_base 3: mod_base = OTHER; note = 5-methyl
  modified_base 6: mod_base = OTHER; note = 5-methyl
  source 1..15: mol_type = other RNA
aacatcaaggaagat

SEQ ID NO: 730 - RNA, 14 nt, synthetic construct
  misc_feature 1..14: note = Description of Artificial Sequence: Synthetic Antisense oligonucleotide
  modified_base 3: mod_base = OTHER; note = 5-methyl
  modified_base 6: mod_base = OTHER; note = 5-methyl
  source 1..14: mol_type = other RNA
aacatcaaggaaga

SEQ ID NO: 731 - RNA, 13 nt, synthetic construct
  misc_feature 1..13: note = Description of Artificial Sequence: Synthetic Antisense oligonucleotide
  modified_base 3: mod_base = OTHER; note = 5-methyl
  modified_base 6: mod_base = OTHER; note = 5-methyl
  source 1..13: mol_type = other RNA
aacatcaaggaag

SEQ ID NO: 732 - RNA, 25 nt, synthetic construct
  misc_feature 1..25: note = Description of Artificial Sequence: Synthetic Antisense oligonucleotide
  modified_base 2: mod_base = OTHER; note = 5-methyl
  modified_base 5: mod_base = OTHER; note = 5-methyl
  modified_base 17: mod_base = OTHER; note = 5-methyl
  modified_base 22: mod_base = OTHER; note = 5-methyl
  source 1..25: mol_type = other RNA
acatcaaggaagatggcatttctag

SEQ ID NO: 733 - RNA, 24 nt, synthetic construct
  misc_feature 1..24: note = Description of Artificial Sequence: Synthetic Antisense oligonucleotide
  modified_base 2: mod_base = OTHER; note = 5-methyl
  modified_base 5: mod_base = OTHER; note = 5-methyl
  modified_base 17: mod_base = OTHER; note = 5-methyl
  modified_base 22: mod_base = OTHER; note = 5-methyl
  source 1..24: mol_type = other RNA
acatcaaggaagatggcatttcta

SEQ ID NO: 734 - RNA, 23 nt, synthetic construct
  misc_feature 1..23: note = Description of Artificial Sequence: Synthetic Antisense oligonucleotide
  modified_base 2: mod_base = OTHER; note = 5-methyl
  modified_base 5: mod_base = OTHER; note = 5-methyl
  modified_base 17: mod_base = OTHER; note = 5-methyl
  modified_base 22: mod_base = OTHER; note = 5-methyl
  source 1..23: mol_type = other RNA
acatcaaggaagatggcatttct

SEQ ID NO: 735 - RNA, 22 nt, synthetic construct
  misc_feature 1..22: note = Description of Artificial Sequence: Synthetic Antisense oligonucleotide
  modified_base 2: mod_base = OTHER; note = 5-methyl
  modified_base 5: mod_base = OTHER; note = 5-methyl
  modified_base 17: mod_base = OTHER; note = 5-methyl
  modified_base 22: mod_base = OTHER; note = 5-methyl
  source 1..22: mol_type = other RNA
acatcaaggaagatggcatttc

SEQ ID NO: 736 - RNA, 21 nt, synthetic construct
  misc_feature 1..21: note = Description of Artificial Sequence: Synthetic Antisense oligonucleotide
  modified_base 2: mod_base = OTHER; note = 5-methyl
  modified_base 5: mod_base = OTHER; note = 5-methyl
  modified_base 17: mod_base = OTHER; note = 5-methyl
  source 1..21: mol_type = other RNA
acatcaaggaagatggcattt

SEQ ID NO: 737 - RNA, 20 nt, synthetic construct
  misc_feature 1..20: note = Description of Artificial Sequence: Synthetic Antisense oligonucleotide
  modified_base 2: mod_base = OTHER; note = 5-methyl
  modified_base 5: mod_base = OTHER; note = 5-methyl
  modified_base 17: mod_base = OTHER; note = 5-methyl
  source 1..20: mol_type = other RNA
acatcaaggaagatggcatt

SEQ ID NO: 738 - RNA, 19 nt, synthetic construct
  misc_feature 1..19: note = Description of Artificial Sequence: Synthetic Antisense oligonucleotide
  modified_base 2: mod_base = OTHER; note = 5-methyl
  modified_base 5: mod_base = OTHER; note = 5-methyl
  modified_base 17: mod_base = OTHER; note = 5-methyl
  source 1..19: mol_type = other RNA
acatcaaggaagatggcat

SEQ ID NO: 739 - RNA, 18 nt, synthetic construct
  misc_feature 1..18: note = Description of Artificial Sequence: Synthetic Antisense oligonucleotide
  modified_base 2: mod_base = OTHER; note = 5-methyl
  modified_base 5: mod_base = OTHER; note = 5-methyl
  modified_base 17: mod_base = OTHER; note = 5-methyl
  source 1..18: mol_type = other RNA
acatcaaggaagatggca

SEQ ID NO: 740 - RNA, 17 nt, synthetic construct
  misc_feature 1..17: note = Description of Artificial Sequence: Synthetic Antisense oligonucleotide
  modified_base 2: mod_base = OTHER; note = 5-methyl
  modified_base 5: mod_base = OTHER; note = 5-methyl
  modified_base 17: mod_base = OTHER; note = 5-methyl
  source 1..17: mol_type = other RNA
acatcaaggaagatggc

SEQ ID NO: 741 - RNA, 16 nt, synthetic construct
  misc_feature 1..16: note = Description of Artificial Sequence: Synthetic Antisense oligonucleotide
  modified_base 2: mod_base = OTHER; note = 5-methyl
  modified_base 5: mod_base = OTHER; note = 5-methyl
  source 1..16: mol_type = other RNA
acatcaaggaagatgg

SEQ ID NO: 742 - RNA, 15 nt, synthetic construct
  misc_feature 1..15: note = Description of Artificial Sequence: Synthetic Antisense oligonucleotide
  modified_base 2: mod_base = OTHER; note = 5-methyl
  modified_base 5: mod_base = OTHER; note = 5-methyl
  source 1..15: mol_type = other RNA
acatcaaggaagatg

SEQ ID NO: 743 - RNA, 14 nt, synthetic construct
  misc_feature 1..14: note = Description of Artificial Sequence: Synthetic Antisense oligonucleotide
  modified_base 2: mod_base = OTHER; note = 5-methyl
  modified_base 5: mod_base = OTHER; note = 5-methyl
  source 1..14: mol_type = other RNA
acatcaaggaagat

SEQ ID NO: 744 - RNA, 13 nt, synthetic construct
  misc_feature 1..13: note = Description of Artificial Sequence: Synthetic Antisense oligonucleotide
  modified_base 2: mod_base = OTHER; note = 5-methyl
  modified_base 5: mod_base = OTHER; note = 5-methyl
  source 1..13: mol_type = other RNA
acatcaaggaaga

SEQ ID NO: 745 - RNA, 12 nt, synthetic construct
  misc_feature 1..12: note = Description of Artificial Sequence: Synthetic Antisense oligonucleotide
  modified_base 2: mod_base = OTHER; note = 5-methyl
  modified_base 5: mod_base = OTHER; note = 5-methyl
  source 1..12: mol_type = other RNA
acatcaaggaag

SEQ ID NO: 746 - RNA, 24 nt, synthetic construct
  misc_feature 1..24: note = Description of Artificial Sequence: Synthetic Antisense oligonucleotide
  modified_base 1: mod_base = OTHER; note = 5-methyl
  modified_base 4: mod_base = OTHER; note = 5-methyl
  modified_base 16: mod_base = OTHER; note = 5-methyl
  modified_base 21: mod_base = OTHER; note = 5-methyl
  source 1..24: mol_type = other RNA
catcaaggaagatggcatttctag

SEQ ID NO: 747 - RNA, 23 nt, synthetic construct
  misc_feature 1..23: note = Description of Artificial Sequence: Synthetic Antisense oligonucleotide
  modified_base 1: mod_base = OTHER; note = 5-methyl
  modified_base 4: mod_base = OTHER; note = 5-methyl
  modified_base 16: mod_base = OTHER; note = 5-methyl
  modified_base 21: mod_base = OTHER; note = 5-methyl
  source 1..23: mol_type = other RNA
catcaaggaagatggcatttcta

SEQ ID NO: 748 - RNA, 22 nt, synthetic construct
  misc_feature 1..22: note = Description of Artificial Sequence: Synthetic Antisense oligonucleotide
  modified_base 1: mod_base = OTHER; note = 5-methyl
  modified_base 4: mod_base = OTHER; note = 5-methyl
  modified_base 16: mod_base = OTHER; note = 5-methyl
  modified_base 21: mod_base = OTHER; note = 5-methyl
  source 1..22: mol_type = other RNA
catcaaggaagatggcatttct

SEQ ID NO: 749 - RNA, 21 nt, synthetic construct
  misc_feature 1..21: note = Description of Artificial Sequence: Synthetic Antisense oligonucleotide
  modified_base 1: mod_base = OTHER; note = 5-methyl
  modified_base 4: mod_base = OTHER; note = 5-methyl
  modified_base 16: mod_base = OTHER; note = 5-methyl
  modified_base 21: mod_base = OTHER; note = 5-methyl
  source 1..21: mol_type = other RNA
catcaaggaagatggcatttc

SEQ ID NO: 750 - RNA, 20 nt, synthetic construct
  misc_feature 1..20: note = Description of Artificial Sequence: Synthetic Antisense oligonucleotide
  modified_base 1: mod_base = OTHER; note = 5-methyl
  modified_base 4: mod_base = OTHER; note = 5-methyl
  modified_base 16: mod_base = OTHER; note = 5-methyl
  source 1..20: mol_type = other RNA
catcaaggaagatggcattt

SEQ ID NO: 751 - RNA, 19 nt, synthetic construct
  misc_feature 1..19: note = Description of Artificial Sequence: Synthetic Antisense oligonucleotide
  modified_base 1: mod_base = OTHER; note = 5-methyl
  modified_base 4: mod_base = OTHER; note = 5-methyl
  modified_base 16: mod_base = OTHER; note = 5-methyl
  source 1..19: mol_type = other RNA
catcaaggaagatggcatt

SEQ ID NO: 752 - RNA, 18 nt, synthetic construct
  misc_feature 1..18: note = Description of Artificial Sequence: Synthetic Antisense oligonucleotide
  modified_base 1: mod_base = OTHER; note = 5-methyl
  modified_base 4: mod_base = OTHER; note = 5-methyl
  modified_base 16: mod_base = OTHER; note = 5-methyl
  source 1..18: mol_type = other RNA
catcaaggaagatggcat

SEQ ID NO: 753 - RNA, 17 nt, synthetic construct
  misc_feature 1..17: note = Description of Artificial Sequence: Synthetic Antisense oligonucleotide
  modified_base 1: mod_base = OTHER; note = 5-methyl
  modified_base 4: mod_base = OTHER; note = 5-methyl
  modified_base 16: mod_base = OTHER; note = 5-methyl
  source 1..17: mol_type = other RNA
catcaaggaagatggca

SEQ ID NO: 754 - RNA, 16 nt, synthetic construct
  misc_feature 1..16: note = Description of Artificial Sequence: Synthetic Antisense oligonucleotide
  modified_base 1: mod_base = OTHER; note = 5-methyl
  modified_base 4: mod_base = OTHER; note = 5-methyl
  modified_base 16: mod_base = OTHER; note = 5-methyl
  source 1..16: mol_type = other RNA
catcaaggaagatggc

SEQ ID NO: 755 - RNA, 15 nt, synthetic construct
  misc_feature 1..15: note = Description of Artificial Sequence: Synthetic Antisense oligonucleotide
  modified_base 1: mod_base = OTHER; note = 5-methyl
  modified_base 4: mod_base = OTHER; note = 5-methyl
  source 1..15: mol_type = other RNA
catcaaggaagatgg

SEQ ID NO: 756 - RNA, 14 nt, synthetic construct
  misc_feature 1..14: note = Description of Artificial Sequence: Synthetic Antisense oligonucleotide
  modified_base 1: mod_base = OTHER; note = 5-methyl
  modified_base 4: mod_base = OTHER; note = 5-methyl
  source 1..14: mol_type = other RNA
catcaaggaagatg

SEQ ID NO: 757 - RNA, 13 nt, synthetic construct
  misc_feature 1..13: note = Description of Artificial Sequence: Synthetic Antisense oligonucleotide
  modified_base 1: mod_base = OTHER; note = 5-methyl
  modified_base 4: mod_base = OTHER; note = 5-methyl
  source 1..13: mol_type = other RNA
catcaaggaagat

SEQ ID NO: 758 - RNA, 12 nt, synthetic construct
  misc_feature 1..12: note = Description of Artificial Sequence: Synthetic Antisense oligonucleotide
  modified_base 1: mod_base = OTHER; note = 5-methyl
  modified_base 4: mod_base = OTHER; note = 5-methyl
  source 1..12: mol_type = other RNA
catcaaggaaga

SEQ ID NO: 759 - RNA, 11 nt, synthetic construct
  misc_feature 1..11: note = Description of Artificial Sequence: Synthetic Antisense oligonucleotide
  modified_base 1: mod_base = OTHER; note = 5-methyl
  modified_base 4: mod_base = OTHER; note = 5-methyl
  source 1..11: mol_type = other RNA
catcaaggaag

SEQ ID NO: 760 - RNA, 23 nt, synthetic construct
  misc_feature 1..23: note = Description of Artificial Sequence: Synthetic Antisense oligonucleotide
  modified_base 3: mod_base = OTHER; note = 5-methyl
  modified_base 15: mod_base = OTHER; note = 5-methyl
  modified_base 20: mod_base = OTHER; note = 5-methyl
  source 1..23: mol_type = other RNA
atcaaggaagatggcatttctag

SEQ ID NO: 761 - RNA, 22 nt, synthetic construct
  misc_feature 1..22: note = Description of Artificial Sequence: Synthetic Antisense oligonucleotide
  modified_base 3: mod_base = OTHER; note = 5-methyl
  modified_base 15: mod_base = OTHER; note = 5-methyl
  modified_base 20: mod_base = OTHER; note = 5-methyl
  source 1..22: mol_type = other RNA
atcaaggaagatggcatttcta

SEQ ID NO: 762 - RNA, 21 nt, synthetic construct
  misc_feature 1..21: note = Description of Artificial Sequence: Synthetic Antisense oligonucleotide
  modified_base 3: mod_base = OTHER; note = 5-methyl
  modified_base 15: mod_base = OTHER; note = 5-methyl
  modified_base 20: mod_base = OTHER; note = 5-methyl
  source 1..21: mol_type = other RNA
atcaaggaagatggcatttct

SEQ ID NO: 763 - RNA, 20 nt, synthetic construct
  misc_feature 1..20: note = Description of Artificial Sequence: Synthetic Antisense oligonucleotide
  modified_base 3: mod_base = OTHER; note = 5-methyl
  modified_base 15: mod_base = OTHER; note = 5-methyl
  modified_base 20: mod_base = OTHER; note = 5-methyl
  source 1..20: mol_type = other RNA
atcaaggaagatggcatttc

SEQ ID NO: 764 - RNA, 19 nt, synthetic construct
  misc_feature 1..19: note = Description of Artificial Sequence: Synthetic Antisense oligonucleotide
  modified_base 3: mod_base = OTHER; note = 5-methyl
  modified_base 15: mod_base = OTHER; note = 5-methyl
  source 1..19: mol_type = other RNA
atcaaggaagatggcattt

SEQ ID NO: 765 - RNA, 18 nt, synthetic construct
  misc_feature 1..18: note = Description of Artificial Sequence: Synthetic Antisense oligonucleotide
  modified_base 3: mod_base = OTHER; note = 5-methyl
  modified_base 15: mod_base = OTHER; note = 5-methyl
  source 1..18: mol_type = other RNA
atcaaggaagatggcatt

SEQ ID NO: 766 - RNA, 17 nt, synthetic construct
  misc_feature 1..17: note = Description of Artificial Sequence: Synthetic Antisense oligonucleotide
  modified_base 3: mod_base = OTHER; note = 5-methyl
  modified_base 15: mod_base = OTHER; note = 5-methyl
  source 1..17: mol_type = other RNA
atcaaggaagatggcat

SEQ ID NO: 767 - RNA, 16 nt, synthetic construct
  misc_feature 1..16: note = Description of Artificial Sequence: Synthetic Antisense oligonucleotide
  modified_base 3: mod_base = OTHER; note = 5-methyl
  modified_base 15: mod_base = OTHER; note = 5-methyl
  source 1..16: mol_type = other RNA
atcaaggaagatggca

SEQ ID NO: 768 - RNA, 15 nt, synthetic construct
  misc_feature 1..15: note = Description of Artificial Sequence: Synthetic Antisense oligonucleotide
  modified_base 3: mod_base = OTHER; note = 5-methyl
  modified_base 15: mod_base = OTHER; note = 5-methyl
  source 1..15: mol_type = other RNA
atcaaggaagatggc

SEQ ID NO: 769 - RNA, 14 nt, synthetic construct
  misc_feature 1..14: note = Description of Artificial Sequence: Synthetic Antisense oligonucleotide
  modified_base 3: mod_base = OTHER; note = 5-methyl
  source 1..14: mol_type = other RNA
atcaaggaagatgg

SEQ ID NO: 770 - RNA, 13 nt, synthetic construct
  misc_feature 1..13: note = Description of Artificial Sequence: Synthetic Antisense oligonucleotide
  modified_base 3: mod_base = OTHER; note = 5-methyl
  source 1..13: mol_type = other RNA
atcaaggaagatg

SEQ ID NO: 771 - RNA, 12 nt, synthetic construct
  misc_feature 1..12: note = Description of Artificial Sequence: Synthetic Antisense oligonucleotide
  modified_base 3: mod_base = OTHER; note = 5-methyl
  source 1..12: mol_type = other RNA
atcaaggaagat

SEQ ID NO: 772 - RNA, 11 nt, synthetic construct
  misc_feature 1..11: note = Description of Artificial Sequence: Synthetic Antisense oligonucleotide
  modified_base 3: mod_base = OTHER; note = 5-methyl
  source 1..11: mol_type = other RNA
atcaaggaaga

SEQ ID NO: 773 - RNA, 10 nt, synthetic construct
  misc_feature 1..10: note = Description of Artificial Sequence: Synthetic Antisense oligonucleotide
  modified_base 3: mod_base = OTHER; note = 5-methyl
  source 1..10: mol_type = other RNA
atcaaggaag

SEQ ID NO: 774 - DNA, 18 bp, synthetic construct
  misc_feature 1..18: note = Description of Artificial Sequence: Synthetic Antisense oligonucleotide
  source 1..18: mol_type = other DNA
ggtaagttctgtccaagc

SEQ ID NO: 775 - DNA, 18 bp, synthetic construct
  misc_feature 1..18: note = Description of Artificial Sequence: Synthetic Antisense oligonucleotide
  source 1..18: mol_type = other DNA
gtaagttctgtccaagcc

SEQ ID NO: 776 - DNA, 18 bp, synthetic construct
  misc_feature 1..18: note = Description of Artificial Sequence: Synthetic Antisense oligonucleotide
  source 1..18: mol_type = other DNA
agtcggtaagttctgtcc

SEQ ID NO: 777 - DNA, 18 bp, synthetic construct
  misc_feature 1..18: note = Description of Artificial Sequence: Synthetic Antisense oligonucleotide
  source 1..18: mol_type = other DNA
ctgtccaagcccggttga

SEQ ID NO: 778 - DNA, 15 bp, synthetic construct
  misc_feature 1..15: note = Description of Artificial Sequence: Synthetic Antisense oligonucleotide
  source 1..15: mol_type = other DNA
taagttctgtccaag

SEQ ID NO: 779 - DNA, 20 bp, synthetic construct
  misc_feature 1..20: note = Description of Artificial Sequence: Synthetic Antisense oligonucleotide
  source 1..20: mol_type = other DNA
ttctgtccaagcccggttga

SEQ ID NO: 780 - DNA, 19 bp, synthetic construct
  misc_feature 1..19: note = Description of Artificial Sequence: Synthetic Antisense oligonucleotide
  source 1..19: mol_type = other DNA
ttctgtccaagcccggttg

SEQ ID NO: 781 - DNA, 18 bp, synthetic construct
  misc_feature 1..18: note = Description of Artificial Sequence: Synthetic Antisense oligonucleotide
  source 1..18: mol_type = other DNA
ttctgtccaagcccggtt

SEQ ID NO: 782 - DNA, 17 bp, synthetic construct
  misc_feature 1..17: note = Description of Artificial Sequence: Synthetic Antisense oligonucleotide
  source 1..17: mol_type = other DNA
ttctgtccaagcccggt

SEQ ID NO: 783 - DNA, 16 bp, synthetic construct
  misc_feature 1..16: note = Description of Artificial Sequence: Synthetic Antisense oligonucleotide
  source 1..16: mol_type = other DNA
ttctgtccaagcccgg

SEQ ID NO: 784 - DNA, 15 bp, synthetic construct
  misc_feature 1..15: note = Description of Artificial Sequence: Synthetic Antisense oligonucleotide
  source 1..15: mol_type = other DNA
ttctgtccaagcccg

SEQ ID NO: 785 - DNA, 14 bp, synthetic construct
  misc_feature 1..14: note = Description of Artificial Sequence: Synthetic Antisense oligonucleotide
  source 1..14: mol_type = other DNA
ttctgtccaagccc

SEQ ID NO: 786 - DNA, 13 bp, synthetic construct
  misc_feature 1..13: note = Description of Artificial Sequence: Synthetic Antisense oligonucleotide
  source 1..13: mol_type = other DNA
ttctgtccaagcc

SEQ ID NO: 787 - DNA, 12 bp, synthetic construct
  misc_feature 1..12: note = Description of Artificial Sequence: Synthetic Antisense oligonucleotide
  source 1..12: mol_type = other DNA
ttctgtccaagc

SEQ ID NO: 788 - DNA, 11 bp, synthetic construct
  misc_feature 1..11: note = Description of Artificial Sequence: Synthetic Antisense oligonucleotide
  source 1..11: mol_type = other DNA
ttctgtccaag

SEQ ID NO: 789 - DNA, 10 bp, synthetic construct
  misc_feature 1..10: note = Description of Artificial Sequence: Synthetic Antisense oligonucleotide
  source 1..10: mol_type = other DNA
ttctgtccaa

SEQ ID NO: 790-791 - skipped (2 entries)

SEQ ID NO: 792 - DNA, 19 bp, synthetic construct
  misc_feature 1..19: note = Description of Artificial Sequence: Synthetic Antisense oligonucleotide
  source 1..19: mol_type = other DNA
tctgtccaagcccggttga

SEQ ID NO: 793 - DNA, 18 bp, synthetic construct
  misc_feature 1..18: note = Description of Artificial Sequence: Synthetic Antisense oligonucleotide
  source 1..18: mol_type = other DNA
tctgtccaagcccggttg

SEQ ID NO: 794 - DNA, 17 bp, synthetic construct
  misc_feature 1..17: note = Description of Artificial Sequence: Synthetic Antisense oligonucleotide
  source 1..17: mol_type = other DNA
tctgtccaagcccggtt

SEQ ID NO: 795 - DNA, 16 bp, synthetic construct
  misc_feature 1..16: note = Description of Artificial Sequence: Synthetic Antisense oligonucleotide
  source 1..16: mol_type = other DNA
tctgtccaagcccggt

SEQ ID NO: 796 - DNA, 15 bp, synthetic construct
  misc_feature 1..15: note = Description of Artificial Sequence: Synthetic Antisense oligonucleotide
  source 1..15: mol_type = other DNA
tctgtccaagcccgg

SEQ ID NO: 797 - DNA, 14 bp, synthetic construct
  misc_feature 1..14: note = Description of Artificial Sequence: Synthetic Antisense oligonucleotide
  source 1..14: mol_type = other DNA
tctgtccaagcccg

SEQ ID NO: 798 - DNA, 13 bp, synthetic construct
  misc_feature 1..13: note = Description of Artificial Sequence: Synthetic Antisense oligonucleotide
  source 1..13: mol_type = other DNA
tctgtccaagccc

SEQ ID NO: 799 - DNA, 12 bp, synthetic construct
  misc_feature 1..12: note = Description of Artificial Sequence: Synthetic Antisense oligonucleotide
  source 1..12: mol_type = other DNA
tctgtccaagcc

SEQ ID NO: 800 - DNA, 11 bp, synthetic construct
  misc_feature 1..11: note = Description of Artificial Sequence: Synthetic Antisense oligonucleotide
  source 1..11: mol_type = other DNA
tctgtccaagc

SEQ ID NO: 801 - DNA, 10 bp, synthetic construct
  misc_feature 1..10: note = Description of Artificial Sequence: Synthetic Antisense oligonucleotide
  source 1..10: mol_type = other DNA
tctgtccaag

SEQ ID NO: 802-803 - skipped (2 entries)

SEQ ID NO: 804 - DNA, 17 bp, synthetic construct
  misc_feature 1..17: note = Description of Artificial Sequence: Synthetic Antisense oligonucleotide
  source 1..17: mol_type = other DNA
ctgtccaagcccggttg

SEQ ID NO: 805 - DNA, 16 bp, synthetic construct
  misc_feature 1..16: note = Description of Artificial Sequence: Synthetic Antisense oligonucleotide
  source 1..16: mol_type = other DNA
ctgtccaagcccggtt

SEQ ID NO: 806 - DNA, 15 bp, synthetic construct
  misc_feature 1..15: note = Description of Artificial Sequence: Synthetic Antisense oligonucleotide
  source 1..15: mol_type = other DNA
ctgtccaagcccggt

SEQ ID NO: 807 - DNA, 14 bp, synthetic construct
  misc_feature 1..14: note = Description of Artificial Sequence: Synthetic Antisense oligonucleotide
  source 1..14: mol_type = other DNA
ctgtccaagcccgg

SEQ ID NO: 808 - DNA, 13 bp, synthetic construct
  misc_feature 1..13: note = Description of Artificial Sequence: Synthetic Antisense oligonucleotide
  source 1..13: mol_type = other DNA
ctgtccaagcccg

SEQ ID NO: 809 - DNA, 12 bp, synthetic construct
  misc_feature 1..12: note = Description of Artificial Sequence: Synthetic Antisense oligonucleotide
  source 1..12: mol_type = other DNA
ctgtccaagccc

SEQ ID NO: 810 - DNA, 11 bp, synthetic construct
  misc_feature 1..11: note = Description of Artificial Sequence: Synthetic Antisense oligonucleotide
  source 1..11: mol_type = other DNA
ctgtccaagcc

SEQ ID NO: 811 - DNA, 10 bp, synthetic construct
  misc_feature 1..10: note = Description of Artificial Sequence: Synthetic Antisense oligonucleotide
  source 1..10: mol_type = other DNA
ctgtccaagc

SEQ ID NO: 812-813 - skipped (2 entries)

SEQ ID NO: 814 - DNA, 20 bp, synthetic construct
  misc_feature 1..20: note = Description of Artificial Sequence: Synthetic Antisense oligonucleotide
  source 1..20: mol_type = other DNA
gttctgtccaagcccggttg

SEQ ID NO: 815 - DNA, 19 bp, synthetic construct
  misc_feature 1..19: note = Description of Artificial Sequence: Synthetic Antisense oligonucleotide
  source 1..19: mol_type = other DNA
gttctgtccaagcccggtt

SEQ ID NO: 816 - DNA, 18 bp, synthetic construct
  misc_feature 1..18: note = Description of Artificial Sequence: Synthetic Antisense oligonucleotide
  source 1..18: mol_type = other DNA
gttctgtccaagcccggt

SEQ ID NO: 817 - DNA, 17 bp, synthetic construct
  misc_feature 1..17: note = Description of Artificial Sequence: Synthetic Antisense oligonucleotide
  source 1..17: mol_type = other DNA
gttctgtccaagcccgg

SEQ ID NO: 818 - DNA, 16 bp, synthetic construct
  misc_feature 1..16: note = Description of Artificial Sequence: Synthetic Antisense oligonucleotide
  source 1..16: mol_type = other DNA
gttctgtccaagcccg

SEQ ID NO: 819 - DNA, 15 bp, synthetic construct
  misc_feature 1..15: note = Description of Artificial Sequence: Synthetic Antisense oligonucleotide
  source 1..15: mol_type = other DNA
gttctgtccaagccc

SEQ ID NO: 820 - DNA, 14 bp, synthetic construct
  misc_feature 1..14: note = Description of Artificial Sequence: Synthetic Antisense oligonucleotide
  source 1..14: mol_type = other DNA
gttctgtccaagcc

SEQ ID NO: 821 - DNA, 13 bp, synthetic construct
  misc_feature 1..13: note = Description of Artificial Sequence: Synthetic Antisense oligonucleotide
  source 1..13: mol_type = other DNA
gttctgtccaagc

SEQ ID NO: 822 - DNA, 12 bp, synthetic construct
  misc_feature 1..12: note = Description of Artificial Sequence: Synthetic Antisense oligonucleotide
  source 1..12: mol_type = other DNA
gttctgtccaag

SEQ ID NO: 823 - DNA, 11 bp, synthetic construct
  misc_feature 1..11: note = Description of Artificial Sequence: Synthetic Antisense oligonucleotide
  source 1..11: mol_type = other DNA
gttctgtccaa

SEQ ID NO: 824 - DNA, 10 bp, synthetic construct
  misc_feature 1..10: note = Description of Artificial Sequence: Synthetic Antisense oligonucleotide
  source 1..10: mol_type = other DNA
gttctgtcca

SEQ ID NO: 825-826 - skipped (2 entries)

SEQ ID NO: 827 - DNA, 20 bp, synthetic construct
  misc_feature 1..20: note = Description of Artificial Sequence: Synthetic Antisense oligonucleotide
  source 1..20: mol_type = other DNA
agttctgtccaagcccggtt

SEQ ID NO: 828 - DNA, 19 bp, synthetic construct
  misc_feature 1..19: note = Description of Artificial Sequence: Synthetic Antisense oligonucleotide
  source 1..19: mol_type = other DNA
agttctgtccaagcccggt

SEQ ID NO: 829 - DNA, 18 bp, synthetic construct
  misc_feature 1..18: note = Description of Artificial Sequence: Synthetic Antisense oligonucleotide
  source 1..18: mol_type = other DNA
agttctgtccaagcccgg

SEQ ID NO: 830 - DNA, 17 bp, synthetic construct
  misc_feature 1..17: note = Description of Artificial Sequence: Synthetic Antisense oligonucleotide
  source 1..17: mol_type = other DNA
agttctgtccaagcccg

SEQ ID NO: 831 - DNA, 16 bp, synthetic construct
  misc_feature 1..16: note = Description of Artificial Sequence: Synthetic Antisense oligonucleotide
  source 1..16: mol_type = other DNA
agttctgtccaagccc

SEQ ID NO: 832 - DNA, 15 bp, synthetic construct
  misc_feature 1..15: note = Description of Artificial Sequence: Synthetic Antisense oligonucleotide
  source 1..15: mol_type = other DNA
agttctgtccaagcc

SEQ ID NO: 833 - DNA, 14 bp, synthetic construct
  misc_feature 1..14: note = Description of Artificial Sequence: Synthetic Antisense oligonucleotide
  source 1..14: mol_type = other DNA
agttctgtccaagc

SEQ ID NO: 834 - DNA, 13 bp, synthetic construct
  misc_feature 1..13: note = Description of Artificial Sequence: Synthetic Antisense oligonucleotide
  source 1..13: mol_type = other DNA
agttctgtccaag

SEQ ID NO: 835 - DNA, 12 bp, synthetic construct
  misc_feature 1..12: note = Description of Artificial Sequence: Synthetic Antisense oligonucleotide
  source 1..12: mol_type = other DNA
agttctgtccaa

SEQ ID NO: 836 - DNA, 11 bp, synthetic construct
  misc_feature 1..11: note = Description of Artificial Sequence: Synthetic Antisense oligonucleotide
  source 1..11: mol_type = other DNA
agttctgtcca

SEQ ID NO: 837 - DNA, 10 bp, synthetic construct
  misc_feature 1..10: note = Description of Artificial Sequence: Synthetic Antisense oligonucleotide
  source 1..10: mol_type = other DNA
agttctgtcc

SEQ ID NO: 838-839 - skipped (2 entries)

SEQ ID NO: 840 - DNA, 20 bp, synthetic construct
  misc_feature 1..20: note = Description of Artificial Sequence: Synthetic Antisense oligonucleotide
  source 1..20: mol_type = other DNA
aagttctgtccaagcccggt

SEQ ID NO: 841 - DNA, 19 bp, synthetic construct
  misc_feature 1..19: note = Description of Artificial Sequence: Synthetic Antisense oligonucleotide
  source 1..19: mol_type = other DNA
aagttctgtccaagcccgg

SEQ ID NO: 842 - DNA, 18 bp, synthetic construct
  misc_feature 1..18: note = Description of Artificial Sequence: Synthetic Antisense oligonucleotide
  source 1..18: mol_type = other DNA
aagttctgtccaagcccg

SEQ ID NO: 843 - DNA, 17 bp, synthetic construct
  misc_feature 1..17: note = Description of Artificial Sequence: Synthetic Antisense oligonucleotide
  source 1..17: mol_type = other DNA
aagttctgtccaagccc

SEQ ID NO: 844 - DNA, 16 bp, synthetic construct
  misc_feature 1..16: note = Description of Artificial Sequence: Synthetic Antisense oligonucleotide
  source 1..16: mol_type = other DNA
aagttctgtccaagcc

SEQ ID NO: 845 - DNA, 15 bp, synthetic construct
  misc_feature 1..15: note = Description of Artificial Sequence: Synthetic Antisense oligonucleotide
  source 1..15: mol_type = other DNA
aagttctgtccaagc

SEQ ID NO: 846 - DNA, 14 bp, synthetic construct
  misc_feature 1..14: note = Description of Artificial Sequence: Synthetic Antisense oligonucleotide
  source 1..14: mol_type = other DNA
aagttctgtccaag

SEQ ID NO: 847 - DNA, 13 bp, synthetic construct
  misc_feature 1..13: note = Description of Artificial Sequence: Synthetic Antisense oligonucleotide
  source 1..13: mol_type = other DNA
aagttctgtccaa

SEQ ID NO: 848 - DNA, 12 bp, synthetic construct
  misc_feature 1..12: note = Description of Artificial Sequence: Synthetic Antisense oligonucleotide
  source 1..12: mol_type = other DNA
aagttctgtcca

SEQ ID NO: 849 - DNA, 11 bp, synthetic construct
  misc_feature 1..11: note = Description of Artificial Sequence: Synthetic Antisense oligonucleotide
  source 1..11: mol_type = other DNA
aagttctgtcc

SEQ ID NO: 850 - DNA, 10 bp, synthetic construct
  misc_feature 1..10: note = Description of Artificial Sequence: Synthetic Antisense oligonucleotide
  source 1..10: mol_type = other DNA
aagttctgtc

SEQ ID NO: 851-852 - skipped (2 entries)

SEQ ID NO: 853 - DNA, 20 bp, synthetic construct
  misc_feature 1..20: note = Description of Artificial Sequence: Synthetic Antisense oligonucleotide
  source 1..20: mol_type = other DNA
taagttctgtccaagcccgg

SEQ ID NO: 854 - DNA, 19 bp, synthetic construct
  misc_feature 1..19: note = Description of Artificial Sequence: Synthetic Antisense oligonucleotide
  source 1..19: mol_type = other DNA
taagttctgtccaagcccg

SEQ ID NO: 855 - DNA, 18 bp, synthetic construct
  misc_feature 1..18: note = Description of Artificial Sequence: Synthetic Antisense oligonucleotide
  source 1..18: mol_type = other DNA
taagttctgtccaagccc

SEQ ID NO: 856 - DNA, 17 bp, synthetic construct
  misc_feature 1..17: note = Description of Artificial Sequence: Synthetic Antisense oligonucleotide
  source 1..17: mol_type = other DNA
taagttctgtccaagcc

SEQ ID NO: 857 - DNA, 16 bp, synthetic construct
  misc_feature 1..16: note = Description of Artificial Sequence: Synthetic Antisense oligonucleotide
  source 1..16: mol_type = other DNA
taagttctgtccaagc

SEQ ID NO: 858 - DNA, 14 bp, synthetic construct
  misc_feature 1..14: note = Description of Artificial Sequence: Synthetic Antisense oligonucleotide
  source 1..14: mol_type = other DNA
taagttctgtccaa

SEQ ID NO: 859 - DNA, 13 bp, synthetic construct
  misc_feature 1..13: note = Description of Artificial Sequence: Synthetic Antisense oligonucleotide
  source 1..13: mol_type = other DNA
taagttctgtcca

SEQ ID NO: 860 - DNA, 12 bp, synthetic construct
  misc_feature 1..12: note = Description of Artificial Sequence: Synthetic Antisense oligonucleotide
  source 1..12: mol_type = other DNA
taagttctgtcc

SEQ ID NO: 861 - DNA, 11 bp, synthetic construct
  misc_feature 1..11: note = Description of Artificial Sequence: Synthetic Antisense oligonucleotide
  source 1..11: mol_type = other DNA
taagttctgtc

SEQ ID NO: 862 - DNA, 10 bp, synthetic construct
  misc_feature 1..10: note = Description of Artificial Sequence: Synthetic Antisense oligonucleotide
  source 1..10: mol_type = other DNA
taagttctgt

SEQ ID NO: 863-864 - skipped (2 entries)

SEQ ID NO: 865 - DNA, 20 bp, synthetic construct
  misc_feature 1..20: note = Description of Artificial Sequence: Synthetic Antisense oligonucleotide
  source 1..20: mol_type = other DNA
gtaagttctgtccaagcccg

SEQ ID NO: 866 - DNA, 19 bp, synthetic construct
  misc_feature 1..19: note = Description of Artificial Sequence: Synthetic Antisense oligonucleotide
  source 1..19: mol_type = other DNA
gtaagttctgtccaagccc

SEQ ID NO: 867 - DNA, 17 bp, synthetic construct
  misc_feature 1..17: note = Description of Artificial Sequence: Synthetic Antisense oligonucleotide
  source 1..17: mol_type = other DNA
gtaagttctgtccaagc

SEQ ID NO: 868 - DNA, 16 bp, synthetic construct
  misc_feature 1..16: note = Description of Artificial Sequence: Synthetic Antisense oligonucleotide
  source 1..16: mol_type = other DNA
gtaagttctgtccaag

SEQ ID NO: 869 - DNA, 15 bp, synthetic construct
  misc_feature 1..15: note = Description of Artificial Sequence: Synthetic Antisense oligonucleotide
  source 1..15: mol_type = other DNA
gtaagttctgtccaa

SEQ ID NO: 870 - DNA, 14 bp, synthetic construct
  misc_feature 1..14: note = Description of Artificial Sequence: Synthetic Antisense oligonucleotide
  source 1..14: mol_type = other DNA
gtaagttctgtcca

SEQ ID NO: 871 - DNA, 13 bp, synthetic construct
  misc_feature 1..13: note = Description of Artificial Sequence: Synthetic Antisense oligonucleotide
  source 1..13: mol_type = other DNA
gtaagttctgtcc

SEQ ID NO: 872 - DNA, 12 bp, synthetic construct
  misc_feature 1..12: note = Description of Artificial Sequence: Synthetic Antisense oligonucleotide
  source 1..12: mol_type = other DNA
gtaagttctgtc

SEQ ID NO: 873 - DNA, 11 bp, synthetic construct
  misc_feature 1..11: note = Description of Artificial Sequence: Synthetic Antisense oligonucleotide
  source 1..11: mol_type = other DNA
gtaagttctgt

SEQ ID NO: 874 - DNA, 10 bp, synthetic construct
  misc_feature 1..10: note = Description of Artificial Sequence: Synthetic Antisense oligonucleotide
  source 1..10: mol_type = other DNA
gtaagttctg

SEQ ID NO: 875-876 - skipped (2 entries)

SEQ ID NO: 877 - DNA, 20 bp, synthetic construct
  misc_feature 1..20: note = Description of Artificial Sequence: Synthetic Antisense oligonucleotide
  source 1..20: mol_type = other DNA
ggtaagttctgtccaagccc

SEQ ID NO: 878 - DNA, 19 bp, synthetic construct
  misc_feature 1..19: note = Description of Artificial Sequence: Synthetic Antisense oligonucleotide
  source 1..19: mol_type = other DNA
ggtaagttctgtccaagcc

SEQ ID NO: 879 - DNA, 17 bp, synthetic construct
  misc_feature 1..17: note = Description of Artificial Sequence: Synthetic Antisense oligonucleotide
  source 1..17: mol_type = other DNA
ggtaagttctgtccaag

SEQ ID NO: 880 - DNA, 16 bp, synthetic construct
  misc_feature 1..16: note = Description of Artificial Sequence: Synthetic Antisense oligonucleotide
  source 1..16: mol_type = other DNA
ggtaagttctgtccaa

SEQ ID NO: 881 - DNA, 15 bp, synthetic construct
  misc_feature 1..15: note = Description of Artificial Sequence: Synthetic Antisense oligonucleotide
  source 1..15: mol_type = other DNA
ggtaagttctgtcca

SEQ ID NO: 882 - DNA, 14 bp, synthetic construct
  misc_feature 1..14: note = Description of Artificial Sequence: Synthetic Antisense oligonucleotide
  source 1..14: mol_type = other DNA
ggtaagttctgtcc

SEQ ID NO: 883 - DNA, 13 bp, synthetic construct
  misc_feature 1..13: note = Description of Artificial Sequence: Synthetic Antisense oligonucleotide
  source 1..13: mol_type = other DNA
ggtaagttctgtc

SEQ ID NO: 884 - DNA, 12 bp, synthetic construct
  misc_feature 1..12: note = Description of Artificial Sequence: Synthetic Antisense oligonucleotide
  source 1..12: mol_type = other DNA
ggtaagttctgt

SEQ ID NO: 885 - DNA, 11 bp, synthetic construct
  misc_feature 1..11: note = Description of Artificial Sequence: Synthetic Antisense oligonucleotide
  source 1..11: mol_type = other DNA
ggtaagttctg

SEQ ID NO: 886 - DNA, 10 bp, synthetic construct
  misc_feature 1..10: note = Description of Artificial Sequence: Synthetic Antisense oligonucleotide
  source 1..10: mol_type = other DNA
ggtaagttct

SEQ ID NO: 887-888 - skipped (2 entries)

SEQ ID NO: 889 - DNA, 20 bp, synthetic construct
  misc_feature 1..20: note = Description of Artificial Sequence: Synthetic Antisense oligonucleotide
  source 1..20: mol_type = other DNA
cggtaagttctgtccaagcc

SEQ ID NO: 890 - DNA, 19 bp, synthetic construct
  misc_feature 1..19: note = Description of Artificial Sequence: Synthetic Antisense oligonucleotide
  source 1..19: mol_type = other DNA
cggtaagttctgtccaagc

SEQ ID NO: 891 - DNA, 18 bp, synthetic construct
  misc_feature 1..18: note = Description of Artificial Sequence: Synthetic Antisense oligonucleotide
  source 1..18: mol_type = other DNA
cggtaagttctgtccaag

SEQ ID NO: 892 - DNA, 17 bp, synthetic construct
  misc_feature 1..17: note = Description of Artificial Sequence: Synthetic Antisense oligonucleotide
  source 1..17: mol_type = other DNA
cggtaagttctgtccaa

SEQ ID NO: 893 - DNA, 16 bp, synthetic construct
  misc_feature 1..16: note = Description of Artificial Sequence: Synthetic Antisense oligonucleotide
  source 1..16: mol_type = other DNA
cggtaagttctgtcca

SEQ ID NO: 894 - DNA, 15 bp, synthetic construct
  misc_feature 1..15: note = Description of Artificial Sequence: Synthetic Antisense oligonucleotide
  source 1..15: mol_type = other DNA
cggtaagttctgtcc

SEQ ID NO: 895 - DNA, 14 bp, synthetic construct
  misc_feature 1..14: note = Description of Artificial Sequence: Synthetic Antisense oligonucleotide
  source 1..14: mol_type = other DNA
cggtaagttctgtc

SEQ ID NO: 896 - DNA, 13 bp, synthetic construct
  misc_feature 1..13: note = Description of Artificial Sequence: Synthetic Antisense oligonucleotide
  source 1..13: mol_type = other DNA
cggtaagttctgt

SEQ ID NO: 897 - DNA, 12 bp, synthetic construct
  misc_feature 1..12: note = Description of Artificial Sequence: Synthetic Antisense oligonucleotide
  source 1..12: mol_type = other DNA
cggtaagttctg

SEQ ID NO: 898 - DNA, 11 bp, synthetic construct
  misc_feature 1..11: note = Description of Artificial Sequence: Synthetic Antisense oligonucleotide
  source 1..11: mol_type = other DNA
cggtaagttct

SEQ ID NO: 899 - DNA, 10 bp, synthetic construct
  misc_feature 1..10: note = Description of Artificial Sequence: Synthetic Antisense oligonucleotide
  source 1..10: mol_type = other DNA
cggtaagttc

SEQ ID NO: 900-901 - skipped (2 entries)

SEQ ID NO: 902 - DNA, 20 bp, synthetic construct
  misc_feature 1..20: note = Description of Artificial Sequence: Synthetic Antisense oligonucleotide
  source 1..20: mol_type = other DNA
tcggtaagttctgtccaagc

SEQ ID NO: 903 - DNA, 19 bp, synthetic construct
  misc_feature 1..19: note = Description of Artificial Sequence: Synthetic Antisense oligonucleotide
  source 1..19: mol_type = other DNA
tcggtaagttctgtccaag

SEQ ID NO: 904 - DNA, 18 bp, synthetic construct
  misc_feature 1..18: note = Description of Artificial Sequence: Synthetic Antisense oligonucleotide
  source 1..18: mol_type = other DNA
tcggtaagttctgtccaa

SEQ ID NO: 905 - DNA, 17 bp, synthetic construct
  misc_feature 1..17: note = Description of Artificial Sequence: Synthetic Antisense oligonucleotide
  source 1..17: mol_type = other DNA
tcggtaagttctgtcca

SEQ ID NO: 906 - DNA, 16 bp, synthetic construct
  misc_feature 1..16: note = Description of Artificial Sequence: Synthetic Antisense oligonucleotide
  source 1..16: mol_type = other DNA
tcggtaagttctgtcc

SEQ ID NO: 907 - DNA, 15 bp, synthetic construct
  misc_feature 1..15: note = Description of Artificial Sequence: Synthetic Antisense oligonucleotide
  source 1..15: mol_type = other DNA
tcggtaagttctgtc

SEQ ID NO: 908 - DNA, 14 bp, synthetic construct
  misc_feature 1..14: note = Description of Artificial Sequence: Synthetic Antisense oligonucleotide
  source 1..14: mol_type = other DNA
tcggtaagttctgt

SEQ ID NO: 909 - DNA, 13 bp, synthetic construct
  misc_feature 1..13: note = Description of Artificial Sequence: Synthetic Antisense oligonucleotide
  source 1..13: mol_type = other DNA
tcggtaagttctg

SEQ ID NO: 910 - DNA, 12 bp, synthetic construct
  misc_feature 1..12: note = Description of Artificial Sequence: Synthetic Antisense oligonucleotide
  source 1..12: mol_type = other DNA
tcggtaagttct

SEQ ID NO: 911 - DNA, 11 bp, synthetic construct
  misc_feature 1..11: note = Description of Artificial Sequence: Synthetic Antisense oligonucleotide
  source 1..11: mol_type = other DNA
tcggtaagttc

SEQ ID NO: 912 - DNA, 10 bp, synthetic construct
  misc_feature 1..10: note = Description of Artificial Sequence: Synthetic Antisense oligonucleotide
  source 1..10: mol_type = other DNA
tcggtaagtt

SEQ ID NO: 913 - skipped

SEQ ID NO: 914 - DNA, 20 bp, synthetic construct
  misc_feature 1..20: note = Description of Artificial Sequence: Synthetic Antisense oligonucleotide
  source 1..20: mol_type = other DNA
gtcggtaagttctgtccaag

SEQ ID NO: 915 - DNA, 19 bp, synthetic construct
  misc_feature 1..19: note = Description of Artificial Sequence: Synthetic Antisense oligonucleotide
  source 1..19: mol_type = other DNA
gtcggtaagttctgtccaa

SEQ ID NO: 916 - DNA, 18 bp, synthetic construct
  misc_feature 1..18: note = Description of Artificial Sequence: Synthetic Antisense oligonucleotide
  source 1..18: mol_type = other DNA
gtcggtaagttctgtcca

SEQ ID NO: 917 - DNA, 17 bp, synthetic construct
  misc_feature 1..17: note = Description of Artificial Sequence: Synthetic Antisense oligonucleotide
  source 1..17: mol_type = other DNA
gtcggtaagttctgtcc

SEQ ID NO: 918 - DNA, 16 bp, synthetic construct
  misc_feature 1..16: note = Description of Artificial Sequence: Synthetic Antisense oligonucleotide
  source 1..16: mol_type = other DNA
gtcggtaagttctgtc

SEQ ID NO: 919 - DNA, 15 bp, synthetic construct
  misc_feature 1..15: note = Description of Artificial Sequence: Synthetic Antisense oligonucleotide
  source 1..15: mol_type = other DNA
gtcggtaagttctgt

SEQ ID NO: 920 - DNA, 14 bp, synthetic construct
  misc_feature 1..14: note = Description of Artificial Sequence: Synthetic Antisense oligonucleotide
  source 1..14: mol_type = other DNA
gtcggtaagttctg

SEQ ID NO: 921 - DNA, 13 bp, synthetic construct
  misc_feature 1..13: note = Description of Artificial Sequence: Synthetic Antisense oligonucleotide
  source 1..13: mol_type = other DNA
gtcggtaagttct

SEQ ID NO: 922 - DNA, 12 bp, synthetic construct
  misc_feature 1..12: note = Description of Artificial Sequence: Synthetic Antisense oligonucleotide
  source 1..12: mol_type = other DNA
gtcggtaagttc

SEQ ID NO: 923 - DNA, 11 bp, synthetic construct
  misc_feature 1..11: note = Description of Artificial Sequence: Synthetic Antisense oligonucleotide
  source 1..11: mol_type = other DNA
gtcggtaagtt

SEQ ID NO: 924 - DNA, 10 bp, synthetic construct
  misc_feature 1..10: note = Description of Artificial Sequence: Synthetic Antisense oligonucleotide
  source 1..10: mol_type = other DNA
gtcggtaagt

SEQ ID NO: 925 - DNA, 20 bp, synthetic construct
  misc_feature 1..20: note = Description of Artificial Sequence: Synthetic Antisense oligonucleotide
  source 1..20: mol_type = other DNA
agtcggtaagttctgtccaa

SEQ ID NO: 926 - DNA, 19 bp, synthetic construct
  misc_feature 1..19: note = Description of Artificial Sequence: Synthetic Antisense oligonucleotide
  source 1..19: mol_type = other DNA
agtcggtaagttctgtcca

SEQ ID NO: 927 - DNA, 17 bp, synthetic construct
  misc_feature 1..17: note = Description of Artificial Sequence: Synthetic Antisense oligonucleotide
  source 1..17: mol_type = other DNA
agtcggtaagttctgtc

SEQ ID NO: 928 - DNA, 16 bp, synthetic construct
  misc_feature 1..16: note = Description of Artificial Sequence: Synthetic Antisense oligonucleotide
  source 1..16: mol_type = other DNA
agtcggtaagttctgt

SEQ ID NO: 929 - DNA, 15 bp, synthetic construct
  misc_feature 1..15: note = Description of Artificial Sequence: Synthetic Antisense oligonucleotide
  source 1..15: mol_type = other DNA
agtcggtaagttctg

SEQ ID NO: 930 - DNA, 14 bp, synthetic construct
  misc_feature 1..14: note = Description of Artificial Sequence: Synthetic Antisense oligonucleotide
  source 1..14: mol_type = other DNA
agtcggtaagttct

SEQ ID NO: 931 - DNA, 13 bp, synthetic construct
  misc_feature 1..13: note = Description of Artificial Sequence: Synthetic Antisense oligonucleotide
  source 1..13: mol_type = other DNA
agtcggtaagttc

SEQ ID NO: 932 - DNA, 12 bp, synthetic construct
  misc_feature 1..12: note = Description of Artificial Sequence: Synthetic Antisense oligonucleotide
  source 1..12: mol_type = other DNA
agtcggtaagtt

SEQ ID NO: 933 - DNA, 11 bp, synthetic construct
  misc_feature 1..11: note = Description of Artificial Sequence: Synthetic Antisense oligonucleotide
  source 1..11: mol_type = other DNA
agtcggtaagt

SEQ ID NO: 934 - DNA, 20 bp, synthetic construct
  misc_feature 1..20: note = Description of Artificial Sequence: Synthetic Antisense oligonucleotide
  source 1..20: mol_type = other DNA
cagtcggtaagttctgtcca

SEQ ID NO: 935 - DNA, 19 bp, synthetic construct
  misc_feature 1..19: note = Description of Artificial Sequence: Synthetic Antisense oligonucleotide
  source 1..19: mol_type = other DNA
cagtcggtaagttctgtcc

SEQ ID NO: 936 - DNA, 18 bp, synthetic construct
  misc_feature 1..18: note = Description of Artificial Sequence: Synthetic Antisense oligonucleotide
  source 1..18: mol_type = other DNA
cagtcggtaagttctgtc

SEQ ID NO: 937 - DNA, 17 bp, synthetic construct
  misc_feature 1..17: note = Description of Artificial Sequence: Synthetic Antisense oligonucleotide
  source 1..17: mol_type = other DNA
cagtcggtaagttctgt

SEQ ID NO: 938 - DNA, 16 bp, synthetic construct
  misc_feature 1..16: note = Description of Artificial Sequence: Synthetic Antisense oligonucleotide
  source 1..16: mol_type = other DNA
cagtcggtaagttctg

SEQ ID NO: 939 - DNA, 15 bp, synthetic construct
  misc_feature 1..15: note = Description of Artificial Sequence: Synthetic Antisense oligonucleotide
  source 1..15: mol_type = other DNA
cagtcggtaagttct

SEQ ID NO: 940 - DNA, 14 bp, synthetic construct
  misc_feature 1..14: note = Description of Artificial Sequence: Synthetic Antisense oligonucleotide
  source 1..14: mol_type = other DNA
cagtcggtaagttc

SEQ ID NO: 941 - DNA, 13 bp, synthetic construct
  misc_feature 1..13: note = Description of Artificial Sequence: Synthetic Antisense oligonucleotide
  source 1..13: mol_type = other DNA
cagtcggtaagtt

SEQ ID NO: 942 - DNA, 12 bp, synthetic construct
  misc_feature 1..12: note = Description of Artificial Sequence: Synthetic Antisense oligonucleotide
  source 1..12: mol_type = other DNA
cagtcggtaagt

SEQ ID NO: 943 - DNA, 20 bp, synthetic construct
  misc_feature 1..20: note = Description of Artificial Sequence: Synthetic Antisense oligonucleotide
  source 1..20: mol_type = other DNA
ccagtcggtaagttctgtcc

SEQ ID NO: 944 - DNA, 19 bp, synthetic construct
  misc_feature 1..19: note = Description of Artificial Sequence: Synthetic Antisense oligonucleotide
  source 1..19: mol_type = other DNA
ccagtcggtaagttctgtc

SEQ ID NO: 945 - DNA, 18 bp, synthetic construct
  misc_feature 1..18: note = Description of Artificial Sequence: Synthetic Antisense oligonucleotide
  source 1..18: mol_type = other DNA
ccagtcggtaagttctgt

SEQ ID NO: 946 - DNA, 17 bp, synthetic construct
  misc_feature 1..17: note = Description of Artificial Sequence: Synthetic Antisense oligonucleotide
  source 1..17: mol_type = other DNA
ccagtcggtaagttctg

SEQ ID NO: 947 - DNA, 16 bp, synthetic construct
  misc_feature 1..16: note = Description of Artificial Sequence: Synthetic Antisense oligonucleotide
  source 1..16: mol_type = other DNA
ccagtcggtaagttct

SEQ ID NO: 948 - DNA, 15 bp, synthetic construct
  misc_feature 1..15: note = Description of Artificial Sequence: Synthetic Antisense oligonucleotide
  source 1..15: mol_type = other DNA
ccagtcggtaagttc

SEQ ID NO: 949 - DNA, 14 bp, synthetic construct
  misc_feature 1..14: note = Description of Artificial Sequence: Synthetic Antisense oligonucleotide
  source 1..14: mol_type = other DNA
ccagtcggtaagtt

SEQ ID NO: 950 - DNA, 13 bp, synthetic construct
  misc_feature 1..13: note = Description of Artificial Sequence: Synthetic Antisense oligonucleotide
  source 1..13: mol_type = other DNA
ccagtcggtaagt

SEQ ID NO: 951 - DNA, 20 bp, synthetic construct
  misc_feature 1..20: note = Description of Artificial Sequence: Synthetic Antisense oligonucleotide
  source 1..20: mol_type = other DNA
gccagtcggtaagttctgtc

SEQ ID NO: 952 - DNA, 19 bp, synthetic construct
  misc_feature 1..19: note = Description of Artificial Sequence: Synthetic Antisense oligonucleotide
  source 1..19: mol_type = other DNA
gccagtcggtaagttctgt

SEQ ID NO: 953 - DNA, 18 bp, synthetic construct
  misc_feature 1..18: note = Description of Artificial Sequence: Synthetic Antisense oligonucleotide
  source 1..18: mol_type = other DNA
gccagtcggtaagttctg

SEQ ID NO: 954 - DNA, 17 bp, synthetic construct
  misc_feature 1..17: note = Description of Artificial Sequence: Synthetic Antisense oligonucleotide
  source 1..17: mol_type = other DNA
gccagtcggtaagttct

SEQ ID NO: 955 - DNA, 16 bp, synthetic construct
  misc_feature 1..16: note = Description of Artificial Sequence: Synthetic Antisense oligonucleotide
  source 1..16: mol_type = other DNA
gccagtcggtaagttc

SEQ ID NO: 956 - DNA, 15 bp, synthetic construct
  misc_feature 1..15: note = Description of Artificial Sequence: Synthetic Antisense oligonucleotide
  source 1..15: mol_type = other DNA
gccagtcggtaagtt

SEQ ID NO: 957 - DNA, 14 bp, synthetic construct
  misc_feature 1..14: note = Description of Artificial Sequence: Synthetic Antisense oligonucleotide
  source 1..14: mol_type = other DNA
gccagtcggtaagt

SEQ ID NO: 958 - DNA, 20 bp, synthetic construct
  misc_feature 1..20: note = Description of Artificial Sequence: Synthetic Antisense oligonucleotide
  source 1..20: mol_type = other DNA
tcaaggaagatggcatttct

SEQ ID NO: 959 - DNA, 22 bp, synthetic construct
  misc_feature 1..22: note = Description of Artificial Sequence: Synthetic Antisense oligonucleotide
  source 1..22: mol_type = other DNA
tcaaggaagatggcatttctag

SEQ ID NO: 960 - DNA, 16 bp, synthetic construct
  misc_feature 1..16: note = Description of Artificial Sequence: Synthetic Antisense oligonucleotide
  source 1..16: mol_type = other DNA
tcaaggaagatggcat

SEQ ID NO: 961 - DNA, 15 bp, synthetic construct
  misc_feature 1..15: note = Description of Artificial Sequence: Synthetic Antisense oligonucleotide
  source 1..15: mol_type = other DNA
gaagatggcatttct

SEQ ID NO: 962 - DNA, 21 bp, synthetic construct
  misc_feature 1..21: note = Description of Artificial Sequence: Synthetic Antisense oligonucleotide
  source 1..21: mol_type = other DNA
tcaaggaagatggcatttcta

SEQ ID NO: 963 - DNA, 19 bp, synthetic construct
  misc_feature 1..19: note = Description of Artificial Sequence: Synthetic Antisense oligonucleotide
  source 1..19: mol_type = other DNA
tcaaggaagatggcatttc

SEQ ID NO: 964 - DNA, 18 bp, synthetic construct
  misc_feature 1..18: note = Description of Artificial Sequence: Synthetic Antisense oligonucleotide
  source 1..18: mol_type = other DNA
tcaaggaagatggcattt

SEQ ID NO: 965 - DNA, 17 bp, synthetic construct
  misc_feature 1..17: note = Description of Artificial Sequence: Synthetic Antisense oligonucleotide
  source 1..17: mol_type = other DNA
tcaaggaagatggcatt

SEQ ID NO: 966 - DNA, 15 bp, synthetic construct
  misc_feature 1..15: note = Description of Artificial Sequence: Synthetic Antisense oligonucleotide
  source 1..15: mol_type = other DNA
tcaaggaagatggca

SEQ ID NO: 967 - DNA, 14 bp, synthetic construct
  misc_feature 1..14: note = Description of Artificial Sequence: Synthetic Antisense oligonucleotide
  source 1..14: mol_type = other DNA
tcaaggaagatggc

SEQ ID NO: 968 - DNA, 13 bp, synthetic construct
  misc_feature 1..13: note = Description of Artificial Sequence: Synthetic Antisense oligonucleotide
  source 1..13: mol_type = other DNA
tcaaggaagatgg

SEQ ID NO: 969 - DNA, 12 bp, synthetic construct
  misc_feature 1..12: note = Description of Artificial Sequence: Synthetic Antisense oligonucleotide
  source 1..12: mol_type = other DNA
tcaaggaagatg

SEQ ID NO: 970 - DNA, 11 bp, synthetic construct
  misc_feature 1..11: note = Description of Artificial Sequence: Synthetic Antisense oligonucleotide
  source 1..11: mol_type = other DNA
tcaaggaagat

SEQ ID NO: 971 - DNA, 10 bp, synthetic construct
  misc_feature 1..10: note = Description of Artificial Sequence: Synthetic Antisense oligonucleotide
  source 1..10: mol_type = other DNA
tcaaggaaga

SEQ ID NO: 972 - skipped

SEQ ID NO: 973 - DNA, 21 bp, synthetic construct
  misc_feature 1..21: note = Description of Artificial Sequence: Synthetic Antisense oligonucleotide
  source 1..21: mol_type = other DNA
caaggaagatggcatttctag

SEQ ID NO: 974 - DNA, 20 bp, synthetic construct
  misc_feature 1..20: note = Description of Artificial Sequence: Synthetic Antisense oligonucleotide
  source 1..20: mol_type = other DNA
caaggaagatggcatttcta

SEQ ID NO: 975 - DNA, 19 bp, synthetic construct
  misc_feature 1..19: note = Description of Artificial Sequence: Synthetic Antisense oligonucleotide
  source 1..19: mol_type = other DNA
caaggaagatggcatttct

SEQ ID NO: 976 - DNA, 18 bp, synthetic construct
  misc_feature 1..18: note = Description of Artificial Sequence: Synthetic Antisense oligonucleotide
  source 1..18: mol_type = other DNA
caaggaagatggcatttc

SEQ ID NO: 977 - DNA, 17 bp, synthetic construct
  misc_feature 1..17: note = Description of Artificial Sequence: Synthetic Antisense oligonucleotide
  source 1..17: mol_type = other DNA
caaggaagatggcattt

SEQ ID NO: 978 - DNA, 16 bp, synthetic construct
  misc_feature 1..16: note = Description of Artificial Sequence: Synthetic Antisense oligonucleotide
  source 1..16: mol_type = other DNA
caaggaagatggcatt

SEQ ID NO: 979 - DNA, 15 bp, synthetic construct
  misc_feature 1..15: note = Description of Artificial Sequence: Synthetic Antisense oligonucleotide
  source 1..15: mol_type = other DNA
caaggaagatggcat

SEQ ID NO: 980 - DNA, 14 bp, synthetic construct
  misc_feature 1..14: note = Description of Artificial Sequence: Synthetic Antisense oligonucleotide
  source 1..14: mol_type = other DNA
caaggaagatggca

SEQ ID NO: 981 - DNA, 13 bp, synthetic construct
  misc_feature 1..13: note = Description of Artificial Sequence: Synthetic Antisense oligonucleotide
  source 1..13: mol_type = other DNA
caaggaagatggc

SEQ ID NO: 982 - DNA, 12 bp, synthetic construct
  misc_feature 1..12: note = Description of Artificial Sequence: Synthetic Antisense oligonucleotide
  source 1..12: mol_type = other DNA
caaggaagatgg

SEQ ID NO: 983 - DNA, 11 bp, synthetic construct
  misc_feature 1..11: note = Description of Artificial Sequence: Synthetic Antisense oligonucleotide
  source 1..11: mol_type = other DNA
caaggaagatg

SEQ ID NO: 984 - DNA, 10 bp, synthetic construct
  misc_feature 1..10: note = Description of Artificial Sequence: Synthetic Antisense oligonucleotide
  source 1..10: mol_type = other DNA
caaggaagat

SEQ ID NO: 985 - DNA, 20 bp, synthetic construct
  misc_feature 1..20: note = Description of Artificial Sequence: Synthetic Antisense oligonucleotide
  source 1..20: mol_type = other DNA
aaggaagatggcatttctag

SEQ ID NO: 986 - DNA, 19 bp, synthetic construct
  misc_feature 1..19: note = Description of Artificial Sequence: Synthetic Antisense oligonucleotide
  source 1..19: mol_type = other DNA
aaggaagatggcatttcta

SEQ ID NO: 987 - DNA, 18 bp, synthetic construct
  misc_feature 1..18: note = Description of Artificial Sequence: Synthetic Antisense oligonucleotide
  source 1..18: mol_type = other DNA
aaggaagatggcatttct

SEQ ID NO: 988 - DNA, 17 bp, synthetic construct
  misc_feature 1..17: note = Description of Artificial Sequence: Synthetic Antisense oligonucleotide
  source 1..17: mol_type = other DNA
aaggaagatggcatttc

SEQ ID NO: 989 - DNA, 16 bp, synthetic construct
  misc_feature 1..16: note = Description of Artificial Sequence: Synthetic Antisense oligonucleotide
  source 1..16: mol_type = other DNA
aaggaagatggcattt

SEQ ID NO: 990 - DNA, 15 bp, synthetic construct
  misc_feature 1..15: note = Description of Artificial Sequence: Synthetic Antisense oligonucleotide
  source 1..15: mol_type = other DNA
aaggaagatggcatt

SEQ ID NO: 991 - DNA, 14 bp, synthetic construct
  misc_feature 1..14: note = Description of Artificial Sequence: Synthetic Antisense oligonucleotide
  source 1..14: mol_type = other DNA
aaggaagatggcat

SEQ ID NO: 992 - DNA, 13 bp, synthetic construct
  misc_feature 1..13: note = Description of Artificial Sequence: Synthetic Antisense oligonucleotide
  source 1..13: mol_type = other DNA
aaggaagatggca

SEQ ID NO: 993 - DNA, 12 bp, synthetic construct
  misc_feature 1..12: note = Description of Artificial Sequence: Synthetic Antisense oligonucleotide
  source 1..12: mol_type = other DNA
aaggaagatggc

SEQ ID NO: 994 - DNA, 11 bp, synthetic construct
  misc_feature 1..11: note = Description of Artificial Sequence: Synthetic Antisense oligonucleotide
  source 1..11: mol_type = other DNA
aaggaagatgg

SEQ ID NO: 995 - DNA, 10 bp, synthetic construct
  misc_feature 1..10: note = Description of Artificial Sequence: Synthetic Antisense oligonucleotide
  source 1..10: mol_type = other DNA
aaggaagatg

SEQ ID NO: 996 - skipped

SEQ ID NO: 997 - DNA, 19 bp, synthetic construct
  misc_feature 1..19: note = Description of Artificial Sequence: Synthetic Antisense oligonucleotide
  source 1..19: mol_type = other DNA
aggaagatggcatttctag

SEQ ID NO: 998 - DNA, 18 bp, synthetic construct
  misc_feature 1..18: note = Description of Artificial Sequence: Synthetic Antisense oligonucleotide
  source 1..18: mol_type = other DNA
aggaagatggcatttcta

SEQ ID NO: 999 - DNA, 17 bp, synthetic construct
  misc_feature 1..17: note = Description of Artificial Sequence: Synthetic Antisense oligonucleotide
  source 1..17: mol_type = other DNA
aggaagatggcatttct

SEQ ID NO: 1000 - DNA, 16 bp, synthetic construct
  misc_feature 1..16: note = Description of Artificial Sequence: Synthetic Antisense oligonucleotide
  source 1..16: mol_type = other DNA
aggaagatggcatttc

SEQ ID NO: 1001 - DNA, 15 bp, synthetic construct
  misc_feature 1..15: note = Description of Artificial Sequence: Synthetic Antisense oligonucleotide
  source 1..15: mol_type = other DNA
aggaagatggcattt

SEQ ID NO: 1002 - DNA, 14 bp, synthetic construct
  misc_feature 1..14: note = Description of Artificial Sequence: Synthetic Antisense oligonucleotide
  source 1..14: mol_type = other DNA
aggaagatggcatt

SEQ ID NO: 1003 - DNA, 13 bp, synthetic construct
  misc_feature 1..13: note = Description of Artificial Sequence: Synthetic Antisense oligonucleotide
  source 1..13: mol_type = other DNA
aggaagatggcat

SEQ ID NO: 1004 - DNA, 12 bp, synthetic construct
  misc_feature 1..12: note = Description of Artificial Sequence: Synthetic Antisense oligonucleotide
  source 1..12: mol_type = other DNA
aggaagatggca

SEQ ID NO: 1005 - DNA, 10 bp, synthetic construct
  misc_feature 1..10: note = Description of Artificial Sequence: Synthetic Antisense oligonucleotide
  source 1..10: mol_type = other DNA
aggaagatgg

SEQ ID NO: 1006-1007 - skipped (2 entries)

SEQ ID NO: 1008 - DNA, 18 bp, synthetic construct
  misc_feature 1..18: note = Description of Artificial Sequence: Synthetic Antisense oligonucleotide
  source 1..18: mol_type = other DNA
ggaagatggcatttctag

SEQ ID NO: 1009 - DNA, 17 bp, synthetic construct
  misc_feature 1..17: note = Description of Artificial Sequence: Synthetic Antisense oligonucleotide
  source 1..17: mol_type = other DNA
ggaagatggcatttcta

SEQ ID NO: 1010 - DNA, 16 bp, synthetic construct
  misc_feature 1..16: note = Description of Artificial Sequence: Synthetic Antisense oligonucleotide
  source 1..16: mol_type = other DNA
ggaagatggcatttct

SEQ ID NO: 1011 - DNA, 15 bp, synthetic construct
  misc_feature 1..15: note = Description of Artificial Sequence: Synthetic Antisense oligonucleotide
  source 1..15: mol_type = other DNA
ggaagatggcatttc

SEQ ID NO: 1012 - DNA, 14 bp, synthetic construct
  misc_feature 1..14: note = Description of Artificial Sequence: Synthetic Antisense oligonucleotide
  source 1..14: mol_type = other DNA
ggaagatggcattt

SEQ ID NO: 1013 - DNA, 13 bp, synthetic construct
  misc_feature 1..13: note = Description of Artificial Sequence: Synthetic Antisense oligonucleotide
  source 1..13: mol_type = other DNA
ggaagatggcatt

SEQ ID NO: 1014 - DNA, 12 bp, synthetic construct
  misc_feature 1..12: note = Description of Artificial Sequence: Synthetic Antisense oligonucleotide
  source 1..12: mol_type = other DNA
ggaagatggcat

SEQ ID NO: 1015 - DNA, 11 bp, synthetic construct
  misc_feature 1..11: note = Description of Artificial Sequence: Synthetic Antisense oligonucleotide
  source 1..11: mol_type = other DNA
ggaagatggca

SEQ ID NO: 1016 - DNA, 10 bp, synthetic construct
  misc_feature 1..10: note = Description of Artificial Sequence: Synthetic Antisense oligonucleotide
  source 1..10: mol_type = other DNA
ggaagatggc

SEQ ID NO: 1017 - skipped

SEQ ID NO: 1018 - DNA, 17 bp, synthetic construct
  misc_feature 1..17: note = Description of Artificial Sequence: Synthetic Antisense oligonucleotide
  source 1..17: mol_type = other DNA
gaagatggcatttctag

SEQ ID NO: 1019 - DNA, 16 bp, synthetic construct
  misc_feature 1..16: note = Description of Artificial Sequence: Synthetic Antisense oligonucleotide
  source 1..16: mol_type = other DNA
gaagatggcatttcta

SEQ ID NO: 1020 - DNA, 14 bp, synthetic construct
  misc_feature 1..14: note = Description of Artificial Sequence: Synthetic Antisense oligonucleotide
  source 1..14: mol_type = other DNA
gaagatggcatttc

SEQ ID NO: 1021 - DNA, 13 bp, synthetic construct
  misc_feature 1..13: note = Description of Artificial Sequence: Synthetic Antisense oligonucleotide
  source 1..13: mol_type = other DNA
gaagatggcattt

SEQ ID NO: 1022 - DNA, 12 bp, synthetic construct
  misc_feature 1..12: note = Description of Artificial Sequence: Synthetic Antisense oligonucleotide
  source 1..12: mol_type = other DNA
gaagatggcatt

SEQ ID NO: 1023 - DNA, 11 bp, synthetic construct
  misc_feature 1..11: note = Description of Artificial Sequence: Synthetic Antisense oligonucleotide
  source 1..11: mol_type = other DNA
gaagatggcat

SEQ ID NO: 1024 - DNA, 10 bp, synthetic construct
  misc_feature 1..10: note = Description of Artificial Sequence: Synthetic Antisense oligonucleotide
  source 1..10: mol_type = other DNA
gaagatggca

SEQ ID NO: 1025-1026 - skipped (2 entries)

SEQ ID NO: 1027 - DNA, 16 bp, synthetic construct
  misc_feature 1..16: note = Description of Artificial Sequence: Synthetic Antisense oligonucleotide
  source 1..16: mol_type = other DNA
aagatggcatttctag

SEQ ID NO: 1028 - DNA, 15 bp, synthetic construct
  misc_feature 1..15: note = Description of Artificial Sequence: Synthetic Antisense oligonucleotide
  source 1..15: mol_type = other DNA
aagatggcatttcta

SEQ ID NO: 1029 - DNA, 14 bp, synthetic construct
  misc_feature 1..14: note = Description of Artificial Sequence: Synthetic Antisense oligonucleotide
  source 1..14: mol_type = other DNA
aagatggcatttct

SEQ ID NO: 1030 - DNA, 13 bp, synthetic construct
  misc_feature 1..13: note = Description of Artificial Sequence: Synthetic Antisense oligonucleotide
  source 1..13: mol_type = other DNA
aagatggcatttc

SEQ ID NO: 1031 - DNA, 12 bp, synthetic construct
  misc_feature 1..12: note = Description of Artificial Sequence: Synthetic Antisense oligonucleotide
  source 1..12: mol_type = other DNA
aagatggcattt

SEQ ID NO: 1032 - DNA, 11 bp, synthetic construct
  misc_feature 1..11: note = Description of Artificial Sequence: Synthetic Antisense oligonucleotide
  source 1..11: mol_type = other DNA
aagatggcatt

SEQ ID NO: 1033 - DNA, 10 bp, synthetic construct
  misc_feature 1..10: note = Description of Artificial Sequence: Synthetic Antisense oligonucleotide
  source 1..10: mol_type = other DNA
aagatggcat

SEQ ID NO: 1034-1035 - skipped (2 entries)

SEQ ID NO: 1036 - DNA, 15 bp, synthetic construct
  misc_feature 1..15: note = Description of Artificial Sequence: Synthetic Antisense oligonucleotide
  source 1..15: mol_type = other DNA
agatggcatttctag

SEQ ID NO: 1037 - DNA, 14 bp, synthetic construct
  misc_feature 1..14: note = Description of Artificial Sequence: Synthetic Antisense oligonucleotide
  source 1..14: mol_type = other DNA
agatggcatttcta

SEQ ID NO: 1038 - DNA, 13 bp, synthetic construct
  misc_feature 1..13: note = Description of Artificial Sequence: Synthetic Antisense oligonucleotide
  source 1..13: mol_type = other DNA
agatggcatttct

SEQ ID NO: 1039 - DNA, 12 bp, synthetic construct
  misc_feature 1..12: note = Description of Artificial Sequence: Synthetic Antisense oligonucleotide
  source 1..12: mol_type = other DNA
agatggcatttc

SEQ ID NO: 1040 - DNA, 11 bp, synthetic construct
  misc_feature 1..11: note = Description of Artificial Sequence: Synthetic Antisense oligonucleotide
  source 1..11: mol_type = other DNA
agatggcattt

SEQ ID NO: 1041 - DNA, 10 bp, synthetic construct
  misc_feature 1..10: note = Description of Artificial Sequence: Synthetic Antisense oligonucleotide
  source 1..10: mol_type = other DNA
agatggcatt

SEQ ID NO: 1042-1043 - skipped (2 entries)

SEQ ID NO: 1044 - DNA, 30 bp, synthetic construct; identical to SEQ ID NO: 8
  misc_feature 1..30: note = Description of Artificial Sequence: Synthetic Antisense oligonucleotide
  source 1..30: mol_type = other DNA

SEQ ID NO: 1045 - DNA, 29 bp, synthetic construct
  misc_feature 1..29: note = Description of Artificial Sequence: Synthetic Antisense oligonucleotide
  source 1..29: mol_type = other DNA
ctccaacatcaaggaagatggcatttcta

SEQ ID NO: 1046 - DNA, 28 bp, synthetic construct
  misc_feature 1..28: note = Description of Artificial Sequence: Synthetic Antisense oligonucleotide
  source 1..28: mol_type = other DNA
ctccaacatcaaggaagatggcatttct

SEQ ID NO: 1047 - DNA, 27 bp, synthetic construct
  misc_feature 1..27: note = Description of Artificial Sequence: Synthetic Antisense oligonucleotide
  source 1..27: mol_type = other DNA
ctccaacatcaaggaagatggcatttc

SEQ ID NO: 1048 - DNA, 26 bp, synthetic construct
  misc_feature 1..26: note = Description of Artificial Sequence: Synthetic Antisense oligonucleotide
  source 1..26: mol_type = other DNA
ctccaacatcaaggaagatggcattt

SEQ ID NO: 1049 - DNA, 25 bp, synthetic construct
  misc_feature 1..25: note = Description of Artificial Sequence: Synthetic Antisense oligonucleotide
  source 1..25: mol_type = other DNA
ctccaacatcaaggaagatggcatt

SEQ ID NO: 1050 - DNA, 24 bp, synthetic construct
  misc_feature 1..24: note = Description of Artificial Sequence: Synthetic Antisense oligonucleotide
  source 1..24: mol_type = other DNA
ctccaacatcaaggaagatggcat

SEQ ID NO: 1051 - DNA, 23 bp, synthetic construct
  misc_feature 1..23: note = Description of Artificial Sequence: Synthetic Antisense oligonucleotide
  source 1..23: mol_type = other DNA
ctccaacatcaaggaagatggca

SEQ ID NO: 1052 - DNA, 22 bp, synthetic construct
  misc_feature 1..22: note = Description of Artificial Sequence: Synthetic Antisense oligonucleotide
  source 1..22: mol_type = other DNA
ctccaacatcaaggaagatggc

SEQ ID NO: 1053 - DNA, 21 bp, synthetic construct
  misc_feature 1..21: note = Description of Artificial Sequence: Synthetic Antisense oligonucleotide
  source 1..21: mol_type = other DNA
ctccaacatcaaggaagatgg

SEQ ID NO: 1054 - DNA, 20 bp, synthetic construct
  misc_feature 1..20: note = Description of Artificial Sequence: Synthetic Antisense oligonucleotide
  source 1..20: mol_type = other DNA
ctccaacatcaaggaagatg

SEQ ID NO: 1055 - DNA, 19 bp, synthetic construct
  misc_feature 1..19: note = Description of Artificial Sequence: Synthetic Antisense oligonucleotide
  source 1..19: mol_type = other DNA
ctccaacatcaaggaagat

SEQ ID NO: 1056 - DNA, 18 bp, synthetic construct
  misc_feature 1..18: note = Description of Artificial Sequence: Synthetic Antisense oligonucleotide
  source 1..18: mol_type = other DNA
ctccaacatcaaggaaga

SEQ ID NO: 1057 - DNA, 17 bp, synthetic construct
  misc_feature 1..17: note = Description of Artificial Sequence: Synthetic Antisense oligonucleotide
  source 1..17: mol_type = other DNA
ctccaacatcaaggaag

SEQ ID NO: 1058 - DNA, 29 bp, synthetic construct
  misc_feature 1..29: note = Description of Artificial Sequence: Synthetic Antisense oligonucleotide
  source 1..29: mol_type = other DNA
tccaacatcaaggaagatggcatttctag

SEQ ID NO: 1059 - DNA, 28 bp, synthetic construct
  misc_feature 1..28: note = Description of Artificial Sequence: Synthetic Antisense oligonucleotide
  source 1..28: mol_type = other DNA
tccaacatcaaggaagatggcatttcta

SEQ ID NO: 1060 - DNA, 27 bp, synthetic construct
  misc_feature 1..27: note = Description of Artificial Sequence: Synthetic Antisense oligonucleotide
  source 1..27: mol_type = other DNA
tccaacatcaaggaagatggcatttct

SEQ ID NO: 1061 - DNA, 26 bp, synthetic construct
  misc_feature 1..26: note = Description of Artificial Sequence: Synthetic Antisense oligonucleotide
  source 1..26: mol_type = other DNA
tccaacatcaaggaagatggcatttc

SEQ ID NO: 1062 - DNA, 25 bp, synthetic construct
  misc_feature 1..25: note = Description of Artificial Sequence: Synthetic Antisense oligonucleotide
  source 1..25: mol_type = other DNA
tccaacatcaaggaagatggcattt

SEQ ID NO: 1063 - DNA, 24 bp, synthetic construct
  misc_feature 1..24: note = Description of Artificial Sequence: Synthetic Antisense oligonucleotide
  source 1..24: mol_type = other DNA
tccaacatcaaggaagatggcatt

SEQ ID NO: 1064 - DNA, 23 bp, synthetic construct
  misc_feature 1..23: note = Description of Artificial Sequence: Synthetic Antisense oligonucleotide
  source 1..23: mol_type = other DNA
tccaacatcaaggaagatggcat

SEQ ID NO: 1065 - DNA, 22 bp, synthetic construct
  misc_feature 1..22: note = Description of Artificial Sequence: Synthetic Antisense oligonucleotide
  source 1..22: mol_type = other DNA
tccaacatcaaggaagatggca

SEQ ID NO: 1066 - DNA, 21 bp, synthetic construct
  misc_feature 1..21: note = Description of Artificial Sequence: Synthetic Antisense oligonucleotide
  source 1..21: mol_type = other DNA
tccaacatcaaggaagatggc

SEQ ID NO: 1067 - DNA, 20 bp, synthetic construct
  misc_feature 1..20: note = Description of Artificial Sequence: Synthetic Antisense oligonucleotide
  source 1..20: mol_type = other DNA
tccaacatcaaggaagatgg

SEQ ID NO: 1068 - DNA, 19 bp, synthetic construct
  misc_feature 1..19: note = Description of Artificial Sequence: Synthetic Antisense oligonucleotide
  source 1..19: mol_type = other DNA
tccaacatcaaggaagatg

SEQ ID NO: 1069 - DNA, 18 bp, synthetic construct
  misc_feature 1..18: note = Description of Artificial Sequence: Synthetic Antisense oligonucleotide
  source 1..18: mol_type = other DNA
tccaacatcaaggaagat

SEQ ID NO: 1070 - DNA, 17 bp, synthetic construct
  misc_feature 1..17: note = Description of Artificial Sequence: Synthetic Antisense oligonucleotide
  source 1..17: mol_type = other DNA
tccaacatcaaggaaga

SEQ ID NO: 1071 - DNA, 16 bp, synthetic construct
  misc_feature 1..16: note = Description of Artificial Sequence: Synthetic Antisense oligonucleotide
  source 1..16: mol_type = other DNA
tccaacatcaaggaag

SEQ ID NO: 1072 - DNA, 28 bp, synthetic construct
  misc_feature 1..28: note = Description of Artificial Sequence: Synthetic Antisense oligonucleotide
  source 1..28: mol_type = other DNA
ccaacatcaaggaagatggcatttctag

SEQ ID NO: 1073 - DNA, 27 bp, synthetic construct
  misc_feature 1..27: note = Description of Artificial Sequence: Synthetic Antisense oligonucleotide
  source 1..27: mol_type = other DNA
ccaacatcaaggaagatggcatttcta

SEQ ID NO: 1074 - DNA, 26 bp, synthetic construct
  misc_feature 1..26: note = Description of Artificial Sequence: Synthetic Antisense oligonucleotide
  source 1..26: mol_type = other DNA
ccaacatcaaggaagatggcatttct

SEQ ID NO: 1075 - DNA, 25 bp, synthetic construct
  misc_feature 1..25: note = Description of Artificial Sequence: Synthetic Antisense oligonucleotide
  source 1..25: mol_type = other DNA
ccaacatcaaggaagatggcatttc

SEQ ID NO: 1076 - DNA, 24 bp, synthetic construct
  misc_feature 1..24: note = Description of Artificial Sequence: Synthetic Antisense oligonucleotide
  source 1..24: mol_type = other DNA
ccaacatcaaggaagatggcattt

SEQ ID NO: 1077 - DNA, 23 bp, synthetic construct
  misc_feature 1..23: note = Description of Artificial Sequence: Synthetic Antisense oligonucleotide
  source 1..23: mol_type = other DNA
ccaacatcaaggaagatggcatt

SEQ ID NO: 1078 - DNA, 22 bp, synthetic construct
  misc_feature 1..22: note = Description of Artificial Sequence: Synthetic Antisense oligonucleotide
  source 1..22: mol_type = other DNA
ccaacatcaaggaagatggcat

SEQ ID NO: 1079 - DNA, 21 bp, synthetic construct
  misc_feature 1..21: note = Description of Artificial Sequence: Synthetic Antisense oligonucleotide
  source 1..21: mol_type = other DNA
ccaacatcaaggaagatggca

SEQ ID NO: 1080 - DNA, 20 bp, synthetic construct
  misc_feature 1..20: note = Description of Artificial Sequence: Synthetic Antisense oligonucleotide
  source 1..20: mol_type = other DNA
ccaacatcaaggaagatggc

SEQ ID NO: 1081 - DNA, 19 bp, synthetic construct
  misc_feature 1..19: note = Description of Artificial Sequence: Synthetic Antisense oligonucleotide
  source 1..19: mol_type = other DNA
ccaacatcaaggaagatgg

SEQ ID NO: 1082 - DNA, 18 bp, synthetic construct
  misc_feature 1..18: note = Description of Artificial Sequence: Synthetic Antisense oligonucleotide
  source 1..18: mol_type = other DNA
ccaacatcaaggaagatg

SEQ ID NO: 1083 - DNA, 17 bp, synthetic construct
  misc_feature 1..17: note = Description of Artificial Sequence: Synthetic Antisense oligonucleotide
  source 1..17: mol_type = other DNA
ccaacatcaaggaagat

SEQ ID NO: 1084 - DNA, 16 bp, synthetic construct
  misc_feature 1..16: note = Description of Artificial Sequence: Synthetic Antisense oligonucleotide
  source 1..16: mol_type = other DNA
ccaacatcaaggaaga

SEQ ID NO: 1085 - DNA, 15 bp, synthetic construct
  misc_feature 1..15: note = Description of Artificial Sequence: Synthetic Antisense oligonucleotide
  source 1..15: mol_type = other DNA
ccaacatcaaggaag

SEQ ID NO: 1086 - DNA, 27 bp, synthetic construct
  misc_feature 1..27: note = Description of Artificial Sequence: Synthetic Antisense oligonucleotide
  source 1..27: mol_type = other DNA
caacatcaaggaagatggcatttctag

SEQ ID NO: 1087 - DNA, 26 bp, synthetic construct
  misc_feature 1..26: note = Description of Artificial Sequence: Synthetic Antisense oligonucleotide
  source 1..26: mol_type = other DNA
caacatcaaggaagatggcatttcta

SEQ ID NO: 1088 - DNA, 25 bp, synthetic construct
  misc_feature 1..25: note = Description of Artificial Sequence: Synthetic Antisense oligonucleotide
  source 1..25: mol_type = other DNA
caacatcaaggaagatggcatttct

SEQ ID NO: 1089 - DNA, 24 bp, synthetic construct
  misc_feature 1..24: note = Description of Artificial Sequence: Synthetic Antisense oligonucleotide
  source 1..24: mol_type = other DNA
caacatcaaggaagatggcatttc

SEQ ID NO: 1090 - DNA, 23 bp, synthetic construct
  misc_feature 1..23: note = Description of Artificial Sequence: Synthetic Antisense oligonucleotide
  source 1..23: mol_type = other DNA
caacatcaaggaagatggcattt

SEQ ID NO: 1091 - DNA, 22 bp, synthetic construct
  misc_feature 1..22: note = Description of Artificial Sequence: Synthetic Antisense oligonucleotide
  source 1..22: mol_type = other DNA
caacatcaaggaagatggcatt

SEQ ID NO: 1092 - DNA, 21 bp, synthetic construct
  misc_feature 1..21: note = Description of Artificial Sequence: Synthetic Antisense oligonucleotide
  source 1..21: mol_type = other DNA
caacatcaaggaagatggcat

SEQ ID NO: 1093 - DNA, 20 bp, synthetic construct
  misc_feature 1..20: note = Description of Artificial Sequence: Synthetic Antisense oligonucleotide
  source 1..20: mol_type = other DNA
caacatcaaggaagatggca

SEQ ID NO: 1094 - DNA, 19 bp, synthetic construct
  misc_feature 1..19: note = Description of Artificial Sequence: Synthetic Antisense oligonucleotide
  source 1..19: mol_type = other DNA
caacatcaaggaagatggc

SEQ ID NO: 1095 - DNA, 18 bp, synthetic construct
  misc_feature 1..18: note = Description of Artificial Sequence: Synthetic Antisense oligonucleotide
  source 1..18: mol_type = other DNA
caacatcaaggaagatgg

SEQ ID NO: 1096 - DNA, 17 bp, synthetic construct
  misc_feature 1..17: note = Description of Artificial Sequence: Synthetic Antisense oligonucleotide
  source 1..17: mol_type = other DNA
caacatcaaggaagatg

SEQ ID NO: 1097 - DNA, 16 bp, synthetic construct
  misc_feature 1..16: note = Description of Artificial Sequence: Synthetic Antisense oligonucleotide
  source 1..16: mol_type = other DNA
caacatcaaggaagat

SEQ ID NO: 1098 - DNA, 15 bp, synthetic construct
  misc_feature 1..15: note = Description of Artificial Sequence: Synthetic Antisense oligonucleotide
  source 1..15: mol_type = other DNA
caacatcaaggaaga

SEQ ID NO: 1099 - DNA, 14 bp, synthetic construct
  misc_feature 1..14: note = Description of Artificial Sequence: Synthetic Antisense oligonucleotide
  source 1..14: mol_type = other DNA
caacatcaaggaag

SEQ ID NO: 1100 - DNA, 26 bp, synthetic construct
  misc_feature 1..26: note = Description of Artificial Sequence: Synthetic Antisense oligonucleotide
  source 1..26: mol_type = other DNA
aacatcaaggaagatggcatttctag

SEQ ID NO: 1101 - DNA, 25 bp, synthetic construct
  misc_feature 1..25: note = Description of Artificial Sequence: Synthetic Antisense oligonucleotide
  source 1..25: mol_type = other DNA
aacatcaaggaagatggcatttcta

SEQ ID NO: 1102 - DNA, 24 bp, synthetic construct
  misc_feature 1..24: note = Description of Artificial Sequence: Synthetic Antisense oligonucleotide
  source 1..24: mol_type = other DNA
aacatcaaggaagatggcatttct

SEQ ID NO: 1103 - DNA, 23 bp, synthetic construct
  misc_feature 1..23: note = Description of Artificial Sequence: Synthetic Antisense oligonucleotide
  source 1..23: mol_type = other DNA
aacatcaaggaagatggcatttc

SEQ ID NO: 1104 - DNA, 22 bp, synthetic construct
  misc_feature 1..22: note = Description of Artificial Sequence: Synthetic Antisense oligonucleotide
  source 1..22: mol_type = other DNA
aacatcaaggaagatggcattt

SEQ ID NO: 1105 - DNA, 21 bp, synthetic construct
  misc_feature 1..21: note = Description of Artificial Sequence: Synthetic Antisense oligonucleotide
  source 1..21: mol_type = other DNA
aacatcaaggaagatggcatt

SEQ ID NO: 1106 - DNA, 20 bp, synthetic construct
  misc_feature 1..20: note = Description of Artificial Sequence: Synthetic Antisense oligonucleotide
  source 1..20: mol_type = other DNA
aacatcaaggaagatggcat

SEQ ID NO: 1107 - DNA, 19 bp, synthetic construct
  misc_feature 1..19: note = Description of Artificial Sequence: Synthetic Antisense oligonucleotide
  source 1..19: mol_type = other DNA
aacatcaaggaagatggca

SEQ ID NO: 1108 - DNA, 18 bp, synthetic construct
  misc_feature 1..18: note = Description of Artificial Sequence: Synthetic Antisense oligonucleotide
  source 1..18: mol_type = other DNA
aacatcaaggaagatggc

SEQ ID NO: 1109 - DNA, 17 bp, synthetic construct
  misc_feature 1..17: note = Description of Artificial Sequence: Synthetic Antisense oligonucleotide
  source 1..17: mol_type = other DNA
aacatcaaggaagatgg

SEQ ID NO: 1110 - DNA, 16 bp, synthetic construct
  misc_feature 1..16: note = Description of Artificial Sequence: Synthetic Antisense oligonucleotide
  source 1..16: mol_type = other DNA
aacatcaaggaagatg

SEQ ID NO: 1111 - DNA, 15 bp, synthetic construct
  misc_feature 1..15: note = Description of Artificial Sequence: Synthetic Antisense oligonucleotide
  source 1..15: mol_type = other DNA
aacatcaaggaagat

SEQ ID NO: 1112 - DNA, 14 bp, synthetic construct
  misc_feature 1..14: note = Description of Artificial Sequence: Synthetic Antisense oligonucleotide
  source 1..14: mol_type = other DNA
aacatcaaggaaga

SEQ ID NO: 1113 - DNA, 13 bp, synthetic construct
  misc_feature 1..13: note = Description of Artificial Sequence: Synthetic Antisense oligonucleotide
  source 1..13: mol_type = other DNA
aacatcaaggaag

SEQ ID NO: 1114 - DNA, 25 bp, synthetic construct
  misc_feature 1..25: note = Description of Artificial Sequence: Synthetic Antisense oligonucleotide
  source 1..25: mol_type = other DNA
acatcaaggaagatggcatttctag

SEQ ID NO: 1115 - DNA, 24 bp, synthetic construct
  misc_feature 1..24: note = Description of Artificial Sequence: Synthetic Antisense oligonucleotide
  source 1..24: mol_type = other DNA
acatcaaggaagatggcatttcta

SEQ ID NO: 1116 - DNA, 23 bp, synthetic construct
  misc_feature 1..23: note = Description of Artificial Sequence: Synthetic Antisense oligonucleotide
  source 1..23: mol_type = other DNA
acatcaaggaagatggcatttct

SEQ ID NO: 1117 - DNA, 22 bp, synthetic construct
  misc_feature 1..22: note = Description of Artificial Sequence: Synthetic Antisense oligonucleotide
  source 1..22: mol_type = other DNA
acatcaaggaagatggcatttc

SEQ ID NO: 1118 - DNA, 21 bp, synthetic construct
  misc_feature 1..21: note = Description of Artificial Sequence: Synthetic Antisense oligonucleotide
  source 1..21: mol_type = other DNA
acatcaaggaagatggcattt

SEQ ID NO: 1119 - DNA, 20 bp, synthetic construct
  misc_feature 1..20: note = Description of Artificial Sequence: Synthetic Antisense oligonucleotide
  source 1..20: mol_type = other DNA
acatcaaggaagatggcatt

SEQ ID NO: 1120 - DNA, 19 bp, synthetic construct
  misc_feature 1..19: note = Description of Artificial Sequence: Synthetic Antisense oligonucleotide
  source 1..19: mol_type = other DNA
acatcaaggaagatggcat

SEQ ID NO: 1121 - DNA, 18 bp, synthetic construct
  misc_feature 1..18: note = Description of Artificial Sequence: Synthetic Antisense oligonucleotide
  source 1..18: mol_type = other DNA
acatcaaggaagatggca

SEQ ID NO: 1122 - DNA, 17 bp, synthetic construct
  misc_feature 1..17: note = Description of Artificial Sequence: Synthetic Antisense oligonucleotide
  source 1..17: mol_type = other DNA
acatcaaggaagatggc

SEQ ID NO: 1123 - DNA, 16 bp, synthetic construct
  misc_feature 1..16: note = Description of Artificial Sequence: Synthetic Antisense oligonucleotide
  source 1..16: mol_type = other DNA
acatcaaggaagatgg

SEQ ID NO: 1124 - DNA, 15 bp, synthetic construct
  misc_feature 1..15: note = Description of Artificial Sequence: Synthetic Antisense oligonucleotide
  source 1..15: mol_type = other DNA
acatcaaggaagatg

SEQ ID NO: 1125 - DNA, 14 bp, synthetic construct
  misc_feature 1..14: note = Description of Artificial Sequence: Synthetic Antisense oligonucleotide
  source 1..14: mol_type = other DNA
acatcaaggaagat

SEQ ID NO: 1126 - DNA, 13 bp, synthetic construct
  misc_feature 1..13: note = Description of Artificial Sequence: Synthetic Antisense oligonucleotide
  source 1..13: mol_type = other DNA
acatcaaggaaga

SEQ ID NO: 1127 - DNA, 12 bp, synthetic construct
  misc_feature 1..12: note = Description of Artificial Sequence: Synthetic Antisense oligonucleotide
  source 1..12: mol_type = other DNA
acatcaaggaag

SEQ ID NO: 1128 - DNA, 24 bp, synthetic construct
  misc_feature 1..24: note = Description of Artificial Sequence: Synthetic Antisense oligonucleotide
  source 1..24: mol_type = other DNA
catcaaggaagatggcatttctag

SEQ ID NO: 1129 - DNA, 23 bp, synthetic construct
  misc_feature 1..23: note = Description of Artificial Sequence: Synthetic Antisense oligonucleotide
  source 1..23: mol_type = other DNA
catcaaggaagatggcatttcta

SEQ ID NO: 1130 - DNA, 22 bp, synthetic construct
  misc_feature 1..22: note = Description of Artificial Sequence: Synthetic Antisense oligonucleotide
  source 1..22: mol_type = other DNA
catcaaggaagatggcatttct

SEQ ID NO: 1131 - DNA, 21 bp, synthetic construct
  misc_feature 1..21: note = Description of Artificial Sequence: Synthetic Antisense oligonucleotide
  source 1..21: mol_type = other DNA
catcaaggaagatggcatttc

SEQ ID NO: 1132 - DNA, 20 bp, synthetic construct
  misc_feature 1..20: note = Description of Artificial Sequence: Synthetic Antisense oligonucleotide
  source 1..20: mol_type = other DNA
catcaaggaagatggcattt

SEQ ID NO: 1133 - DNA, 19 bp, synthetic construct
  misc_feature 1..19: note = Description of Artificial Sequence: Synthetic Antisense oligonucleotide
  source 1..19: mol_type = other DNA
catcaaggaagatggcatt

SEQ ID NO: 1134 - DNA, 18 bp, synthetic construct
  misc_feature 1..18: note = Description of Artificial Sequence: Synthetic Antisense oligonucleotide
  source 1..18: mol_type = other DNA
catcaaggaagatggcat

SEQ ID NO: 1135 - DNA, 17 bp, synthetic construct
  misc_feature 1..17: note = Description of Artificial Sequence: Synthetic Antisense oligonucleotide
  source 1..17: mol_type = other DNA
catcaaggaagatggca

SEQ ID NO: 1136 - DNA, 16 bp, synthetic construct
  misc_feature 1..16: note = Description of Artificial Sequence: Synthetic Antisense oligonucleotide
  source 1..16: mol_type = other DNA
catcaaggaagatggc

SEQ ID NO: 1137 - DNA, 15 bp, synthetic construct
  misc_feature 1..15: note = Description of Artificial Sequence: Synthetic Antisense oligonucleotide
  source 1..15: mol_type = other DNA
catcaaggaagatgg

SEQ ID NO: 1138 - DNA, 14 bp, synthetic construct
  misc_feature 1..14: note = Description of Artificial Sequence: Synthetic Antisense oligonucleotide
  source 1..14: mol_type = other DNA
catcaaggaagatg

SEQ ID NO: 1139 - DNA, 13 bp, synthetic construct
  misc_feature 1..13: note = Description of Artificial Sequence: Synthetic Antisense oligonucleotide
  source 1..13: mol_type = other DNA
catcaaggaagat

SEQ ID NO: 1140 - DNA, 12 bp, synthetic construct
  misc_feature 1..12: note = Description of Artificial Sequence: Synthetic Antisense oligonucleotide
  source 1..12: mol_type = other DNA
catcaaggaaga

SEQ ID NO: 1141 - DNA, 11 bp, synthetic construct
  misc_feature 1..11: note = Description of Artificial Sequence: Synthetic Antisense oligonucleotide
  source 1..11: mol_type = other DNA
catcaaggaag

SEQ ID NO: 1142 - DNA, 23 bp, synthetic construct
  misc_feature 1..23: note = Description of Artificial Sequence: Synthetic Antisense oligonucleotide
  source 1..23: mol_type = other DNA
atcaaggaagatggcatttctag

SEQ ID NO: 1143 - DNA, 22 bp, synthetic construct
  misc_feature 1..22: note = Description of Artificial Sequence: Synthetic Antisense oligonucleotide
  source 1..22: mol_type = other DNA
atcaaggaagatggcatttcta

SEQ ID NO: 1144 - DNA, 21 bp, synthetic construct
  misc_feature 1..21: note = Description of Artificial Sequence: Synthetic Antisense oligonucleotide
  source 1..21: mol_type = other DNA
atcaaggaagatggcatttct

SEQ ID NO: 1145 - DNA, 20 bp, synthetic construct
  misc_feature 1..20: note = Description of Artificial Sequence: Synthetic Antisense oligonucleotide
  source 1..20: mol_type = other DNA
atcaaggaagatggcatttc

SEQ ID NO: 1146 - DNA, 19 bp, synthetic construct
  misc_feature 1..19: note = Description of Artificial Sequence: Synthetic Antisense oligonucleotide
  source 1..19: mol_type = other DNA
atcaaggaagatggcattt

SEQ ID NO: 1147 - DNA, 18 bp, synthetic construct
  misc_feature 1..18: note = Description of Artificial Sequence: Synthetic Antisense oligonucleotide
  source 1..18: mol_type = other DNA
atcaaggaagatggcatt

SEQ ID NO: 1148 - DNA, 17 bp, synthetic construct
  misc_feature 1..17: note = Description of Artificial Sequence: Synthetic Antisense oligonucleotide
  source 1..17: mol_type = other DNA
atcaaggaagatggcat

SEQ ID NO: 1149 - DNA, 16 bp, synthetic construct
  misc_feature 1..16: note = Description of Artificial Sequence: Synthetic Antisense oligonucleotide
  source 1..16: mol_type = other DNA
atcaaggaagatggca

SEQ ID NO: 1150 - DNA, 15 bp, synthetic construct
  misc_feature 1..15: note = Description of Artificial Sequence: Synthetic Antisense oligonucleotide
  source 1..15: mol_type = other DNA
atcaaggaagatggc

SEQ ID NO: 1151 - DNA, 14 bp, synthetic construct
  misc_feature 1..14: note = Description of Artificial Sequence: Synthetic Antisense oligonucleotide
  source 1..14: mol_type = other DNA
atcaaggaagatgg

SEQ ID NO: 1152 - DNA, 13 bp, synthetic construct
  misc_feature 1..13: note = Description of Artificial Sequence: Synthetic Antisense oligonucleotide
  source 1..13: mol_type = other DNA
atcaaggaagatg

SEQ ID NO: 1153 - DNA, 12 bp, synthetic construct
  misc_feature 1..12: note = Description of Artificial Sequence: Synthetic Antisense oligonucleotide
  source 1..12: mol_type = other DNA
atcaaggaagat

SEQ ID NO: 1154 - DNA, 11 bp, synthetic construct
  misc_feature 1..11: note = Description of Artificial Sequence: Synthetic Antisense oligonucleotide
  source 1..11: mol_type = other DNA
atcaaggaaga

SEQ ID NO: 1155 - DNA, 10 bp, synthetic construct
  misc_feature 1..10: note = Description of Artificial Sequence: Synthetic Antisense oligonucleotide
  source 1..10: mol_type = other DNA
atcaaggaag

SEQ ID NO: 1156 - DNA, 18 bp, synthetic construct
  misc_feature 1..18: note = Description of Artificial Sequence: Synthetic Antisense oligonucleotide
  modified_base 9: mod_base = OTHER; note = 5-methyl
  modified_base 13..14: mod_base = OTHER; note = 5-methyl
  modified_base 18: mod_base = OTHER; note = 5-methyl
  source 1..18: mol_type = other DNA
ggtaagttctgtccaagc

SEQ ID NO: 1157 - DNA, 18 bp, synthetic construct
  misc_feature 1..18: note = Description of Artificial Sequence: Synthetic Antisense oligonucleotide
  modified_base 8: mod_base = OTHER; note = 5-methyl
  modified_base 12..13: mod_base = OTHER; note = 5-methyl
  modified_base 17..18: mod_base = OTHER; note = 5-methyl
  source 1..18: mol_type = other DNA
gtaagttctgtccaagcc

SEQ ID NO: 1158 - DNA, 18 bp, synthetic construct
  misc_feature 1..18: note = Description of Artificial Sequence: Synthetic Antisense oligonucleotide
  modified_base 4: mod_base = OTHER; note = 5-methyl
  modified_base 13: mod_base = OTHER; note = 5-methyl
  modified_base 17..18: mod_base = OTHER; note = 5-methyl
  source 1..18: mol_type = other DNA
agtcggtaagttctgtcc

SEQ ID NO: 1159 - DNA, 18 bp, synthetic construct
  misc_feature 1..18: note = Description of Artificial Sequence: Synthetic Antisense oligonucleotide
  modified_base 1: mod_base = OTHER; note = 5-methyl
  modified_base 5..6: mod_base = OTHER; note = 5-methyl
  modified_base 10..12: mod_base = OTHER; note = 5-methyl
  source 1..18: mol_type = other DNA
ctgtccaagcccggttga

SEQ ID NO: 1160 - DNA, 15 bp, synthetic construct
  misc_feature 1..15: note = Description of Artificial Sequence: Synthetic Antisense oligonucleotide
  modified_base 7: mod_base = OTHER; note = 5-methyl
  modified_base 11..12: mod_base = OTHER; note = 5-methyl
  source 1..15: mol_type = other DNA
taagttctgtccaag

SEQ ID NO: 1161 - DNA, 20 bp, synthetic construct
  misc_feature 1..20: note = Description of Artificial Sequence: Synthetic Antisense oligonucleotide
  modified_base 3: mod_base = OTHER; note = 5-methyl
  modified_base 7..8: mod_base = OTHER; note = 5-methyl
  modified_base 12..14: mod_base = OTHER; note = 5-methyl
  source 1..20: mol_type = other DNA
ttctgtccaagcccggttga

SEQ ID NO: 1162 - DNA, 19 bp, synthetic construct
  misc_feature 1..19: note = Description of Artificial Sequence: Synthetic Antisense oligonucleotide
  modified_base 3: mod_base = OTHER; note = 5-methyl
  modified_base 7..8: mod_base = OTHER; note = 5-methyl
  modified_base 12..14: mod_base = OTHER; note = 5-methyl
  source 1..19: mol_type = other DNA
ttctgtccaagcccggttg

SEQ ID NO: 1163 - DNA, 18 bp, synthetic construct
  misc_feature 1..18: note = Description of Artificial Sequence: Synthetic Antisense oligonucleotide
  modified_base 3: mod_base = OTHER; note = 5-methyl
  modified_base 7..8: mod_base = OTHER; note = 5-methyl
  modified_base 12..14: mod_base = OTHER; note = 5-methyl
  source 1..18: mol_type = other DNA
ttctgtccaagcccggtt

SEQ ID NO: 1164 - DNA, 17 bp, synthetic construct
  misc_feature 1..17: note = Description of Artificial Sequence: Synthetic Antisense oligonucleotide
  modified_base 3: mod_base = OTHER; note = 5-methyl
  modified_base 7..8: mod_base = OTHER; note = 5-methyl
  modified_base 12..14: mod_base = OTHER; note = 5-methyl
  source 1..17: mol_type = other DNA
ttctgtccaagcccggt

SEQ ID NO: 1165 - DNA, 16 bp, synthetic construct
  misc_feature 1..16: note = Description of Artificial Sequence: Synthetic Antisense oligonucleotide
  modified_base 3: mod_base = OTHER; note = 5-methyl
  modified_base 7..8: mod_base = OTHER; note = 5-methyl
  modified_base 12..14: mod_base = OTHER; note = 5-methyl
  source 1..16: mol_type = other DNA
ttctgtccaagcccgg

SEQ ID NO: 1166 - DNA, 15 bp, synthetic construct
  misc_feature 1..15: note = Description of Artificial Sequence: Synthetic Antisense oligonucleotide
  modified_base 3: mod_base = OTHER; note = 5-methyl
  modified_base 7..8: mod_base = OTHER; note = 5-methyl
  modified_base 12..14: mod_base = OTHER; note = 5-methyl
  source 1..15: mol_type = other DNA
ttctgtccaagcccg

SEQ ID NO: 1167 - DNA, 14 bp, synthetic construct
  misc_feature 1..14: note = Description of Artificial Sequence: Synthetic Antisense oligonucleotide
  modified_base 3: mod_base = OTHER; note = 5-methyl
  modified_base 7..8: mod_base = OTHER; note = 5-methyl
  modified_base 12..14: mod_base = OTHER; note = 5-methyl
  source 1..14: mol_type = other DNA
ttctgtccaagccc

SEQ ID NO: 1168 - DNA, 13 bp, synthetic construct
  misc_feature 1..13: note = Description of Artificial Sequence: Synthetic Antisense oligonucleotide
  modified_base 3: mod_base = OTHER; note = 5-methyl
  modified_base 7..8: mod_base = OTHER; note = 5-methyl
  modified_base 12..13: mod_base = OTHER; note = 5-methyl
  source 1..13: mol_type = other DNA
ttctgtccaagcc

SEQ ID NO: 1169 - DNA, 12 bp, synthetic construct
  misc_feature 1..12: note = Description of Artificial Sequence: Synthetic Antisense oligonucleotide
  modified_base 3: mod_base = OTHER; note = 5-methyl
  modified_base 7..8: mod_base = OTHER; note = 5-methyl
  modified_base 12: mod_base = OTHER; note = 5-methyl
  source 1..12: mol_type = other DNA
ttctgtccaagc

SEQ ID NO: 1170 - DNA, 11 bp, synthetic construct
  misc_feature 1..11: note = Description of Artificial Sequence: Synthetic Antisense oligonucleotide
  modified_base 3: mod_base = OTHER; note = 5-methyl
  modified_base 7..8: mod_base = OTHER; note = 5-methyl
  source 1..11: mol_type = other DNA
ttctgtccaag

SEQ ID NO: 1171 - DNA, 10 bp, synthetic construct
  misc_feature 1..10: note = Description of Artificial Sequence: Synthetic Antisense oligonucleotide
  modified_base 3: mod_base = OTHER; note = 5-methyl
  modified_base 7..8: mod_base = OTHER; note = 5-methyl
  source 1..10: mol_type = other DNA
ttctgtccaa

SEQ ID NO: 1172-1173 - skipped (2 entries)

SEQ ID NO: 1174 - DNA, 19 bp, synthetic construct
  misc_feature 1..19: note = Description of Artificial Sequence: Synthetic Antisense oligonucleotide
  modified_base 2: mod_base = OTHER; note = 5-methyl
  modified_base 6..7: mod_base = OTHER; note = 5-methyl
  modified_base 11..13: mod_base = OTHER; note = 5-methyl
  source 1..19: mol_type = other DNA
tctgtccaagcccggttga

SEQ ID NO: 1175 - DNA, 18 bp, synthetic construct
  misc_feature 1..18: note = Description of Artificial Sequence: Synthetic Antisense oligonucleotide
  modified_base 2: mod_base = OTHER; note = 5-methyl
  modified_base 6..7: mod_base = OTHER; note = 5-methyl
  modified_base 11..13: mod_base = OTHER; note = 5-methyl
  source 1..18: mol_type = other DNA
tctgtccaagcccggttg

SEQ ID NO: 1176 - DNA, 17 bp, synthetic construct
  misc_feature 1..17: note = Description of Artificial Sequence: Synthetic Antisense oligonucleotide
  modified_base 2: mod_base = OTHER; note = 5-methyl
  modified_base 6..7: mod_base = OTHER; note = 5-methyl
  modified_base 11..13: mod_base = OTHER; note = 5-methyl
  source 1..17: mol_type = other DNA
tctgtccaagcccggtt

SEQ ID NO: 1177 - DNA, 16 bp, synthetic construct
  misc_feature 1..16: note = Description of Artificial Sequence: Synthetic Antisense oligonucleotide
  modified_base 2: mod_base = OTHER; note = 5-methyl
  modified_base 6..7: mod_base = OTHER; note = 5-methyl
  modified_base 11..13: mod_base = OTHER; note = 5-methyl
  source 1..16: mol_type = other DNA
tctgtccaagcccggt

SEQ ID NO: 1178 - DNA, 15 bp, synthetic construct
  misc_feature 1..15: note = Description of Artificial Sequence: Synthetic Antisense oligonucleotide
  modified_base 2: mod_base = OTHER; note = 5-methyl
  modified_base 6..7: mod_base = OTHER; note = 5-methyl
  modified_base 11..13: mod_base = OTHER; note = 5-methyl
  source 1..15: mol_type = other DNA
tctgtccaagcccgg

SEQ ID NO: 1179 - DNA, 14 bp, synthetic construct
  misc_feature 1..14: note = Description of Artificial Sequence: Synthetic Antisense oligonucleotide
  modified_base 2: mod_base = OTHER; note = 5-methyl
  modified_base 6..7: mod_base = OTHER; note = 5-methyl
  modified_base 11..13: mod_base = OTHER; note = 5-methyl
  source 1..14: mol_type = other DNA
tctgtccaagcccg

SEQ ID NO: 1180 - DNA, 13 bp, synthetic construct
  misc_feature 1..13: note = Description of Artificial Sequence: Synthetic Antisense oligonucleotide
  modified_base 2: mod_base = OTHER; note = 5-methyl
  modified_base 6..7: mod_base = OTHER; note = 5-methyl
  modified_base 11..13: mod_base = OTHER; note = 5-methyl
  source 1..13: mol_type = other DNA
tctgtccaagccc

SEQ ID NO: 1181 - DNA, 12 bp, synthetic construct
  misc_feature 1..12: note = Description of Artificial Sequence: Synthetic Antisense oligonucleotide
  modified_base 2: mod_base = OTHER; note = 5-methyl
  modified_base 6..7: mod_base = OTHER; note = 5-methyl
  modified_base 11..12: mod_base = OTHER; note = 5-methyl
  source 1..12: mol_type = other DNA
tctgtccaagcc

SEQ ID NO: 1182 - DNA, 11 bp, synthetic construct
  misc_feature 1..11: note = Description of Artificial Sequence: Synthetic Antisense oligonucleotide
  modified_base 2: mod_base = OTHER; note = 5-methyl
  modified_base 6..7: mod_base = OTHER; note = 5-methyl
  modified_base 11: mod_base = OTHER; note = 5-methyl
  source 1..11: mol_type = other DNA
tctgtccaagc

SEQ ID NO: 1183 - DNA, 10 bp, synthetic construct
  misc_feature 1..10: note = Description of Artificial Sequence: Synthetic Antisense oligonucleotide
  modified_base 2: mod_base = OTHER; note = 5-methyl
  modified_base 6..7: mod_base = OTHER; note = 5-methyl
  source 1..10: mol_type = other DNA
tctgtccaag

SEQ ID NO: 1184-1185 - skipped (2 entries)

SEQ ID NO: 1186 - DNA, 17 bp, synthetic construct
  misc_feature 1..17: note = Description of Artificial Sequence: Synthetic Antisense oligonucleotide
  modified_base 1: mod_base = OTHER; note = 5-methyl
  modified_base 5..6: mod_base = OTHER; note = 5-methyl
  modified_base 10..12: mod_base = OTHER; note = 5-methyl
  source 1..17: mol_type = other DNA
ctgtccaagcccggttg

SEQ ID NO: 1187 - DNA, 16 bp, synthetic construct
  misc_feature 1..16: note = Description of Artificial Sequence: Synthetic Antisense oligonucleotide
  modified_base 1: mod_base = OTHER; note = 5-methyl
  modified_base 5..6: mod_base = OTHER; note = 5-methyl
  modified_base 10..12: mod_base = OTHER; note = 5-methyl
  source 1..16: mol_type = other DNA
ctgtccaagcccggtt

SEQ ID NO: 1188 - DNA, 15 bp, synthetic construct
  misc_feature 1..15: note = Description of Artificial Sequence: Synthetic Antisense oligonucleotide
  modified_base 1: mod_base = OTHER; note = 5-methyl
  modified_base 5..6: mod_base = OTHER; note = 5-methyl
  modified_base 10..12: mod_base = OTHER; note = 5-methyl
  source 1..15: mol_type = other DNA
ctgtccaagcccggt

SEQ ID NO: 1189 - DNA, 14 bp, synthetic construct
  misc_feature 1..14: note = Description of Artificial Sequence: Synthetic Antisense oligonucleotide
  modified_base 1: mod_base = OTHER; note = 5-methyl
  modified_base 5..6: mod_base = OTHER; note = 5-methyl
  modified_base 10..12: mod_base = OTHER; note = 5-methyl
  source 1..14: mol_type = other DNA
ctgtccaagcccgg

SEQ ID NO: 1190 - DNA, 13 bp, synthetic construct
  misc_feature 1..13: note = Description of Artificial Sequence: Synthetic Antisense oligonucleotide
  modified_base 1: mod_base = OTHER; note = 5-methyl
  modified_base 5..6: mod_base = OTHER; note = 5-methyl
  modified_base 10..12: mod_base = OTHER; note = 5-methyl
  source 1..13: mol_type = other DNA
ctgtccaagcccg

SEQ ID NO: 1191 - DNA, 12 bp, synthetic construct
  misc_feature 1..12: note = Description of Artificial Sequence: Synthetic Antisense oligonucleotide
  modified_base 1: mod_base = OTHER; note = 5-methyl
  modified_base 5..6: mod_base = OTHER; note = 5-methyl
  modified_base 10..12: mod_base = OTHER; note = 5-methyl
  source 1..12: mol_type = other DNA
ctgtccaagccc

SEQ ID NO: 1192 - DNA, 11 bp, synthetic construct
  misc_feature 1..11: note = Description of Artificial Sequence: Synthetic Antisense oligonucleotide
  modified_base 1: mod_base = OTHER; note = 5-methyl
  modified_base 5..6: mod_base = OTHER; note = 5-methyl
  modified_base 10..11: mod_base = OTHER; note = 5-methyl
  source 1..11: mol_type = other DNA
ctgtccaagcc

SEQ ID NO: 1193 - DNA, 10 bp, synthetic construct
  misc_feature 1..10: note = Description of Artificial Sequence: Synthetic Antisense oligonucleotide
  modified_base 1: mod_base = OTHER; note = 5-methyl
  modified_base 5..6: mod_base = OTHER; note = 5-methyl
  modified_base 10: mod_base = OTHER; note = 5-methyl
  source 1..10: mol_type = other DNA
ctgtccaagc

SEQ ID NO: 1194-1195 - skipped (2 entries)

SEQ ID NO: 1196 - DNA, 20 bp, synthetic construct
  misc_feature 1..20: note = Description of Artificial Sequence: Synthetic Antisense oligonucleotide
  modified_base 4: mod_base = OTHER; note = 5-methyl
  modified_base 8..9: mod_base = OTHER; note = 5-methyl
  modified_base 13..15: mod_base = OTHER; note = 5-methyl
  source 1..20: mol_type = other DNA
gttctgtccaagcccggttg

SEQ ID NO: 1197 - DNA, 19 bp, synthetic construct
  misc_feature 1..19: note = Description of Artificial Sequence: Synthetic Antisense oligonucleotide
  modified_base 4: mod_base = OTHER; note = 5-methyl
  modified_base 8..9: mod_base = OTHER; note = 5-methyl
  modified_base 13..15: mod_base = OTHER; note = 5-methyl
  source 1..19: mol_type = other DNA
gttctgtccaagcccggtt

SEQ ID NO: 1198 - DNA, 18 bp, synthetic construct
  misc_feature 1..18: note = Description of Artificial Sequence: Synthetic Antisense oligonucleotide
  modified_base 4: mod_base = OTHER; note = 5-methyl
  modified_base 8..9: mod_base = OTHER; note = 5-methyl
  modified_base 13..15: mod_base = OTHER; note = 5-methyl
  source 1..18: mol_type = other DNA
gttctgtccaagcccggt

SEQ ID NO: 1199 - DNA, 17 bp, synthetic construct
  misc_feature 1..17: note = Description of Artificial Sequence: Synthetic Antisense oligonucleotide
  modified_base 4: mod_base = OTHER; note = 5-methyl
  modified_base 8..9: mod_base = OTHER; note = 5-methyl
  modified_base 13..15: mod_base = OTHER; note = 5-methyl
  source 1..17: mol_type = other DNA
gttctgtccaagcccgg

SEQ ID NO: 1200 - DNA, 16 bp, synthetic construct
  misc_feature 1..16: note = Description of Artificial Sequence: Synthetic Antisense oligonucleotide
  modified_base 4: mod_base = OTHER; note = 5-methyl
  modified_base 8..9: mod_base = OTHER; note = 5-methyl
  modified_base 13..15: mod_base = OTHER; note = 5-methyl
  source 1..16: mol_type = other DNA
gttctgtccaagcccg

SEQ ID NO: 1201 - DNA, 15 bp, synthetic construct
  misc_feature 1..15: note = Description of Artificial Sequence: Synthetic Antisense oligonucleotide
  modified_base 4: mod_base = OTHER; note = 5-methyl
  modified_base 8..9: mod_base = OTHER; note = 5-methyl
  modified_base 13..15: mod_base = OTHER; note = 5-methyl
  source 1..15: mol_type = other DNA
gttctgtccaagccc

SEQ ID NO: 1202 - DNA, 14 bp, synthetic construct
  misc_feature 1..14: note = Description of Artificial Sequence: Synthetic Antisense oligonucleotide
  modified_base 4: mod_base = OTHER; note = 5-methyl
  modified_base 8..9: mod_base = OTHER; note = 5-methyl
  modified_base 13..14: mod_base = OTHER; note = 5-methyl
  source 1..14: mol_type = other DNA
gttctgtccaagcc

SEQ ID NO: 1203 - DNA, 13 bp, synthetic construct
  misc_feature 1..13: note = Description of Artificial Sequence: Synthetic Antisense oligonucleotide
  modified_base 4: mod_base = OTHER; note = 5-methyl
  modified_base 8..9: mod_base = OTHER; note = 5-methyl
  modified_base 13: mod_base = OTHER; note = 5-methyl
  source 1..13: mol_type = other DNA
gttctgtccaagc

SEQ ID NO: 1204 - DNA, 12 bp, synthetic construct
  misc_feature 1..12: note = Description of Artificial Sequence: Synthetic Antisense oligonucleotide
  modified_base 4: mod_base = OTHER; note = 5-methyl
  modified_base 8..9: mod_base = OTHER; note = 5-methyl
  source 1..12: mol_type = other DNA
gttctgtccaag

SEQ ID NO: 1205 - DNA, 11 bp, synthetic construct
  misc_feature 1..11: note = Description of Artificial Sequence: Synthetic Antisense oligonucleotide
  modified_base 4: mod_base = OTHER; note = 5-methyl
  modified_base 8..9: mod_base = OTHER; note = 5-methyl
  source 1..11: mol_type = other DNA
gttctgtccaa

SEQ ID NO: 1206 - DNA, 10 bp, synthetic construct
  misc_feature 1..10: note = Description of Artificial Sequence: Synthetic Antisense oligonucleotide
  modified_base 4: mod_base = OTHER; note = 5-methyl
  modified_base 8..9: mod_base = OTHER; note = 5-methyl
  source 1..10: mol_type = other DNA
gttctgtcca

SEQ ID NO: 1207-1208 - skipped (2 entries)

SEQ ID NO: 1209 - DNA, 20 bp, synthetic construct
  misc_feature 1..20: note = Description of Artificial Sequence: Synthetic Antisense oligonucleotide
  modified_base 5: mod_base = OTHER; note = 5-methyl
  modified_base 9..10: mod_base = OTHER; note = 5-methyl
  modified_base 14..16: mod_base = OTHER; note = 5-methyl
  source 1..20: mol_type = other DNA
agttctgtccaagcccggtt

SEQ ID NO: 1210 - DNA, 19 bp, synthetic construct
  misc_feature 1..19: note = Description of Artificial Sequence: Synthetic Antisense oligonucleotide
  modified_base 5: mod_base = OTHER; note = 5-methyl
  modified_base 9..10: mod_base = OTHER; note = 5-methyl
  modified_base 14..16: mod_base = OTHER; note = 5-methyl
  source 1..19: mol_type = other DNA
agttctgtccaagcccggt

SEQ ID NO: 1211 - DNA, 18 bp, synthetic construct
  misc_feature 1..18: note = Description of Artificial Sequence: Synthetic Antisense oligonucleotide
  modified_base 5: mod_base = OTHER; note = 5-methyl
  modified_base 9..10: mod_base = OTHER; note = 5-methyl
  modified_base 14..16: mod_base = OTHER; note = 5-methyl
  source 1..18: mol_type = other DNA
agttctgtccaagcccgg

SEQ ID NO: 1212 - DNA, 17 bp, synthetic construct
  misc_feature 1..17: note = Description of Artificial Sequence: Synthetic Antisense oligonucleotide
  modified_base 5: mod_base = OTHER; note = 5-methyl
  modified_base 9..10: mod_base = OTHER; note = 5-methyl
  modified_base 14..16: mod_base = OTHER; note = 5-methyl
  source 1..17: mol_type = other DNA
agttctgtccaagcccg

SEQ ID NO: 1213 - DNA, 16 bp, synthetic construct
  misc_feature 1..16: note = Description of Artificial Sequence: Synthetic Antisense oligonucleotide
  modified_base 5: mod_base = OTHER; note = 5-methyl
  modified_base 9..10: mod_base = OTHER; note = 5-methyl
  modified_base 14..16: mod_base = OTHER; note = 5-methyl
  source 1..16: mol_type = other DNA
agttctgtccaagccc

SEQ ID NO: 1214 - DNA, 15 bp, synthetic construct
  misc_feature 1..15: note = Description of Artificial Sequence: Synthetic Antisense oligonucleotide
  modified_base 5: mod_base = OTHER; note = 5-methyl
  modified_base 9..10: mod_base = OTHER; note = 5-methyl
  modified_base 14..15: mod_base = OTHER; note = 5-methyl
  source 1..15: mol_type = other DNA
agttctgtccaagcc

SEQ ID NO: 1215 - DNA, 14 bp, synthetic construct
  misc_feature 1..14: note = Description of Artificial Sequence: Synthetic Antisense oligonucleotide
  modified_base 5: mod_base = OTHER; note = 5-methyl
  modified_base 9..10: mod_base = OTHER; note = 5-methyl
  modified_base 14: mod_base = OTHER; note = 5-methyl
  source 1..14: mol_type = other DNA
agttctgtccaagc

SEQ ID NO: 1216 - DNA, 13 bp, synthetic construct
  misc_feature 1..13: note = Description of Artificial Sequence: Synthetic Antisense oligonucleotide
  modified_base 5: mod_base = OTHER; note = 5-methyl
  modified_base 9..10: mod_base = OTHER; note = 5-methyl
  source 1..13: mol_type = other DNA
agttctgtccaag

SEQ ID NO: 1217 - DNA, 12 bp, synthetic construct
  misc_feature 1..12: note = Description of Artificial Sequence: Synthetic Antisense oligonucleotide
  modified_base 5: mod_base = OTHER; note = 5-methyl
  modified_base 9..10: mod_base = OTHER; note = 5-methyl
  source 1..12: mol_type = other DNA
agttctgtccaa

SEQ ID NO: 1218 - DNA, 11 bp, synthetic construct
  misc_feature 1..11: note = Description of Artificial Sequence: Synthetic Antisense oligonucleotide
  modified_base 5: mod_base = OTHER; note = 5-methyl
  modified_base 9..10: mod_base = OTHER; note = 5-methyl
  source 1..11: mol_type = other DNA
agttctgtcca

SEQ ID NO: 1219 - DNA, 10 bp, synthetic construct
  misc_feature 1..10: note = Description of Artificial Sequence: Synthetic Antisense oligonucleotide
  modified_base 5: mod_base = OTHER; note = 5-methyl
  modified_base 9..10: mod_base = OTHER; note = 5-methyl
  source 1..10: mol_type = other DNA
agttctgtcc

SEQ ID NO: 1220-1221 - skipped (2 entries)

SEQ ID NO: 1222 - DNA, 20 bp, synthetic construct
  misc_feature 1..20: note = Description of Artificial Sequence: Synthetic Antisense oligonucleotide
  modified_base 6: mod_base = OTHER; note = 5-methyl
  modified_base 10..11: mod_base = OTHER; note = 5-methyl
  modified_base 15..17: mod_base = OTHER; note = 5-methyl
  source 1..20: mol_type = other DNA
aagttctgtccaagcccggt

SEQ ID NO: 1223 - DNA, 19 bp, synthetic construct
  misc_feature 1..19: note = Description of Artificial Sequence: Synthetic Antisense oligonucleotide
  modified_base 6: mod_base = OTHER; note = 5-methyl
  modified_base 10..11: mod_base = OTHER; note = 5-methyl
  modified_base 15..17: mod_base = OTHER; note = 5-methyl
  source 1..19: mol_type = other DNA
aagttctgtccaagcccgg

SEQ ID NO: 1224 - DNA, 18 bp, synthetic construct
  misc_feature 1..18: note = Description of Artificial Sequence: Synthetic Antisense oligonucleotide
  modified_base 6: mod_base = OTHER; note = 5-methyl
  modified_base 10..11: mod_base = OTHER; note = 5-methyl
  modified_base 15..17: mod_base = OTHER; note = 5-methyl
  source 1..18: mol_type = other DNA
aagttctgtccaagcccg

SEQ ID NO: 1225 - DNA, 17 bp, synthetic construct
  misc_feature 1..17: note = Description of Artificial Sequence: Synthetic Antisense oligonucleotide
  modified_base 6: mod_base = OTHER; note = 5-methyl
  modified_base 10..11: mod_base = OTHER; note = 5-methyl
  modified_base 15..17: mod_base = OTHER; note = 5-methyl
  source 1..17: mol_type = other DNA
aagttctgtccaagccc

SEQ ID NO: 1226 - DNA, 16 bp, synthetic construct
  misc_feature 1..16: note = Description of Artificial Sequence: Synthetic Antisense oligonucleotide
  modified_base 6: mod_base = OTHER; note = 5-methyl
  modified_base 10..11: mod_base = OTHER; note = 5-methyl
  modified_base 15..16: mod_base = OTHER; note = 5-methyl
  source 1..16: mol_type = other DNA
aagttctgtccaagcc

SEQ ID NO: 1227 - DNA, 15 bp, synthetic construct
  misc_feature 1..15: note = Description of Artificial Sequence: Synthetic Antisense oligonucleotide
  modified_base 6: mod_base = OTHER; note = 5-methyl
  modified_base 10..11: mod_base = OTHER; note = 5-methyl
  modified_base 15: mod_base = OTHER; note = 5-methyl
  source 1..15: mol_type = other DNA
aagttctgtccaagc

SEQ ID NO: 1228 - DNA, 14 bp, synthetic construct
  misc_feature 1..14: note = Description of Artificial Sequence: Synthetic Antisense oligonucleotide
  modified_base 6: mod_base = OTHER; note = 5-methyl
  modified_base 10..11: mod_base = OTHER; note = 5-methyl
  source 1..14: mol_type = other DNA
aagttctgtccaag

SEQ ID NO: 1229 - DNA, 13 bp, synthetic construct
  misc_feature 1..13: note = Description of Artificial Sequence: Synthetic Antisense oligonucleotide
  modified_base 6: mod_base = OTHER; note = 5-methyl
  modified_base 10..11: mod_base = OTHER; note = 5-methyl
  source 1..13: mol_type = other DNA
aagttctgtccaa

SEQ ID NO: 1230 - DNA, 12 bp, synthetic construct
  misc_feature 1..12: note = Description of Artificial Sequence: Synthetic Antisense oligonucleotide
  modified_base 6: mod_base = OTHER; note = 5-methyl
  modified_base 10..11: mod_base = OTHER; note = 5-methyl
  source 1..12: mol_type = other DNA
aagttctgtcca

SEQ ID NO: 1231 - DNA, 11 bp, synthetic construct
  misc_feature 1..11: note = Description of Artificial Sequence: Synthetic Antisense oligonucleotide
  modified_base 6: mod_base = OTHER; note = 5-methyl
  modified_base 10..11: mod_base = OTHER; note = 5-methyl
  source 1..11: mol_type = other DNA
aagttctgtcc

SEQ ID NO: 1232 - DNA, 10 bp, synthetic construct
  misc_feature 1..10: note = Description of Artificial Sequence: Synthetic Antisense oligonucleotide
  modified_base 6: mod_base = OTHER; note = 5-methyl
  modified_base 10: mod_base = OTHER; note = 5-methyl
  source 1..10: mol_type = other DNA
aagttctgtc

SEQ ID NO: 1233-1234 - skipped (2 entries)

SEQ ID NO: 1235 - DNA, 20 bp, synthetic construct
  misc_feature 1..20: note = Description of Artificial Sequence: Synthetic Antisense oligonucleotide
  modified_base 7: mod_base = OTHER; note = 5-methyl
  modified_base 11..12: mod_base = OTHER; note = 5-methyl
  modified_base 16..18: mod_base = OTHER; note = 5-methyl
  source 1..20: mol_type = other DNA
taagttctgtccaagcccgg

SEQ ID NO: 1236 - DNA, 19 bp, synthetic construct
  misc_feature 1..19: note = Description of Artificial Sequence: Synthetic Antisense oligonucleotide
  modified_base 7: mod_base = OTHER; note = 5-methyl
  modified_base 11..12: mod_base = OTHER; note = 5-methyl
  modified_base 16..18: mod_base = OTHER; note = 5-methyl
  source 1..19: mol_type = other DNA
taagttctgtccaagcccg

SEQ ID NO: 1237 - DNA, 18 bp, synthetic construct
  misc_feature 1..18: note = Description of Artificial Sequence: Synthetic Antisense oligonucleotide
  modified_base 7: mod_base = OTHER; note = 5-methyl
  modified_base 11..12: mod_base = OTHER; note = 5-methyl
  modified_base 16..18: mod_base = OTHER; note = 5-methyl
  source 1..18: mol_type = other DNA
taagttctgtccaagccc

SEQ ID NO: 1238 - DNA, 17 bp, synthetic construct
  misc_feature 1..17: note = Description of Artificial Sequence: Synthetic Antisense oligonucleotide
  modified_base 7: mod_base = OTHER; note = 5-methyl
  modified_base 11..12: mod_base = OTHER; note = 5-methyl
  modified_base 16..17: mod_base = OTHER; note = 5-methyl
  source 1..17: mol_type = other DNA
taagttctgtccaagcc

SEQ ID NO: 1239 - DNA, 16 bp, synthetic construct
  misc_feature 1..16: note = Description of Artificial Sequence: Synthetic Antisense oligonucleotide
  modified_base 7: mod_base = OTHER; note = 5-methyl
  modified_base 11..12: mod_base = OTHER; note = 5-methyl
  modified_base 16: mod_base = OTHER; note = 5-methyl
  source 1..16: mol_type = other DNA
taagttctgtccaagc

SEQ ID NO: 1240 - DNA, 14 bp, synthetic construct
  misc_feature 1..14: note = Description of Artificial Sequence: Synthetic Antisense oligonucleotide
  modified_base 7: mod_base = OTHER; note = 5-methyl
  modified_base 11..12: mod_base = OTHER; note = 5-methyl
  source 1..14: mol_type = other DNA
taagttctgtccaa

SEQ ID NO: 1241 - DNA, 13 bp, synthetic construct
  misc_feature 1..13: note = Description of Artificial Sequence: Synthetic Antisense oligonucleotide
  modified_base 7: mod_base = OTHER; note = 5-methyl
  modified_base 11..12: mod_base = OTHER; note = 5-methyl
  source 1..13: mol_type = other DNA
taagttctgtcca

SEQ ID NO: 1242 - DNA, 12 bp, synthetic construct
  misc_feature 1..12: note = Description of Artificial Sequence: Synthetic Antisense oligonucleotide
  modified_base 7: mod_base = OTHER; note = 5-methyl
  modified_base 11..12: mod_base = OTHER; note = 5-methyl
  source 1..12: mol_type = other DNA
taagttctgtcc

SEQ ID NO: 1243 - DNA, 11 bp, synthetic construct
  misc_feature 1..11: note = Description of Artificial Sequence: Synthetic Antisense oligonucleotide
  modified_base 7: mod_base = OTHER; note = 5-methyl
  modified_base 11: mod_base = OTHER; note = 5-methyl
  source 1..11: mol_type = other DNA
taagttctgtc

SEQ ID NO: 1244 - DNA, 10 bp, synthetic construct
  misc_feature 1..10: note = Description of Artificial Sequence: Synthetic Antisense oligonucleotide
  modified_base 7: mod_base = OTHER; note = 5-methyl
  source 1..10: mol_type = other DNA
taagttctgt

SEQ ID NO: 1245-1246 - skipped (2 entries)

SEQ ID NO: 1247 - DNA, 20 bp, synthetic construct
  misc_feature 1..20: note = Description of Artificial Sequence: Synthetic Antisense oligonucleotide
  modified_base 8: mod_base = OTHER; note = 5-methyl
  modified_base 12..13: mod_base = OTHER; note = 5-methyl
  modified_base 17..19: mod_base = OTHER; note = 5-methyl
  source 1..20: mol_type = other DNA
gtaagttctgtccaagcccg

SEQ ID NO: 1248 - DNA, 19 bp, synthetic construct
  misc_feature 1..19: note = Description of Artificial Sequence: Synthetic Antisense oligonucleotide
  modified_base 8: mod_base = OTHER; note = 5-methyl
  modified_base 12..13: mod_base = OTHER; note = 5-methyl
  modified_base 17..19: mod_base = OTHER; note = 5-methyl
  source 1..19: mol_type = other DNA
gtaagttctgtccaagccc

SEQ ID NO: 1249 - DNA, 17 bp, synthetic construct
  misc_feature 1..17: note = Description of Artificial Sequence: Synthetic Antisense oligonucleotide
  modified_base 8: mod_base = OTHER; note = 5-methyl
  modified_base 12..13: mod_base = OTHER; note = 5-methyl
  modified_base 17: mod_base = OTHER; note = 5-methyl
  source 1..17: mol_type = other DNA
gtaagttctgtccaagc

SEQ ID NO: 1250 - DNA, 16 bp, synthetic construct
  misc_feature 1..16: note = Description of Artificial Sequence: Synthetic Antisense oligonucleotide
  modified_base 8: mod_base = OTHER; note = 5-methyl
  modified_base 12..13: mod_base = OTHER; note = 5-methyl
  source 1..16: mol_type = other DNA
gtaagttctgtccaag

SEQ ID NO: 1251 - DNA, 15 bp, synthetic construct
  misc_feature 1..15: note = Description of Artificial Sequence: Synthetic Antisense oligonucleotide
  modified_base 8: mod_base = OTHER; note = 5-methyl
  modified_base 12..13: mod_base = OTHER; note = 5-methyl
  source 1..15: mol_type = other DNA
gtaagttctgtccaa

SEQ ID NO: 1252 - DNA, 14 bp, synthetic construct
  misc_feature 1..14: note = Description of Artificial Sequence: Synthetic Antisense oligonucleotide
  modified_base 8: mod_base = OTHER; note = 5-methyl
  modified_base 12..13: mod_base = OTHER; note = 5-methyl
  source 1..14: mol_type = other DNA
gtaagttctgtcca

SEQ ID NO: 1253 - DNA, 13 bp, synthetic construct
  misc_feature 1..13: note = Description of Artificial Sequence: Synthetic Antisense oligonucleotide
  modified_base 8: mod_base = OTHER; note = 5-methyl
  modified_base 12..13: mod_base = OTHER; note = 5-methyl
  source 1..13: mol_type = other DNA
gtaagttctgtcc

SEQ ID NO: 1254 - DNA, 12 bp, synthetic construct
  misc_feature 1..12: note = Description of Artificial Sequence: Synthetic Antisense oligonucleotide
  modified_base 8: mod_base = OTHER; note = 5-methyl
  modified_base 12: mod_base = OTHER; note = 5-methyl
  source 1..12: mol_type = other DNA
gtaagttctgtc

SEQ ID NO: 1255 - DNA, 11 bp, synthetic construct
  misc_feature 1..11: note = Description of Artificial Sequence: Synthetic Antisense oligonucleotide
  modified_base 8: mod_base = OTHER; note = 5-methyl
  source 1..11: mol_type = other DNA
gtaagttctgt

SEQ ID NO: 1256 - DNA, 10 bp, synthetic construct
  misc_feature 1..10: note = Description of Artificial Sequence: Synthetic Antisense oligonucleotide
  modified_base 8: mod_base = OTHER; note = 5-methyl
  source 1..10: mol_type = other DNA
gtaagttctg

SEQ ID NO: 1257-1258 - skipped (2 entries)

SEQ ID NO: 1259 - DNA, 20 bp, synthetic construct
  misc_feature 1..20: note = Description of Artificial Sequence: Synthetic Antisense oligonucleotide
  modified_base 9: mod_base = OTHER; note = 5-methyl
  modified_base 13..14: mod_base = OTHER; note = 5-methyl
  modified_base 18..20: mod_base = OTHER; note = 5-methyl
  source 1..20: mol_type = other DNA
ggtaagttctgtccaagccc

SEQ ID NO: 1260 - DNA, 19 bp, synthetic construct
  misc_feature 1..19: note = Description of Artificial Sequence: Synthetic Antisense oligonucleotide
  modified_base 9: mod_base = OTHER; note = 5-methyl
  modified_base 13..14: mod_base = OTHER; note = 5-methyl
  modified_base 18..19: mod_base = OTHER; note = 5-methyl
  source 1..19: mol_type = other DNA
ggtaagttctgtccaagcc

SEQ ID NO: 1261 - DNA, 17 bp, synthetic construct
  misc_feature 1..17: note = Description of Artificial Sequence: Synthetic Antisense oligonucleotide
  modified_base 9: mod_base = OTHER; note = 5-methyl
  modified_base 13..14: mod_base = OTHER; note = 5-methyl
  source 1..17: mol_type = other DNA
ggtaagttctgtccaag

SEQ ID NO: 1262 - DNA, 16 bp, synthetic construct
  misc_feature 1..16: note = Description of Artificial Sequence: Synthetic Antisense oligonucleotide
  modified_base 9: mod_base = OTHER; note = 5-methyl
  modified_base 13..14: mod_base = OTHER; note = 5-methyl
  source 1..16: mol_type = other DNA
ggtaagttctgtccaa

SEQ ID NO: 1263 - DNA, 15 bp, synthetic construct
  misc_feature 1..15: note = Description of Artificial Sequence: Synthetic Antisense oligonucleotide
  modified_base 9: mod_base = OTHER; note = 5-methyl
  modified_base 13..14: mod_base = OTHER; note = 5-methyl
  source 1..15: mol_type = other DNA
ggtaagttctgtcca

SEQ ID NO: 1264 - DNA, 14 bp, synthetic construct
  misc_feature 1..14: note = Description of Artificial Sequence: Synthetic Antisense oligonucleotide
  modified_base 9: mod_base = OTHER; note = 5-methyl
  modified_base 13..14: mod_base = OTHER; note = 5-methyl
  source 1..14: mol_type = other DNA
ggtaagttctgtcc

SEQ ID NO: 1265 - DNA, 13 bp, synthetic construct
  misc_feature 1..13: note = Description of Artificial Sequence: Synthetic Antisense oligonucleotide
  modified_base 9: mod_base = OTHER; note = 5-methyl
  modified_base 13: mod_base = OTHER; note = 5-methyl
  source 1..13: mol_type = other DNA
ggtaagttctgtc

SEQ ID NO: 1266 - DNA, 12 bp, synthetic construct
  misc_feature 1..12: note = Description of Artificial Sequence: Synthetic Antisense oligonucleotide
  modified_base 9: mod_base = OTHER; note = 5-methyl
  source 1..12: mol_type = other DNA
ggtaagttctgt

SEQ ID NO: 1267 - DNA, 11 bp, synthetic construct
  misc_feature 1..11: note = Description of Artificial Sequence: Synthetic Antisense oligonucleotide
  modified_base 9: mod_base = OTHER; note = 5-methyl
  source 1..11: mol_type = other DNA
ggtaagttctg

SEQ ID NO: 1268 - DNA, 10 bp, synthetic construct
  misc_feature 1..10: note = Description of Artificial Sequence: Synthetic Antisense oligonucleotide
  modified_base 9: mod_base = OTHER; note = 5-methyl
  source 1..10: mol_type = other DNA
ggtaagttct

SEQ ID NO: 1269 - skipped

SEQ ID NO: 1270 - DNA, 20 bp, synthetic construct
  misc_feature 1..20: note = Description of Artificial Sequence: Synthetic Antisense oligonucleotide
  modified_base 1: mod_base = OTHER; note = 5-methyl
  modified_base 10: mod_base = OTHER; note = 5-methyl
  modified_base 14..15: mod_base = OTHER; note = 5-methyl
  modified_base 19..20: mod_base = OTHER; note = 5-methyl
  source 1..20: mol_type = other DNA
cggtaagttctgtccaagcc

SEQ ID NO: 1271 - DNA, 19 bp, synthetic construct
  misc_feature 1..19: note = Description of Artificial Sequence: Synthetic Antisense oligonucleotide
  modified_base 1: mod_base = OTHER; note = 5-methyl
  modified_base 10: mod_base = OTHER; note = 5-methyl
  modified_base 14..15: mod_base = OTHER; note = 5-methyl
  modified_base 19: mod_base = OTHER; note = 5-methyl
  source 1..19: mol_type = other DNA
cggtaagttctgtccaagc

SEQ ID NO: 1272 - DNA, 18 bp, synthetic construct
  misc_feature 1..18: note = Description of Artificial Sequence: Synthetic Antisense oligonucleotide
  modified_base 1: mod_base = OTHER; note = 5-methyl
  modified_base 10: mod_base = OTHER; note = 5-methyl
  modified_base 14..15: mod_base = OTHER; note = 5-methyl
  source 1..18: mol_type = other DNA
cggtaagttctgtccaag

SEQ ID NO: 1273 - DNA, 17 bp, synthetic construct
  misc_feature 1..17: note = Description of Artificial Sequence: Synthetic Antisense oligonucleotide
  modified_base 1: mod_base = OTHER; note = 5-methyl
  modified_base 10: mod_base = OTHER; note = 5-methyl
  modified_base 14..15: mod_base = OTHER; note = 5-methyl
  source 1..17: mol_type = other DNA
cggtaagttctgtccaa

SEQ ID NO: 1274 - DNA, 16 bp, synthetic construct
  misc_feature 1..16: note = Description of Artificial Sequence: Synthetic Antisense oligonucleotide
  modified_base 1: mod_base = OTHER; note = 5-methyl
  modified_base 10: mod_base = OTHER; note = 5-methyl
  modified_base 14..15: mod_base = OTHER; note = 5-methyl
  source 1..16: mol_type = other DNA
cggtaagttctgtcca

SEQ ID NO: 1275 - DNA, 15 bp, synthetic construct
  misc_feature 1..15: note = Description of Artificial Sequence: Synthetic Antisense oligonucleotide
  modified_base 1: mod_base = OTHER; note = 5-methyl
  modified_base 10: mod_base = OTHER; note = 5-methyl
  modified_base 14..15: mod_base = OTHER; note = 5-methyl
  source 1..15: mol_type = other DNA
cggtaagttctgtcc

SEQ ID NO: 1276 - DNA, 14 bp, synthetic construct
  misc_feature 1..14: note = Description of Artificial Sequence: Synthetic Antisense oligonucleotide
  modified_base 1: mod_base = OTHER; note = 5-methyl
  modified_base 10: mod_base = OTHER; note = 5-methyl
  modified_base 14: mod_base = OTHER; note = 5-methyl
  source 1..14: mol_type = other DNA
cggtaagttctgtc

SEQ ID NO: 1277 - DNA, 13 bp, synthetic construct
  misc_feature 1..13: note = Description of Artificial Sequence: Synthetic Antisense oligonucleotide
  modified_base 1: mod_base = OTHER; note = 5-methyl
  modified_base 10: mod_base = OTHER; note = 5-methyl
  source 1..13: mol_type = other DNA
cggtaagttctgt

SEQ ID NO: 1278 - DNA, 12 bp, synthetic construct
  misc_feature 1..12: note = Description of Artificial Sequence: Synthetic Antisense oligonucleotide
  modified_base 1: mod_base = OTHER; note = 5-methyl
  modified_base 10: mod_base = OTHER; note = 5-methyl
  source 1..12: mol_type = other DNA
cggtaagttctg

SEQ ID NO: 1279 - DNA, 11 bp, synthetic construct
  misc_feature 1..11: note = Description of Artificial Sequence: Synthetic Antisense oligonucleotide
  modified_base 1: mod_base = OTHER; note = 5-methyl
  modified_base 10: mod_base = OTHER; note = 5-methyl
  source 1..11: mol_type = other DNA
cggtaagttct

SEQ ID NO: 1280 - DNA, 10 bp, synthetic construct
  misc_feature 1..10: note = Description of Artificial Sequence: Synthetic Antisense oligonucleotide
  modified_base 1: mod_base = OTHER; note = 5-methyl
  modified_base 10: mod_base = OTHER; note = 5-methyl
  source 1..10: mol_type = other DNA
cggtaagttc

SEQ ID NO: 1281-1282 - skipped (2 entries)

SEQ ID NO: 1283 - DNA, 20 bp, synthetic construct
  misc_feature 1..20: note = Description of Artificial Sequence: Synthetic Antisense oligonucleotide
  modified_base 2: mod_base = OTHER; note = 5-methyl
  modified_base 11: mod_base = OTHER; note = 5-methyl
  modified_base 15..16: mod_base = OTHER; note = 5-methyl
  modified_base 20: mod_base = OTHER; note = 5-methyl
  source 1..20: mol_type = other DNA
tcggtaagttctgtccaagc

SEQ ID NO: 1284 - DNA, 19 bp, synthetic construct
  misc_feature 1..19: note = Description of Artificial Sequence: Synthetic Antisense oligonucleotide
  modified_base 2: mod_base = OTHER; note = 5-methyl
  modified_base 11: mod_base = OTHER; note = 5-methyl
  modified_base 15..16: mod_base = OTHER; note = 5-methyl
  source 1..19: mol_type = other DNA
tcggtaagttctgtccaag

SEQ ID NO: 1285 - DNA, 18 bp, synthetic construct
  misc_feature 1..18: note = Description of Artificial Sequence: Synthetic Antisense oligonucleotide
  modified_base 2: mod_base = OTHER; note = 5-methyl
  modified_base 11: mod_base = OTHER; note = 5-methyl
  modified_base 15..16: mod_base = OTHER; note = 5-methyl
  source 1..18: mol_type = other DNA
tcggtaagttctgtccaa

SEQ ID NO: 1286 - DNA, 17 bp, synthetic construct
  misc_feature 1..17: note = Description of Artificial Sequence: Synthetic Antisense oligonucleotide
  modified_base 2: mod_base = OTHER; note = 5-methyl
  modified_base 11: mod_base = OTHER; note = 5-methyl
  modified_base 15..16: mod_base = OTHER; note = 5-methyl
  source 1..17: mol_type = other DNA
tcggtaagttctgtcca

SEQ ID NO: 1287 - DNA, 16 bp, synthetic construct
  misc_feature 1..16: note = Description of Artificial Sequence: Synthetic Antisense oligonucleotide
  modified_base 2: mod_base = OTHER; note = 5-methyl
  modified_base 11: mod_base = OTHER; note = 5-methyl
  modified_base 15..16: mod_base = OTHER; note = 5-methyl
  source 1..16: mol_type = other DNA
tcggtaagttctgtcc

SEQ ID NO: 1288 - DNA, 15 bp, synthetic construct
  misc_feature 1..15: note = Description of Artificial Sequence: Synthetic Antisense oligonucleotide
  modified_base 2: mod_base = OTHER; note = 5-methyl
  modified_base 11: mod_base = OTHER; note = 5-methyl
  modified_base 15: mod_base = OTHER; note = 5-methyl
  source 1..15: mol_type = other DNA
tcggtaagttctgtc

SEQ ID NO: 1289 - DNA, 14 bp, synthetic construct
  misc_feature 1..14: note = Description of Artificial Sequence: Synthetic Antisense oligonucleotide
  modified_base 2: mod_base = OTHER; note = 5-methyl
  modified_base 11: mod_base = OTHER; note = 5-methyl
  source 1..14: mol_type = other DNA
tcggtaagttctgt

SEQ ID NO: 1290 - DNA, 13 bp, synthetic construct
  misc_feature 1..13: note = Description of Artificial Sequence: Synthetic Antisense oligonucleotide
  modified_base 2: mod_base = OTHER; note = 5-methyl
  modified_base 11: mod_base = OTHER; note = 5-methyl
  source 1..13: mol_type = other DNA
tcggtaagttctg

SEQ ID NO: 1291 - DNA, 12 bp, synthetic construct
  misc_feature 1..12: note = Description of Artificial Sequence: Synthetic Antisense oligonucleotide
  modified_base 2: mod_base = OTHER; note = 5-methyl
  modified_base 11: mod_base = OTHER; note = 5-methyl
  source 1..12: mol_type = other DNA
tcggtaagttct

SEQ ID NO: 1292 - DNA, 11 bp, synthetic construct
  misc_feature 1..11: note = Description of Artificial Sequence: Synthetic Antisense oligonucleotide
  modified_base 2: mod_base = OTHER; note = 5-methyl
  modified_base 11: mod_base = OTHER; note = 5-methyl
  source 1..11: mol_type = other DNA
tcggtaagttc

SEQ ID NO: 1293 - DNA, 10 bp, synthetic construct
  misc_feature 1..10: note = Description of Artificial Sequence: Synthetic Antisense oligonucleotide
  modified_base 2: mod_base = OTHER; note = 5-methyl
  source 1..10: mol_type = other DNA
tcggtaagtt

SEQ ID NO: 1294 - skipped

SEQ ID NO: 1295 - DNA, 20 bp, synthetic construct
  misc_feature 1..20: note = Description of Artificial Sequence: Synthetic Antisense oligonucleotide
  modified_base 3: mod_base = OTHER; note = 5-methyl
  modified_base 12: mod_base = OTHER; note = 5-methyl
  modified_base 16..17: mod_base = OTHER; note = 5-methyl
  source 1..20: mol_type = other DNA
gtcggtaagttctgtccaag

SEQ ID NO: 1296 - DNA, 19 bp, synthetic construct
  misc_feature 1..19: note = Description of Artificial Sequence: Synthetic Antisense oligonucleotide
  modified_base 3: mod_base = OTHER; note = 5-methyl
  modified_base 12: mod_base = OTHER; note = 5-methyl
  modified_base 16..17: mod_base = OTHER; note = 5-methyl
  source 1..19: mol_type = other DNA
gtcggtaagttctgtccaa

SEQ ID NO: 1297 - DNA, 18 bp, synthetic construct
  misc_feature 1..18: note = Description of Artificial Sequence: Synthetic Antisense oligonucleotide
  modified_base 3: mod_base = OTHER; note = 5-methyl
  modified_base 12: mod_base = OTHER; note = 5-methyl
  modified_base 16..17: mod_base = OTHER; note = 5-methyl
  source 1..18: mol_type = other DNA
gtcggtaagttctgtcca

SEQ ID NO: 1298 - DNA, 17 bp, synthetic construct
  misc_feature 1..17: note = Description of Artificial Sequence: Synthetic Antisense oligonucleotide
  modified_base 3: mod_base = OTHER; note = 5-methyl
  modified_base 12: mod_base = OTHER; note = 5-methyl
  modified_base 16..17: mod_base = OTHER; note = 5-methyl
  source 1..17: mol_type = other DNA
gtcggtaagttctgtcc

SEQ ID NO: 1299 - DNA, 16 bp, synthetic construct
  misc_feature 1..16: note = Description of Artificial Sequence: Synthetic Antisense oligonucleotide
  modified_base 3: mod_base = OTHER; note = 5-methyl
  modified_base 12: mod_base = OTHER; note = 5-methyl
  modified_base 16: mod_base = OTHER; note = 5-methyl
  source 1..16: mol_type = other DNA
gtcggtaagttctgtc

SEQ ID NO: 1300 - DNA, 15 bp, synthetic construct
  misc_feature 1..15: note = Description of Artificial Sequence: Synthetic Antisense oligonucleotide
  modified_base 3: mod_base = OTHER; note = 5-methyl
  modified_base 12: mod_base = OTHER; note = 5-methyl
  source 1..15: mol_type = other DNA
gtcggtaagttctgt

SEQ ID NO: 1301 - DNA, 14 bp, synthetic construct
  misc_feature 1..14: note = Description of Artificial Sequence: Synthetic Antisense oligonucleotide
  modified_base 3: mod_base = OTHER; note = 5-methyl
  modified_base 12: mod_base = OTHER; note = 5-methyl
  source 1..14: mol_type = other DNA
gtcggtaagttctg

SEQ ID NO: 1302 - DNA, 13 bp, synthetic construct
  misc_feature 1..13: note = Description of Artificial Sequence: Synthetic Antisense oligonucleotide
  modified_base 3: mod_base = OTHER; note = 5-methyl
  modified_base 12: mod_base = OTHER; note = 5-methyl
  source 1..13: mol_type = other DNA
gtcggtaagttct

SEQ ID NO: 1303 - DNA, 12 bp, synthetic construct
  misc_feature 1..12: note = Description of Artificial Sequence: Synthetic Antisense oligonucleotide
  modified_base 3: mod_base = OTHER; note = 5-methyl
  modified_base 12: mod_base = OTHER; note = 5-methyl
  source 1..12: mol_type = other DNA
gtcggtaagttc

SEQ ID NO: 1304 - DNA, 11 bp, synthetic construct
  misc_feature 1..11: note = Description of Artificial Sequence: Synthetic Antisense oligonucleotide
  modified_base 3: mod_base = OTHER; note = 5-methyl
  source 1..11: mol_type = other DNA
gtcggtaagtt

SEQ ID NO: 1305 - DNA, 10 bp, synthetic construct
  misc_feature 1..10: note = Description of Artificial Sequence: Synthetic Antisense oligonucleotide
  modified_base 3: mod_base = OTHER; note = 5-methyl
  source 1..10: mol_type = other DNA
gtcggtaagt

SEQ ID NO: 1306 - DNA, 20 bp, synthetic construct
  misc_feature 1..20: note = Description of Artificial Sequence: Synthetic Antisense oligonucleotide
  modified_base 4: mod_base = OTHER; note = 5-methyl
  modified_base 13: mod_base = OTHER; note = 5-methyl
  modified_base 17..18: mod_base = OTHER; note = 5-methyl
  source 1..20: mol_type = other DNA
agtcggtaagttctgtccaa

SEQ ID NO: 1307 - DNA, 19 bp, synthetic construct
  misc_feature 1..19: note = Description of Artificial Sequence: Synthetic Antisense oligonucleotide
  modified_base 4: mod_base = OTHER; note = 5-methyl
  modified_base 13: mod_base = OTHER; note = 5-methyl
  modified_base 17..18: mod_base = OTHER; note = 5-methyl
  source 1..19: mol_type = other DNA
agtcggtaagttctgtcca

SEQ ID NO: 1308 - DNA, 17 bp, synthetic construct
  misc_feature 1..17: note = Description of Artificial Sequence: Synthetic Antisense oligonucleotide
  modified_base 4: mod_base = OTHER; note = 5-methyl
  modified_base 13: mod_base = OTHER; note = 5-methyl
  modified_base 17: mod_base = OTHER; note = 5-methyl
  source 1..17: mol_type = other DNA
agtcggtaagttctgtc

SEQ ID NO: 1309 - DNA, 16 bp, synthetic construct
  misc_feature 1..16: note = Description of Artificial Sequence: Synthetic Antisense oligonucleotide
  modified_base 4: mod_base = OTHER; note = 5-methyl
  modified_base 13: mod_base = OTHER; note = 5-methyl
  source 1..16: mol_type = other DNA
agtcggtaagttctgt

SEQ ID NO: 1310 - DNA, 15 bp, synthetic construct
  misc_feature 1..15: note = Description of Artificial Sequence: Synthetic Antisense oligonucleotide
  modified_base 4: mod_base = OTHER; note = 5-methyl
  modified_base 13: mod_base = OTHER; note = 5-methyl
  source 1..15: mol_type = other DNA
agtcggtaagttctg

SEQ ID NO: 1311 - DNA, 14 bp, synthetic construct
  misc_feature 1..14: note = Description of Artificial Sequence: Synthetic Antisense oligonucleotide
  modified_base 4: mod_base = OTHER; note = 5-methyl
  modified_base 13: mod_base = OTHER; note = 5-methyl
  source 1..14: mol_type = other DNA
agtcggtaagttct

SEQ ID NO: 1312 - DNA, 13 bp, synthetic construct
  misc_feature 1..13: note = Description of Artificial Sequence: Synthetic Antisense oligonucleotide
  modified_base 4: mod_base = OTHER; note = 5-methyl
  modified_base 13: mod_base = OTHER; note = 5-methyl
  source 1..13: mol_type = other DNA
agtcggtaagttc

SEQ ID NO: 1313 - DNA, 12 bp, synthetic construct
  misc_feature 1..12: note = Description of Artificial Sequence: Synthetic Antisense oligonucleotide
  modified_base 4: mod_base = OTHER; note = 5-methyl
  source 1..12: mol_type = other DNA
agtcggtaagtt

SEQ ID NO: 1314 - DNA, 11 bp, synthetic construct
  misc_feature 1..11: note = Description of Artificial Sequence: Synthetic Antisense oligonucleotide
  modified_base 4: mod_base = OTHER; note = 5-methyl
  source 1..11: mol_type = other DNA
agtcggtaagt

SEQ ID NO: 1315 - DNA, 20 bp, synthetic construct
  misc_feature 1..20: note = Description of Artificial Sequence: Synthetic Antisense oligonucleotide
  modified_base 1: mod_base = OTHER; note = 5-methyl
  modified_base 5: mod_base = OTHER; note = 5-methyl
  modified_base 14: mod_base = OTHER; note = 5-methyl
  modified_base 18..19: mod_base = OTHER; note = 5-methyl
  source 1..20: mol_type = other DNA
cagtcggtaagttctgtcca

SEQ ID NO: 1316 - DNA, 19 bp, synthetic construct
  misc_feature 1..19: note = Description of Artificial Sequence: Synthetic Antisense oligonucleotide
  modified_base 1: mod_base = OTHER; note = 5-methyl
  modified_base 5: mod_base = OTHER; note = 5-methyl
  modified_base 14: mod_base = OTHER; note = 5-methyl
  modified_base 18..19: mod_base = OTHER; note = 5-methyl
  source 1..19: mol_type = other DNA
cagtcggtaagttctgtcc

SEQ ID NO: 1317 - DNA, 18 bp, synthetic construct
  misc_feature 1..18: note = Description of Artificial Sequence: Synthetic Antisense oligonucleotide
  modified_base 1: mod_base = OTHER; note = 5-methyl
  modified_base 5: mod_base = OTHER; note = 5-methyl
  modified_base 14: mod_base = OTHER; note = 5-methyl
  modified_base 18: mod_base = OTHER; note = 5-methyl
  source 1..18: mol_type = other DNA
cagtcggtaagttctgtc

SEQ ID NO: 1318 - DNA, 17 bp, synthetic construct
  misc_feature 1..17: note = Description of Artificial Sequence: Synthetic Antisense oligonucleotide
  modified_base 1: mod_base = OTHER; note = 5-methyl
  modified_base 5: mod_base = OTHER; note = 5-methyl
  modified_base 14: mod_base = OTHER; note = 5-methyl
  source 1..17: mol_type = other DNA
cagtcggtaagttctgt

SEQ ID NO: 1319 - DNA, 16 bp, synthetic construct
  misc_feature 1..16: note = Description of Artificial Sequence: Synthetic Antisense oligonucleotide
  modified_base 1: mod_base = OTHER; note = 5-methyl
  modified_base 5: mod_base = OTHER; note = 5-methyl
  modified_base 14: mod_base = OTHER; note = 5-methyl
  source 1..16: mol_type = other DNA
cagtcggtaagttctg

SEQ ID NO: 1320 - DNA, 15 bp, synthetic construct
  misc_feature 1..15: note = Description of Artificial Sequence: Synthetic Antisense oligonucleotide
  modified_base 1: mod_base = OTHER; note = 5-methyl
  modified_base 5: mod_base = OTHER; note = 5-methyl
  modified_base 14: mod_base = OTHER; note = 5-methyl
  source 1..15: mol_type = other DNA
cagtcggtaagttct

SEQ ID NO: 1321 - DNA, 14 bp, synthetic construct
  misc_feature 1..14: note = Description of Artificial Sequence: Synthetic Antisense oligonucleotide
  modified_base 1: mod_base = OTHER; note = 5-methyl
  modified_base 5: mod_base = OTHER; note = 5-methyl
  modified_base 14: mod_base = OTHER; note = 5-methyl
  source 1..14: mol_type = other DNA
cagtcggtaagttc

SEQ ID NO: 1322 - DNA, 13 bp, synthetic construct
  misc_feature 1..13: note = Description of Artificial Sequence: Synthetic Antisense oligonucleotide
  modified_base 1: mod_base = OTHER; note = 5-methyl
  modified_base 5: mod_base = OTHER; note = 5-methyl
  source 1..13: mol_type = other DNA
cagtcggtaagtt

SEQ ID NO: 1323 - DNA, 12 bp, synthetic construct
  misc_feature 1..12: note = Description of Artificial Sequence: Synthetic Antisense oligonucleotide
  modified_base 1: mod_base = OTHER; note = 5-methyl
  modified_base 5: mod_base = OTHER; note = 5-methyl
  source 1..12: mol_type = other DNA
cagtcggtaagt

SEQ ID NO: 1324 - DNA, 20 bp, synthetic construct
  misc_feature 1..20: note = Description of Artificial Sequence: Synthetic Antisense oligonucleotide
  modified_base 1..2: mod_base = OTHER; note = 5-methyl
  modified_base 6: mod_base = OTHER; note = 5-methyl
  modified_base 15: mod_base = OTHER; note = 5-methyl
  modified_base 19..20: mod_base = OTHER; note = 5-methyl
  source 1..20: mol_type = other DNA
ccagtcggtaagttctgtcc

SEQ ID NO: 1325 - DNA, 19 bp, synthetic construct
  misc_feature 1..19: note = Description of Artificial Sequence: Synthetic Antisense oligonucleotide
  modified_base 1..2: mod_base = OTHER; note = 5-methyl
  modified_base 6: mod_base = OTHER; note = 5-methyl
  modified_base 15: mod_base = OTHER; note = 5-methyl
  modified_base 19: mod_base = OTHER; note = 5-methyl
  source 1..19: mol_type = other DNA
ccagtcggtaagttctgtc

SEQ ID NO: 1326 - DNA, 18 bp, synthetic construct
  misc_feature 1..18: note = Description of Artificial Sequence: Synthetic Antisense oligonucleotide
  modified_base 1..2: mod_base = OTHER; note = 5-methyl
  modified_base 6: mod_base = OTHER; note = 5-methyl
  modified_base 15: mod_base = OTHER; note = 5-methyl
  source 1..18: mol_type = other DNA
ccagtcggtaagttctgt

SEQ ID NO: 1327 - DNA, 17 bp, synthetic construct
  misc_feature 1..17: note = Description of Artificial Sequence: Synthetic Antisense oligonucleotide
  modified_base 1..2: mod_base = OTHER; note = 5-methyl
  modified_base 6: mod_base = OTHER; note = 5-methyl
  modified_base 15: mod_base = OTHER; note = 5-methyl
  source 1..17: mol_type = other DNA
ccagtcggtaagttctg

SEQ ID NO: 1328 - DNA, 16 bp, synthetic construct
  misc_feature 1..16: note = Description of Artificial Sequence: Synthetic Antisense oligonucleotide
  modified_base 1..2: mod_base = OTHER; note = 5-methyl
  modified_base 6: mod_base = OTHER; note = 5-methyl
  modified_base 15: mod_base = OTHER; note = 5-methyl
  source 1..16: mol_type = other DNA
ccagtcggtaagttct

SEQ ID NO: 1329 - DNA, 15 bp, synthetic construct
  misc_feature 1..15: note = Description of Artificial Sequence: Synthetic Antisense oligonucleotide
  modified_base 1..2: mod_base = OTHER; note = 5-methyl
  modified_base 6: mod_base = OTHER; note = 5-methyl
  modified_base 15: mod_base = OTHER; note = 5-methyl
  source 1..15: mol_type = other DNA
ccagtcggtaagttc

SEQ ID NO: 1330 - DNA, 14 bp, synthetic construct
  misc_feature 1..14: note = Description of Artificial Sequence: Synthetic Antisense oligonucleotide
  modified_base 1..2: mod_base = OTHER; note = 5-methyl
  modified_base 6: mod_base = OTHER; note = 5-methyl
  source 1..14: mol_type = other DNA
ccagtcggtaagtt

SEQ ID NO: 1331 - DNA, 13 bp, synthetic construct
  misc_feature 1..13: note = Description of Artificial Sequence: Synthetic Antisense oligonucleotide
  modified_base 1..2: mod_base = OTHER; note = 5-methyl
  modified_base 6: mod_base = OTHER; note = 5-methyl
  source 1..13: mol_type = other DNA
ccagtcggtaagt

SEQ ID NO: 1332 - DNA, 20 bp, synthetic construct
  misc_feature 1..20: note = Description of Artificial Sequence: Synthetic Antisense oligonucleotide
  modified_base 2..3: mod_base = OTHER; note = 5-methyl
  modified_base 7: mod_base = OTHER; note = 5-methyl
  modified_base 16: mod_base = OTHER; note = 5-methyl
  modified_base 20: mod_base = OTHER; note = 5-methyl
  source 1..20: mol_type = other DNA
gccagtcggtaagttctgtc

SEQ ID NO: 1333 - DNA, 19 bp, synthetic construct
  misc_feature 1..19: note = Description of Artificial Sequence: Synthetic Antisense oligonucleotide
  modified_base 2..3: mod_base = OTHER; note = 5-methyl
  modified_base 7: mod_base = OTHER; note = 5-methyl
  modified_base 16: mod_base = OTHER; note = 5-methyl
  source 1..19: mol_type = other DNA
gccagtcggtaagttctgt

SEQ ID NO: 1334 - DNA, 18 bp, synthetic construct
  misc_feature 1..18: note = Description of Artificial Sequence: Synthetic Antisense oligonucleotide
  modified_base 2..3: mod_base = OTHER; note = 5-methyl
  modified_base 7: mod_base = OTHER; note = 5-methyl
  modified_base 16: mod_base = OTHER; note = 5-methyl
  source 1..18: mol_type = other DNA
gccagtcggtaagttctg

SEQ ID NO: 1335 - DNA, 17 bp, synthetic construct
  misc_feature 1..17: note = Description of Artificial Sequence: Synthetic Antisense oligonucleotide
  modified_base 2..3: mod_base = OTHER; note = 5-methyl
  modified_base 7: mod_base = OTHER; note = 5-methyl
  modified_base 16: mod_base = OTHER; note = 5-methyl
  source 1..17: mol_type = other DNA
gccagtcggtaagttct

SEQ ID NO: 1336 - DNA, 16 bp, synthetic construct
  misc_feature 1..16: note = Description of Artificial Sequence: Synthetic Antisense oligonucleotide
  modified_base 2..3: mod_base = OTHER; note = 5-methyl
  modified_base 7: mod_base = OTHER; note = 5-methyl
  modified_base 16: mod_base = OTHER; note = 5-methyl
  source 1..16: mol_type = other DNA
gccagtcggtaagttc

SEQ ID NO: 1337 - DNA, 15 bp, synthetic construct
  misc_feature 1..15: note = Description of Artificial Sequence: Synthetic Antisense oligonucleotide
  modified_base 2..3: mod_base = OTHER; note = 5-methyl
  modified_base 7: mod_base = OTHER; note = 5-methyl
  source 1..15: mol_type = other DNA
gccagtcggtaagtt

SEQ ID NO: 1338 - DNA, 14 bp, synthetic construct
  misc_feature 1..14: note = Description of Artificial Sequence: Synthetic Antisense oligonucleotide
  modified_base 2..3: mod_base = OTHER; note = 5-methyl
  modified_base 7: mod_base = OTHER; note = 5-methyl
  source 1..14: mol_type = other DNA
gccagtcggtaagt

SEQ ID NO: 1339 - DNA, 20 bp, synthetic construct
  misc_feature 1..20: note = Description of Artificial Sequence: Synthetic Antisense oligonucleotide
  modified_base 2: mod_base = OTHER; note = 5-methyl
  modified_base 14: mod_base = OTHER; note = 5-methyl
  modified_base 19: mod_base = OTHER; note = 5-methyl
  source 1..20: mol_type = other DNA
tcaaggaagatggcatttct

SEQ ID NO: 1340 - DNA, 22 bp, synthetic construct
  misc_feature 1..22: note = Description of Artificial Sequence: Synthetic Antisense oligonucleotide
  modified_base 2: mod_base = OTHER; note = 5-methyl
  modified_base 14: mod_base = OTHER; note = 5-methyl
  modified_base 19: mod_base = OTHER; note = 5-methyl
  source 1..22: mol_type = other DNA
tcaaggaagatggcatttctag

SEQ ID NO: 1341 - DNA, 16 bp, synthetic construct
  misc_feature 1..16: note = Description of Artificial Sequence: Synthetic Antisense oligonucleotide
  modified_base 2: mod_base = OTHER; note = 5-methyl
  modified_base 14: mod_base = OTHER; note = 5-methyl
  source 1..16: mol_type = other DNA
tcaaggaagatggcat

SEQ ID NO: 1342 - DNA, 15 bp, synthetic construct
  misc_feature 1..15: note = Description of Artificial Sequence: Synthetic Antisense oligonucleotide
  modified_base 9: mod_base = OTHER; note = 5-methyl
  modified_base 14: mod_base = OTHER; note = 5-methyl
  source 1..15: mol_type = other DNA
gaagatggcatttct

SEQ ID NO: 1343 - DNA, 21 bp, synthetic construct
  misc_feature 1..21: note = Description of Artificial Sequence: Synthetic Antisense oligonucleotide
  modified_base 2: mod_base = OTHER; note = 5-methyl
  modified_base 14: mod_base = OTHER; note = 5-methyl
  modified_base 19: mod_base = OTHER; note = 5-methyl
  source 1..21: mol_type = other DNA
tcaaggaagatggcatttcta

SEQ ID NO: 1344 - DNA, 19 bp, synthetic construct
  misc_feature 1..19: note = Description of Artificial Sequence: Synthetic Antisense oligonucleotide
  modified_base 2: mod_base = OTHER; note = 5-methyl
  modified_base 14: mod_base = OTHER; note = 5-methyl
  modified_base 19: mod_base = OTHER; note = 5-methyl
  source 1..19: mol_type = other DNA
tcaaggaagatggcatttc

SEQ ID NO: 1345 - DNA, 18 bp, synthetic construct
  misc_feature 1..18: note = Description of Artificial Sequence: Synthetic Antisense oligonucleotide
  modified_base 2: mod_base = OTHER; note = 5-methyl
  modified_base 14: mod_base = OTHER; note = 5-methyl
  source 1..18: mol_type = other DNA
tcaaggaagatggcattt

SEQ ID NO: 1346 - DNA, 17 bp, synthetic construct
  misc_feature 1..17: note = Description of Artificial Sequence: Synthetic Antisense oligonucleotide
  modified_base 2: mod_base = OTHER; note = 5-methyl
  modified_base 14: mod_base = OTHER; note = 5-methyl
  source 1..17: mol_type = other DNA
tcaaggaagatggcatt

SEQ ID NO: 1347 - DNA, 15 bp, synthetic construct
  misc_feature 1..15: note = Description of Artificial Sequence: Synthetic Antisense oligonucleotide
  modified_base 2: mod_base = OTHER; note = 5-methyl
  modified_base 14: mod_base = OTHER; note = 5-methyl
  source 1..15: mol_type = other DNA
tcaaggaagatggca

SEQ ID NO: 1348 - DNA, 14 bp, synthetic construct
  misc_feature 1..14: note = Description of Artificial Sequence: Synthetic Antisense oligonucleotide
  modified_base 2: mod_base = OTHER; note = 5-methyl
  modified_base 14: mod_base = OTHER; note = 5-methyl
  source 1..14: mol_type = other DNA
tcaaggaagatggc

SEQ ID NO: 1349 - DNA, 13 bp, synthetic construct
  misc_feature 1..13: note = Description of Artificial Sequence: Synthetic Antisense oligonucleotide
  modified_base 2: mod_base = OTHER; note = 5-methyl
  source 1..13: mol_type = other DNA
tcaaggaagatgg

SEQ ID NO: 1350 - DNA, 12 bp, synthetic construct
  misc_feature 1..12: note = Description of Artificial Sequence: Synthetic Antisense oligonucleotide
  modified_base 2: mod_base = OTHER; note = 5-methyl
  source 1..12: mol_type = other DNA
tcaaggaagatg

SEQ ID NO: 1351 - DNA, 11 bp, synthetic construct
  misc_feature 1..11: note = Description of Artificial Sequence: Synthetic Antisense oligonucleotide
  modified_base 2: mod_base = OTHER; note = 5-methyl
  source 1..11: mol_type = other DNA
tcaaggaagat

SEQ ID NO: 1352 - DNA, 10 bp, synthetic construct
  misc_feature 1..10: note = Description of Artificial Sequence: Synthetic Antisense oligonucleotide
  modified_base 2: mod_base = OTHER; note = 5-methyl
  source 1..10: mol_type = other DNA
tcaaggaaga

SEQ ID NO: 1353 - skipped

SEQ ID NO: 1354 - DNA, 21 bp, synthetic construct
  misc_feature 1..21: note = Description of Artificial Sequence: Synthetic Antisense oligonucleotide
  modified_base 1: mod_base = OTHER; note = 5-methyl
  modified_base 13: mod_base = OTHER; note = 5-methyl
  modified_base 18: mod_base = OTHER; note = 5-methyl
  source 1..21: mol_type = other DNA
caaggaagatggcatttctag

SEQ ID NO: 1355 - DNA, 20 bp, synthetic construct
  misc_feature 1..20: note = Description of Artificial Sequence: Synthetic Antisense oligonucleotide
  modified_base 1: mod_base = OTHER; note = 5-methyl
  modified_base 13: mod_base = OTHER; note = 5-methyl
  modified_base 18: mod_base = OTHER; note = 5-methyl
  source 1..20: mol_type = other DNA
caaggaagatggcatttcta

SEQ ID NO: 1356 - DNA, 19 bp, synthetic construct
  misc_feature 1..19: note = Description of Artificial Sequence: Synthetic Antisense oligonucleotide
  modified_base 1: mod_base = OTHER; note = 5-methyl
  modified_base 13: mod_base = OTHER; note = 5-methyl
  modified_base 18: mod_base = OTHER; note = 5-methyl
  source 1..19: mol_type = other DNA
caaggaagatggcatttct

SEQ ID NO: 1357 - DNA, 18 bp, synthetic construct
  misc_feature 1..18: note = Description of Artificial Sequence: Synthetic Antisense oligonucleotide
  modified_base 1: mod_base = OTHER; note = 5-methyl
  modified_base 13: mod_base = OTHER; note = 5-methyl
  modified_base 18: mod_base = OTHER; note = 5-methyl
  source 1..18: mol_type = other DNA
caaggaagatggcatttc

SEQ ID NO: 1358 - DNA, 17 bp, synthetic construct
  misc_feature 1..17: note = Description of Artificial Sequence: Synthetic Antisense oligonucleotide
  modified_base 1: mod_base = OTHER; note = 5-methyl
  modified_base 13: mod_base = OTHER; note = 5-methyl
  source 1..17: mol_type = other DNA
caaggaagatggcattt

SEQ ID NO: 1359 - DNA, 16 bp, synthetic construct
  misc_feature 1..16: note = Description of Artificial Sequence: Synthetic Antisense oligonucleotide
  modified_base 1: mod_base = OTHER; note = 5-methyl
  modified_base 13: mod_base = OTHER; note = 5-methyl
  source 1..16: mol_type = other DNA
caaggaagatggcatt

SEQ ID NO: 1360 - DNA, 15 bp, synthetic construct
  misc_feature 1..15: note = Description of Artificial Sequence: Synthetic Antisense oligonucleotide
  modified_base 1: mod_base = OTHER; note = 5-methyl
  modified_base 13: mod_base = OTHER; note = 5-methyl
  source 1..15: mol_type = other DNA
caaggaagatggcat

SEQ ID NO: 1361 - DNA, 14 bp, synthetic construct
  misc_feature 1..14: note = Description of Artificial Sequence: Synthetic Antisense oligonucleotide
  modified_base 1: mod_base = OTHER; note = 5-methyl
  modified_base 13: mod_base = OTHER; note = 5-methyl
  source 1..14: mol_type = other DNA
caaggaagatggca

SEQ ID NO: 1362 - DNA, 13 bp, synthetic construct
  misc_feature 1..13: note = Description of Artificial Sequence: Synthetic Antisense oligonucleotide
  modified_base 1: mod_base = OTHER; note = 5-methyl
  modified_base 13: mod_base = OTHER; note = 5-methyl
  source 1..13: mol_type = other DNA
caaggaagatggc

SEQ ID NO: 1363 - DNA, 12 bp, synthetic construct
  misc_feature 1..12: note = Description of Artificial Sequence: Synthetic Antisense oligonucleotide
  modified_base 1: mod_base = OTHER; note = 5-methyl
  source 1..12: mol_type = other DNA
caaggaagatgg

SEQ ID NO: 1364 - DNA, 11 bp, synthetic construct
  misc_feature 1..11: note = Description of Artificial Sequence: Synthetic Antisense oligonucleotide
  modified_base 1: mod_base = OTHER; note = 5-methyl
  source 1..11: mol_type = other DNA
caaggaagatg

SEQ ID NO: 1365 - DNA, 10 bp, synthetic construct
  misc_feature 1..10: note = Description of Artificial Sequence: Synthetic Antisense oligonucleotide
  modified_base 1: mod_base = OTHER; note = 5-methyl
  source 1..10: mol_type = other DNA
caaggaagat

SEQ ID NO: 1366 - DNA, 20 bp, synthetic construct
  misc_feature 1..20: note = Description of Artificial Sequence: Synthetic Antisense oligonucleotide
  modified_base 12: mod_base = OTHER; note = 5-methyl
  modified_base 17: mod_base = OTHER; note = 5-methyl
  source 1..20: mol_type = other DNA
aaggaagatggcatttctag

SEQ ID NO: 1367 - DNA, 19 bp, synthetic construct
  misc_feature 1..19: note = Description of Artificial Sequence: Synthetic Antisense oligonucleotide
  modified_base 12: mod_base = OTHER; note = 5-methyl
  modified_base 17: mod_base = OTHER; note = 5-methyl
  source 1..19: mol_type = other DNA
aaggaagatggcatttcta

SEQ ID NO: 1368 - DNA, 18 bp, synthetic construct
  misc_feature 1..18: note = Description of Artificial Sequence: Synthetic Antisense oligonucleotide
  modified_base 12: mod_base = OTHER; note = 5-methyl
  modified_base 17: mod_base = OTHER; note = 5-methyl
  source 1..18: mol_type = other DNA
aaggaagatggcatttct

SEQ ID NO: 1369 - DNA, 17 bp, synthetic construct
  misc_feature 1..17: note = Description of Artificial Sequence: Synthetic Antisense oligonucleotide
  modified_base 12: mod_base = OTHER; note = 5-methyl
  modified_base 17: mod_base = OTHER; note = 5-methyl
  source 1..17: mol_type = other DNA
aaggaagatggcatttc

SEQ ID NO: 1370 - DNA, 16 bp, synthetic construct
  misc_feature 1..16: note = Description of Artificial Sequence: Synthetic Antisense oligonucleotide
  modified_base 12: mod_base = OTHER; note = 5-methyl
  source 1..16: mol_type = other DNA
aaggaagatggcattt

SEQ ID NO: 1371 - DNA, 15 bp, synthetic construct
  misc_feature 1..15: note = Description of Artificial Sequence: Synthetic Antisense oligonucleotide
  modified_base 12: mod_base = OTHER; note = 5-methyl
  source 1..15: mol_type = other DNA
aaggaagatggcatt

SEQ ID NO: 1372 - DNA, 14 bp, synthetic construct
  misc_feature 1..14: note = Description of Artificial Sequence: Synthetic Antisense oligonucleotide
  modified_base 12: mod_base = OTHER; note = 5-methyl
  source 1..14: mol_type = other DNA
aaggaagatggcat

SEQ ID NO: 1373 - DNA, 13 bp, synthetic construct
  misc_feature 1..13: note = Description of Artificial Sequence: Synthetic Antisense oligonucleotide
  modified_base 12: mod_base = OTHER; note = 5-methyl
  source 1..13: mol_type = other DNA
aaggaagatggca

SEQ ID NO: 1374 - DNA, 12 bp, synthetic construct
  misc_feature 1..12: note = Description of Artificial Sequence: Synthetic Antisense oligonucleotide
  modified_base 12: mod_base = OTHER; note = 5-methyl
  source 1..12: mol_type = other DNA
aaggaagatggc

SEQ ID NO: 1375 - DNA, 19 bp, synthetic construct
  misc_feature 1..19: note = Description of Artificial Sequence: Synthetic Antisense oligonucleotide
  modified_base 11: mod_base = OTHER; note = 5-methyl
  modified_base 16: mod_base = OTHER; note = 5-methyl
  source 1..19: mol_type = other DNA
aggaagatggcatttctag

SEQ ID NO: 1376 - DNA, 18 bp, synthetic construct
  misc_feature 1..18: note = Description of Artificial Sequence: Synthetic Antisense oligonucleotide
  modified_base 11: mod_base = OTHER; note = 5-methyl
  modified_base 16: mod_base = OTHER; note = 5-methyl
  source 1..18: mol_type = other DNA
aggaagatggcatttcta

SEQ ID NO: 1377 - DNA, 17 bp, synthetic construct
  misc_feature 1..17: note = Description of Artificial Sequence: Synthetic Antisense oligonucleotide
  modified_base 11: mod_base = OTHER; note = 5-methyl
  modified_base 16: mod_base = OTHER; note = 5-methyl
  source 1..17: mol_type = other DNA
aggaagatggcatttct

SEQ ID NO: 1378 - DNA, 16 bp, synthetic construct
  misc_feature 1..16: note = Description of Artificial Sequence: Synthetic Antisense oligonucleotide
  modified_base 11: mod_base = OTHER; note = 5-methyl
  modified_base 16: mod_base = OTHER; note = 5-methyl
  source 1..16: mol_type = other DNA
aggaagatggcatttc

SEQ ID NO: 1379 - DNA, 15 bp, synthetic construct
  misc_feature 1..15: note = Description of Artificial Sequence: Synthetic Antisense oligonucleotide
  modified_base 11: mod_base = OTHER; note = 5-methyl
  source 1..15: mol_type = other DNA
aggaagatggcattt

SEQ ID NO: 1380 - DNA, 14 bp, synthetic construct
  misc_feature 1..14: note = Description of Artificial Sequence: Synthetic Antisense oligonucleotide
  modified_base 11: mod_base = OTHER; note = 5-methyl
  source 1..14: mol_type = other DNA
aggaagatggcatt

SEQ ID NO: 1381 - DNA, 13 bp, synthetic construct
  misc_feature 1..13: note = Description of Artificial Sequence: Synthetic Antisense oligonucleotide
  modified_base 11: mod_base = OTHER; note = 5-methyl
  source 1..13: mol_type = other DNA
aggaagatggcat

SEQ ID NO: 1382 - DNA, 12 bp, synthetic construct
  misc_feature 1..12: note = Description of Artificial Sequence: Synthetic Antisense oligonucleotide
  modified_base 11: mod_base = OTHER; note = 5-methyl
  source 1..12: mol_type = other DNA
aggaagatggca

SEQ ID NO: 1383 - DNA, 18 bp, synthetic construct
  misc_feature 1..18: note = Description of Artificial Sequence: Synthetic Antisense oligonucleotide
  modified_base 10: mod_base = OTHER; note = 5-methyl
  modified_base 15: mod_base = OTHER; note = 5-methyl
  source 1..18: mol_type = other DNA
ggaagatggcatttctag

SEQ ID NO: 1384 - DNA, 17 bp, synthetic construct
  misc_feature 1..17: note = Description of Artificial Sequence: Synthetic Antisense oligonucleotide
  modified_base 10: mod_base = OTHER; note = 5-methyl
  modified_base 15: mod_base = OTHER; note = 5-methyl
  source 1..17: mol_type = other DNA
ggaagatggcatttcta

SEQ ID NO: 1385 - DNA, 16 bp, synthetic construct
  misc_feature 1..16: note = Description of Artificial Sequence: Synthetic Antisense oligonucleotide
  modified_base 10: mod_base = OTHER; note = 5-methyl
  modified_base 15: mod_base = OTHER; note = 5-methyl
  source 1..16: mol_type = other DNA
ggaagatggcatttct

SEQ ID NO: 1386 - DNA, 15 bp, synthetic construct
  misc_feature 1..15: note = Description of Artificial Sequence: Synthetic Antisense oligonucleotide
  modified_base 10: mod_base = OTHER; note = 5-methyl
  modified_base 15: mod_base = OTHER; note = 5-methyl
  source 1..15: mol_type = other DNA
ggaagatggcatttc

SEQ ID NO: 1387 - DNA, 14 bp, synthetic construct
  misc_feature 1..14: note = Description of Artificial Sequence: Synthetic Antisense oligonucleotide
  modified_base 10: mod_base = OTHER; note = 5-methyl
  source 1..14: mol_type = other DNA
ggaagatggcattt

SEQ ID NO: 1388 - DNA, 13 bp, synthetic construct
  misc_feature 1..13: note = Description of Artificial Sequence: Synthetic Antisense oligonucleotide
  modified_base 10: mod_base = OTHER; note = 5-methyl
  source 1..13: mol_type = other DNA
ggaagatggcatt

SEQ ID NO: 1389 - DNA, 12 bp, synthetic construct
  misc_feature 1..12: note = Description of Artificial Sequence: Synthetic Antisense oligonucleotide
  modified_base 10: mod_base = OTHER; note = 5-methyl
  source 1..12: mol_type = other DNA
ggaagatggcat

SEQ ID NO: 1390 - DNA, 11 bp, synthetic construct
  misc_feature 1..11: note = Description of Artificial Sequence: Synthetic Antisense oligonucleotide
  modified_base 10: mod_base = OTHER; note = 5-methyl
  source 1..11: mol_type = other DNA
ggaagatggca

SEQ ID NO: 1391 - DNA, 10 bp, synthetic construct
  misc_feature 1..10: note = Description of Artificial Sequence: Synthetic Antisense oligonucleotide
  modified_base 10: mod_base = OTHER; note = 5-methyl
  source 1..10: mol_type = other DNA
ggaagatggc

SEQ ID NO: 1392 - DNA, 17 bp, synthetic construct
  misc_feature 1..17: note = Description of Artificial Sequence: Synthetic Antisense oligonucleotide
  modified_base 9: mod_base = OTHER; note = 5-methyl
  modified_base 14: mod_base = OTHER; note = 5-methyl
  source 1..17: mol_type = other DNA
gaagatggcatttctag

SEQ ID NO: 1393 - DNA, 16 bp, synthetic construct
  misc_feature 1..16: note = Description of Artificial Sequence: Synthetic Antisense oligonucleotide
  modified_base 9: mod_base = OTHER; note = 5-methyl
  modified_base 14: mod_base = OTHER; note = 5-methyl
  source 1..16: mol_type = other DNA
gaagatggcatttcta

SEQ ID NO: 1394 - DNA, 14 bp, synthetic construct
  misc_feature 1..14: note = Description of Artificial Sequence: Synthetic Antisense oligonucleotide
  modified_base 9: mod_base = OTHER; note = 5-methyl
  modified_base 14: mod_base = OTHER; note = 5-methyl
  source 1..14: mol_type = other DNA
gaagatggcatttc

SEQ ID NO: 1395 - DNA, 13 bp, synthetic construct
  misc_feature 1..13: note = Description of Artificial Sequence: Synthetic Antisense oligonucleotide
  modified_base 9: mod_base = OTHER; note = 5-methyl
  source 1..13: mol_type = other DNA
gaagatggcattt

SEQ ID NO: 1396 - DNA, 12 bp, synthetic construct
  misc_feature 1..12: note = Description of Artificial Sequence: Synthetic Antisense oligonucleotide
  modified_base 9: mod_base = OTHER; note = 5-methyl
  source 1..12: mol_type = other DNA
gaagatggcatt

SEQ ID NO: 1397 - DNA, 11 bp, synthetic construct
  misc_feature 1..11: note = Description of Artificial Sequence: Synthetic Antisense oligonucleotide
  modified_base 9: mod_base = OTHER; note = 5-methyl
  source 1..11: mol_type = other DNA
gaagatggcat

SEQ ID NO: 1398 - DNA, 10 bp, synthetic construct
  misc_feature 1..10: note = Description of Artificial Sequence: Synthetic Antisense oligonucleotide
  modified_base 9: mod_base = OTHER; note = 5-methyl
  source 1..10: mol_type = other DNA
gaagatggca

SEQ ID NO: 1399 - skipped

SEQ ID NO: 1400 - DNA, 16 bp, synthetic construct
  misc_feature 1..16: note = Description of Artificial Sequence: Synthetic Antisense oligonucleotide
  modified_base 8: mod_base = OTHER; note = 5-methyl
  modified_base 13: mod_base = OTHER; note = 5-methyl
  source 1..16: mol_type = other DNA
aagatggcatttctag

SEQ ID NO: 1401 - DNA, 15 bp, synthetic construct
  misc_feature 1..15: note = Description of Artificial Sequence: Synthetic Antisense oligonucleotide
  modified_base 8: mod_base = OTHER; note = 5-methyl
  modified_base 13: mod_base = OTHER; note = 5-methyl
  source 1..15: mol_type = other DNA
aagatggcatttcta

SEQ ID NO: 1402 - DNA, 14 bp, synthetic construct
  misc_feature 1..14: note = Description of Artificial Sequence: Synthetic Antisense oligonucleotide
  modified_base 8: mod_base = OTHER; note = 5-methyl
  modified_base 13: mod_base = OTHER; note = 5-methyl
  source 1..14: mol_type = other DNA
aagatggcatttct

SEQ ID NO: 1403 - DNA, 13 bp, synthetic construct
  misc_feature 1..13: note = Description of Artificial Sequence: Synthetic Antisense oligonucleotide
  modified_base 8: mod_base = OTHER; note = 5-methyl
  modified_base 13: mod_base = OTHER; note = 5-methyl
  source 1..13: mol_type = other DNA
aagatggcatttc

SEQ ID NO: 1404 - DNA, 12 bp, synthetic construct
  misc_feature 1..12: note = Description of Artificial Sequence: Synthetic Antisense oligonucleotide
  modified_base 8: mod_base = OTHER; note = 5-methyl
  source 1..12: mol_type = other DNA
aagatggcattt

SEQ ID NO: 1405 - DNA, 11 bp, synthetic construct
  misc_feature 1..11: note = Description of Artificial Sequence: Synthetic Antisense oligonucleotide
  modified_base 8: mod_base = OTHER; note = 5-methyl
  source 1..11: mol_type = other DNA
aagatggcatt

SEQ ID NO: 1406 - DNA, 10 bp, synthetic construct
  misc_feature 1..10: note = Description of Artificial Sequence: Synthetic Antisense oligonucleotide
  modified_base 8: mod_base = OTHER; note = 5-methyl
  source 1..10: mol_type = other DNA
aagatggcat

SEQ ID NO: 1407-1408 - skipped (2 entries)

SEQ ID NO: 1409 - DNA, 15 bp, synthetic construct
  misc_feature 1..15: note = Description of Artificial Sequence: Synthetic Antisense oligonucleotide
  modified_base 7: mod_base = OTHER; note = 5-methyl
  modified_base 12: mod_base = OTHER; note = 5-methyl
  source 1..15: mol_type = other DNA
agatggcatttctag

SEQ ID NO: 1410 - DNA, 14 bp, synthetic construct
  misc_feature 1..14: note = Description of Artificial Sequence: Synthetic Antisense oligonucleotide
  modified_base 7: mod_base = OTHER; note = 5-methyl
  modified_base 12: mod_base = OTHER; note = 5-methyl
  source 1..14: mol_type = other DNA
agatggcatttcta

SEQ ID NO: 1411 - DNA, 13 bp, synthetic construct
  misc_feature 1..13: note = Description of Artificial Sequence: Synthetic Antisense oligonucleotide
  modified_base 7: mod_base = OTHER; note = 5-methyl
  modified_base 12: mod_base = OTHER; note = 5-methyl
  source 1..13: mol_type = other DNA
agatggcatttct

SEQ ID NO: 1412 - DNA, 12 bp, synthetic construct
  misc_feature 1..12: note = Description of Artificial Sequence: Synthetic Antisense oligonucleotide
  modified_base 7: mod_base = OTHER; note = 5-methyl
  modified_base 12: mod_base = OTHER; note = 5-methyl
  source 1..12: mol_type = other DNA
agatggcatttc

SEQ ID NO: 1413 - DNA, 11 bp, synthetic construct
  misc_feature 1..11: note = Description of Artificial Sequence: Synthetic Antisense oligonucleotide
  modified_base 7: mod_base = OTHER; note = 5-methyl
  source 1..11: mol_type = other DNA
agatggcattt

SEQ ID NO: 1414 - DNA, 10 bp, synthetic construct
  misc_feature 1..10: note = Description of Artificial Sequence: Synthetic Antisense oligonucleotide
  modified_base 7: mod_base = OTHER; note = 5-methyl
  source 1..10: mol_type = other DNA
agatggcatt

SEQ ID NO: 1415-1416 - skipped (2 entries)

SEQ ID NO: 1417 - DNA, 30 bp, synthetic construct; identical to SEQ ID NO: 8
  misc_feature 1..30: note = Description of Artificial Sequence: Synthetic Antisense oligonucleotide
  modified_base 1: mod_base = OTHER; note = 5-methyl
  modified_base 3..4: mod_base = OTHER; note = 5-methyl
  modified_base 7: mod_base = OTHER; note = 5-methyl
  modified_base 10: mod_base = OTHER; note = 5-methyl
  modified_base 22: mod_base = OTHER; note = 5-methyl
  modified_base 27: mod_base = OTHER; note = 5-methyl
  source 1..30: mol_type = other DNA

SEQ ID NO: 1418 - DNA, 29 bp, synthetic construct
  misc_feature 1..29: note = Description of Artificial Sequence: Synthetic Antisense oligonucleotide
  modified_base 1: mod_base = OTHER; note = 5-methyl
  modified_base 3..4: mod_base = OTHER; note = 5-methyl
  modified_base 7: mod_base = OTHER; note = 5-methyl
  modified_base 10: mod_base = OTHER; note = 5-methyl
  modified_base 22: mod_base = OTHER; note = 5-methyl
  modified_base 27: mod_base = OTHER; note = 5-methyl
  source 1..29: mol_type = other DNA
ctccaacatcaaggaagatggcatttcta

SEQ ID NO: 1419 - DNA, 28 bp, synthetic construct
  misc_feature 1..28: note = Description of Artificial Sequence: Synthetic Antisense oligonucleotide
  modified_base 1: mod_base = OTHER; note = 5-methyl
  modified_base 3..4: mod_base = OTHER; note = 5-methyl
  modified_base 7: mod_base = OTHER; note = 5-methyl
  modified_base 10: mod_base = OTHER; note = 5-methyl
  modified_base 22: mod_base = OTHER; note = 5-methyl
  modified_base 27: mod_base = OTHER; note = 5-methyl
  source 1..28: mol_type = other DNA
ctccaacatcaaggaagatggcatttct

SEQ ID NO: 1420 - DNA, 27 bp, synthetic construct
  misc_feature 1..27: note = Description of Artificial Sequence: Synthetic Antisense oligonucleotide
  modified_base 1: mod_base = OTHER; note = 5-methyl
  modified_base 3..4: mod_base = OTHER; note = 5-methyl
  modified_base 7: mod_base = OTHER; note = 5-methyl
  modified_base 10: mod_base = OTHER; note = 5-methyl
  modified_base 22: mod_base = OTHER; note = 5-methyl
  modified_base 27: mod_base = OTHER; note = 5-methyl
  source 1..27: mol_type = other DNA
ctccaacatcaaggaagatggcatttc

SEQ ID NO: 1421 - DNA, 26 bp, synthetic construct
  misc_feature 1..26: note = Description of Artificial Sequence: Synthetic Antisense oligonucleotide
  modified_base 1: mod_base = OTHER; note = 5-methyl
  modified_base 3..4: mod_base = OTHER; note = 5-methyl
  modified_base 7: mod_base = OTHER; note = 5-methyl
  modified_base 10: mod_base = OTHER; note = 5-methyl
  modified_base 22: mod_base = OTHER; note = 5-methyl
  source 1..26: mol_type = other DNA
ctccaacatcaaggaagatggcattt

SEQ ID NO: 1422 - DNA, 25 bp, synthetic construct
  misc_feature 1..25: note = Description of Artificial Sequence: Synthetic Antisense oligonucleotide
  modified_base 1: mod_base = OTHER; note = 5-methyl
  modified_base 3..4: mod_base = OTHER; note = 5-methyl
  modified_base 7: mod_base = OTHER; note = 5-methyl
  modified_base 10: mod_base = OTHER; note = 5-methyl
  modified_base 22: mod_base = OTHER; note = 5-methyl
  source 1..25: mol_type = other DNA
ctccaacatcaaggaagatggcatt

SEQ ID NO: 1423 - DNA, 24 bp, synthetic construct
  misc_feature 1..24: note = Description of Artificial Sequence: Synthetic Antisense oligonucleotide
  modified_base 1: mod_base = OTHER; note = 5-methyl
  modified_base 3..4: mod_base = OTHER; note = 5-methyl
  modified_base 7: mod_base = OTHER; note = 5-methyl
  modified_base 10: mod_base = OTHER; note = 5-methyl
  modified_base 22: mod_base = OTHER; note = 5-methyl
  source 1..24: mol_type = other DNA
ctccaacatcaaggaagatggcat

SEQ ID NO: 1424 - DNA, 23 bp, synthetic construct
  misc_feature 1..23: note = Description of Artificial Sequence: Synthetic Antisense oligonucleotide
  modified_base 1: mod_base = OTHER; note = 5-methyl
  modified_base 3..4: mod_base = OTHER; note = 5-methyl
  modified_base 7: mod_base = OTHER; note = 5-methyl
  modified_base 10: mod_base = OTHER; note = 5-methyl
  modified_base 22: mod_base = OTHER; note = 5-methyl
  source 1..23: mol_type = other DNA
ctccaacatcaaggaagatggca

SEQ ID NO: 1425 - DNA, 22 bp, synthetic construct
  misc_feature 1..22: note = Description of Artificial Sequence: Synthetic Antisense oligonucleotide
  modified_base 1: mod_base = OTHER; note = 5-methyl
  modified_base 3..4: mod_base = OTHER; note = 5-methyl
  modified_base 7: mod_base = OTHER; note = 5-methyl
  modified_base 10: mod_base = OTHER; note = 5-methyl
  modified_base 22: mod_base = OTHER; note = 5-methyl
  source 1..22: mol_type = other DNA
ctccaacatcaaggaagatggc

SEQ ID NO: 1426 - DNA, 21 bp, synthetic construct
  misc_feature 1..21: note = Description of Artificial Sequence: Synthetic Antisense oligonucleotide
  modified_base 1: mod_base = OTHER; note = 5-methyl
  modified_base 3..4: mod_base = OTHER; note = 5-methyl
  modified_base 7: mod_base = OTHER; note = 5-methyl
  modified_base 10: mod_base = OTHER; note = 5-methyl
  source 1..21: mol_type = other DNA
ctccaacatcaaggaagatgg

SEQ ID NO: 1427 - DNA, 20 bp, synthetic construct
  misc_feature 1..20: note = Description of Artificial Sequence: Synthetic Antisense oligonucleotide
  modified_base 1: mod_base = OTHER; note = 5-methyl
  modified_base 3..4: mod_base = OTHER; note = 5-methyl
  modified_base 7: mod_base = OTHER; note = 5-methyl
  modified_base 10: mod_base = OTHER; note = 5-methyl
  source 1..20: mol_type = other DNA
ctccaacatcaaggaagatg

SEQ ID NO: 1428 - DNA, 19 bp, synthetic construct
  misc_feature 1..19: note = Description of Artificial Sequence: Synthetic Antisense oligonucleotide
  modified_base 1: mod_base = OTHER; note = 5-methyl
  modified_base 3..4: mod_base = OTHER; note = 5-methyl
  modified_base 7: mod_base = OTHER; note = 5-methyl
  modified_base 10: mod_base = OTHER; note = 5-methyl
  source 1..19: mol_type = other DNA
ctccaacatcaaggaagat

SEQ ID NO: 1429 - DNA, 18 bp, synthetic construct
  misc_feature 1..18: note = Description of Artificial Sequence: Synthetic Antisense oligonucleotide
  modified_base 1: mod_base = OTHER; note = 5-methyl
  modified_base 3..4: mod_base = OTHER; note = 5-methyl
  modified_base 7: mod_base = OTHER; note = 5-methyl
  modified_base 10: mod_base = OTHER; note = 5-methyl
  source 1..18: mol_type = other DNA
ctccaacatcaaggaaga

SEQ ID NO: 1430 - DNA, 17 bp, synthetic construct
  misc_feature 1..17: note = Description of Artificial Sequence: Synthetic Antisense oligonucleotide
  modified_base 1: mod_base = OTHER; note = 5-methyl
  modified_base 3..4: mod_base = OTHER; note = 5-methyl
  modified_base 7: mod_base = OTHER; note = 5-methyl
  modified_base 10: mod_base = OTHER; note = 5-methyl
  source 1..17: mol_type = other DNA
ctccaacatcaaggaag

SEQ ID NO: 1431 - DNA, 29 bp, synthetic construct
  misc_feature 1..29: note = Description of Artificial Sequence: Synthetic Antisense oligonucleotide
  modified_base 2..3: mod_base = OTHER; note = 5-methyl
  modified_base 6: mod_base = OTHER; note = 5-methyl
  modified_base 9: mod_base = OTHER; note = 5-methyl
  modified_base 21: mod_base = OTHER; note = 5-methyl
  modified_base 26: mod_base = OTHER; note = 5-methyl
  source 1..29: mol_type = other DNA
tccaacatcaaggaagatggcatttctag

SEQ ID NO: 1432 - DNA, 28 bp, synthetic construct
  misc_feature 1..28: note = Description of Artificial Sequence: Synthetic Antisense oligonucleotide
  modified_base 2..3: mod_base = OTHER; note = 5-methyl
  modified_base 6: mod_base = OTHER; note = 5-methyl
  modified_base 9: mod_base = OTHER; note = 5-methyl
  modified_base 21: mod_base = OTHER; note = 5-methyl
  modified_base 26: mod_base = OTHER; note = 5-methyl
  source 1..28: mol_type = other DNA
tccaacatcaaggaagatggcatttcta

SEQ ID NO: 1433 - DNA, 27 bp, synthetic construct
  misc_feature 1..27: note = Description of Artificial Sequence: Synthetic Antisense oligonucleotide
  modified_base 2..3: mod_base = OTHER; note = 5-methyl
  modified_base 6: mod_base = OTHER; note = 5-methyl
  modified_base 9: mod_base = OTHER; note = 5-methyl
  modified_base 21: mod_base = OTHER; note = 5-methyl
  modified_base 26: mod_base = OTHER; note = 5-methyl
  source 1..27: mol_type = other DNA
tccaacatcaaggaagatggcatttct

SEQ ID NO: 1434 - DNA, 26 bp, synthetic construct
  misc_feature 1..26: note = Description of Artificial Sequence: Synthetic Antisense oligonucleotide
  modified_base 2..3: mod_base = OTHER; note = 5-methyl
  modified_base 6: mod_base = OTHER; note = 5-methyl
  modified_base 9: mod_base = OTHER; note = 5-methyl
  modified_base 21: mod_base = OTHER; note = 5-methyl
  modified_base 26: mod_base = OTHER; note = 5-methyl
  source 1..26: mol_type = other DNA
tccaacatcaaggaagatggcatttc

SEQ ID NO: 1435 - DNA, 25 bp, synthetic construct
  misc_feature 1..25: note = Description of Artificial Sequence: Synthetic Antisense oligonucleotide
  modified_base 2..3: mod_base = OTHER; note = 5-methyl
  modified_base 6: mod_base = OTHER; note = 5-methyl
  modified_base 9: mod_base = OTHER; note = 5-methyl
  modified_base 21: mod_base = OTHER; note = 5-methyl
  source 1..25: mol_type = other DNA
tccaacatcaaggaagatggcattt

SEQ ID NO: 1436 - DNA, 24 bp, synthetic construct
  misc_feature 1..24: note = Description of Artificial Sequence: Synthetic Antisense oligonucleotide
  modified_base 2..3: mod_base = OTHER; note = 5-methyl
  modified_base 6: mod_base = OTHER; note = 5-methyl
  modified_base 9: mod_base = OTHER; note = 5-methyl
  modified_base 21: mod_base = OTHER; note = 5-methyl
  source 1..24: mol_type = other DNA
tccaacatcaaggaagatggcatt

SEQ ID NO: 1437 - DNA, 23 bp, synthetic construct
  misc_feature 1..23: note = Description of Artificial Sequence: Synthetic Antisense oligonucleotide
  modified_base 2..3: mod_base = OTHER; note = 5-methyl
  modified_base 6: mod_base = OTHER; note = 5-methyl
  modified_base 9: mod_base = OTHER; note = 5-methyl
  modified_base 21: mod_base = OTHER; note = 5-methyl
  source 1..23: mol_type = other DNA
tccaacatcaaggaagatggcat

SEQ ID NO: 1438 - DNA, 22 bp, synthetic construct
  misc_feature 1..22: note = Description of Artificial Sequence: Synthetic Antisense oligonucleotide
  modified_base 2..3: mod_base = OTHER; note = 5-methyl
  modified_base 6: mod_base = OTHER; note = 5-methyl
  modified_base 9: mod_base = OTHER; note = 5-methyl
  modified_base 21: mod_base = OTHER; note = 5-methyl
  source 1..22: mol_type = other DNA
tccaacatcaaggaagatggca

SEQ ID NO: 1439 - DNA, 21 bp, synthetic construct
  misc_feature 1..21: note = Description of Artificial Sequence: Synthetic Antisense oligonucleotide
  modified_base 2..3: mod_base = OTHER; note = 5-methyl
  modified_base 6: mod_base = OTHER; note = 5-methyl
  modified_base 9: mod_base = OTHER; note = 5-methyl
  modified_base 21: mod_base = OTHER; note = 5-methyl
  source 1..21: mol_type = other DNA
tccaacatcaaggaagatggc

SEQ ID NO: 1440 - DNA, 20 bp, synthetic construct
  misc_feature 1..20: note = Description of Artificial Sequence: Synthetic Antisense oligonucleotide
  modified_base 2..3: mod_base = OTHER; note = 5-methyl
  modified_base 6: mod_base = OTHER; note = 5-methyl
  modified_base 9: mod_base = OTHER; note = 5-methyl
  source 1..20: mol_type = other DNA
tccaacatcaaggaagatgg

SEQ ID NO: 1441 - DNA, 19 bp, synthetic construct
  misc_feature 1..19: note = Description of Artificial Sequence: Synthetic Antisense oligonucleotide
  modified_base 2..3: mod_base = OTHER; note = 5-methyl
  modified_base 6: mod_base = OTHER; note = 5-methyl
  modified_base 9: mod_base = OTHER; note = 5-methyl
  source 1..19: mol_type = other DNA
tccaacatcaaggaagatg

SEQ ID NO: 1442 - DNA, 18 bp, synthetic construct
  misc_feature 1..18: note = Description of Artificial Sequence: Synthetic Antisense oligonucleotide
  modified_base 2..3: mod_base = OTHER; note = 5-methyl
  modified_base 6: mod_base = OTHER; note = 5-methyl
  modified_base 9: mod_base = OTHER; note = 5-methyl
  source 1..18: mol_type = other DNA
tccaacatcaaggaagat

SEQ ID NO: 1443 - DNA, 17 bp, synthetic construct
  misc_feature 1..17: note = Description of Artificial Sequence: Synthetic Antisense oligonucleotide
  modified_base 2..3: mod_base = OTHER; note = 5-methyl
  modified_base 6: mod_base = OTHER; note = 5-methyl
  modified_base 9: mod_base = OTHER; note = 5-methyl
  source 1..17: mol_type = other DNA
tccaacatcaaggaaga

SEQ ID NO: 1444 - DNA, 16 bp, synthetic construct
  misc_feature 1..16: note = Description of Artificial Sequence: Synthetic Antisense oligonucleotide
  modified_base 2..3: mod_base = OTHER; note = 5-methyl
  modified_base 6: mod_base = OTHER; note = 5-methyl
  modified_base 9: mod_base = OTHER; note = 5-methyl
  source 1..16: mol_type = other DNA
tccaacatcaaggaag

SEQ ID NO: 1445 - DNA, 28 bp, synthetic construct
  misc_feature 1..28: note = Description of Artificial Sequence: Synthetic Antisense oligonucleotide
  modified_base 1..2: mod_base = OTHER; note = 5-methyl
  modified_base 5: mod_base = OTHER; note = 5-methyl
  modified_base 8: mod_base = OTHER; note = 5-methyl
  modified_base 20: mod_base = OTHER; note = 5-methyl
  modified_base 25: mod_base = OTHER; note = 5-methyl
  source 1..28: mol_type = other DNA
ccaacatcaaggaagatggcatttctag

SEQ ID NO: 1446 - DNA, 27 bp, synthetic construct
  misc_feature 1..27: note = Description of Artificial Sequence: Synthetic Antisense oligonucleotide
  modified_base 1..2: mod_base = OTHER; note = 5-methyl
  modified_base 5: mod_base = OTHER; note = 5-methyl
  modified_base 8: mod_base = OTHER; note = 5-methyl
  modified_base 20: mod_base = OTHER; note = 5-methyl
  modified_base 25: mod_base = OTHER; note = 5-methyl
  source 1..27: mol_type = other DNA
ccaacatcaaggaagatggcatttcta

SEQ ID NO: 1447 - DNA, 26 bp, synthetic construct
  misc_feature 1..26: note = Description of Artificial Sequence: Synthetic Antisense oligonucleotide
  modified_base 1..2: mod_base = OTHER; note = 5-methyl
  modified_base 5: mod_base = OTHER; note = 5-methyl
  modified_base 8: mod_base = OTHER; note = 5-methyl
  modified_base 20: mod_base = OTHER; note = 5-methyl
  modified_base 25: mod_base = OTHER; note = 5-methyl
  source 1..26: mol_type = other DNA
ccaacatcaaggaagatggcatttct

SEQ ID NO: 1448 - DNA, 25 bp, synthetic construct
  misc_feature 1..25: note = Description of Artificial Sequence: Synthetic Antisense oligonucleotide
  modified_base 1..2: mod_base = OTHER; note = 5-methyl
  modified_base 5: mod_base = OTHER; note = 5-methyl
  modified_base 8: mod_base = OTHER; note = 5-methyl
  modified_base 20: mod_base = OTHER; note = 5-methyl
  modified_base 25: mod_base = OTHER; note = 5-methyl
  source 1..25: mol_type = other DNA
ccaacatcaaggaagatggcatttc

SEQ ID NO: 1449 - DNA, 24 bp, synthetic construct
  misc_feature 1..24: note = Description of Artificial Sequence: Synthetic Antisense oligonucleotide
  modified_base 1..2: mod_base = OTHER; note = 5-methyl
  modified_base 5: mod_base = OTHER; note = 5-methyl
  modified_base 8: mod_base = OTHER; note = 5-methyl
  modified_base 20: mod_base = OTHER; note = 5-methyl
  source 1..24: mol_type = other DNA
ccaacatcaaggaagatggcattt

SEQ ID NO: 1450 - DNA, 23 bp, synthetic construct
  misc_feature 1..23: note = Description of Artificial Sequence: Synthetic Antisense oligonucleotide
  modified_base 1..2: mod_base = OTHER; note = 5-methyl
  modified_base 5: mod_base = OTHER; note = 5-methyl
  modified_base 8: mod_base = OTHER; note = 5-methyl
  modified_base 20: mod_base = OTHER; note = 5-methyl
  source 1..23: mol_type = other DNA
ccaacatcaaggaagatggcatt

SEQ ID NO: 1451 - DNA, 22 bp, synthetic construct
  misc_feature 1..22: note = Description of Artificial Sequence: Synthetic Antisense oligonucleotide
  modified_base 1..2: mod_base = OTHER; note = 5-methyl
  modified_base 5: mod_base = OTHER; note = 5-methyl
  modified_base 8: mod_base = OTHER; note = 5-methyl
  modified_base 20: mod_base = OTHER; note = 5-methyl
  source 1..22: mol_type = other DNA
ccaacatcaaggaagatggcat

SEQ ID NO: 1452 - DNA, 21 bp, synthetic construct
  misc_feature 1..21: note = Description of Artificial Sequence: Synthetic Antisense oligonucleotide
  modified_base 1..2: mod_base = OTHER; note = 5-methyl
  modified_base 5: mod_base = OTHER; note = 5-methyl
  modified_base 8: mod_base = OTHER; note = 5-methyl
  modified_base 20: mod_base = OTHER; note = 5-methyl
  source 1..21: mol_type = other DNA
ccaacatcaaggaagatggca

SEQ ID NO: 1453 - DNA, 20 bp, synthetic construct
  misc_feature 1..20: note = Description of Artificial Sequence: Synthetic Antisense oligonucleotide
  modified_base 1..2: mod_base = OTHER; note = 5-methyl
  modified_base 5: mod_base = OTHER; note = 5-methyl
  modified_base 8: mod_base = OTHER; note = 5-methyl
  modified_base 20: mod_base = OTHER; note = 5-methyl
  source 1..20: mol_type = other DNA
ccaacatcaaggaagatggc

SEQ ID NO: 1454 - DNA, 19 bp, synthetic construct
  misc_feature 1..19: note = Description of Artificial Sequence: Synthetic Antisense oligonucleotide
  modified_base 1..2: mod_base = OTHER; note = 5-methyl
  modified_base 5: mod_base = OTHER; note = 5-methyl
  modified_base 8: mod_base = OTHER; note = 5-methyl
  source 1..19: mol_type = other DNA
ccaacatcaaggaagatgg

SEQ ID NO: 1455 - DNA, 18 bp, synthetic construct
  misc_feature 1..18: note = Description of Artificial Sequence: Synthetic Antisense oligonucleotide
  modified_base 1..2: mod_base = OTHER; note = 5-methyl
  modified_base 5: mod_base = OTHER; note = 5-methyl
  modified_base 8: mod_base = OTHER; note = 5-methyl
  source 1..18: mol_type = other DNA
ccaacatcaaggaagatg

SEQ ID NO: 1456 - DNA, 17 bp, synthetic construct
  misc_feature 1..17: note = Description of Artificial Sequence: Synthetic Antisense oligonucleotide
  modified_base 1..2: mod_base = OTHER; note = 5-methyl
  modified_base 5: mod_base = OTHER; note = 5-methyl
  modified_base 8: mod_base = OTHER; note = 5-methyl
  source 1..17: mol_type = other DNA
ccaacatcaaggaagat

SEQ ID NO: 1457 - DNA, 16 bp, synthetic construct
  misc_feature 1..16: note = Description of Artificial Sequence: Synthetic Antisense oligonucleotide
  modified_base 1..2: mod_base = OTHER; note = 5-methyl
  modified_base 5: mod_base = OTHER; note = 5-methyl
  modified_base 8: mod_base = OTHER; note = 5-methyl
  source 1..16: mol_type = other DNA
ccaacatcaaggaaga

SEQ ID NO: 1458 - DNA, 15 bp, synthetic construct
  misc_feature 1..15: note = Description of Artificial Sequence: Synthetic Antisense oligonucleotide
  modified_base 1..2: mod_base = OTHER; note = 5-methyl
  modified_base 5: mod_base = OTHER; note = 5-methyl
  modified_base 8: mod_base = OTHER; note = 5-methyl
  source 1..15: mol_type = other DNA
ccaacatcaaggaag

SEQ ID NO: 1459 - DNA, 27 bp, synthetic construct
  misc_feature 1..27: note = Description of Artificial Sequence: Synthetic Antisense oligonucleotide
  modified_base 1: mod_base = OTHER; note = 5-methyl
  modified_base 4: mod_base = OTHER; note = 5-methyl
  modified_base 7: mod_base = OTHER; note = 5-methyl
  modified_base 19: mod_base = OTHER; note = 5-methyl
  modified_base 24: mod_base = OTHER; note = 5-methyl
  source 1..27: mol_type = other DNA
caacatcaaggaagatggcatttctag

SEQ ID NO: 1460 - DNA, 26 bp, synthetic construct
  misc_feature 1..26: note = Description of Artificial Sequence: Synthetic Antisense oligonucleotide
  modified_base 1: mod_base = OTHER; note = 5-methyl
  modified_base 4: mod_base = OTHER; note = 5-methyl
  modified_base 7: mod_base = OTHER; note = 5-methyl
  modified_base 19: mod_base = OTHER; note = 5-methyl
  modified_base 24: mod_base = OTHER; note = 5-methyl
  source 1..26: mol_type = other DNA
caacatcaaggaagatggcatttcta

SEQ ID NO: 1461 - DNA, 25 bp, synthetic construct
  misc_feature 1..25: note = Description of Artificial Sequence: Synthetic Antisense oligonucleotide
  modified_base 1: mod_base = OTHER; note = 5-methyl
  modified_base 4: mod_base = OTHER; note = 5-methyl
  modified_base 7: mod_base = OTHER; note = 5-methyl
  modified_base 19: mod_base = OTHER; note = 5-methyl
  modified_base 24: mod_base = OTHER; note = 5-methyl
  source 1..25: mol_type = other DNA
caacatcaaggaagatggcatttct

SEQ ID NO: 1462 - DNA, 24 bp, synthetic construct
  misc_feature 1..24: note = Description of Artificial Sequence: Synthetic Antisense oligonucleotide
  modified_base 1: mod_base = OTHER; note = 5-methyl
  modified_base 4: mod_base = OTHER; note = 5-methyl
  modified_base 7: mod_base = OTHER; note = 5-methyl
  modified_base 19: mod_base = OTHER; note = 5-methyl
  modified_base 24: mod_base = OTHER; note = 5-methyl
  source 1..24: mol_type = other DNA
caacatcaaggaagatggcatttc

SEQ ID NO: 1463 - DNA, 23 bp, synthetic construct
  misc_feature 1..23: note = Description of Artificial Sequence: Synthetic Antisense oligonucleotide
  modified_base 1: mod_base = OTHER; note = 5-methyl
  modified_base 4: mod_base = OTHER; note = 5-methyl
  modified_base 7: mod_base = OTHER; note = 5-methyl
  modified_base 19: mod_base = OTHER; note = 5-methyl
  source 1..23: mol_type = other DNA
caacatcaaggaagatggcattt

SEQ ID NO: 1464 - DNA, 22 bp, synthetic construct
  misc_feature 1..22: note = Description of Artificial Sequence: Synthetic Antisense oligonucleotide
  modified_base 1: mod_base = OTHER; note = 5-methyl
  modified_base 4: mod_base = OTHER; note = 5-methyl
  modified_base 7: mod_base = OTHER; note = 5-methyl
  modified_base 19: mod_base = OTHER; note = 5-methyl
  source 1..22: mol_type = other DNA
caacatcaaggaagatggcatt

SEQ ID NO: 1465 - DNA, 21 bp, synthetic construct
  misc_feature 1..21: note = Description of Artificial Sequence: Synthetic Antisense oligonucleotide
  modified_base 1: mod_base = OTHER; note = 5-methyl
  modified_base 4: mod_base = OTHER; note = 5-methyl
  modified_base 7: mod_base = OTHER; note = 5-methyl
  modified_base 19: mod_base = OTHER; note = 5-methyl
  source 1..21: mol_type = other DNA
caacatcaaggaagatggcat

SEQ ID NO: 1466 - DNA, 20 bp, synthetic construct
  misc_feature 1..20: note = Description of Artificial Sequence: Synthetic Antisense oligonucleotide
  modified_base 1: mod_base = OTHER; note = 5-methyl
  modified_base 4: mod_base = OTHER; note = 5-methyl
  modified_base 7: mod_base = OTHER; note = 5-methyl
  modified_base 19: mod_base = OTHER; note = 5-methyl
  source 1..20: mol_type = other DNA
caacatcaaggaagatggca

SEQ ID NO: 1467 - DNA, 19 bp, synthetic construct
  misc_feature 1..19: note = Description of Artificial Sequence: Synthetic Antisense oligonucleotide
  modified_base 1: mod_base = OTHER; note = 5-methyl
  modified_base 4: mod_base = OTHER; note = 5-methyl
  modified_base 7: mod_base = OTHER; note = 5-methyl
  modified_base 19: mod_base = OTHER; note = 5-methyl
  source 1..19: mol_type = other DNA
caacatcaaggaagatggc

SEQ ID NO: 1468 - DNA, 18 bp, synthetic construct
  misc_feature 1..18: note = Description of Artificial Sequence: Synthetic Antisense oligonucleotide
  modified_base 1: mod_base = OTHER; note = 5-methyl
  modified_base 4: mod_base = OTHER; note = 5-methyl
  modified_base 7: mod_base = OTHER; note = 5-methyl
  source 1..18: mol_type = other DNA
caacatcaaggaagatgg

SEQ ID NO: 1469 - DNA, 17 bp, synthetic construct
  misc_feature 1..17: note = Description of Artificial Sequence: Synthetic Antisense oligonucleotide
  modified_base 1: mod_base = OTHER; note = 5-methyl
  modified_base 4: mod_base = OTHER; note = 5-methyl
  modified_base 7: mod_base = OTHER; note = 5-methyl
  source 1..17: mol_type = other DNA
caacatcaaggaagatg

SEQ ID NO: 1470 - DNA, 16 bp, synthetic construct
  misc_feature 1..16: note = Description of Artificial Sequence: Synthetic Antisense oligonucleotide
  modified_base 1: mod_base = OTHER; note = 5-methyl
  modified_base 4: mod_base = OTHER; note = 5-methyl
  modified_base 7: mod_base = OTHER; note = 5-methyl
  source 1..16: mol_type = other DNA
caacatcaaggaagat

SEQ ID NO: 1471 - DNA, 15 bp, synthetic construct
  misc_feature 1..15: note = Description of Artificial Sequence: Synthetic Antisense oligonucleotide
  modified_base 1: mod_base = OTHER; note = 5-methyl
  modified_base 4: mod_base = OTHER; note = 5-methyl
  modified_base 7: mod_base = OTHER; note = 5-methyl
  source 1..15: mol_type = other DNA
caacatcaaggaaga

SEQ ID NO: 1472 - DNA, 14 bp, synthetic construct
  misc_feature 1..14: note = Description of Artificial Sequence: Synthetic Antisense oligonucleotide
  modified_base 1: mod_base = OTHER; note = 5-methyl
  modified_base 4: mod_base = OTHER; note = 5-methyl
  modified_base 7: mod_base = OTHER; note = 5-methyl
  source 1..14: mol_type = other DNA
caacatcaaggaag

SEQ ID NO: 1473 - DNA, 26 bp, synthetic construct
  misc_feature 1..26: note = Description of Artificial Sequence: Synthetic Antisense oligonucleotide
  modified_base 3: mod_base = OTHER; note = 5-methyl
  modified_base 6: mod_base = OTHER; note = 5-methyl
  modified_base 18: mod_base = OTHER; note = 5-methyl
  modified_base 23: mod_base = OTHER; note = 5-methyl
  source 1..26: mol_type = other DNA
aacatcaaggaagatggcatttctag

SEQ ID NO: 1474 - DNA, 25 bp, synthetic construct
  misc_feature 1..25: note = Description of Artificial Sequence: Synthetic Antisense oligonucleotide
  modified_base 3: mod_base = OTHER; note = 5-methyl
  modified_base 6: mod_base = OTHER; note = 5-methyl
  modified_base 18: mod_base = OTHER; note = 5-methyl
  modified_base 23: mod_base = OTHER; note = 5-methyl
  source 1..25: mol_type = other DNA
aacatcaaggaagatggcatttcta

SEQ ID NO: 1475 - DNA, 24 bp, synthetic construct
  misc_feature 1..24: note = Description of Artificial Sequence: Synthetic Antisense oligonucleotide
  modified_base 3: mod_base = OTHER; note = 5-methyl
  modified_base 6: mod_base = OTHER; note = 5-methyl
  modified_base 18: mod_base = OTHER; note = 5-methyl
  modified_base 23: mod_base = OTHER; note = 5-methyl
  source 1..24: mol_type = other DNA
aacatcaaggaagatggcatttct

SEQ ID NO: 1476 - DNA, 23 bp, synthetic construct
  misc_feature 1..23: note = Description of Artificial Sequence: Synthetic Antisense oligonucleotide
  modified_base 3: mod_base = OTHER; note = 5-methyl
  modified_base 6: mod_base = OTHER; note = 5-methyl
  modified_base 18: mod_base = OTHER; note = 5-methyl
  modified_base 23: mod_base = OTHER; note = 5-methyl
  source 1..23: mol_type = other DNA
aacatcaaggaagatggcatttc

SEQ ID NO: 1477 - DNA, 22 bp, synthetic construct
  misc_feature 1..22: note = Description of Artificial Sequence: Synthetic Antisense oligonucleotide
  modified_base 3: mod_base = OTHER; note = 5-methyl
  modified_base 6: mod_base = OTHER; note = 5-methyl
  modified_base 18: mod_base = OTHER; note = 5-methyl
  source 1..22: mol_type = other DNA
aacatcaaggaagatggcattt

SEQ ID NO: 1478 - DNA, 21 bp, synthetic construct
  misc_feature 1..21: note = Description of Artificial Sequence: Synthetic Antisense oligonucleotide
  modified_base 3: mod_base = OTHER; note = 5-methyl
  modified_base 6: mod_base = OTHER; note = 5-methyl
  modified_base 18: mod_base = OTHER; note = 5-methyl
  source 1..21: mol_type = other DNA
aacatcaaggaagatggcatt

SEQ ID NO: 1479 - DNA, 20 bp, synthetic construct
  misc_feature 1..20: note = Description of Artificial Sequence: Synthetic Antisense oligonucleotide
  modified_base 3: mod_base = OTHER; note = 5-methyl
  modified_base 6: mod_base = OTHER; note = 5-methyl
  modified_base 18: mod_base = OTHER; note = 5-methyl
  source 1..20: mol_type = other DNA
aacatcaaggaagatggcat

SEQ ID NO: 1480 - DNA, 19 bp, synthetic construct
  misc_feature 1..19: note = Description of Artificial Sequence: Synthetic Antisense oligonucleotide
  modified_base 3: mod_base = OTHER; note = 5-methyl
  modified_base 6: mod_base = OTHER; note = 5-methyl
  modified_base 18: mod_base = OTHER; note = 5-methyl
  source 1..19: mol_type = other DNA
aacatcaaggaagatggca

SEQ ID NO: 1481 - DNA, 18 bp, synthetic construct
  misc_feature 1..18: note = Description of Artificial Sequence: Synthetic Antisense oligonucleotide
  modified_base 3: mod_base = OTHER; note = 5-methyl
  modified_base 6: mod_base = OTHER; note = 5-methyl
  modified_base 18: mod_base = OTHER; note = 5-methyl
  source 1..18: mol_type = other DNA
aacatcaaggaagatggc

SEQ ID NO: 1482 - DNA, 17 bp, synthetic construct
  misc_feature 1..17: note = Description of Artificial Sequence: Synthetic Antisense oligonucleotide
  modified_base 3: mod_base = OTHER; note = 5-methyl
  modified_base 6: mod_base = OTHER; note = 5-methyl
  source 1..17: mol_type = other DNA
aacatcaaggaagatgg

SEQ ID NO: 1483 - DNA, 16 bp, synthetic construct
  misc_feature 1..16: note = Description of Artificial Sequence: Synthetic Antisense oligonucleotide
  modified_base 3: mod_base = OTHER; note = 5-methyl
  modified_base 6: mod_base = OTHER; note = 5-methyl
  source 1..16: mol_type = other DNA
aacatcaaggaagatg

SEQ ID NO: 1484 - DNA, 15 bp, synthetic construct
  misc_feature 1..15: note = Description of Artificial Sequence: Synthetic Antisense oligonucleotide
  modified_base 3: mod_base = OTHER; note = 5-methyl
  modified_base 6: mod_base = OTHER; note = 5-methyl
  source 1..15: mol_type = other DNA
aacatcaaggaagat

SEQ ID NO: 1485 - DNA, 14 bp, synthetic construct
  misc_feature 1..14: note = Description of Artificial Sequence: Synthetic Antisense oligonucleotide
  modified_base 3: mod_base = OTHER; note = 5-methyl
  modified_base 6: mod_base = OTHER; note = 5-methyl
  source 1..14: mol_type = other DNA
aacatcaaggaaga

SEQ ID NO: 1486 - DNA, 13 bp, synthetic construct
  misc_feature 1..13: note = Description of Artificial Sequence: Synthetic Antisense oligonucleotide
  modified_base 3: mod_base = OTHER; note = 5-methyl
  modified_base 6: mod_base = OTHER; note = 5-methyl
  source 1..13: mol_type = other DNA
aacatcaaggaag

SEQ ID NO: 1487 - DNA, 25 bp, synthetic construct
  misc_feature 1..25: note = Description of Artificial Sequence: Synthetic Antisense oligonucleotide
  modified_base 2: mod_base = OTHER; note = 5-methyl
  modified_base 5: mod_base = OTHER; note = 5-methyl
  modified_base 17: mod_base = OTHER; note = 5-methyl
  modified_base 22: mod_base = OTHER; note = 5-methyl
  source 1..25: mol_type = other DNA
acatcaaggaagatggcatttctag

SEQ ID NO: 1488 - DNA, 24 bp, synthetic construct
  misc_feature 1..24: note = Description of Artificial Sequence: Synthetic Antisense oligonucleotide
  modified_base 2: mod_base = OTHER; note = 5-methyl
  modified_base 5: mod_base = OTHER; note = 5-methyl
  modified_base 17: mod_base = OTHER; note = 5-methyl
  modified_base 22: mod_base = OTHER; note = 5-methyl
  source 1..24: mol_type = other DNA
acatcaaggaagatggcatttcta

SEQ ID NO: 1489 - DNA, 23 bp, synthetic construct
  misc_feature 1..23: note = Description of Artificial Sequence: Synthetic Antisense oligonucleotide
  modified_base 2: mod_base = OTHER; note = 5-methyl
  modified_base 5: mod_base = OTHER; note = 5-methyl
  modified_base 17: mod_base = OTHER; note = 5-methyl
  modified_base 22: mod_base = OTHER; note = 5-methyl
  source 1..23: mol_type = other DNA
acatcaaggaagatggcatttct

SEQ ID NO: 1490 - DNA, 22 bp, synthetic construct
  misc_feature 1..22: note = Description of Artificial Sequence: Synthetic Antisense oligonucleotide
  modified_base 2: mod_base = OTHER; note = 5-methyl
  modified_base 5: mod_base = OTHER; note = 5-methyl
  modified_base 17: mod_base = OTHER; note = 5-methyl
  modified_base 22: mod_base = OTHER; note = 5-methyl
  source 1..22: mol_type = other DNA
acatcaaggaagatggcatttc

SEQ ID NO: 1491 - DNA, 21 bp, synthetic construct
  misc_feature 1..21: note = Description of Artificial Sequence: Synthetic Antisense oligonucleotide
  modified_base 2: mod_base = OTHER; note = 5-methyl
  modified_base 5: mod_base = OTHER; note = 5-methyl
  modified_base 17: mod_base = OTHER; note = 5-methyl
  source 1..21: mol_type = other DNA
acatcaaggaagatggcattt

SEQ ID NO: 1492 - DNA, 20 bp, synthetic construct
  misc_feature 1..20: note = Description of Artificial Sequence: Synthetic Antisense oligonucleotide
  modified_base 2: mod_base = OTHER; note = 5-methyl
  modified_base 5: mod_base = OTHER; note = 5-methyl
  modified_base 17: mod_base = OTHER; note = 5-methyl
  source 1..20: mol_type = other DNA
acatcaaggaagatggcatt

SEQ ID NO: 1493 - DNA, 19 bp, synthetic construct
  misc_feature 1..19: note = Description of Artificial Sequence: Synthetic Antisense oligonucleotide
  modified_base 2: mod_base = OTHER; note = 5-methyl
  modified_base 5: mod_base = OTHER; note = 5-methyl
  modified_base 17: mod_base = OTHER; note = 5-methyl
  source 1..19: mol_type = other DNA
acatcaaggaagatggcat

SEQ ID NO: 1494 - DNA, 18 bp, synthetic construct
  misc_feature 1..18: note = Description of Artificial Sequence: Synthetic Antisense oligonucleotide
  modified_base 2: mod_base = OTHER; note = 5-methyl
  modified_base 5: mod_base = OTHER; note = 5-methyl
  modified_base 17: mod_base = OTHER; note = 5-methyl
  source 1..18: mol_type = other DNA
acatcaaggaagatggca

SEQ ID NO: 1495 - DNA, 17 bp, synthetic construct
  misc_feature 1..17: note = Description of Artificial Sequence: Synthetic Antisense oligonucleotide
  modified_base 2: mod_base = OTHER; note = 5-methyl
  modified_base 5: mod_base = OTHER; note = 5-methyl
  modified_base 17: mod_base = OTHER; note = 5-methyl
  source 1..17: mol_type = other DNA
acatcaaggaagatggc

SEQ ID NO: 1496 - DNA, 16 bp, synthetic construct
  misc_feature 1..16: note = Description of Artificial Sequence: Synthetic Antisense oligonucleotide
  modified_base 2: mod_base = OTHER; note = 5-methyl
  modified_base 5: mod_base = OTHER; note = 5-methyl
  source 1..16: mol_type = other DNA
acatcaaggaagatgg

SEQ ID NO: 1497 - DNA, 15 bp, synthetic construct
  misc_feature 1..15: note = Description of Artificial Sequence: Synthetic Antisense oligonucleotide
  modified_base 2: mod_base = OTHER; note = 5-methyl
  modified_base 5: mod_base = OTHER; note = 5-methyl
  source 1..15: mol_type = other DNA
acatcaaggaagatg

SEQ ID NO: 1498 - DNA, 14 bp, synthetic construct
  misc_feature 1..14: note = Description of Artificial Sequence: Synthetic Antisense oligonucleotide
  modified_base 2: mod_base = OTHER; note = 5-methyl
  modified_base 5: mod_base = OTHER; note = 5-methyl
  source 1..14: mol_type = other DNA
acatcaaggaagat

SEQ ID NO: 1499 - DNA, 13 bp, synthetic construct
  misc_feature 1..13: note = Description of Artificial Sequence: Synthetic Antisense oligonucleotide
  modified_base 2: mod_base = OTHER; note = 5-methyl
  modified_base 5: mod_base = OTHER; note = 5-methyl
  source 1..13: mol_type = other DNA
acatcaaggaaga

SEQ ID NO: 1500 - DNA, 12 bp, synthetic construct
  misc_feature 1..12: note = Description of Artificial Sequence: Synthetic Antisense oligonucleotide
  modified_base 2: mod_base = OTHER; note = 5-methyl
  modified_base 5: mod_base = OTHER; note = 5-methyl
  source 1..12: mol_type = other DNA
acatcaaggaag

SEQ ID NO: 1501 - DNA, 24 bp, synthetic construct
  misc_feature 1..24: note = Description of Artificial Sequence: Synthetic Antisense oligonucleotide
  modified_base 1: mod_base = OTHER; note = 5-methyl
  modified_base 4: mod_base = OTHER; note = 5-methyl
  modified_base 16: mod_base = OTHER; note = 5-methyl
  modified_base 21: mod_base = OTHER; note = 5-methyl
  source 1..24: mol_type = other DNA
catcaaggaagatggcatttctag

SEQ ID NO: 1502 - DNA, 23 bp, synthetic construct
  misc_feature 1..23: note = Description of Artificial Sequence: Synthetic Antisense oligonucleotide
  modified_base 1: mod_base = OTHER; note = 5-methyl
  modified_base 4: mod_base = OTHER; note = 5-methyl
  modified_base 16: mod_base = OTHER; note = 5-methyl
  modified_base 21: mod_base = OTHER; note = 5-methyl
  source 1..23: mol_type = other DNA
catcaaggaagatggcatttcta

SEQ ID NO: 1503 - DNA, 22 bp, synthetic construct
  misc_feature 1..22: note = Description of Artificial Sequence: Synthetic Antisense oligonucleotide
  modified_base 1: mod_base = OTHER; note = 5-methyl
  modified_base 4: mod_base = OTHER; note = 5-methyl
  modified_base 16: mod_base = OTHER; note = 5-methyl
  modified_base 21: mod_base = OTHER; note = 5-methyl
  source 1..22: mol_type = other DNA
catcaaggaagatggcatttct

SEQ ID NO: 1504 - DNA, 21 bp, synthetic construct
  misc_feature 1..21: note = Description of Artificial Sequence: Synthetic Antisense oligonucleotide
  modified_base 1: mod_base = OTHER; note = 5-methyl
  modified_base 4: mod_base = OTHER; note = 5-methyl
  modified_base 16: mod_base = OTHER; note = 5-methyl
  modified_base 21: mod_base = OTHER; note = 5-methyl
  source 1..21: mol_type = other DNA
catcaaggaagatggcatttc

SEQ ID NO: 1505 - DNA, 20 bp, synthetic construct
  misc_feature 1..20: note = Description of Artificial Sequence: Synthetic Antisense oligonucleotide
  modified_base 1: mod_base = OTHER; note = 5-methyl
  modified_base 4: mod_base = OTHER; note = 5-methyl
  modified_base 16: mod_base = OTHER; note = 5-methyl
  source 1..20: mol_type = other DNA
catcaaggaagatggcattt

SEQ ID NO: 1506 - DNA, 19 bp, synthetic construct
  misc_feature 1..19: note = Description of Artificial Sequence: Synthetic Antisense oligonucleotide
  modified_base 1: mod_base = OTHER; note = 5-methyl
  modified_base 4: mod_base = OTHER; note = 5-methyl
  modified_base 16: mod_base = OTHER; note = 5-methyl
  source 1..19: mol_type = other DNA
catcaaggaagatggcatt

SEQ ID NO: 1507 - DNA, 18 bp, synthetic construct
  misc_feature 1..18: note = Description of Artificial Sequence: Synthetic Antisense oligonucleotide
  modified_base 1: mod_base = OTHER; note = 5-methyl
  modified_base 4: mod_base = OTHER; note = 5-methyl
  modified_base 16: mod_base = OTHER; note = 5-methyl
  source 1..18: mol_type = other DNA
catcaaggaagatggcat

SEQ ID NO: 1508 - DNA, 17 bp, synthetic construct
  misc_feature 1..17: note = Description of Artificial Sequence: Synthetic Antisense oligonucleotide
  modified_base 1: mod_base = OTHER; note = 5-methyl
  modified_base 4: mod_base = OTHER; note = 5-methyl
  modified_base 16: mod_base = OTHER; note = 5-methyl
  source 1..17: mol_type = other DNA
catcaaggaagatggca

SEQ ID NO: 1509 - DNA, 16 bp, synthetic construct
  misc_feature 1..16: note = Description of Artificial Sequence: Synthetic Antisense oligonucleotide
  modified_base 1: mod_base = OTHER; note = 5-methyl
  modified_base 4: mod_base = OTHER; note = 5-methyl
  modified_base 16: mod_base = OTHER; note = 5-methyl
  source 1..16: mol_type = other DNA
catcaaggaagatggc

SEQ ID NO: 1510 - DNA, 15 bp, synthetic construct
  misc_feature 1..15: note = Description of Artificial Sequence: Synthetic Antisense oligonucleotide
  modified_base 1: mod_base = OTHER; note = 5-methyl
  modified_base 4: mod_base = OTHER; note = 5-methyl
  source 1..15: mol_type = other DNA
catcaaggaagatgg

SEQ ID NO: 1511 - DNA, 14 bp, synthetic construct
  misc_feature 1..14: note = Description of Artificial Sequence: Synthetic Antisense oligonucleotide
  modified_base 1: mod_base = OTHER; note = 5-methyl
  modified_base 4: mod_base = OTHER; note = 5-methyl
  source 1..14: mol_type = other DNA
catcaaggaagatg

SEQ ID NO: 1512 - DNA, 13 bp, synthetic construct
  misc_feature 1..13: note = Description of Artificial Sequence: Synthetic Antisense oligonucleotide
  modified_base 1: mod_base = OTHER; note = 5-methyl
  modified_base 4: mod_base = OTHER; note = 5-methyl
  source 1..13: mol_type = other DNA
catcaaggaagat

SEQ ID NO: 1513 - DNA, 12 bp, synthetic construct
  misc_feature 1..12: note = Description of Artificial Sequence: Synthetic Antisense oligonucleotide
  modified_base 1: mod_base = OTHER; note = 5-methyl
  modified_base 4: mod_base = OTHER; note = 5-methyl
  source 1..12: mol_type = other DNA
catcaaggaaga

SEQ ID NO: 1514 - DNA, 11 bp, synthetic construct
  misc_feature 1..11: note = Description of Artificial Sequence: Synthetic Antisense oligonucleotide
  modified_base 1: mod_base = OTHER; note = 5-methyl
  modified_base 4: mod_base = OTHER; note = 5-methyl
  source 1..11: mol_type = other DNA
catcaaggaag

SEQ ID NO: 1515 - DNA, 23 bp, synthetic construct
  misc_feature 1..23: note = Description of Artificial Sequence: Synthetic Antisense oligonucleotide
  modified_base 3: mod_base = OTHER; note = 5-methyl
  modified_base 15: mod_base = OTHER; note = 5-methyl
  modified_base 20: mod_base = OTHER; note = 5-methyl
  source 1..23: mol_type = other DNA
atcaaggaagatggcatttctag

SEQ ID NO: 1516 - DNA, 22 bp, synthetic construct
  misc_feature 1..22: note = Description of Artificial Sequence: Synthetic Antisense oligonucleotide
  modified_base 3: mod_base = OTHER; note = 5-methyl
  modified_base 15: mod_base = OTHER; note = 5-methyl
  modified_base 20: mod_base = OTHER; note = 5-methyl
  source 1..22: mol_type = other DNA
atcaaggaagatggcatttcta

SEQ ID NO: 1517 - DNA, 21 bp, synthetic construct
  misc_feature 1..21: note = Description of Artificial Sequence: Synthetic Antisense oligonucleotide
  modified_base 3: mod_base = OTHER; note = 5-methyl
  modified_base 15: mod_base = OTHER; note = 5-methyl
  modified_base 20: mod_base = OTHER; note = 5-methyl
  source 1..21: mol_type = other DNA
atcaaggaagatggcatttct

SEQ ID NO: 1518 - DNA, 20 bp, synthetic construct
  misc_feature 1..20: note = Description of Artificial Sequence: Synthetic Antisense oligonucleotide
  modified_base 3: mod_base = OTHER; note = 5-methyl
  modified_base 15: mod_base = OTHER; note = 5-methyl
  modified_base 20: mod_base = OTHER; note = 5-methyl
  source 1..20: mol_type = other DNA
atcaaggaagatggcatttc

SEQ ID NO: 1519 - DNA, 19 bp, synthetic construct
  misc_feature 1..19: note = Description of Artificial Sequence: Synthetic Antisense oligonucleotide
  modified_base 3: mod_base = OTHER; note = 5-methyl
  modified_base 15: mod_base = OTHER; note = 5-methyl
  source 1..19: mol_type = other DNA
atcaaggaagatggcattt

SEQ ID NO: 1520 - DNA, 18 bp, synthetic construct
  misc_feature 1..18: note = Description of Artificial Sequence: Synthetic Antisense oligonucleotide
  modified_base 3: mod_base = OTHER; note = 5-methyl
  modified_base 15: mod_base = OTHER; note = 5-methyl
  source 1..18: mol_type = other DNA
atcaaggaagatggcatt

SEQ ID NO: 1521 - DNA, 17 bp, synthetic construct
  misc_feature 1..17: note = Description of Artificial Sequence: Synthetic Antisense oligonucleotide
  modified_base 3: mod_base = OTHER; note = 5-methyl
  modified_base 15: mod_base = OTHER; note = 5-methyl
  source 1..17: mol_type = other DNA
atcaaggaagatggcat

SEQ ID NO: 1522 - DNA, 16 bp, synthetic construct
  misc_feature 1..16: note = Description of Artificial Sequence: Synthetic Antisense oligonucleotide
  modified_base 3: mod_base = OTHER; note = 5-methyl
  modified_base 15: mod_base = OTHER; note = 5-methyl
  source 1..16: mol_type = other DNA
atcaaggaagatggca

SEQ ID NO: 1523 - DNA, 15 bp, synthetic construct
  misc_feature 1..15: note = Description of Artificial Sequence: Synthetic Antisense oligonucleotide
  modified_base 3: mod_base = OTHER; note = 5-methyl
  modified_base 15: mod_base = OTHER; note = 5-methyl
  source 1..15: mol_type = other DNA
atcaaggaagatggc

SEQ ID NO: 1524 - DNA, 14 bp, synthetic construct
  misc_feature 1..14: note = Description of Artificial Sequence: Synthetic Antisense oligonucleotide
  modified_base 3: mod_base = OTHER; note = 5-methyl
  source 1..14: mol_type = other DNA
atcaaggaagatgg

SEQ ID NO: 1525 - DNA, 13 bp, synthetic construct
  misc_feature 1..13: note = Description of Artificial Sequence: Synthetic Antisense oligonucleotide
  modified_base 3: mod_base = OTHER; note = 5-methyl
  source 1..13: mol_type = other DNA
atcaaggaagatg

SEQ ID NO: 1526 - DNA, 12 bp, synthetic construct
  misc_feature 1..12: note = Description of Artificial Sequence: Synthetic Antisense oligonucleotide
  modified_base 3: mod_base = OTHER; note = 5-methyl
  source 1..12: mol_type = other DNA
atcaaggaagat

SEQ ID NO: 1527 - DNA, 11 bp, synthetic construct
  misc_feature 1..11: note = Description of Artificial Sequence: Synthetic Antisense oligonucleotide
  modified_base 3: mod_base = OTHER; note = 5-methyl
  source 1..11: mol_type = other DNA
atcaaggaaga

SEQ ID NO: 1528 - DNA, 10 bp, synthetic construct
  misc_feature 1..10: note = Description of Artificial Sequence: Synthetic Antisense oligonucleotide
  modified_base 3: mod_base = OTHER; note = 5-methyl
  source 1..10: mol_type = other DNA
atcaaggaag

SEQ ID NO: 1529 - RNA, 18 nt, synthetic construct
  misc_feature 1..18: note = Description of Artificial Sequence: Synthetic Antisense oligonucleotide
  modified_base 1: mod_base = OTHER; note = bicyclic nucleic acid (BNA)
  source 1..18: mol_type = other RNA
ggtaagttctgtccaagc

SEQ ID NO: 1530 - RNA, 18 nt, synthetic construct
  misc_feature 1..18: note = Description of Artificial Sequence: Synthetic Antisense oligonucleotide
  modified_base 1: mod_base = OTHER; note = bicyclic nucleic acid (BNA)
  source 1..18: mol_type = other RNA
gtaagttctgtccaagcc

SEQ ID NO: 1531 - RNA, 18 nt, synthetic construct
  misc_feature 1..18: note = Description of Artificial Sequence: Synthetic Antisense oligonucleotide
  modified_base 1: mod_base = OTHER; note = bicyclic nucleic acid (BNA)
  source 1..18: mol_type = other RNA
agtcggtaagttctgtcc

SEQ ID NO: 1532 - RNA, 18 nt, synthetic construct
  misc_feature 1..18: note = Description of Artificial Sequence: Synthetic Antisense oligonucleotide
  modified_base 1: mod_base = OTHER; note = bicyclic nucleic acid (BNA)
  source 1..18: mol_type = other RNA
ctgtccaagcccggttga

SEQ ID NO: 1533 - DNA, 15 bp, synthetic construct
  misc_feature 1..15: note = Description of Artificial Sequence: Synthetic Antisense oligonucleotide
  misc_feature 1..15: note = Original Sequence: taaguucuguccaag
  modified_base 1: mod_base = OTHER; note = bicyclic nucleic acid (BNA)
  source 1..15: mol_type = other DNA
  modified_base 5: mod_base = OTHER; note = Uracil
  modified_base 6: mod_base = OTHER; note = Uracil
  modified_base 8: mod_base = OTHER; note = Uracil
  modified_base 10: mod_base = OTHER; note = Uracil
taagttctgtccaag

SEQ ID NO: 1534 - DNA, 20 bp, synthetic construct
  misc_feature 1..20: note = Description of Artificial Sequence: Synthetic Antisense oligonucleotide
  misc_feature 1..20: note = Original Sequence: tucuguccaagcccgguuga
  modified_base 1: mod_base = OTHER; note = bicyclic nucleic acid (BNA)
  source 1..20: mol_type = other DNA
  modified_base 2: mod_base = OTHER; note = Uracil
  modified_base 4: mod_base = OTHER; note = Uracil
  modified_base 6: mod_base = OTHER; note = Uracil
  modified_base 17: mod_base = OTHER; note = Uracil
  modified_base 18: mod_base = OTHER; note = Uracil
ttctgtccaagcccggttga

SEQ ID NO: 1535 - DNA, 19 bp, synthetic construct
  misc_feature 1..19: note = Description of Artificial Sequence: Synthetic Antisense oligonucleotide
  misc_feature 1..19: note = Original Sequence: tucuguccaagcccgguug
  modified_base 1: mod_base = OTHER; note = bicyclic nucleic acid (BNA)
  source 1..19: mol_type = other DNA
  modified_base 2: mod_base = OTHER; note = Uracil
  modified_base 4: mod_base = OTHER; note = Uracil
  modified_base 6: mod_base = OTHER; note = Uracil
  modified_base 17: mod_base = OTHER; note = Uracil
  modified_base 18: mod_base = OTHER; note = Uracil
ttctgtccaagcccggttg

SEQ ID NO: 1536 - DNA, 18 bp, synthetic construct
  misc_feature 1..18: note = Description of Artificial Sequence: Synthetic Antisense oligonucleotide
  misc_feature 1..18: note = Original Sequence: tucuguccaagcccgguu
  modified_base 1: mod_base = OTHER; note = bicyclic nucleic acid (BNA)
  source 1..18: mol_type = other DNA
  modified_base 2: mod_base = OTHER; note = Uracil
  modified_base 4: mod_base = OTHER; note = Uracil
  modified_base 6: mod_base = OTHER; note = Uracil
  modified_base 17: mod_base = OTHER; note = Uracil
  modified_base 18: mod_base = OTHER; note = Uracil
ttctgtccaagcccggtt

SEQ ID NO: 1537 - DNA, 17 bp, synthetic construct
  misc_feature 1..17: note = Description of Artificial Sequence: Synthetic Antisense oligonucleotide
  misc_feature 1..17: note = Original Sequence: tucuguccaagcccggu
  modified_base 1: mod_base = OTHER; note = bicyclic nucleic acid (BNA)
  source 1..17: mol_type = other DNA
  modified_base 2: mod_base = OTHER; note = Uracil
  modified_base 4: mod_base = OTHER; note = Uracil
  modified_base 6: mod_base = OTHER; note = Uracil
  modified_base 17: mod_base = OTHER; note = Uracil
ttctgtccaagcccggt

SEQ ID NO: 1538 - DNA, 16 bp, synthetic construct
  misc_feature 1..16: note = Description of Artificial Sequence: Synthetic Antisense oligonucleotide
  misc_feature 1..16: note = Original Sequence: tucuguccaagcccgg
  modified_base 1: mod_base = OTHER; note = bicyclic nucleic acid (BNA)
  source 1..16: mol_type = other DNA
  modified_base 2: mod_base = OTHER; note = Uracil
  modified_base 4: mod_base = OTHER; note = Uracil
  modified_base 6: mod_base = OTHER; note = Uracil
ttctgtccaagcccgg

SEQ ID NO: 1539 - DNA, 15 bp, synthetic construct
  misc_feature 1..15: note = Description of Artificial Sequence: Synthetic Antisense oligonucleotide
  misc_feature 1..15: note = Original Sequence: tucuguccaagcccg
  modified_base 1: mod_base = OTHER; note = bicyclic nucleic acid (BNA)
  source 1..15: mol_type = other DNA
  modified_base 2: mod_base = OTHER; note = Uracil
  modified_base 4: mod_base = OTHER; note = Uracil
  modified_base 6: mod_base = OTHER; note = Uracil
ttctgtccaagcccg

SEQ ID NO: 1540 - DNA, 14 bp, synthetic construct
  misc_feature 1..14: note = Description of Artificial Sequence: Synthetic Antisense oligonucleotide
  misc_feature 1..14: note = Original Sequence: tucuguccaagccc
  modified_base 1: mod_base = OTHER; note = bicyclic nucleic acid (BNA)
  source 1..14: mol_type = other DNA
  modified_base 2: mod_base = OTHER; note = Uracil
  modified_base 4: mod_base = OTHER; note = Uracil
  modified_base 6: mod_base = OTHER; note = Uracil
ttctgtccaagccc

SEQ ID NO: 1541 - DNA, 13 bp, synthetic construct
  misc_feature 1..13: note = Description of Artificial Sequence: Synthetic Antisense oligonucleotide
  misc_feature 1..13: note = Original Sequence: tucuguccaagcc
  modified_base 1: mod_base = OTHER; note = bicyclic nucleic acid (BNA)
  source 1..13: mol_type = other DNA
  modified_base 2: mod_base = OTHER; note = Uracil
  modified_base 4: mod_base = OTHER; note = Uracil
  modified_base 6: mod_base = OTHER; note = Uracil
ttctgtccaagcc

SEQ ID NO: 1542 - DNA, 12 bp, synthetic construct
  misc_feature 1..12: note = Description of Artificial Sequence: Synthetic Antisense oligonucleotide
  misc_feature 1..12: note = Original Sequence: tucuguccaagc
  modified_base 1: mod_base = OTHER; note = bicyclic nucleic acid (BNA)
  source 1..12: mol_type = other DNA
  modified_base 2: mod_base = OTHER; note = Uracil
  modified_base 4: mod_base = OTHER; note = Uracil
  modified_base 6: mod_base = OTHER; note = Uracil
ttctgtccaagc

SEQ ID NO: 1543 - DNA, 11 bp, synthetic construct
  misc_feature 1..11: note = Description of Artificial Sequence: Synthetic Antisense oligonucleotide
  misc_feature 1..11: note = Original Sequence: tucuguccaag
  modified_base 1: mod_base = OTHER; note = bicyclic nucleic acid (BNA)
  source 1..11: mol_type = other DNA
  modified_base 2: mod_base = OTHER; note = Uracil
  modified_base 4: mod_base = OTHER; note = Uracil
  modified_base 6: mod_base = OTHER; note = Uracil
ttctgtccaag

SEQ ID NO: 1544 - DNA, 10 bp, synthetic construct
  misc_feature 1..10: note = Description of Artificial Sequence: Synthetic Antisense oligonucleotide
  misc_feature 1..10: note = Original Sequence: tucuguccaa
  modified_base 1: mod_base = OTHER; note = bicyclic nucleic acid (BNA)
  source 1..10: mol_type = other DNA
  modified_base 2: mod_base = OTHER; note = Uracil
  modified_base 4: mod_base = OTHER; note = Uracil
  modified_base 6: mod_base = OTHER; note = Uracil
ttctgtccaa

SEQ ID NO: 1545-1546 - skipped (2 entries)

SEQ ID NO: 1547 - DNA, 19 bp, synthetic construct
  misc_feature 1..19: note = Description of Artificial Sequence: Synthetic Antisense oligonucleotide
  misc_feature 1..19: note = Original Sequence: tcuguccaagcccgguuga
  modified_base 1: mod_base = OTHER; note = bicyclic nucleic acid (BNA)
  source 1..19: mol_type = other DNA
  modified_base 3: mod_base = OTHER; note = Uracil
  modified_base 5: mod_base = OTHER; note = Uracil
  modified_base 16: mod_base = OTHER; note = Uracil
  modified_base 17: mod_base = OTHER; note = Uracil
tctgtccaagcccggttga

SEQ ID NO: 1548 - DNA, 18 bp, synthetic construct
  misc_feature 1..18: note = Description of Artificial Sequence: Synthetic Antisense oligonucleotide
  misc_feature 1..18: note = Original Sequence: tcuguccaagcccgguug
  modified_base 1: mod_base = OTHER; note = bicyclic nucleic acid (BNA)
  source 1..18: mol_type = other DNA
  modified_base 3: mod_base = OTHER; note = Uracil
  modified_base 5: mod_base = OTHER; note = Uracil
  modified_base 16: mod_base = OTHER; note = Uracil
  modified_base 17: mod_base = OTHER; note = Uracil
tctgtccaagcccggttg

SEQ ID NO: 1549 - DNA, 17 bp, synthetic construct
  misc_feature 1..17: note = Description of Artificial Sequence: Synthetic Antisense oligonucleotide
  misc_feature 1..17: note = Original Sequence: tcuguccaagcccgguu
  modified_base 1: mod_base = OTHER; note = bicyclic nucleic acid (BNA)
  source 1..17: mol_type = other DNA
  modified_base 3: mod_base = OTHER; note = Uracil
  modified_base 5: mod_base = OTHER; note = Uracil
  modified_base 16: mod_base = OTHER; note = Uracil
  modified_base 17: mod_base = OTHER; note = Uracil
tctgtccaagcccggtt

SEQ ID NO: 1550 - DNA, 16 bp, synthetic construct
  misc_feature 1..16: note = Description of Artificial Sequence: Synthetic Antisense oligonucleotide
  misc_feature 1..16: note = Original Sequence: tcuguccaagcccggu
  modified_base 1: mod_base = OTHER; note = bicyclic nucleic acid (BNA)
  source 1..16: mol_type = other DNA
  modified_base 3: mod_base = OTHER; note = Uracil
  modified_base 5: mod_base = OTHER; note = Uracil
  modified_base 16: mod_base = OTHER; note = Uracil
tctgtccaagcccggt

SEQ ID NO: 1551 - DNA, 15 bp, synthetic construct
  misc_feature 1..15: note = Description of Artificial Sequence: Synthetic Antisense oligonucleotide
  misc_feature 1..15: note = Original Sequence: tcuguccaagcccgg
  modified_base 1: mod_base = OTHER; note = bicyclic nucleic acid (BNA)
  source 1..15: mol_type = other DNA
  modified_base 3: mod_base = OTHER; note = Uracil
  modified_base 5: mod_base = OTHER; note = Uracil
tctgtccaagcccgg

SEQ ID NO: 1552 - DNA, 14 bp, synthetic construct
  misc_feature 1..14: note = Description of Artificial Sequence: Synthetic Antisense oligonucleotide
  misc_feature 1..14: note = Original Sequence: tcuguccaagcccg
  modified_base 1: mod_base = OTHER; note = bicyclic nucleic acid (BNA)
  source 1..14: mol_type = other DNA
  modified_base 3: mod_base = OTHER; note = Uracil
  modified_base 5: mod_base = OTHER; note = Uracil
tctgtccaagcccg

SEQ ID NO: 1553 - DNA, 13 bp, synthetic construct
  misc_feature 1..13: note = Description of Artificial Sequence: Synthetic Antisense oligonucleotide
  misc_feature 1..13: note = Original Sequence: tcuguccaagccc
  modified_base 1: mod_base = OTHER; note = bicyclic nucleic acid (BNA)
  source 1..13: mol_type = other DNA
  modified_base 3: mod_base = OTHER; note = Uracil
  modified_base 5: mod_base = OTHER; note = Uracil
tctgtccaagccc

SEQ ID NO: 1554 - DNA, 12 bp, synthetic construct
  misc_feature 1..12: note = Description of Artificial Sequence: Synthetic Antisense oligonucleotide
  misc_feature 1..12: note = Original Sequence: tcuguccaagcc
  modified_base 1: mod_base = OTHER; note = bicyclic nucleic acid (BNA)
  source 1..12: mol_type = other DNA
  modified_base 3: mod_base = OTHER; note = Uracil
  modified_base 5: mod_base = OTHER; note = Uracil
tctgtccaagcc

SEQ ID NO: 1555 - DNA, 11 bp, synthetic construct
  misc_feature 1..11: note = Description of Artificial Sequence: Synthetic Antisense oligonucleotide
  misc_feature 1..11: note = Original Sequence: tcuguccaagc
  modified_base 1: mod_base = OTHER; note = bicyclic nucleic acid (BNA)
  source 1..11: mol_type = other DNA
  modified_base 3: mod_base = OTHER; note = Uracil
  modified_base 5: mod_base = OTHER; note = Uracil
tctgtccaagc

SEQ ID NO: 1556 - DNA, 10 bp, synthetic construct
  misc_feature 1..10: note = Description of Artificial Sequence: Synthetic Antisense oligonucleotide
  misc_feature 1..10: note = Original Sequence: tcuguccaag
  modified_base 1: mod_base = OTHER; note = bicyclic nucleic acid (BNA)
  source 1..10: mol_type = other DNA
  modified_base 3: mod_base = OTHER; note = Uracil
  modified_base 5: mod_base = OTHER; note = Uracil
tctgtccaag

SEQ ID NO: 1557-1558 - skipped (2 entries)

SEQ ID NO: 1559 - RNA, 17 nt, synthetic construct
  misc_feature 1..17: note = Description of Artificial Sequence: Synthetic Antisense oligonucleotide
  modified_base 1: mod_base = OTHER; note = bicyclic nucleic acid (BNA)
  source 1..17: mol_type = other RNA
ctgtccaagcccggttg

SEQ ID NO: 1560 - RNA, 16 nt, synthetic construct
  misc_feature 1..16: note = Description of Artificial Sequence: Synthetic Antisense oligonucleotide
  modified_base 1: mod_base = OTHER; note = bicyclic nucleic acid (BNA)
  source 1..16: mol_type = other RNA
ctgtccaagcccggtt

SEQ ID NO: 1561 - RNA, 15 nt, synthetic construct
  misc_feature 1..15: note = Description of Artificial Sequence: Synthetic Antisense oligonucleotide
  modified_base 1: mod_base = OTHER; note = bicyclic nucleic acid (BNA)
  source 1..15: mol_type = other RNA
ctgtccaagcccggt

SEQ ID NO: 1562 - RNA, 14 nt, synthetic construct
  misc_feature 1..14: note = Description of Artificial Sequence: Synthetic Antisense oligonucleotide
  modified_base 1: mod_base = OTHER; note = bicyclic nucleic acid (BNA)
  source 1..14: mol_type = other RNA
ctgtccaagcccgg

SEQ ID NO: 1563 - RNA, 13 nt, synthetic construct
  misc_feature 1..13: note = Description of Artificial Sequence: Synthetic Antisense oligonucleotide
  modified_base 1: mod_base = OTHER; note = bicyclic nucleic acid (BNA)
  source 1..13: mol_type = other RNA
ctgtccaagcccg

SEQ ID NO: 1564 - RNA, 12 nt, synthetic construct
  misc_feature 1..12: note = Description of Artificial Sequence: Synthetic Antisense oligonucleotide
  modified_base 1: mod_base = OTHER; note = bicyclic nucleic acid (BNA)
  source 1..12: mol_type = other RNA
ctgtccaagccc

SEQ ID NO: 1565 - RNA, 11 nt, synthetic construct
  misc_feature 1..11: note = Description of Artificial Sequence: Synthetic Antisense oligonucleotide
  modified_base 1: mod_base = OTHER; note = bicyclic nucleic acid (BNA)
  source 1..11: mol_type = other RNA
ctgtccaagcc

SEQ ID NO: 1566 - RNA, 10 nt, synthetic construct
  misc_feature 1..10: note = Description of Artificial Sequence: Synthetic Antisense oligonucleotide
  modified_base 1: mod_base = OTHER; note = bicyclic nucleic acid (BNA)
  source 1..10: mol_type = other RNA
ctgtccaagc

SEQ ID NO: 1567-1568 - skipped (2 entries)

SEQ ID NO: 1569 - RNA, 20 nt, synthetic construct
  misc_feature 1..20: note = Description of Artificial Sequence: Synthetic Antisense oligonucleotide
  modified_base 1: mod_base = OTHER; note = bicyclic nucleic acid (BNA)
  source 1..20: mol_type = other RNA
gttctgtccaagcccggttg

SEQ ID NO: 1570 - RNA, 19 nt, synthetic construct
  misc_feature 1..19: note = Description of Artificial Sequence: Synthetic Antisense oligonucleotide
  modified_base 1: mod_base = OTHER; note = bicyclic nucleic acid (BNA)
  source 1..19: mol_type = other RNA
gttctgtccaagcccggtt

SEQ ID NO: 1571 - RNA, 18 nt, synthetic construct
  misc_feature 1..18: note = Description of Artificial Sequence: Synthetic Antisense oligonucleotide
  modified_base 1: mod_base = OTHER; note = bicyclic nucleic acid (BNA)
  source 1..18: mol_type = other RNA
gttctgtccaagcccggt

SEQ ID NO: 1572 - RNA, 17 nt, synthetic construct
  misc_feature 1..17: note = Description of Artificial Sequence: Synthetic Antisense oligonucleotide
  modified_base 1: mod_base = OTHER; note = bicyclic nucleic acid (BNA)
  source 1..17: mol_type = other RNA
gttctgtccaagcccgg

SEQ ID NO: 1573 - RNA, 16 nt, synthetic construct
  misc_feature 1..16: note = Description of Artificial Sequence: Synthetic Antisense oligonucleotide
  modified_base 1: mod_base = OTHER; note = bicyclic nucleic acid (BNA)
  source 1..16: mol_type = other RNA
gttctgtccaagcccg

SEQ ID NO: 1574 - RNA, 15 nt, synthetic construct
  misc_feature 1..15: note = Description of Artificial Sequence: Synthetic Antisense oligonucleotide
  modified_base 1: mod_base = OTHER; note = bicyclic nucleic acid (BNA)
  source 1..15: mol_type = other RNA
gttctgtccaagccc

SEQ ID NO: 1575 - RNA, 14 nt, synthetic construct
  misc_feature 1..14: note = Description of Artificial Sequence: Synthetic Antisense oligonucleotide
  modified_base 1: mod_base = OTHER; note = bicyclic nucleic acid (BNA)
  source 1..14: mol_type = other RNA
gttctgtccaagcc

SEQ ID NO: 1576 - RNA, 13 nt, synthetic construct
  misc_feature 1..13: note = Description of Artificial Sequence: Synthetic Antisense oligonucleotide
  modified_base 1: mod_base = OTHER; note = bicyclic nucleic acid (BNA)
  source 1..13: mol_type = other RNA
gttctgtccaagc

SEQ ID NO: 1577 - RNA, 12 nt, synthetic construct
  misc_feature 1..12: note = Description of Artificial Sequence: Synthetic Antisense oligonucleotide
  modified_base 1: mod_base = OTHER; note = bicyclic nucleic acid (BNA)
  source 1..12: mol_type = other RNA
gttctgtccaag

SEQ ID NO: 1578 - RNA, 11 nt, synthetic construct
  misc_feature 1..11: note = Description of Artificial Sequence: Synthetic Antisense oligonucleotide
  modified_base 1: mod_base = OTHER; note = bicyclic nucleic acid (BNA)
  source 1..11: mol_type = other RNA
gttctgtccaa

SEQ ID NO: 1579 - RNA, 10 nt, synthetic construct
  misc_feature 1..10: note = Description of Artificial Sequence: Synthetic Antisense oligonucleotide
  modified_base 1: mod_base = OTHER; note = bicyclic nucleic acid (BNA)
  source 1..10: mol_type = other RNA
gttctgtcca

SEQ ID NO: 1580-1581 - skipped (2 entries)

SEQ ID NO: 1582 - RNA, 20 nt, synthetic construct
  misc_feature 1..20: note = Description of Artificial Sequence: Synthetic Antisense oligonucleotide
  modified_base 1: mod_base = OTHER; note = bicyclic nucleic acid (BNA)
  source 1..20: mol_type = other RNA
agttctgtccaagcccggtt

SEQ ID NO: 1583 - RNA, 19 nt, synthetic construct
  misc_feature 1..19: note = Description of Artificial Sequence: Synthetic Antisense oligonucleotide
  modified_base 1: mod_base = OTHER; note = bicyclic nucleic acid (BNA)
  source 1..19: mol_type = other RNA
agttctgtccaagcccggt

SEQ ID NO: 1584 - RNA, 18 nt, synthetic construct
  misc_feature 1..18: note = Description of Artificial Sequence: Synthetic Antisense oligonucleotide
  modified_base 1: mod_base = OTHER; note = bicyclic nucleic acid (BNA)
  source 1..18: mol_type = other RNA
agttctgtccaagcccgg

SEQ ID NO: 1585 - RNA, 17 nt, synthetic construct
  misc_feature 1..17: note = Description of Artificial Sequence: Synthetic Antisense oligonucleotide
  modified_base 1: mod_base = OTHER; note = bicyclic nucleic acid (BNA)
  source 1..17: mol_type = other RNA
agttctgtccaagcccg

SEQ ID NO: 1586 - RNA, 16 nt, synthetic construct
  misc_feature 1..16: note = Description of Artificial Sequence: Synthetic Antisense oligonucleotide
  modified_base 1: mod_base = OTHER; note = bicyclic nucleic acid (BNA)
  source 1..16: mol_type = other RNA
agttctgtccaagccc

SEQ ID NO: 1587 - RNA, 15 nt, synthetic construct
  misc_feature 1..15: note = Description of Artificial Sequence: Synthetic Antisense oligonucleotide
  modified_base 1: mod_base = OTHER; note = bicyclic nucleic acid (BNA)
  source 1..15: mol_type = other RNA
agttctgtccaagcc

SEQ ID NO: 1588 - RNA, 14 nt, synthetic construct
  misc_feature 1..14: note = Description of Artificial Sequence: Synthetic Antisense oligonucleotide
  modified_base 1: mod_base = OTHER; note = bicyclic nucleic acid (BNA)
  source 1..14: mol_type = other RNA
agttctgtccaagc

SEQ ID NO: 1589 - RNA, 13 nt, synthetic construct
  misc_feature 1..13: note = Description of Artificial Sequence: Synthetic Antisense oligonucleotide
  modified_base 1: mod_base = OTHER; note = bicyclic nucleic acid (BNA)
  source 1..13: mol_type = other RNA
agttctgtccaag

SEQ ID NO: 1590 - RNA, 12 nt, synthetic construct
  misc_feature 1..12: note = Description of Artificial Sequence: Synthetic Antisense oligonucleotide
  modified_base 1: mod_base = OTHER; note = bicyclic nucleic acid (BNA)
  source 1..12: mol_type = other RNA
agttctgtccaa

SEQ ID NO: 1591 - RNA, 11 nt, synthetic construct
  misc_feature 1..11: note = Description of Artificial Sequence: Synthetic Antisense oligonucleotide
  modified_base 1: mod_base = OTHER; note = bicyclic nucleic acid (BNA)
  source 1..11: mol_type = other RNA
agttctgtcca

SEQ ID NO: 1592 - RNA, 10 nt, synthetic construct
  misc_feature 1..10: note = Description of Artificial Sequence: Synthetic Antisense oligonucleotide
  modified_base 1: mod_base = OTHER; note = bicyclic nucleic acid (BNA)
  source 1..10: mol_type = other RNA
agttctgtcc

SEQ ID NO: 1593-1594 - skipped (2 entries)

SEQ ID NO: 1595 - RNA, 20 nt, synthetic construct
  misc_feature 1..20: note = Description of Artificial Sequence: Synthetic Antisense oligonucleotide
  modified_base 1: mod_base = OTHER; note = bicyclic nucleic acid (BNA)
  source 1..20: mol_type = other RNA
aagttctgtccaagcccggt

SEQ ID NO: 1596 - RNA, 19 nt, synthetic construct
  misc_feature 1..19: note = Description of Artificial Sequence: Synthetic Antisense oligonucleotide
  modified_base 1: mod_base = OTHER; note = bicyclic nucleic acid (BNA)
  source 1..19: mol_type = other RNA
aagttctgtccaagcccgg

SEQ ID NO: 1597 - RNA, 18 nt, synthetic construct
  misc_feature 1..18: note = Description of Artificial Sequence: Synthetic Antisense oligonucleotide
  modified_base 1: mod_base = OTHER; note = bicyclic nucleic acid (BNA)
  source 1..18: mol_type = other RNA
aagttctgtccaagcccg

SEQ ID NO: 1598 - RNA, 17 nt, synthetic construct
  misc_feature 1..17: note = Description of Artificial Sequence: Synthetic Antisense oligonucleotide
  modified_base 1: mod_base = OTHER; note = bicyclic nucleic acid (BNA)
  source 1..17: mol_type = other RNA
aagttctgtccaagccc

SEQ ID NO: 1599 - RNA, 16 nt, synthetic construct
  misc_feature 1..16: note = Description of Artificial Sequence: Synthetic Antisense oligonucleotide
  modified_base 1: mod_base = OTHER; note = bicyclic nucleic acid (BNA)
  source 1..16: mol_type = other RNA
aagttctgtccaagcc

SEQ ID NO: 1600 - RNA, 15 nt, synthetic construct
  misc_feature 1..15: note = Description of Artificial Sequence: Synthetic Antisense oligonucleotide
  modified_base 1: mod_base = OTHER; note = bicyclic nucleic acid (BNA)
  source 1..15: mol_type = other RNA
aagttctgtccaagc

SEQ ID NO: 1601 - RNA, 14 nt, synthetic construct
  misc_feature 1..14: note = Description of Artificial Sequence: Synthetic Antisense oligonucleotide
  modified_base 1: mod_base = OTHER; note = bicyclic nucleic acid (BNA)
  source 1..14: mol_type = other RNA
aagttctgtccaag

SEQ ID NO: 1602 - RNA, 13 nt, synthetic construct
  misc_feature 1..13: note = Description of Artificial Sequence: Synthetic Antisense oligonucleotide
  modified_base 1: mod_base = OTHER; note = bicyclic nucleic acid (BNA)
  source 1..13: mol_type = other RNA
aagttctgtccaa

SEQ ID NO: 1603 - RNA, 12 nt, synthetic construct
  misc_feature 1..12: note = Description of Artificial Sequence: Synthetic Antisense oligonucleotide
  modified_base 1: mod_base = OTHER; note = bicyclic nucleic acid (BNA)
  source 1..12: mol_type = other RNA
aagttctgtcca

SEQ ID NO: 1604 - RNA, 11 nt, synthetic construct
  misc_feature 1..11: note = Description of Artificial Sequence: Synthetic Antisense oligonucleotide
  modified_base 1: mod_base = OTHER; note = bicyclic nucleic acid (BNA)
  source 1..11: mol_type = other RNA
aagttctgtcc

SEQ ID NO: 1605 - RNA, 10 nt, synthetic construct
  misc_feature 1..10: note = Description of Artificial Sequence: Synthetic Antisense oligonucleotide
  modified_base 1: mod_base = OTHER; note = bicyclic nucleic acid (BNA)
  source 1..10: mol_type = other RNA
aagttctgtc

SEQ ID NO: 1606-1607 - skipped (2 entries)

SEQ ID NO: 1608 - DNA, 20 bp, synthetic construct
  misc_feature 1..20: note = Description of Artificial Sequence: Synthetic Antisense oligonucleotide
  misc_feature 1..20: note = Original Sequence: taaguucuguccaagcccgg
  modified_base 1: mod_base = OTHER; note = bicyclic nucleic acid (BNA)
  source 1..20: mol_type = other DNA
  modified_base 5: mod_base = OTHER; note = Uracil
  modified_base 6: mod_base = OTHER; note = Uracil
  modified_base 8: mod_base = OTHER; note = Uracil
  modified_base 10: mod_base = OTHER; note = Uracil
taagttctgtccaagcccgg

SEQ ID NO: 1609 - DNA, 19 bp, synthetic construct
  misc_feature 1..19: note = Description of Artificial Sequence: Synthetic Antisense oligonucleotide
  misc_feature 1..19: note = Original Sequence: taaguucuguccaagcccg
  modified_base 1: mod_base = OTHER; note = bicyclic nucleic acid (BNA)
  source 1..19: mol_type = other DNA
  modified_base 5: mod_base = OTHER; note = Uracil
  modified_base 6: mod_base = OTHER; note = Uracil
  modified_base 8: mod_base = OTHER; note = Uracil
  modified_base 10: mod_base = OTHER; note = Uracil
taagttctgtccaagcccg

SEQ ID NO: 1610 - DNA, 18 bp, synthetic construct
  misc_feature 1..18: note = Description of Artificial Sequence: Synthetic Antisense oligonucleotide
  misc_feature 1..18: note = Original Sequence: taaguucuguccaagccc
  modified_base 1: mod_base = OTHER; note = bicyclic nucleic acid (BNA)
  source 1..18: mol_type = other DNA
  modified_base 5: mod_base = OTHER; note = Uracil
  modified_base 6: mod_base = OTHER; note = Uracil
  modified_base 8: mod_base = OTHER; note = Uracil
  modified_base 10: mod_base = OTHER; note = Uracil
taagttctgtccaagccc

SEQ ID NO: 1611 - DNA, 17 bp, synthetic construct
  misc_feature 1..17: note = Description of Artificial Sequence: Synthetic Antisense oligonucleotide
  misc_feature 1..17: note = Original Sequence: taaguucuguccaagcc
  modified_base 1: mod_base = OTHER; note = bicyclic nucleic acid (BNA)
  source 1..17: mol_type = other DNA
  modified_base 5: mod_base = OTHER; note = Uracil
  modified_base 6: mod_base = OTHER; note = Uracil
  modified_base 8: mod_base = OTHER; note = Uracil
  modified_base 10: mod_base = OTHER; note = Uracil
taagttctgtccaagcc

SEQ ID NO: 1612 - DNA, 16 bp, synthetic construct
  misc_feature 1..16: note = Description of Artificial Sequence: Synthetic Antisense oligonucleotide
  misc_feature 1..16: note = Original Sequence: taaguucuguccaagc
  modified_base 1: mod_base = OTHER; note = bicyclic nucleic acid (BNA)
  source 1..16: mol_type = other DNA
  modified_base 5: mod_base = OTHER; note = Uracil
  modified_base 6: mod_base = OTHER; note = Uracil
  modified_base 8: mod_base = OTHER; note = Uracil
  modified_base 10: mod_base = OTHER; note = Uracil
taagttctgtccaagc

SEQ ID NO: 1613 - DNA, 14 bp, synthetic construct
  misc_feature 1..14: note = Description of Artificial Sequence: Synthetic Antisense oligonucleotide
  misc_feature 1..14: note = Original Sequence: taaguucuguccaa
  modified_base 1: mod_base = OTHER; note = bicyclic nucleic acid (BNA)
  source 1..14: mol_type = other DNA
  modified_base 5: mod_base = OTHER; note = Uracil
  modified_base 6: mod_base = OTHER; note = Uracil
  modified_base 8: mod_base = OTHER; note = Uracil
  modified_base 10: mod_base = OTHER; note = Uracil
taagttctgtccaa

SEQ ID NO: 1614 - DNA, 13 bp, synthetic construct
  misc_feature 1..13: note = Description of Artificial Sequence: Synthetic Antisense oligonucleotide
  misc_feature 1..13: note = Original Sequence: taaguucugucca
  modified_base 1: mod_base = OTHER; note = bicyclic nucleic acid (BNA)
  source 1..13: mol_type = other DNA
  modified_base 5: mod_base = OTHER; note = Uracil
  modified_base 6: mod_base = OTHER; note = Uracil
  modified_base 8: mod_base = OTHER; note = Uracil
  modified_base 10: mod_base = OTHER; note = Uracil
taagttctgtcca

SEQ ID NO: 1615 - DNA, 12 bp, synthetic construct
  misc_feature 1..12: note = Description of Artificial Sequence: Synthetic Antisense oligonucleotide
  misc_feature 1..12: note = Original Sequence: taaguucugucc
  modified_base 1: mod_base = OTHER; note = bicyclic nucleic acid (BNA)
  source 1..12: mol_type = other DNA
  modified_base 5: mod_base = OTHER; note = Uracil
  modified_base 6: mod_base = OTHER; note = Uracil
  modified_base 8: mod_base = OTHER; note = Uracil
  modified_base 10: mod_base = OTHER; note = Uracil
taagttctgtcc

SEQ ID NO: 1616 - DNA, 11 bp, synthetic construct
  misc_feature 1..11: note = Description of Artificial Sequence: Synthetic Antisense oligonucleotide
  misc_feature 1..11: note = Original Sequence: taaguucuguc
  modified_base 1: mod_base = OTHER; note = bicyclic nucleic acid (BNA)
  source 1..11: mol_type = other DNA
  modified_base 5: mod_base = OTHER; note = Uracil
  modified_base 6: mod_base = OTHER; note = Uracil
  modified_base 8: mod_base = OTHER; note = Uracil
  modified_base 10: mod_base = OTHER; note = Uracil
taagttctgtc

SEQ ID NO: 1617 - DNA, 10 bp, synthetic construct
  misc_feature 1..10: note = Description of Artificial Sequence: Synthetic Antisense oligonucleotide
  misc_feature 1..10: note = Original Sequence: taaguucugu
  modified_base 1: mod_base = OTHER; note = bicyclic nucleic acid (BNA)
  source 1..10: mol_type = other DNA
  modified_base 5: mod_base = OTHER; note = Uracil
  modified_base 6: mod_base = OTHER; note = Uracil
  modified_base 8: mod_base = OTHER; note = Uracil
  modified_base 10: mod_base = OTHER; note = Uracil
taagttctgt

SEQ ID NO: 1618-1619 - skipped (2 entries)

SEQ ID NO: 1620 - RNA, 20 nt, synthetic construct
  misc_feature 1..20: note = Description of Artificial Sequence: Synthetic Antisense oligonucleotide
  modified_base 1: mod_base = OTHER; note = bicyclic nucleic acid (BNA)
  source 1..20: mol_type = other RNA
gtaagttctgtccaagcccg

SEQ ID NO: 1621 - RNA, 19 nt, synthetic construct
  misc_feature 1..19: note = Description of Artificial Sequence: Synthetic Antisense oligonucleotide
  modified_base 1: mod_base = OTHER; note = bicyclic nucleic acid (BNA)
  source 1..19: mol_type = other RNA
gtaagttctgtccaagccc

SEQ ID NO: 1622 - RNA, 17 nt, synthetic construct
  misc_feature 1..17: note = Description of Artificial Sequence: Synthetic Antisense oligonucleotide
  modified_base 1: mod_base = OTHER; note = bicyclic nucleic acid (BNA)
  source 1..17: mol_type = other RNA
gtaagttctgtccaagc

SEQ ID NO: 1623 - RNA, 16 nt, synthetic construct
  misc_feature 1..16: note = Description of Artificial Sequence: Synthetic Antisense oligonucleotide
  modified_base 1: mod_base = OTHER; note = bicyclic nucleic acid (BNA)
  source 1..16: mol_type = other RNA
gtaagttctgtccaag

SEQ ID NO: 1624 - RNA, 15 nt, synthetic construct
  misc_feature 1..15: note = Description of Artificial Sequence: Synthetic Antisense oligonucleotide
  modified_base 1: mod_base = OTHER; note = bicyclic nucleic acid (BNA)
  source 1..15: mol_type = other RNA
gtaagttctgtccaa

SEQ ID NO: 1625 - RNA, 14 nt, synthetic construct
  misc_feature 1..14: note = Description of Artificial Sequence: Synthetic Antisense oligonucleotide
  modified_base 1: mod_base = OTHER; note = bicyclic nucleic acid (BNA)
  source 1..14: mol_type = other RNA
gtaagttctgtcca

SEQ ID NO: 1626 - RNA, 13 nt, synthetic construct
  misc_feature 1..13: note = Description of Artificial Sequence: Synthetic Antisense oligonucleotide
  modified_base 1: mod_base = OTHER; note = bicyclic nucleic acid (BNA)
  source 1..13: mol_type = other RNA
gtaagttctgtcc

SEQ ID NO: 1627 - RNA, 12 nt, synthetic construct
  misc_feature 1..12: note = Description of Artificial Sequence: Synthetic Antisense oligonucleotide
  modified_base 1: mod_base = OTHER; note = bicyclic nucleic acid (BNA)
  source 1..12: mol_type = other RNA
gtaagttctgtc

SEQ ID NO: 1628 - RNA, 11 nt, synthetic construct
  misc_feature 1..11: note = Description of Artificial Sequence: Synthetic Antisense oligonucleotide
  modified_base 1: mod_base = OTHER; note = bicyclic nucleic acid (BNA)
  source 1..11: mol_type = other RNA
gtaagttctgt

SEQ ID NO: 1629 - RNA, 10 nt, synthetic construct
  misc_feature 1..10: note = Description of Artificial Sequence: Synthetic Antisense oligonucleotide
  modified_base 1: mod_base = OTHER; note = bicyclic nucleic acid (BNA)
  source 1..10: mol_type = other RNA
gtaagttctg

SEQ ID NO: 1630-1631 - skipped (2 entries)

SEQ ID NO: 1632 - RNA, 20 nt, synthetic construct
  misc_feature 1..20: note = Description of Artificial Sequence: Synthetic Antisense oligonucleotide
  modified_base 1: mod_base = OTHER; note = bicyclic nucleic acid (BNA)
  source 1..20: mol_type = other RNA
ggtaagttctgtccaagccc

SEQ ID NO: 1633 - RNA, 19 nt, synthetic construct
  misc_feature 1..19: note = Description of Artificial Sequence: Synthetic Antisense oligonucleotide
  modified_base 1: mod_base = OTHER; note = bicyclic nucleic acid (BNA)
  source 1..19: mol_type = other RNA
ggtaagttctgtccaagcc

SEQ ID NO: 1634 - RNA, 17 nt, synthetic construct
  misc_feature 1..17: note = Description of Artificial Sequence: Synthetic Antisense oligonucleotide
  modified_base 1: mod_base = OTHER; note = bicyclic nucleic acid (BNA)
  source 1..17: mol_type = other RNA
ggtaagttctgtccaag

SEQ ID NO: 1635 - RNA, 16 nt, synthetic construct
  misc_feature 1..16: note = Description of Artificial Sequence: Synthetic Antisense oligonucleotide
  modified_base 1: mod_base = OTHER; note = bicyclic nucleic acid (BNA)
  source 1..16: mol_type = other RNA
ggtaagttctgtccaa

SEQ ID NO: 1636 - RNA, 15 nt, synthetic construct
  misc_feature 1..15: note = Description of Artificial Sequence: Synthetic Antisense oligonucleotide
  modified_base 1: mod_base = OTHER; note = bicyclic nucleic acid (BNA)
  source 1..15: mol_type = other RNA
ggtaagttctgtcca

SEQ ID NO: 1637 - RNA, 14 nt, synthetic construct
  misc_feature 1..14: note = Description of Artificial Sequence: Synthetic Antisense oligonucleotide
  modified_base 1: mod_base = OTHER; note = bicyclic nucleic acid (BNA)
  source 1..14: mol_type = other RNA
ggtaagttctgtcc

SEQ ID NO: 1638 - RNA, 13 nt, synthetic construct
  misc_feature 1..13: note = Description of Artificial Sequence: Synthetic Antisense oligonucleotide
  modified_base 1: mod_base = OTHER; note = bicyclic nucleic acid (BNA)
  source 1..13: mol_type = other RNA
ggtaagttctgtc

SEQ ID NO: 1639 - RNA, 12 nt, synthetic construct
  misc_feature 1..12: note = Description of Artificial Sequence: Synthetic Antisense oligonucleotide
  modified_base 1: mod_base = OTHER; note = bicyclic nucleic acid (BNA)
  source 1..12: mol_type = other RNA
ggtaagttctgt

SEQ ID NO: 1640 - RNA, 11 nt, synthetic construct
  misc_feature 1..11: note = Description of Artificial Sequence: Synthetic Antisense oligonucleotide
  modified_base 1: mod_base = OTHER; note = bicyclic nucleic acid (BNA)
  source 1..11: mol_type = other RNA
ggtaagttctg

SEQ ID NO: 1641 - RNA, 10 nt, synthetic construct
  misc_feature 1..10: note = Description of Artificial Sequence: Synthetic Antisense oligonucleotide
  modified_base 1: mod_base = OTHER; note = bicyclic nucleic acid (BNA)
  source 1..10: mol_type = other RNA
ggtaagttct

SEQ ID NO: 1642-1643 - skipped (2 entries)

SEQ ID NO: 1644 - RNA, 20 nt, synthetic construct
  misc_feature 1..20: note = Description of Artificial Sequence: Synthetic Antisense oligonucleotide
  modified_base 1: mod_base = OTHER; note = bicyclic nucleic acid (BNA)
  source 1..20: mol_type = other RNA
cggtaagttctgtccaagcc

SEQ ID NO: 1645 - RNA, 19 nt, synthetic construct
  misc_feature 1..19: note = Description of Artificial Sequence: Synthetic Antisense oligonucleotide
  modified_base 1: mod_base = OTHER; note = bicyclic nucleic acid (BNA)
  source 1..19: mol_type = other RNA
cggtaagttctgtccaagc

SEQ ID NO: 1646 - RNA, 18 nt, synthetic construct
  misc_feature 1..18: note = Description of Artificial Sequence: Synthetic Antisense oligonucleotide
  modified_base 1: mod_base = OTHER; note = bicyclic nucleic acid (BNA)
  source 1..18: mol_type = other RNA
cggtaagttctgtccaag

SEQ ID NO: 1647 - RNA, 17 nt, synthetic construct
  misc_feature 1..17: note = Description of Artificial Sequence: Synthetic Antisense oligonucleotide
  modified_base 1: mod_base = OTHER; note = bicyclic nucleic acid (BNA)
  source 1..17: mol_type = other RNA
cggtaagttctgtccaa

SEQ ID NO: 1648 - RNA, 16 nt, synthetic construct
  misc_feature 1..16: note = Description of Artificial Sequence: Synthetic Antisense oligonucleotide
  modified_base 1: mod_base = OTHER; note = bicyclic nucleic acid (BNA)
  source 1..16: mol_type = other RNA
cggtaagttctgtcca

SEQ ID NO: 1649 - RNA, 15 nt, synthetic construct
  misc_feature 1..15: note = Description of Artificial Sequence: Synthetic Antisense oligonucleotide
  modified_base 1: mod_base = OTHER; note = bicyclic nucleic acid (BNA)
  source 1..15: mol_type = other RNA
cggtaagttctgtcc

SEQ ID NO: 1650 - RNA, 14 nt, synthetic construct
  misc_feature 1..14: note = Description of Artificial Sequence: Synthetic Antisense oligonucleotide
  modified_base 1: mod_base = OTHER; note = bicyclic nucleic acid (BNA)
  source 1..14: mol_type = other RNA
cggtaagttctgtc

SEQ ID NO: 1651 - RNA, 13 nt, synthetic construct
  misc_feature 1..13: note = Description of Artificial Sequence: Synthetic Antisense oligonucleotide
  modified_base 1: mod_base = OTHER; note = bicyclic nucleic acid (BNA)
  source 1..13: mol_type = other RNA
cggtaagttctgt

SEQ ID NO: 1652 - RNA, 12 nt, synthetic construct
  misc_feature 1..12: note = Description of Artificial Sequence: Synthetic Antisense oligonucleotide
  modified_base 1: mod_base = OTHER; note = bicyclic nucleic acid (BNA)
  source 1..12: mol_type = other RNA
cggtaagttctg

SEQ ID NO: 1653 - RNA, 11 nt, synthetic construct
  misc_feature 1..11: note = Description of Artificial Sequence: Synthetic Antisense oligonucleotide
  modified_base 1: mod_base = OTHER; note = bicyclic nucleic acid (BNA)
  source 1..11: mol_type = other RNA
cggtaagttct

SEQ ID NO: 1654 - RNA, 10 nt, synthetic construct
  misc_feature 1..10: note = Description of Artificial Sequence: Synthetic Antisense oligonucleotide
  modified_base 1: mod_base = OTHER; note = bicyclic nucleic acid (BNA)
  source 1..10: mol_type = other RNA
cggtaagttc

SEQ ID NO: 1655-1656 - skipped (2 entries)

SEQ ID NO: 1657 - DNA, 20 bp, synthetic construct
  misc_feature 1..20: note = Description of Artificial Sequence: Synthetic Antisense oligonucleotide
  misc_feature 1..20: note = Original Sequence: tcgguaaguucuguccaagc
  modified_base 1: mod_base = OTHER; note = bicyclic nucleic acid (BNA)
  source 1..20: mol_type = other DNA
  modified_base 5: mod_base = OTHER; note = Uracil
  modified_base 9: mod_base = OTHER; note = Uracil
  modified_base 10: mod_base = OTHER; note = Uracil
  modified_base 12: mod_base = OTHER; note = Uracil
  modified_base 14: mod_base = OTHER; note = Uracil
tcggtaagttctgtccaagc

SEQ ID NO: 1658 - DNA, 19 bp, synthetic construct
  misc_feature 1..19: note = Description of Artificial Sequence: Synthetic Antisense oligonucleotide
  misc_feature 1..19: note = Original Sequence: tcgguaaguucuguccaag
  modified_base 1: mod_base = OTHER; note = bicyclic nucleic acid (BNA)
  source 1..19: mol_type = other DNA
  modified_base 5: mod_base = OTHER; note = Uracil
  modified_base 9: mod_base = OTHER; note = Uracil
  modified_base 10: mod_base = OTHER; note = Uracil
  modified_base 12: mod_base = OTHER; note = Uracil
  modified_base 14: mod_base = OTHER; note = Uracil
tcggtaagttctgtccaag

SEQ ID NO: 1659 - DNA, 18 bp, synthetic construct
  misc_feature 1..18: note = Description of Artificial Sequence: Synthetic Antisense oligonucleotide
  misc_feature 1..18: note = Original Sequence: tcgguaaguucuguccaa
  modified_base 1: mod_base = OTHER; note = bicyclic nucleic acid (BNA)
  source 1..18: mol_type = other DNA
  modified_base 5: mod_base = OTHER; note = Uracil
  modified_base 9: mod_base = OTHER; note = Uracil
  modified_base 10: mod_base = OTHER; note = Uracil
  modified_base 12: mod_base = OTHER; note = Uracil
  modified_base 14: mod_base = OTHER; note = Uracil
tcggtaagttctgtccaa

SEQ ID NO: 1660 - DNA, 17 bp, synthetic construct
  misc_feature 1..17: note = Description of Artificial Sequence: Synthetic Antisense oligonucleotide
  misc_feature 1..17: note = Original Sequence: tcgguaaguucugucca
  modified_base 1: mod_base = OTHER; note = bicyclic nucleic acid (BNA)
  source 1..17: mol_type = other DNA
  modified_base 5: mod_base = OTHER; note = Uracil
  modified_base 9: mod_base = OTHER; note = Uracil
  modified_base 10: mod_base = OTHER; note = Uracil
  modified_base 12: mod_base = OTHER; note = Uracil
  modified_base 14: mod_base = OTHER; note = Uracil
tcggtaagttctgtcca

SEQ ID NO: 1661 - DNA, 16 bp, synthetic construct
  misc_feature 1..16: note = Description of Artificial Sequence: Synthetic Antisense oligonucleotide
  misc_feature 1..16: note = Original Sequence: tcgguaaguucugucc
  modified_base 1: mod_base = OTHER; note = bicyclic nucleic acid (BNA)
  source 1..16: mol_type = other DNA
  modified_base 5: mod_base = OTHER; note = Uracil
  modified_base 9: mod_base = OTHER; note = Uracil
  modified_base 10: mod_base = OTHER; note = Uracil
  modified_base 12: mod_base = OTHER; note = Uracil
  modified_base 14: mod_base = OTHER; note = Uracil
tcggtaagttctgtcc

SEQ ID NO: 1662 - DNA, 15 bp, synthetic construct
  misc_feature 1..15: note = Description of Artificial Sequence: Synthetic Antisense oligonucleotide
  misc_feature 1..15: note = Original Sequence: tcgguaaguucuguc
  modified_base 1: mod_base = OTHER; note = bicyclic nucleic acid (BNA)
  source 1..15: mol_type = other DNA
  modified_base 5: mod_base = OTHER; note = Uracil
  modified_base 9: mod_base = OTHER; note = Uracil
  modified_base 10: mod_base = OTHER; note = Uracil
  modified_base 12: mod_base = OTHER; note = Uracil
  modified_base 14: mod_base = OTHER; note = Uracil
tcggtaagttctgtc

SEQ ID NO: 1663 - DNA, 14 bp, synthetic construct
  misc_feature 1..14: note = Description of Artificial Sequence: Synthetic Antisense oligonucleotide
  misc_feature 1..14: note = Original Sequence: tcgguaaguucugu
  modified_base 1: mod_base = OTHER; note = bicyclic nucleic acid (BNA)
  source 1..14: mol_type = other DNA
  modified_base 5: mod_base = OTHER; note = Uracil
  modified_base 9: mod_base = OTHER; note = Uracil
  modified_base 10: mod_base = OTHER; note = Uracil
  modified_base 12: mod_base = OTHER; note = Uracil
  modified_base 14: mod_base = OTHER; note = Uracil
tcggtaagttctgt

SEQ ID NO: 1664 - DNA, 13 bp, synthetic construct
  misc_feature 1..13: note = Description of Artificial Sequence: Synthetic Antisense oligonucleotide
  misc_feature 1..13: note = Original Sequence: tcgguaaguucug
  modified_base 1: mod_base = OTHER; note = bicyclic nucleic acid (BNA)
  source 1..13: mol_type = other DNA
  modified_base 5: mod_base = OTHER; note = Uracil
  modified_base 9: mod_base = OTHER; note = Uracil
  modified_base 10: mod_base = OTHER; note = Uracil
  modified_base 12: mod_base = OTHER; note = Uracil
tcggtaagttctg

SEQ ID NO: 1665 - DNA, 12 bp, synthetic construct
  misc_feature 1..12: note = Description of Artificial Sequence: Synthetic Antisense oligonucleotide
  misc_feature 1..12: note = Original Sequence: tcgguaaguucu
  modified_base 1: mod_base = OTHER; note = bicyclic nucleic acid (BNA)
  source 1..12: mol_type = other DNA
  modified_base 5: mod_base = OTHER; note = Uracil
  modified_base 9: mod_base = OTHER; note = Uracil
  modified_base 10: mod_base = OTHER; note = Uracil
  modified_base 12: mod_base = OTHER; note = Uracil
tcggtaagttct

SEQ ID NO: 1666 - DNA, 11 bp, synthetic construct
  misc_feature 1..11: note = Description of Artificial Sequence: Synthetic Antisense oligonucleotide
  misc_feature 1..11: note = Original Sequence: tcgguaaguuc
  modified_base 1: mod_base = OTHER; note = bicyclic nucleic acid (BNA)
  source 1..11: mol_type = other DNA
  modified_base 5: mod_base = OTHER; note = Uracil
  modified_base 9: mod_base = OTHER; note = Uracil
  modified_base 10: mod_base = OTHER; note = Uracil
tcggtaagttc

SEQ ID NO: 1667 - DNA, 10 bp, synthetic construct
  misc_feature 1..10: note = Description of Artificial Sequence: Synthetic Antisense oligonucleotide
  misc_feature 1..10: note = Original Sequence: tcgguaaguu
  modified_base 1: mod_base = OTHER; note = bicyclic nucleic acid (BNA)
  source 1..10: mol_type = other DNA
  modified_base 5: mod_base = OTHER; note = Uracil
  modified_base 9: mod_base = OTHER; note = Uracil
  modified_base 10: mod_base = OTHER; note = Uracil
tcggtaagtt

SEQ ID NO: 1668 - skipped

SEQ ID NO: 1669 - RNA, 20 nt, synthetic construct
  misc_feature 1..20: note = Description of Artificial Sequence: Synthetic Antisense oligonucleotide
  modified_base 1: mod_base = OTHER; note = bicyclic nucleic acid (BNA)
  source 1..20: mol_type = other RNA
gtcggtaagttctgtccaag

SEQ ID NO: 1670 - RNA, 19 nt, synthetic construct
  misc_feature 1..19: note = Description of Artificial Sequence: Synthetic Antisense oligonucleotide
  modified_base 1: mod_base = OTHER; note = bicyclic nucleic acid (BNA)
  source 1..19: mol_type = other RNA
gtcggtaagttctgtccaa

SEQ ID NO: 1671 - RNA, 18 nt, synthetic construct
  misc_feature 1..18: note = Description of Artificial Sequence: Synthetic Antisense oligonucleotide
  modified_base 1: mod_base = OTHER; note = bicyclic nucleic acid (BNA)
  source 1..18: mol_type = other RNA
gtcggtaagttctgtcca

SEQ ID NO: 1672 - RNA, 17 nt, synthetic construct
  misc_feature 1..17: note = Description of Artificial Sequence: Synthetic Antisense oligonucleotide
  modified_base 1: mod_base = OTHER; note = bicyclic nucleic acid (BNA)
  source 1..17: mol_type = other RNA
gtcggtaagttctgtcc

SEQ ID NO: 1673 - RNA, 16 nt, synthetic construct
  misc_feature 1..16: note = Description of Artificial Sequence: Synthetic Antisense oligonucleotide
  modified_base 1: mod_base = OTHER; note = bicyclic nucleic acid (BNA)
  source 1..16: mol_type = other RNA
gtcggtaagttctgtc

SEQ ID NO: 1674 - RNA, 15 nt, synthetic construct
  misc_feature 1..15: note = Description of Artificial Sequence: Synthetic Antisense oligonucleotide
  modified_base 1: mod_base = OTHER; note = bicyclic nucleic acid (BNA)
  source 1..15: mol_type = other RNA
gtcggtaagttctgt

SEQ ID NO: 1675 - RNA, 14 nt, synthetic construct
  misc_feature 1..14: note = Description of Artificial Sequence: Synthetic Antisense oligonucleotide
  modified_base 1: mod_base = OTHER; note = bicyclic nucleic acid (BNA)
  source 1..14: mol_type = other RNA
gtcggtaagttctg

SEQ ID NO: 1676 - RNA, 13 nt, synthetic construct
  misc_feature 1..13: note = Description of Artificial Sequence: Synthetic Antisense oligonucleotide
  modified_base 1: mod_base = OTHER; note = bicyclic nucleic acid (BNA)
  source 1..13: mol_type = other RNA
gtcggtaagttct

SEQ ID NO: 1677 - RNA, 12 nt, synthetic construct
  misc_feature 1..12: note = Description of Artificial Sequence: Synthetic Antisense oligonucleotide
  modified_base 1: mod_base = OTHER; note = bicyclic nucleic acid (BNA)
  source 1..12: mol_type = other RNA
gtcggtaagttc

SEQ ID NO: 1678 - RNA, 11 nt, synthetic construct
  misc_feature 1..11: note = Description of Artificial Sequence: Synthetic Antisense oligonucleotide
  modified_base 1: mod_base = OTHER; note = bicyclic nucleic acid (BNA)
  source 1..11: mol_type = other RNA
gtcggtaagtt

SEQ ID NO: 1679 - RNA, 10 nt, synthetic construct
  misc_feature 1..10: note = Description of Artificial Sequence: Synthetic Antisense oligonucleotide
  modified_base 1: mod_base = OTHER; note = bicyclic nucleic acid (BNA)
  source 1..10: mol_type = other RNA
gtcggtaagt

SEQ ID NO: 1680 - RNA, 20 nt, synthetic construct
  misc_feature 1..20: note = Description of Artificial Sequence: Synthetic Antisense oligonucleotide
  modified_base 1: mod_base = OTHER; note = bicyclic nucleic acid (BNA)
  source 1..20: mol_type = other RNA
agtcggtaagttctgtccaa

SEQ ID NO: 1681 - RNA, 19 nt, synthetic construct
  misc_feature 1..19: note = Description of Artificial Sequence: Synthetic Antisense oligonucleotide
  modified_base 1: mod_base = OTHER; note = bicyclic nucleic acid (BNA)
  source 1..19: mol_type = other RNA
agtcggtaagttctgtcca

SEQ ID NO: 1682 - RNA, 17 nt, synthetic construct
  misc_feature 1..17: note = Description of Artificial Sequence: Synthetic Antisense oligonucleotide
  modified_base 1: mod_base = OTHER; note = bicyclic nucleic acid (BNA)
  source 1..17: mol_type = other RNA
agtcggtaagttctgtc

SEQ ID NO: 1683 - RNA, 16 nt, synthetic construct
  misc_feature 1..16: note = Description of Artificial Sequence: Synthetic Antisense oligonucleotide
  modified_base 1: mod_base = OTHER; note = bicyclic nucleic acid (BNA)
  source 1..16: mol_type = other RNA
agtcggtaagttctgt

SEQ ID NO: 1684 - RNA, 15 nt, synthetic construct
  misc_feature 1..15: note = Description of Artificial Sequence: Synthetic Antisense oligonucleotide
  modified_base 1: mod_base = OTHER; note = bicyclic nucleic acid (BNA)
  source 1..15: mol_type = other RNA
agtcggtaagttctg

SEQ ID NO: 1685 - RNA, 14 nt, synthetic construct
  misc_feature 1..14: note = Description of Artificial Sequence: Synthetic Antisense oligonucleotide
  modified_base 1: mod_base = OTHER; note = bicyclic nucleic acid (BNA)
  source 1..14: mol_type = other RNA
agtcggtaagttct

SEQ ID NO: 1686 - RNA, 13 nt, synthetic construct
  misc_feature 1..13: note = Description of Artificial Sequence: Synthetic Antisense oligonucleotide
  modified_base 1: mod_base = OTHER; note = bicyclic nucleic acid (BNA)
  source 1..13: mol_type = other RNA
agtcggtaagttc

SEQ ID NO: 1687 - RNA, 12 nt, synthetic construct
  misc_feature 1..12: note = Description of Artificial Sequence: Synthetic Antisense oligonucleotide
  modified_base 1: mod_base = OTHER; note = bicyclic nucleic acid (BNA)
  source 1..12: mol_type = other RNA
agtcggtaagtt

SEQ ID NO: 1688 - RNA, 11 nt, synthetic construct
  misc_feature 1..11: note = Description of Artificial Sequence: Synthetic Antisense oligonucleotide
  modified_base 1: mod_base = OTHER; note = bicyclic nucleic acid (BNA)
  source 1..11: mol_type = other RNA
agtcggtaagt

SEQ ID NO: 1689 - RNA, 20 nt, synthetic construct
  misc_feature 1..20: note = Description of Artificial Sequence: Synthetic Antisense oligonucleotide
  modified_base 1: mod_base = OTHER; note = bicyclic nucleic acid (BNA)
  source 1..20: mol_type = other RNA
cagtcggtaagttctgtcca

SEQ ID NO: 1690 - RNA, 19 nt, synthetic construct
  misc_feature 1..19: note = Description of Artificial Sequence: Synthetic Antisense oligonucleotide
  modified_base 1: mod_base = OTHER; note = bicyclic nucleic acid (BNA)
  source 1..19: mol_type = other RNA
cagtcggtaagttctgtcc

SEQ ID NO: 1691 - RNA, 18 nt, synthetic construct
  misc_feature 1..18: note = Description of Artificial Sequence: Synthetic Antisense oligonucleotide
  modified_base 1: mod_base = OTHER; note = bicyclic nucleic acid (BNA)
  source 1..18: mol_type = other RNA
cagtcggtaagttctgtc

SEQ ID NO: 1692 - RNA, 17 nt, synthetic construct
  misc_feature 1..17: note = Description of Artificial Sequence: Synthetic Antisense oligonucleotide
  modified_base 1: mod_base = OTHER; note = bicyclic nucleic acid (BNA)
  source 1..17: mol_type = other RNA
cagtcggtaagttctgt

SEQ ID NO: 1693 - RNA, 16 nt, synthetic construct
  misc_feature 1..16: note = Description of Artificial Sequence: Synthetic Antisense oligonucleotide
  modified_base 1: mod_base = OTHER; note = bicyclic nucleic acid (BNA)
  source 1..16: mol_type = other RNA
cagtcggtaagttctg

SEQ ID NO: 1694 - RNA, 15 nt, synthetic construct
  misc_feature 1..15: note = Description of Artificial Sequence: Synthetic Antisense oligonucleotide
  modified_base 1: mod_base = OTHER; note = bicyclic nucleic acid (BNA)
  source 1..15: mol_type = other RNA
cagtcggtaagttct

SEQ ID NO: 1695 - RNA, 14 nt, synthetic construct
  misc_feature 1..14: note = Description of Artificial Sequence: Synthetic Antisense oligonucleotide
  modified_base 1: mod_base = OTHER; note = bicyclic nucleic acid (BNA)
  source 1..14: mol_type = other RNA
cagtcggtaagttc

SEQ ID NO: 1696 - RNA, 13 nt, synthetic construct
  misc_feature 1..13: note = Description of Artificial Sequence: Synthetic Antisense oligonucleotide
  modified_base 1: mod_base = OTHER; note = bicyclic nucleic acid (BNA)
  source 1..13: mol_type = other RNA
cagtcggtaagtt

SEQ ID NO: 1697 - RNA, 12 nt, synthetic construct
  misc_feature 1..12: note = Description of Artificial Sequence: Synthetic Antisense oligonucleotide
  modified_base 1: mod_base = OTHER; note = bicyclic nucleic acid (BNA)
  source 1..12: mol_type = other RNA
cagtcggtaagt

SEQ ID NO: 1698 - RNA, 20 nt, synthetic construct
  misc_feature 1..20: note = Description of Artificial Sequence: Synthetic Antisense oligonucleotide
  modified_base 1: mod_base = OTHER; note = bicyclic nucleic acid (BNA)
  source 1..20: mol_type = other RNA
ccagtcggtaagttctgtcc

SEQ ID NO: 1699 - RNA, 19 nt, synthetic construct
  misc_feature 1..19: note = Description of Artificial Sequence: Synthetic Antisense oligonucleotide
  modified_base 1: mod_base = OTHER; note = bicyclic nucleic acid (BNA)
  source 1..19: mol_type = other RNA
ccagtcggtaagttctgtc

SEQ ID NO: 1700 - RNA, 18 nt, synthetic construct
  misc_feature 1..18: note = Description of Artificial Sequence: Synthetic Antisense oligonucleotide
  modified_base 1: mod_base = OTHER; note = bicyclic nucleic acid (BNA)
  source 1..18: mol_type = other RNA
ccagtcggtaagttctgt

SEQ ID NO: 1701 - RNA, 17 nt, synthetic construct
  misc_feature 1..17: note = Description of Artificial Sequence: Synthetic Antisense oligonucleotide
  modified_base 1: mod_base = OTHER; note = bicyclic nucleic acid (BNA)
  source 1..17: mol_type = other RNA
ccagtcggtaagttctg

SEQ ID NO: 1702 - RNA, 16 nt, synthetic construct
  misc_feature 1..16: note = Description of Artificial Sequence: Synthetic Antisense oligonucleotide
  modified_base 1: mod_base = OTHER; note = bicyclic nucleic acid (BNA)
  source 1..16: mol_type = other RNA
ccagtcggtaagttct

SEQ ID NO: 1703 - RNA, 15 nt, synthetic construct
  misc_feature 1..15: note = Description of Artificial Sequence: Synthetic Antisense oligonucleotide
  modified_base 1: mod_base = OTHER; note = bicyclic nucleic acid (BNA)
  source 1..15: mol_type = other RNA
ccagtcggtaagttc

SEQ ID NO: 1704 - RNA, 14 nt, synthetic construct
  misc_feature 1..14: note = Description of Artificial Sequence: Synthetic Antisense oligonucleotide
  modified_base 1: mod_base = OTHER; note = bicyclic nucleic acid (BNA)
  source 1..14: mol_type = other RNA
ccagtcggtaagtt

SEQ ID NO: 1705 - RNA, 13 nt, synthetic construct
  misc_feature 1..13: note = Description of Artificial Sequence: Synthetic Antisense oligonucleotide
  modified_base 1: mod_base = OTHER; note = bicyclic nucleic acid (BNA)
  source 1..13: mol_type = other RNA
ccagtcggtaagt

SEQ ID NO: 1706 - RNA, 20 nt, synthetic construct
  misc_feature 1..20: note = Description of Artificial Sequence: Synthetic Antisense oligonucleotide
  modified_base 1: mod_base = OTHER; note = bicyclic nucleic acid (BNA)
  source 1..20: mol_type = other RNA
gccagtcggtaagttctgtc

SEQ ID NO: 1707 - RNA, 19 nt, synthetic construct
  misc_feature 1..19: note = Description of Artificial Sequence: Synthetic Antisense oligonucleotide
  modified_base 1: mod_base = OTHER; note = bicyclic nucleic acid (BNA)
  source 1..19: mol_type = other RNA
gccagtcggtaagttctgt

SEQ ID NO: 1708 - RNA, 18 nt, synthetic construct
  misc_feature 1..18: note = Description of Artificial Sequence: Synthetic Antisense oligonucleotide
  modified_base 1: mod_base = OTHER; note = bicyclic nucleic acid (BNA)
  source 1..18: mol_type = other RNA
gccagtcggtaagttctg

SEQ ID NO: 1709 - RNA, 17 nt, synthetic construct
  misc_feature 1..17: note = Description of Artificial Sequence: Synthetic Antisense oligonucleotide
  modified_base 1: mod_base = OTHER; note = bicyclic nucleic acid (BNA)
  source 1..17: mol_type = other RNA
gccagtcggtaagttct

SEQ ID NO: 1710 - RNA, 16 nt, synthetic construct
  misc_feature 1..16: note = Description of Artificial Sequence: Synthetic Antisense oligonucleotide
  modified_base 1: mod_base = OTHER; note = bicyclic nucleic acid (BNA)
  source 1..16: mol_type = other RNA
gccagtcggtaagttc

SEQ ID NO: 1711 - RNA, 15 nt, synthetic construct
  misc_feature 1..15: note = Description of Artificial Sequence: Synthetic Antisense oligonucleotide
  modified_base 1: mod_base = OTHER; note = bicyclic nucleic acid (BNA)
  source 1..15: mol_type = other RNA
gccagtcggtaagtt

SEQ ID NO: 1712 - RNA, 14 nt, synthetic construct
  misc_feature 1..14: note = Description of Artificial Sequence: Synthetic Antisense oligonucleotide
  modified_base 1: mod_base = OTHER; note = bicyclic nucleic acid (BNA)
  source 1..14: mol_type = other RNA
gccagtcggtaagt

SEQ ID NO: 1713 - DNA, 20 bp, synthetic construct
  misc_feature 1..20: note = Description of Artificial Sequence: Synthetic Antisense oligonucleotide
  misc_feature 1..20: note = Original Sequence: tcaaggaagauggcauuucu
  modified_base 1: mod_base = OTHER; note = bicyclic nucleic acid (BNA)
  source 1..20: mol_type = other DNA
  modified_base 11: mod_base = OTHER; note = Uracil
  modified_base 16: mod_base = OTHER; note = Uracil
  modified_base 17: mod_base = OTHER; note = Uracil
  modified_base 18: mod_base = OTHER; note = Uracil
  modified_base 20: mod_base = OTHER; note = Uracil
tcaaggaagatggcatttct

SEQ ID NO: 1714 - DNA, 22 bp, synthetic construct
  misc_feature 1..22: note = Description of Artificial Sequence: Synthetic Antisense oligonucleotide
  misc_feature 1..22: note = Original Sequence: tcaaggaagauggcauuucuag
  modified_base 1: mod_base = OTHER; note = bicyclic nucleic acid (BNA)
  source 1..22: mol_type = other DNA
  modified_base 11: mod_base = OTHER; note = Uracil
  modified_base 16: mod_base = OTHER; note = Uracil
  modified_base 17: mod_base = OTHER; note = Uracil
  modified_base 18: mod_base = OTHER; note = Uracil
  modified_base 20: mod_base = OTHER; note = Uracil
tcaaggaagatggcatttctag

SEQ ID NO: 1715 - DNA, 16 bp, synthetic construct
  misc_feature 1..16: note = Description of Artificial Sequence: Synthetic Antisense oligonucleotide
  misc_feature 1..16: note = Original Sequence: tcaaggaagauggcau
  modified_base 1: mod_base = OTHER; note = bicyclic nucleic acid (BNA)
  source 1..16: mol_type = other DNA
  modified_base 11: mod_base = OTHER; note = Uracil
  modified_base 16: mod_base = OTHER; note = Uracil
tcaaggaagatggcat

SEQ ID NO: 1716 - RNA, 15 nt, synthetic construct
  misc_feature 1..15: note = Description of Artificial Sequence: Synthetic Antisense oligonucleotide
  modified_base 1: mod_base = OTHER; note = bicyclic nucleic acid (BNA)
  source 1..15: mol_type = other RNA
gaagatggcatttct

SEQ ID NO: 1717 - DNA, 21 bp, synthetic construct
  misc_feature 1..21: note = Description of Artificial Sequence: Synthetic Antisense oligonucleotide
  misc_feature 1..21: note = Original Sequence: tcaaggaagauggcauuucua
  modified_base 1: mod_base = OTHER; note = bicyclic nucleic acid (BNA)
  source 1..21: mol_type = other DNA
  modified_base 11: mod_base = OTHER; note = Uracil
  modified_base 16: mod_base = OTHER; note = Uracil
  modified_base 17: mod_base = OTHER; note = Uracil
  modified_base 18: mod_base = OTHER; note = Uracil
  modified_base 20: mod_base = OTHER; note = Uracil
tcaaggaagatggcatttcta

SEQ ID NO: 1718 - DNA, 19 bp, synthetic construct
  misc_feature 1..19: note = Description of Artificial Sequence: Synthetic Antisense oligonucleotide
  misc_feature 1..19: note = Original Sequence: tcaaggaagauggcauuuc
  modified_base 1: mod_base = OTHER; note = bicyclic nucleic acid (BNA)
  source 1..19: mol_type = other DNA
  modified_base 11: mod_base = OTHER; note = Uracil
  modified_base 16: mod_base = OTHER; note = Uracil
  modified_base 17: mod_base = OTHER; note = Uracil
  modified_base 18: mod_base = OTHER; note = Uracil
tcaaggaagatggcatttc

SEQ ID NO: 1719 - DNA, 18 bp, synthetic construct
  misc_feature 1..18: note = Description of Artificial Sequence: Synthetic Antisense oligonucleotide
  misc_feature 1..18: note = Original Sequence: tcaaggaagauggcauuu
  modified_base 1: mod_base = OTHER; note = bicyclic nucleic acid (BNA)
  source 1..18: mol_type = other DNA
  modified_base 11: mod_base = OTHER; note = Uracil
  modified_base 16: mod_base = OTHER; note = Uracil
  modified_base 17: mod_base = OTHER; note = Uracil
  modified_base 18: mod_base = OTHER; note = Uracil
tcaaggaagatggcattt

SEQ ID NO: 1720 - DNA, 17 bp, synthetic construct
  misc_feature 1..17: note = Description of Artificial Sequence: Synthetic Antisense oligonucleotide
  misc_feature 1..17: note = Original Sequence: tcaaggaagauggcauu
  modified_base 1: mod_base = OTHER; note = bicyclic nucleic acid (BNA)
  source 1..17: mol_type = other DNA
  modified_base 11: mod_base = OTHER; note = Uracil
  modified_base 16: mod_base = OTHER; note = Uracil
  modified_base 17: mod_base = OTHER; note = Uracil
tcaaggaagatggcatt

SEQ ID NO: 1721 - DNA, 15 bp, synthetic construct
  misc_feature 1..15: note = Description of Artificial Sequence: Synthetic Antisense oligonucleotide
  misc_feature 1..15: note = Original Sequence: tcaaggaagauggca
  modified_base 1: mod_base = OTHER; note = bicyclic nucleic acid (BNA)
  source 1..15: mol_type = other DNA
  modified_base 11: mod_base = OTHER; note = Uracil
tcaaggaagatggca

SEQ ID NO: 1722 - DNA, 14 bp, synthetic construct
  misc_feature 1..14: note = Description of Artificial Sequence: Synthetic Antisense oligonucleotide
  misc_feature 1..14: note = Original Sequence: tcaaggaagauggc
  modified_base 1: mod_base = OTHER; note = bicyclic nucleic acid (BNA)
  source 1..14: mol_type = other DNA
  modified_base 11: mod_base = OTHER; note = Uracil
tcaaggaagatggc

SEQ ID NO: 1723 - DNA, 13 bp, synthetic construct
  misc_feature 1..13: note = Description of Artificial Sequence: Synthetic Antisense oligonucleotide
  misc_feature 1..13: note = Original Sequence: tcaaggaagaugg
  modified_base 1: mod_base = OTHER; note = bicyclic nucleic acid (BNA)
  source 1..13: mol_type = other DNA
  modified_base 11: mod_base = OTHER; note = Uracil
tcaaggaagatgg

SEQ ID NO: 1724 - DNA, 12 bp, synthetic construct
  misc_feature 1..12: note = Description of Artificial Sequence: Synthetic Antisense oligonucleotide
  misc_feature 1..12: note = Original Sequence: tcaaggaagaug
  modified_base 1: mod_base = OTHER; note = bicyclic nucleic acid (BNA)
  source 1..12: mol_type = other DNA
  modified_base 11: mod_base = OTHER; note = Uracil
tcaaggaagatg

SEQ ID NO: 1725 - DNA, 11 bp, synthetic construct
  misc_feature 1..11: note = Description of Artificial Sequence: Synthetic Antisense oligonucleotide
  misc_feature 1..11: note = Original Sequence: tcaaggaagau
  modified_base 1: mod_base = OTHER; note = bicyclic nucleic acid (BNA)
  source 1..11: mol_type = other DNA
  modified_base 11: mod_base = OTHER; note = Uracil
tcaaggaagat

SEQ ID NO: 1726 - DNA, 10 bp, synthetic construct
  misc_feature 1..10: note = Description of Artificial Sequence: Synthetic Antisense oligonucleotide
  modified_base 1: mod_base = OTHER; note = bicyclic nucleic acid (BNA)
  source 1..10: mol_type = other DNA
tcaaggaaga

SEQ ID NO: 1727 - skipped

SEQ ID NO: 1728 - RNA, 21 nt, synthetic construct
  misc_feature 1..21: note = Description of Artificial Sequence: Synthetic Antisense oligonucleotide
  modified_base 1: mod_base = OTHER; note = bicyclic nucleic acid (BNA)
  source 1..21: mol_type = other RNA
caaggaagatggcatttctag

SEQ ID NO: 1729 - RNA, 20 nt, synthetic construct
  misc_feature 1..20: note = Description of Artificial Sequence: Synthetic Antisense oligonucleotide
  modified_base 1: mod_base = OTHER; note = bicyclic nucleic acid (BNA)
  source 1..20: mol_type = other RNA
caaggaagatggcatttcta

SEQ ID NO: 1730 - RNA, 19 nt, synthetic construct
  misc_feature 1..19: note = Description of Artificial Sequence: Synthetic Antisense oligonucleotide
  modified_base 1: mod_base = OTHER; note = bicyclic nucleic acid (BNA)
  source 1..19: mol_type = other RNA
caaggaagatggcatttct

SEQ ID NO: 1731 - RNA, 18 nt, synthetic construct
  misc_feature 1..18: note = Description of Artificial Sequence: Synthetic Antisense oligonucleotide
  modified_base 1: mod_base = OTHER; note = bicyclic nucleic acid (BNA)
  source 1..18: mol_type = other RNA
caaggaagatggcatttc

SEQ ID NO: 1732 - RNA, 17 nt, synthetic construct
  misc_feature 1..17: note = Description of Artificial Sequence: Synthetic Antisense oligonucleotide
  modified_base 1: mod_base = OTHER; note = bicyclic nucleic acid (BNA)
  source 1..17: mol_type = other RNA
caaggaagatggcattt

SEQ ID NO: 1733 - RNA, 16 nt, synthetic construct
  misc_feature 1..16: note = Description of Artificial Sequence: Synthetic Antisense oligonucleotide
  modified_base 1: mod_base = OTHER; note = bicyclic nucleic acid (BNA)
  source 1..16: mol_type = other RNA
caaggaagatggcatt

SEQ ID NO: 1734 - RNA, 15 nt, synthetic construct
  misc_feature 1..15: note = Description of Artificial Sequence: Synthetic Antisense oligonucleotide
  modified_base 1: mod_base = OTHER; note = bicyclic nucleic acid (BNA)
  source 1..15: mol_type = other RNA
caaggaagatggcat

SEQ ID NO: 1735 - RNA, 14 nt, synthetic construct
  misc_feature 1..14: note = Description of Artificial Sequence: Synthetic Antisense oligonucleotide
  modified_base 1: mod_base = OTHER; note = bicyclic nucleic acid (BNA)
  source 1..14: mol_type = other RNA
caaggaagatggca

SEQ ID NO: 1736 - RNA, 13 nt, synthetic construct
  misc_feature 1..13: note = Description of Artificial Sequence: Synthetic Antisense oligonucleotide
  modified_base 1: mod_base = OTHER; note = bicyclic nucleic acid (BNA)
  source 1..13: mol_type = other RNA
caaggaagatggc

SEQ ID NO: 1737 - RNA, 12 nt, synthetic construct
  misc_feature 1..12: note = Description of Artificial Sequence: Synthetic Antisense oligonucleotide
  modified_base 1: mod_base = OTHER; note = bicyclic nucleic acid (BNA)
  source 1..12: mol_type = other RNA
caaggaagatgg

SEQ ID NO: 1738 - RNA, 11 nt, synthetic construct
  misc_feature 1..11: note = Description of Artificial Sequence: Synthetic Antisense oligonucleotide
  modified_base 1: mod_base = OTHER; note = bicyclic nucleic acid (BNA)
  source 1..11: mol_type = other RNA
caaggaagatg

SEQ ID NO: 1739 - RNA, 10 nt, synthetic construct
  misc_feature 1..10: note = Description of Artificial Sequence: Synthetic Antisense oligonucleotide
  modified_base 1: mod_base = OTHER; note = bicyclic nucleic acid (BNA)
  source 1..10: mol_type = other RNA
caaggaagat

SEQ ID NO: 1740-1741 - skipped (2 entries)

SEQ ID NO: 1742 - RNA, 20 nt, synthetic construct
  misc_feature 1..20: note = Description of Artificial Sequence: Synthetic Antisense oligonucleotide
  modified_base 1: mod_base = OTHER; note = bicyclic nucleic acid (BNA)
  source 1..20: mol_type = other RNA
aaggaagatggcatttctag

SEQ ID NO: 1743 - RNA, 19 nt, synthetic construct
  misc_feature 1..19: note = Description of Artificial Sequence: Synthetic Antisense oligonucleotide
  modified_base 1: mod_base = OTHER; note = bicyclic nucleic acid (BNA)
  source 1..19: mol_type = other RNA
aaggaagatggcatttcta

SEQ ID NO: 1744 - RNA, 18 nt, synthetic construct
  misc_feature 1..18: note = Description of Artificial Sequence: Synthetic Antisense oligonucleotide
  modified_base 1: mod_base = OTHER; note = bicyclic nucleic acid (BNA)
  source 1..18: mol_type = other RNA
aaggaagatggcatttct

SEQ ID NO: 1745 - RNA, 17 nt, synthetic construct
  misc_feature 1..17: note = Description of Artificial Sequence: Synthetic Antisense oligonucleotide
  modified_base 1: mod_base = OTHER; note = bicyclic nucleic acid (BNA)
  source 1..17: mol_type = other RNA
aaggaagatggcatttc

SEQ ID NO: 1746 - RNA, 16 nt, synthetic construct
  misc_feature 1..16: note = Description of Artificial Sequence: Synthetic Antisense oligonucleotide
  modified_base 1: mod_base = OTHER; note = bicyclic nucleic acid (BNA)
  source 1..16: mol_type = other RNA
aaggaagatggcattt

SEQ ID NO: 1747 - RNA, 15 nt, synthetic construct
  misc_feature 1..15: note = Description of Artificial Sequence: Synthetic Antisense oligonucleotide
  modified_base 1: mod_base = OTHER; note = bicyclic nucleic acid (BNA)
  source 1..15: mol_type = other RNA
aaggaagatggcatt

SEQ ID NO: 1748 - RNA, 14 nt, synthetic construct
  misc_feature 1..14: note = Description of Artificial Sequence: Synthetic Antisense oligonucleotide
  modified_base 1: mod_base = OTHER; note = bicyclic nucleic acid (BNA)
  source 1..14: mol_type = other RNA
aaggaagatggcat

SEQ ID NO: 1749 - RNA, 13 nt, synthetic construct
  misc_feature 1..13: note = Description of Artificial Sequence: Synthetic Antisense oligonucleotide
  modified_base 1: mod_base = OTHER; note = bicyclic nucleic acid (BNA)
  source 1..13: mol_type = other RNA
aaggaagatggca

SEQ ID NO: 1750 - RNA, 12 nt, synthetic construct
  misc_feature 1..12: note = Description of Artificial Sequence: Synthetic Antisense oligonucleotide
  modified_base 1: mod_base = OTHER; note = bicyclic nucleic acid (BNA)
  source 1..12: mol_type = other RNA
aaggaagatggc

SEQ ID NO: 1751 - RNA, 11 nt, synthetic construct
  misc_feature 1..11: note = Description of Artificial Sequence: Synthetic Antisense oligonucleotide
  modified_base 1: mod_base = OTHER; note = bicyclic nucleic acid (BNA)
  source 1..11: mol_type = other RNA
aaggaagatgg

SEQ ID NO: 1752 - RNA, 10 nt, synthetic construct
  misc_feature 1..10: note = Description of Artificial Sequence: Synthetic Antisense oligonucleotide
  modified_base 1: mod_base = OTHER; note = bicyclic nucleic acid (BNA)
  source 1..10: mol_type = other RNA
aaggaagatg

SEQ ID NO: 1753-1754 - skipped (2 entries)

SEQ ID NO: 1755 - RNA, 19 nt, synthetic construct
  misc_feature 1..19: note = Description of Artificial Sequence: Synthetic Antisense oligonucleotide
  modified_base 1: mod_base = OTHER; note = bicyclic nucleic acid (BNA)
  source 1..19: mol_type = other RNA
aggaagatggcatttctag

SEQ ID NO: 1756 - RNA, 18 nt, synthetic construct
  misc_feature 1..18: note = Description of Artificial Sequence: Synthetic Antisense oligonucleotide
  modified_base 1: mod_base = OTHER; note = bicyclic nucleic acid (BNA)
  source 1..18: mol_type = other RNA
aggaagatggcatttcta

SEQ ID NO: 1757 - RNA, 17 nt, synthetic construct
  misc_feature 1..17: note = Description of Artificial Sequence: Synthetic Antisense oligonucleotide
  modified_base 1: mod_base = OTHER; note = bicyclic nucleic acid (BNA)
  source 1..17: mol_type = other RNA
aggaagatggcatttct

SEQ ID NO: 1758 - RNA, 16 nt, synthetic construct
  misc_feature 1..16: note = Description of Artificial Sequence: Synthetic Antisense oligonucleotide
  modified_base 1: mod_base = OTHER; note = bicyclic nucleic acid (BNA)
  source 1..16: mol_type = other RNA
aggaagatggcatttc

SEQ ID NO: 1759 - RNA, 15 nt, synthetic construct
  misc_feature 1..15: note = Description of Artificial Sequence: Synthetic Antisense oligonucleotide
  modified_base 1: mod_base = OTHER; note = bicyclic nucleic acid (BNA)
  source 1..15: mol_type = other RNA
aggaagatggcattt

SEQ ID NO: 1760 - RNA, 14 nt, synthetic construct
  misc_feature 1..14: note = Description of Artificial Sequence: Synthetic Antisense oligonucleotide
  modified_base 1: mod_base = OTHER; note = bicyclic nucleic acid (BNA)
  source 1..14: mol_type = other RNA
aggaagatggcatt

SEQ ID NO: 1761 - RNA, 13 nt, synthetic construct
  misc_feature 1..13: note = Description of Artificial Sequence: Synthetic Antisense oligonucleotide
  modified_base 1: mod_base = OTHER; note = bicyclic nucleic acid (BNA)
  source 1..13: mol_type = other RNA
aggaagatggcat

SEQ ID NO: 1762 - RNA, 12 nt, synthetic construct
  misc_feature 1..12: note = Description of Artificial Sequence: Synthetic Antisense oligonucleotide
  modified_base 1: mod_base = OTHER; note = bicyclic nucleic acid (BNA)
  source 1..12: mol_type = other RNA
aggaagatggca

SEQ ID NO: 1763 - RNA, 10 nt, synthetic construct
  misc_feature 1..10: note = Description of Artificial Sequence: Synthetic Antisense oligonucleotide
  modified_base 1: mod_base = OTHER; note = bicyclic nucleic acid (BNA)
  source 1..10: mol_type = other RNA
aggaagatgg

SEQ ID NO: 1764-1765 - skipped (2 entries)

SEQ ID NO: 1766 - RNA, 18 nt, synthetic construct
  misc_feature 1..18: note = Description of Artificial Sequence: Synthetic Antisense oligonucleotide
  modified_base 1: mod_base = OTHER; note = bicyclic nucleic acid (BNA)
  source 1..18: mol_type = other RNA
ggaagatggcatttctag

SEQ ID NO: 1767 - RNA, 17 nt, synthetic construct
  misc_feature 1..17: note = Description of Artificial Sequence: Synthetic Antisense oligonucleotide
  modified_base 1: mod_base = OTHER; note = bicyclic nucleic acid (BNA)
  source 1..17: mol_type = other RNA
ggaagatggcatttcta

SEQ ID NO: 1768 - RNA, 16 nt, synthetic construct
  misc_feature 1..16: note = Description of Artificial Sequence: Synthetic Antisense oligonucleotide
  modified_base 1: mod_base = OTHER; note = bicyclic nucleic acid (BNA)
  source 1..16: mol_type = other RNA
ggaagatggcatttct

SEQ ID NO: 1769 - RNA, 15 nt, synthetic construct
  misc_feature 1..15: note = Description of Artificial Sequence: Synthetic Antisense oligonucleotide
  modified_base 1: mod_base = OTHER; note = bicyclic nucleic acid (BNA)
  source 1..15: mol_type = other RNA
ggaagatggcatttc

SEQ ID NO: 1770 - RNA, 14 nt, synthetic construct
  misc_feature 1..14: note = Description of Artificial Sequence: Synthetic Antisense oligonucleotide
  modified_base 1: mod_base = OTHER; note = bicyclic nucleic acid (BNA)
  source 1..14: mol_type = other RNA
ggaagatggcattt

SEQ ID NO: 1771 - RNA, 13 nt, synthetic construct
  misc_feature 1..13: note = Description of Artificial Sequence: Synthetic Antisense oligonucleotide
  modified_base 1: mod_base = OTHER; note = bicyclic nucleic acid (BNA)
  source 1..13: mol_type = other RNA
ggaagatggcatt

SEQ ID NO: 1772 - RNA, 12 nt, synthetic construct
  misc_feature 1..12: note = Description of Artificial Sequence: Synthetic Antisense oligonucleotide
  modified_base 1: mod_base = OTHER; note = bicyclic nucleic acid (BNA)
  source 1..12: mol_type = other RNA
ggaagatggcat

SEQ ID NO: 1773 - RNA, 11 nt, synthetic construct
  misc_feature 1..11: note = Description of Artificial Sequence: Synthetic Antisense oligonucleotide
  modified_base 1: mod_base = OTHER; note = bicyclic nucleic acid (BNA)
  source 1..11: mol_type = other RNA
ggaagatggca

SEQ ID NO: 1774 - RNA, 10 nt, synthetic construct
  misc_feature 1..10: note = Description of Artificial Sequence: Synthetic Antisense oligonucleotide
  modified_base 1: mod_base = OTHER; note = bicyclic nucleic acid (BNA)
  source 1..10: mol_type = other RNA
ggaagatggc

SEQ ID NO: 1775 - skipped

SEQ ID NO: 1776 - RNA, 17 nt, synthetic construct
  misc_feature 1..17: note = Description of Artificial Sequence: Synthetic Antisense oligonucleotide
  modified_base 1: mod_base = OTHER; note = bicyclic nucleic acid (BNA)
  source 1..17: mol_type = other RNA
gaagatggcatttctag

SEQ ID NO: 1777 - RNA, 16 nt, synthetic construct
  misc_feature 1..16: note = Description of Artificial Sequence: Synthetic Antisense oligonucleotide
  modified_base 1: mod_base = OTHER; note = bicyclic nucleic acid (BNA)
  source 1..16: mol_type = other RNA
gaagatggcatttcta

SEQ ID NO: 1778 - RNA, 14 nt, synthetic construct
  misc_feature 1..14: note = Description of Artificial Sequence: Synthetic Antisense oligonucleotide
  modified_base 1: mod_base = OTHER; note = bicyclic nucleic acid (BNA)
  source 1..14: mol_type = other RNA
gaagatggcatttc

SEQ ID NO: 1779 - RNA, 13 nt, synthetic construct
  misc_feature 1..13: note = Description of Artificial Sequence: Synthetic Antisense oligonucleotide
  modified_base 1: mod_base = OTHER; note = bicyclic nucleic acid (BNA)
  source 1..13: mol_type = other RNA
gaagatggcattt

SEQ ID NO: 1780 - RNA, 12 nt, synthetic construct
  misc_feature 1..12: note = Description of Artificial Sequence: Synthetic Antisense oligonucleotide
  modified_base 1: mod_base = OTHER; note = bicyclic nucleic acid (BNA)
  source 1..12: mol_type = other RNA
gaagatggcatt

SEQ ID NO: 1781 - RNA, 11 nt, synthetic construct
  misc_feature 1..11: note = Description of Artificial Sequence: Synthetic Antisense oligonucleotide
  modified_base 1: mod_base = OTHER; note = bicyclic nucleic acid (BNA)
  source 1..11: mol_type = other RNA
gaagatggcat

SEQ ID NO: 1782 - RNA, 10 nt, synthetic construct
  misc_feature 1..10: note = Description of Artificial Sequence: Synthetic Antisense oligonucleotide
  modified_base 1: mod_base = OTHER; note = bicyclic nucleic acid (BNA)
  source 1..10: mol_type = other RNA
gaagatggca

SEQ ID NO: 1783-1784 - skipped (2 entries)

SEQ ID NO: 1785 - RNA, 16 nt, synthetic construct
  misc_feature 1..16: note = Description of Artificial Sequence: Synthetic Antisense oligonucleotide
  modified_base 1: mod_base = OTHER; note = bicyclic nucleic acid (BNA)
  source 1..16: mol_type = other RNA
aagatggcatttctag

SEQ ID NO: 1786 - RNA, 15 nt, synthetic construct
  misc_feature 1..15: note = Description of Artificial Sequence: Synthetic Antisense oligonucleotide
  modified_base 1: mod_base = OTHER; note = bicyclic nucleic acid (BNA)
  source 1..15: mol_type = other RNA
aagatggcatttcta

SEQ ID NO: 1787 - RNA, 14 nt, synthetic construct
  misc_feature 1..14: note = Description of Artificial Sequence: Synthetic Antisense oligonucleotide
  modified_base 1: mod_base = OTHER; note = bicyclic nucleic acid (BNA)
  source 1..14: mol_type = other RNA
aagatggcatttct

SEQ ID NO: 1788 - RNA, 13 nt, synthetic construct
  misc_feature 1..13: note = Description of Artificial Sequence: Synthetic Antisense oligonucleotide
  modified_base 1: mod_base = OTHER; note = bicyclic nucleic acid (BNA)
  source 1..13: mol_type = other RNA
aagatggcatttc

SEQ ID NO: 1789 - RNA, 12 nt, synthetic construct
  misc_feature 1..12: note = Description of Artificial Sequence: Synthetic Antisense oligonucleotide
  modified_base 1: mod_base = OTHER; note = bicyclic nucleic acid (BNA)
  source 1..12: mol_type = other RNA
aagatggcattt

SEQ ID NO: 1790 - RNA, 11 nt, synthetic construct
  misc_feature 1..11: note = Description of Artificial Sequence: Synthetic Antisense oligonucleotide
  modified_base 1: mod_base = OTHER; note = bicyclic nucleic acid (BNA)
  source 1..11: mol_type = other RNA
aagatggcatt

SEQ ID NO: 1791 - RNA, 10 nt, synthetic construct
  misc_feature 1..10: note = Description of Artificial Sequence: Synthetic Antisense oligonucleotide
  modified_base 1: mod_base = OTHER; note = bicyclic nucleic acid (BNA)
  source 1..10: mol_type = other RNA
aagatggcat

SEQ ID NO: 1792-1793 - skipped (2 entries)

SEQ ID NO: 1794 - RNA, 15 nt, synthetic construct
  misc_feature 1..15: note = Description of Artificial Sequence: Synthetic Antisense oligonucleotide
  modified_base 1: mod_base = OTHER; note = bicyclic nucleic acid (BNA)
  source 1..15: mol_type = other RNA
agatggcatttctag

SEQ ID NO: 1795 - RNA, 14 nt, synthetic construct
  misc_feature 1..14: note = Description of Artificial Sequence: Synthetic Antisense oligonucleotide
  modified_base 1: mod_base = OTHER; note = bicyclic nucleic acid (BNA)
  source 1..14: mol_type = other RNA
agatggcatttcta

SEQ ID NO: 1796 - RNA, 13 nt, synthetic construct
  misc_feature 1..13: note = Description of Artificial Sequence: Synthetic Antisense oligonucleotide
  modified_base 1: mod_base = OTHER; note = bicyclic nucleic acid (BNA)
  source 1..13: mol_type = other RNA
agatggcatttct

SEQ ID NO: 1797 - RNA, 12 nt, synthetic construct
  misc_feature 1..12: note = Description of Artificial Sequence: Synthetic Antisense oligonucleotide
  modified_base 1: mod_base = OTHER; note = bicyclic nucleic acid (BNA)
  source 1..12: mol_type = other RNA
agatggcatttc

SEQ ID NO: 1798 - RNA, 11 nt, synthetic construct
  misc_feature 1..11: note = Description of Artificial Sequence: Synthetic Antisense oligonucleotide
  modified_base 1: mod_base = OTHER; note = bicyclic nucleic acid (BNA)
  source 1..11: mol_type = other RNA
agatggcattt

SEQ ID NO: 1799 - RNA, 10 nt, synthetic construct
  misc_feature 1..10: note = Description of Artificial Sequence: Synthetic Antisense oligonucleotide
  modified_base 1: mod_base = OTHER; note = bicyclic nucleic acid (BNA)
  source 1..10: mol_type = other RNA
agatggcatt

SEQ ID NO: 1800-1801 - skipped (2 entries)

SEQ ID NO: 1802 - RNA, 30 nt, synthetic construct; identical to SEQ ID NO: 287
  misc_feature 1..30: note = Description of Artificial Sequence: Synthetic Antisense oligonucleotide
  modified_base 1: mod_base = OTHER; note = bicyclic nucleic acid (BNA)
  source 1..30: mol_type = other RNA

SEQ ID NO: 1803 - RNA, 29 nt, synthetic construct
  misc_feature 1..29: note = Description of Artificial Sequence: Synthetic Antisense oligonucleotide
  modified_base 1: mod_base = OTHER; note = bicyclic nucleic acid (BNA)
  source 1..29: mol_type = other RNA
ctccaacatcaaggaagatggcatttcta

SEQ ID NO: 1804 - RNA, 28 nt, synthetic construct
  misc_feature 1..28: note = Description of Artificial Sequence: Synthetic Antisense oligonucleotide
  modified_base 1: mod_base = OTHER; note = bicyclic nucleic acid (BNA)
  source 1..28: mol_type = other RNA
ctccaacatcaaggaagatggcatttct

SEQ ID NO: 1805 - RNA, 27 nt, synthetic construct
  misc_feature 1..27: note = Description of Artificial Sequence: Synthetic Antisense oligonucleotide
  modified_base 1: mod_base = OTHER; note = bicyclic nucleic acid (BNA)
  source 1..27: mol_type = other RNA
ctccaacatcaaggaagatggcatttc

SEQ ID NO: 1806 - RNA, 26 nt, synthetic construct
  misc_feature 1..26: note = Description of Artificial Sequence: Synthetic Antisense oligonucleotide
  modified_base 1: mod_base = OTHER; note = bicyclic nucleic acid (BNA)
  source 1..26: mol_type = other RNA
ctccaacatcaaggaagatggcattt

SEQ ID NO: 1807 - RNA, 25 nt, synthetic construct
  misc_feature 1..25: note = Description of Artificial Sequence: Synthetic Antisense oligonucleotide
  modified_base 1: mod_base = OTHER; note = bicyclic nucleic acid (BNA)
  source 1..25: mol_type = other RNA
ctccaacatcaaggaagatggcatt

SEQ ID NO: 1808 - RNA, 24 nt, synthetic construct
  misc_feature 1..24: note = Description of Artificial Sequence: Synthetic Antisense oligonucleotide
  modified_base 1: mod_base = OTHER; note = bicyclic nucleic acid (BNA)
  source 1..24: mol_type = other RNA
ctccaacatcaaggaagatggcat

SEQ ID NO: 1809 - RNA, 23 nt, synthetic construct
  misc_feature 1..23: note = Description of Artificial Sequence: Synthetic Antisense oligonucleotide
  modified_base 1: mod_base = OTHER; note = bicyclic nucleic acid (BNA)
  source 1..23: mol_type = other RNA
ctccaacatcaaggaagatggca

SEQ ID NO: 1810 - RNA, 22 nt, synthetic construct
  misc_feature 1..22: note = Description of Artificial Sequence: Synthetic Antisense oligonucleotide
  modified_base 1: mod_base = OTHER; note = bicyclic nucleic acid (BNA)
  source 1..22: mol_type = other RNA
ctccaacatcaaggaagatggc

SEQ ID NO: 1811 - RNA, 21 nt, synthetic construct
  misc_feature 1..21: note = Description of Artificial Sequence: Synthetic Antisense oligonucleotide
  modified_base 1: mod_base = OTHER; note = bicyclic nucleic acid (BNA)
  source 1..21: mol_type = other RNA
ctccaacatcaaggaagatgg

SEQ ID NO: 1812 - RNA, 20 nt, synthetic construct
  misc_feature 1..20: note = Description of Artificial Sequence: Synthetic Antisense oligonucleotide
  modified_base 1: mod_base = OTHER; note = bicyclic nucleic acid (BNA)
  source 1..20: mol_type = other RNA
ctccaacatcaaggaagatg

SEQ ID NO: 1813 - RNA, 19 nt, synthetic construct
  misc_feature 1..19: note = Description of Artificial Sequence: Synthetic Antisense oligonucleotide
  modified_base 1: mod_base = OTHER; note = bicyclic nucleic acid (BNA)
  source 1..19: mol_type = other RNA
ctccaacatcaaggaagat

SEQ ID NO: 1814 - RNA, 18 nt, synthetic construct
  misc_feature 1..18: note = Description of Artificial Sequence: Synthetic Antisense oligonucleotide
  modified_base 1: mod_base = OTHER; note = bicyclic nucleic acid (BNA)
  source 1..18: mol_type = other RNA
ctccaacatcaaggaaga

SEQ ID NO: 1815 - RNA, 17 nt, synthetic construct
  misc_feature 1..17: note = Description of Artificial Sequence: Synthetic Antisense oligonucleotide
  modified_base 1: mod_base = OTHER; note = bicyclic nucleic acid (BNA)
  source 1..17: mol_type = other RNA
ctccaacatcaaggaag

SEQ ID NO: 1816 - DNA, 29 bp, synthetic construct
  misc_feature 1..29: note = Description of Artificial Sequence: Synthetic Antisense oligonucleotide
  misc_feature 1..29: note = Original Sequence: tccaacaucaaggaagauggcauuucuag
  modified_base 1: mod_base = OTHER; note = bicyclic nucleic acid (BNA)
  source 1..29: mol_type = other DNA
  modified_base 8: mod_base = OTHER; note = Uracil
  modified_base 18: mod_base = OTHER; note = Uracil
  modified_base 23: mod_base = OTHER; note = Uracil
  modified_base 24: mod_base = OTHER; note = Uracil
  modified_base 25: mod_base = OTHER; note = Uracil
  modified_base 27: mod_base = OTHER; note = Uracil
tccaacatcaaggaagatggcatttctag

SEQ ID NO: 1817 - DNA, 28 bp, synthetic construct
  misc_feature 1..28: note = Description of Artificial Sequence: Synthetic Antisense oligonucleotide
  misc_feature 1..28: note = Original Sequence: tccaacaucaaggaagauggcauuucua
  modified_base 1: mod_base = OTHER; note = bicyclic nucleic acid (BNA)
  source 1..28: mol_type = other DNA
  modified_base 8: mod_base = OTHER; note = Uracil
  modified_base 18: mod_base = OTHER; note = Uracil
  modified_base 23: mod_base = OTHER; note = Uracil
  modified_base 24: mod_base = OTHER; note = Uracil
  modified_base 25: mod_base = OTHER; note = Uracil
  modified_base 27: mod_base = OTHER; note = Uracil
tccaacatcaaggaagatggcatttcta

SEQ ID NO: 1818 - DNA, 27 bp, synthetic construct
  misc_feature 1..27: note = Description of Artificial Sequence: Synthetic Antisense oligonucleotide
  misc_feature 1..27: note = Original Sequence: tccaacaucaaggaagauggcauuucu
  modified_base 1: mod_base = OTHER; note = bicyclic nucleic acid (BNA)
  source 1..27: mol_type = other DNA
  modified_base 8: mod_base = OTHER; note = Uracil
  modified_base 18: mod_base = OTHER; note = Uracil
  modified_base 23: mod_base = OTHER; note = Uracil
  modified_base 24: mod_base = OTHER; note = Uracil
  modified_base 25: mod_base = OTHER; note = Uracil
  modified_base 27: mod_base = OTHER; note = Uracil
tccaacatcaaggaagatggcatttct

SEQ ID NO: 1819 - DNA, 26 bp, synthetic construct
  misc_feature 1..26: note = Description of Artificial Sequence: Synthetic Antisense oligonucleotide
  misc_feature 1..26: note = Original Sequence: tccaacaucaaggaagauggcauuuc
  modified_base 1: mod_base = OTHER; note = bicyclic nucleic acid (BNA)
  source 1..26: mol_type = other DNA
  modified_base 8: mod_base = OTHER; note = Uracil
  modified_base 18: mod_base = OTHER; note = Uracil
  modified_base 23: mod_base = OTHER; note = Uracil
  modified_base 24: mod_base = OTHER; note = Uracil
  modified_base 25: mod_base = OTHER; note = Uracil
tccaacatcaaggaagatggcatttc

SEQ ID NO: 1820 - DNA, 25 bp, synthetic construct
  misc_feature 1..25: note = Description of Artificial Sequence: Synthetic Antisense oligonucleotide
  misc_feature 1..25: note = Original Sequence: tccaacaucaaggaagauggcauuu
  modified_base 1: mod_base = OTHER; note = bicyclic nucleic acid (BNA)
  source 1..25: mol_type = other DNA
  modified_base 8: mod_base = OTHER; note = Uracil
  modified_base 18: mod_base = OTHER; note = Uracil
  modified_base 23: mod_base = OTHER; note = Uracil
  modified_base 24: mod_base = OTHER; note = Uracil
  modified_base 25: mod_base = OTHER; note = Uracil
tccaacatcaaggaagatggcattt

SEQ ID NO: 1821 - DNA, 24 bp, synthetic construct
  misc_feature 1..24: note = Description of Artificial Sequence: Synthetic Antisense oligonucleotide
  misc_feature 1..24: note = Original Sequence: tccaacaucaaggaagauggcauu
  modified_base 1: mod_base = OTHER; note = bicyclic nucleic acid (BNA)
  source 1..24: mol_type = other DNA
  modified_base 8: mod_base = OTHER; note = Uracil
  modified_base 18: mod_base = OTHER; note = Uracil
  modified_base 23: mod_base = OTHER; note = Uracil
  modified_base 24: mod_base = OTHER; note = Uracil
tccaacatcaaggaagatggcatt

SEQ ID NO: 1822 - DNA, 23 bp, synthetic construct
  misc_feature 1..23: note = Description of Artificial Sequence: Synthetic Antisense oligonucleotide
  misc_feature 1..23: note = Original Sequence: tccaacaucaaggaagauggcau
  modified_base 1: mod_base = OTHER; note = bicyclic nucleic acid (BNA)
  source 1..23: mol_type = other DNA
  modified_base 8: mod_base = OTHER; note = Uracil
  modified_base 18: mod_base = OTHER; note = Uracil
  modified_base 23: mod_base = OTHER; note = Uracil
tccaacatcaaggaagatggcat

SEQ ID NO: 1823 - DNA, 22 bp, synthetic construct
  misc_feature 1..22: note = Description of Artificial Sequence: Synthetic Antisense oligonucleotide
  misc_feature 1..22: note = Original Sequence: tccaacaucaaggaagauggca
  modified_base 1: mod_base = OTHER; note = bicyclic nucleic acid (BNA)
  source 1..22: mol_type = other DNA
  modified_base 8: mod_base = OTHER; note = Uracil
  modified_base 18: mod_base = OTHER; note = Uracil
tccaacatcaaggaagatggca

SEQ ID NO: 1824 - DNA, 21 bp, synthetic construct
  misc_feature 1..21: note = Description of Artificial Sequence: Synthetic Antisense oligonucleotide
  misc_feature 1..21: note = Original Sequence: tccaacaucaaggaagauggc
  modified_base 1: mod_base = OTHER; note = bicyclic nucleic acid (BNA)
  source 1..21: mol_type = other DNA
  modified_base 8: mod_base = OTHER; note = Uracil
  modified_base 18: mod_base = OTHER; note = Uracil
tccaacatcaaggaagatggc

SEQ ID NO: 1825 - DNA, 20 bp, synthetic construct
  misc_feature 1..20: note = Description of Artificial Sequence: Synthetic Antisense oligonucleotide
  misc_feature 1..20: note = Original Sequence: tccaacaucaaggaagaugg
  modified_base 1: mod_base = OTHER; note = bicyclic nucleic acid (BNA)
  source 1..20: mol_type = other DNA
  modified_base 8: mod_base = OTHER; note = Uracil
  modified_base 18: mod_base = OTHER; note = Uracil
tccaacatcaaggaagatgg

SEQ ID NO: 1826 - DNA, 19 bp, synthetic construct
  misc_feature 1..19: note = Description of Artificial Sequence: Synthetic Antisense oligonucleotide
  misc_feature 1..19: note = Original Sequence: tccaacaucaaggaagaug
  modified_base 1: mod_base = OTHER; note = bicyclic nucleic acid (BNA)
  source 1..19: mol_type = other DNA
  modified_base 8: mod_base = OTHER; note = Uracil
  modified_base 18: mod_base = OTHER; note = Uracil
tccaacatcaaggaagatg

SEQ ID NO: 1827 - DNA, 18 bp, synthetic construct
  misc_feature 1..18: note = Description of Artificial Sequence: Synthetic Antisense oligonucleotide
  misc_feature 1..18: note = Original Sequence: tccaacaucaaggaagau
  modified_base 1: mod_base = OTHER; note = bicyclic nucleic acid (BNA)
  source 1..18: mol_type = other DNA
  modified_base 8: mod_base = OTHER; note = Uracil
  modified_base 18: mod_base = OTHER; note = Uracil
tccaacatcaaggaagat

SEQ ID NO: 1828 - DNA, 17 bp, synthetic construct
  misc_feature 1..17: note = Description of Artificial Sequence: Synthetic Antisense oligonucleotide
  misc_feature 1..17: note = Original Sequence: tccaacaucaaggaaga
  modified_base 1: mod_base = OTHER; note = bicyclic nucleic acid (BNA)
  source 1..17: mol_type = other DNA
  modified_base 8: mod_base = OTHER; note = Uracil
tccaacatcaaggaaga

SEQ ID NO: 1829 - DNA, 16 bp, synthetic construct
  misc_feature 1..16: note = Description of Artificial Sequence: Synthetic Antisense oligonucleotide
  misc_feature 1..16: note = Original Sequence: tccaacaucaaggaag
  modified_base 1: mod_base = OTHER; note = bicyclic nucleic acid (BNA)
  source 1..16: mol_type = other DNA
  modified_base 8: mod_base = OTHER; note = Uracil
tccaacatcaaggaag

SEQ ID NO: 1830 - RNA, 28 nt, synthetic construct
  misc_feature 1..28: note = Description of Artificial Sequence: Synthetic Antisense oligonucleotide
  modified_base 1: mod_base = OTHER; note = bicyclic nucleic acid (BNA)
  source 1..28: mol_type = other RNA
ccaacatcaaggaagatggcatttctag

SEQ ID NO: 1831 - RNA, 27 nt, synthetic construct
  misc_feature 1..27: note = Description of Artificial Sequence: Synthetic Antisense oligonucleotide
  modified_base 1: mod_base = OTHER; note = bicyclic nucleic acid (BNA)
  source 1..27: mol_type = other RNA
ccaacatcaaggaagatggcatttcta

SEQ ID NO: 1832 - RNA, 26 nt, synthetic construct
  misc_feature 1..26: note = Description of Artificial Sequence: Synthetic Antisense oligonucleotide
  modified_base 1: mod_base = OTHER; note = bicyclic nucleic acid (BNA)
  source 1..26: mol_type = other RNA
ccaacatcaaggaagatggcatttct

SEQ ID NO: 1833 - RNA, 25 nt, synthetic construct
  misc_feature 1..25: note = Description of Artificial Sequence: Synthetic Antisense oligonucleotide
  modified_base 1: mod_base = OTHER; note = bicyclic nucleic acid (BNA)
  source 1..25: mol_type = other RNA
ccaacatcaaggaagatggcatttc

SEQ ID NO: 1834 - RNA, 24 nt, synthetic construct
  misc_feature 1..24: note = Description of Artificial Sequence: Synthetic Antisense oligonucleotide
  modified_base 1: mod_base = OTHER; note = bicyclic nucleic acid (BNA)
  source 1..24: mol_type = other RNA
ccaacatcaaggaagatggcattt

SEQ ID NO: 1835 - RNA, 23 nt, synthetic construct
  misc_feature 1..23: note = Description of Artificial Sequence: Synthetic Antisense oligonucleotide
  modified_base 1: mod_base = OTHER; note = bicyclic nucleic acid (BNA)
  source 1..23: mol_type = other RNA
ccaacatcaaggaagatggcatt

SEQ ID NO: 1836 - RNA, 22 nt, synthetic construct
  misc_feature 1..22: note = Description of Artificial Sequence: Synthetic Antisense oligonucleotide
  modified_base 1: mod_base = OTHER; note = bicyclic nucleic acid (BNA)
  source 1..22: mol_type = other RNA
ccaacatcaaggaagatggcat

SEQ ID NO: 1837 - RNA, 21 nt, synthetic construct
  misc_feature 1..21: note = Description of Artificial Sequence: Synthetic Antisense oligonucleotide
  modified_base 1: mod_base = OTHER; note = bicyclic nucleic acid (BNA)
  source 1..21: mol_type = other RNA
ccaacatcaaggaagatggca

SEQ ID NO: 1838 - RNA, 20 nt, synthetic construct
  misc_feature 1..20: note = Description of Artificial Sequence: Synthetic Antisense oligonucleotide
  modified_base 1: mod_base = OTHER; note = bicyclic nucleic acid (BNA)
  source 1..20: mol_type = other RNA
ccaacatcaaggaagatggc

SEQ ID NO: 1839 - RNA, 19 nt, synthetic construct
  misc_feature 1..19: note = Description of Artificial Sequence: Synthetic Antisense oligonucleotide
  modified_base 1: mod_base = OTHER; note = bicyclic nucleic acid (BNA)
  source 1..19: mol_type = other RNA
ccaacatcaaggaagatgg

SEQ ID NO: 1840 - RNA, 18 nt, synthetic construct
  misc_feature 1..18: note = Description of Artificial Sequence: Synthetic Antisense oligonucleotide
  modified_base 1: mod_base = OTHER; note = bicyclic nucleic acid (BNA)
  source 1..18: mol_type = other RNA
ccaacatcaaggaagatg

SEQ ID NO: 1841 - RNA, 17 nt, synthetic construct
  misc_feature 1..17: note = Description of Artificial Sequence: Synthetic Antisense oligonucleotide
  modified_base 1: mod_base = OTHER; note = bicyclic nucleic acid (BNA)
  source 1..17: mol_type = other RNA
ccaacatcaaggaagat

SEQ ID NO: 1842 - RNA, 16 nt, synthetic construct
  misc_feature 1..16: note = Description of Artificial Sequence: Synthetic Antisense oligonucleotide
  modified_base 1: mod_base = OTHER; note = bicyclic nucleic acid (BNA)
  source 1..16: mol_type = other RNA
ccaacatcaaggaaga

SEQ ID NO: 1843 - RNA, 15 nt, synthetic construct
  misc_feature 1..15: note = Description of Artificial Sequence: Synthetic Antisense oligonucleotide
  modified_base 1: mod_base = OTHER; note = bicyclic nucleic acid (BNA)
  source 1..15: mol_type = other RNA
ccaacatcaaggaag

SEQ ID NO: 1844 - RNA, 27 nt, synthetic construct
  misc_feature 1..27: note = Description of Artificial Sequence: Synthetic Antisense oligonucleotide
  modified_base 1: mod_base = OTHER; note = bicyclic nucleic acid (BNA)
  source 1..27: mol_type = other RNA
caacatcaaggaagatggcatttctag

SEQ ID NO: 1845 - RNA, 26 nt, synthetic construct
  misc_feature 1..26: note = Description of Artificial Sequence: Synthetic Antisense oligonucleotide
  modified_base 1: mod_base = OTHER; note = bicyclic nucleic acid (BNA)
  source 1..26: mol_type = other RNA
caacatcaaggaagatggcatttcta

SEQ ID NO: 1846 - RNA, 25 nt, synthetic construct
  misc_feature 1..25: note = Description of Artificial Sequence: Synthetic Antisense oligonucleotide
  modified_base 1: mod_base = OTHER; note = bicyclic nucleic acid (BNA)
  source 1..25: mol_type = other RNA
caacatcaaggaagatggcatttct

SEQ ID NO: 1847 - RNA, 24 nt, synthetic construct
  misc_feature 1..24: note = Description of Artificial Sequence: Synthetic Antisense oligonucleotide
  modified_base 1: mod_base = OTHER; note = bicyclic nucleic acid (BNA)
  source 1..24: mol_type = other RNA
caacatcaaggaagatggcatttc

SEQ ID NO: 1848 - RNA, 23 nt, synthetic construct
  misc_feature 1..23: note = Description of Artificial Sequence: Synthetic Antisense oligonucleotide
  modified_base 1: mod_base = OTHER; note = bicyclic nucleic acid (BNA)
  source 1..23: mol_type = other RNA
caacatcaaggaagatggcattt

SEQ ID NO: 1849 - RNA, 22 nt, synthetic construct
  misc_feature 1..22: note = Description of Artificial Sequence: Synthetic Antisense oligonucleotide
  modified_base 1: mod_base = OTHER; note = bicyclic nucleic acid (BNA)
  source 1..22: mol_type = other RNA
caacatcaaggaagatggcatt

SEQ ID NO: 1850 - RNA, 21 nt, synthetic construct
  misc_feature 1..21: note = Description of Artificial Sequence: Synthetic Antisense oligonucleotide
  modified_base 1: mod_base = OTHER; note = bicyclic nucleic acid (BNA)
  source 1..21: mol_type = other RNA
caacatcaaggaagatggcat

SEQ ID NO: 1851 - RNA, 20 nt, synthetic construct
  misc_feature 1..20: note = Description of Artificial Sequence: Synthetic Antisense oligonucleotide
  modified_base 1: mod_base = OTHER; note = bicyclic nucleic acid (BNA)
  source 1..20: mol_type = other RNA
caacatcaaggaagatggca

SEQ ID NO: 1852 - RNA, 19 nt, synthetic construct
  misc_feature 1..19: note = Description of Artificial Sequence: Synthetic Antisense oligonucleotide
  modified_base 1: mod_base = OTHER; note = bicyclic nucleic acid (BNA)
  source 1..19: mol_type = other RNA
caacatcaaggaagatggc

SEQ ID NO: 1853 - RNA, 18 nt, synthetic construct
  misc_feature 1..18: note = Description of Artificial Sequence: Synthetic Antisense oligonucleotide
  modified_base 1: mod_base = OTHER; note = bicyclic nucleic acid (BNA)
  source 1..18: mol_type = other RNA
caacatcaaggaagatgg

SEQ ID NO: 1854 - RNA, 17 nt, synthetic construct
  misc_feature 1..17: note = Description of Artificial Sequence: Synthetic Antisense oligonucleotide
  modified_base 1: mod_base = OTHER; note = bicyclic nucleic acid (BNA)
  source 1..17: mol_type = other RNA
caacatcaaggaagatg

SEQ ID NO: 1855 - RNA, 16 nt, synthetic construct
  misc_feature 1..16: note = Description of Artificial Sequence: Synthetic Antisense oligonucleotide
  modified_base 1: mod_base = OTHER; note = bicyclic nucleic acid (BNA)
  source 1..16: mol_type = other RNA
caacatcaaggaagat

SEQ ID NO: 1856 - RNA, 15 nt, synthetic construct
  misc_feature 1..15: note = Description of Artificial Sequence: Synthetic Antisense oligonucleotide
  modified_base 1: mod_base = OTHER; note = bicyclic nucleic acid (BNA)
  source 1..15: mol_type = other RNA
caacatcaaggaaga

SEQ ID NO: 1857 - RNA, 14 nt, synthetic construct
  misc_feature 1..14: note = Description of Artificial Sequence: Synthetic Antisense oligonucleotide
  modified_base 1: mod_base = OTHER; note = bicyclic nucleic acid (BNA)
  source 1..14: mol_type = other RNA
caacatcaaggaag

SEQ ID NO: 1858 - RNA, 26 nt, synthetic construct
  misc_feature 1..26: note = Description of Artificial Sequence: Synthetic Antisense oligonucleotide
  modified_base 1: mod_base = OTHER; note = bicyclic nucleic acid (BNA)
  source 1..26: mol_type = other RNA
aacatcaaggaagatggcatttctag

SEQ ID NO: 1859 - RNA, 25 nt, synthetic construct
  misc_feature 1..25: note = Description of Artificial Sequence: Synthetic Antisense oligonucleotide
  modified_base 1: mod_base = OTHER; note = bicyclic nucleic acid (BNA)
  source 1..25: mol_type = other RNA
aacatcaaggaagatggcatttcta

SEQ ID NO: 1860 - RNA, 24 nt, synthetic construct
  misc_feature 1..24: note = Description of Artificial Sequence: Synthetic Antisense oligonucleotide
  modified_base 1: mod_base = OTHER; note = bicyclic nucleic acid (BNA)
  source 1..24: mol_type = other RNA
aacatcaaggaagatggcatttct

SEQ ID NO: 1861 - RNA, 23 nt, synthetic construct
  misc_feature 1..23: note = Description of Artificial Sequence: Synthetic Antisense oligonucleotide
  modified_base 1: mod_base = OTHER; note = bicyclic nucleic acid (BNA)
  source 1..23: mol_type = other RNA
aacatcaaggaagatggcatttc

SEQ ID NO: 1862 - RNA, 22 nt, synthetic construct
  misc_feature 1..22: note = Description of Artificial Sequence: Synthetic Antisense oligonucleotide
  modified_base 1: mod_base = OTHER; note = bicyclic nucleic acid (BNA)
  source 1..22: mol_type = other RNA
aacatcaaggaagatggcattt

SEQ ID NO: 1863 - RNA, 21 nt, synthetic construct
  misc_feature 1..21: note = Description of Artificial Sequence: Synthetic Antisense oligonucleotide
  modified_base 1: mod_base = OTHER; note = bicyclic nucleic acid (BNA)
  source 1..21: mol_type = other RNA
aacatcaaggaagatggcatt

SEQ ID NO: 1864 - RNA, 20 nt, synthetic construct
  misc_feature 1..20: note = Description of Artificial Sequence: Synthetic Antisense oligonucleotide
  modified_base 1: mod_base = OTHER; note = bicyclic nucleic acid (BNA)
  source 1..20: mol_type = other RNA
aacatcaaggaagatggcat

SEQ ID NO: 1865 - RNA, 19 nt, synthetic construct
  misc_feature 1..19: note = Description of Artificial Sequence: Synthetic Antisense oligonucleotide
  modified_base 1: mod_base = OTHER; note = bicyclic nucleic acid (BNA)
  source 1..19: mol_type = other RNA
aacatcaaggaagatggca

SEQ ID NO: 1866 - RNA, 18 nt, synthetic construct
  misc_feature 1..18: note = Description of Artificial Sequence: Synthetic Antisense oligonucleotide
  modified_base 1: mod_base = OTHER; note = bicyclic nucleic acid (BNA)
  source 1..18: mol_type = other RNA
aacatcaaggaagatggc

SEQ ID NO: 1867 - RNA, 17 nt, synthetic construct
  misc_feature 1..17: note = Description of Artificial Sequence: Synthetic Antisense oligonucleotide
  modified_base 1: mod_base = OTHER; note = bicyclic nucleic acid (BNA)
  source 1..17: mol_type = other RNA
aacatcaaggaagatgg

SEQ ID NO: 1868 - RNA, 16 nt, synthetic construct
  misc_feature 1..16: note = Description of Artificial Sequence: Synthetic Antisense oligonucleotide
  modified_base 1: mod_base = OTHER; note = bicyclic nucleic acid (BNA)
  source 1..16: mol_type = other RNA
aacatcaaggaagatg

SEQ ID NO: 1869 - RNA, 15 nt, synthetic construct
  misc_feature 1..15: note = Description of Artificial Sequence: Synthetic Antisense oligonucleotide
  modified_base 1: mod_base = OTHER; note = bicyclic nucleic acid (BNA)
  source 1..15: mol_type = other RNA
aacatcaaggaagat

SEQ ID NO: 1870 - RNA, 14 nt, synthetic construct
  misc_feature 1..14: note = Description of Artificial Sequence: Synthetic Antisense oligonucleotide
  modified_base 1: mod_base = OTHER; note = bicyclic nucleic acid (BNA)
  source 1..14: mol_type = other RNA
aacatcaaggaaga

SEQ ID NO: 1871 - RNA, 13 nt, synthetic construct
  misc_feature 1..13: note = Description of Artificial Sequence: Synthetic Antisense oligonucleotide
  modified_base 1: mod_base = OTHER; note = bicyclic nucleic acid (BNA)
  source 1..13: mol_type = other RNA
aacatcaaggaag

SEQ ID NO: 1872 - RNA, 25 nt, synthetic construct
  misc_feature 1..25: note = Description of Artificial Sequence: Synthetic Antisense oligonucleotide
  modified_base 1: mod_base = OTHER; note = bicyclic nucleic acid (BNA)
  source 1..25: mol_type = other RNA
acatcaaggaagatggcatttctag

SEQ ID NO: 1873 - RNA, 24 nt, synthetic construct
  misc_feature 1..24: note = Description of Artificial Sequence: Synthetic Antisense oligonucleotide
  modified_base 1: mod_base = OTHER; note = bicyclic nucleic acid (BNA)
  source 1..24: mol_type = other RNA
acatcaaggaagatggcatttcta

SEQ ID NO: 1874 - RNA, 23 nt, synthetic construct
  misc_feature 1..23: note = Description of Artificial Sequence: Synthetic Antisense oligonucleotide
  modified_base 1: mod_base = OTHER; note = bicyclic nucleic acid (BNA)
  source 1..23: mol_type = other RNA
acatcaaggaagatggcatttct

SEQ ID NO: 1875 - RNA, 22 nt, synthetic construct
  misc_feature 1..22: note = Description of Artificial Sequence: Synthetic Antisense oligonucleotide
  modified_base 1: mod_base = OTHER; note = bicyclic nucleic acid (BNA)
  source 1..22: mol_type = other RNA
acatcaaggaagatggcatttc

SEQ ID NO: 1876 - RNA, 21 nt, synthetic construct
  misc_feature 1..21: note = Description of Artificial Sequence: Synthetic Antisense oligonucleotide
  modified_base 1: mod_base = OTHER; note = bicyclic nucleic acid (BNA)
  source 1..21: mol_type = other RNA
acatcaaggaagatggcattt

SEQ ID NO: 1877 - RNA, 20 nt, synthetic construct
  misc_feature 1..20: note = Description of Artificial Sequence: Synthetic Antisense oligonucleotide
  modified_base 1: mod_base = OTHER; note = bicyclic nucleic acid (BNA)
  source 1..20: mol_type = other RNA
acatcaaggaagatggcatt

SEQ ID NO: 1878 - RNA, 19 nt, synthetic construct
  misc_feature 1..19: note = Description of Artificial Sequence: Synthetic Antisense oligonucleotide
  modified_base 1: mod_base = OTHER; note = bicyclic nucleic acid (BNA)
  source 1..19: mol_type = other RNA
acatcaaggaagatggcat

SEQ ID NO: 1879 - RNA, 18 nt, synthetic construct
  misc_feature 1..18: note = Description of Artificial Sequence: Synthetic Antisense oligonucleotide
  modified_base 1: mod_base = OTHER; note = bicyclic nucleic acid (BNA)
  source 1..18: mol_type = other RNA
acatcaaggaagatggca

SEQ ID NO: 1880 - RNA, 17 nt, synthetic construct
  misc_feature 1..17: note = Description of Artificial Sequence: Synthetic Antisense oligonucleotide
  modified_base 1: mod_base = OTHER; note = bicyclic nucleic acid (BNA)
  source 1..17: mol_type = other RNA
acatcaaggaagatggc

SEQ ID NO: 1881 - RNA, 16 nt, synthetic construct
  misc_feature 1..16: note = Description of Artificial Sequence: Synthetic Antisense oligonucleotide
  modified_base 1: mod_base = OTHER; note = bicyclic nucleic acid (BNA)
  source 1..16: mol_type = other RNA
acatcaaggaagatgg

SEQ ID NO: 1882 - RNA, 15 nt, synthetic construct
  misc_feature 1..15: note = Description of Artificial Sequence: Synthetic Antisense oligonucleotide
  modified_base 1: mod_base = OTHER; note = bicyclic nucleic acid (BNA)
  source 1..15: mol_type = other RNA
acatcaaggaagatg

SEQ ID NO: 1883 - RNA, 14 nt, synthetic construct
  misc_feature 1..14: note = Description of Artificial Sequence: Synthetic Antisense oligonucleotide
  modified_base 1: mod_base = OTHER; note = bicyclic nucleic acid (BNA)
  source 1..14: mol_type = other RNA
acatcaaggaagat

SEQ ID NO: 1884 - RNA, 13 nt, synthetic construct
  misc_feature 1..13: note = Description of Artificial Sequence: Synthetic Antisense oligonucleotide
  modified_base 1: mod_base = OTHER; note = bicyclic nucleic acid (BNA)
  source 1..13: mol_type = other RNA
acatcaaggaaga

SEQ ID NO: 1885 - RNA, 12 nt, synthetic construct
  misc_feature 1..12: note = Description of Artificial Sequence: Synthetic Antisense oligonucleotide
  modified_base 1: mod_base = OTHER; note = bicyclic nucleic acid (BNA)
  source 1..12: mol_type = other RNA
acatcaaggaag

SEQ ID NO: 1886 - RNA, 24 nt, synthetic construct
  misc_feature 1..24: note = Description of Artificial Sequence: Synthetic Antisense oligonucleotide
  modified_base 1: mod_base = OTHER; note = bicyclic nucleic acid (BNA)
  source 1..24: mol_type = other RNA
catcaaggaagatggcatttctag

SEQ ID NO: 1887 - RNA, 23 nt, synthetic construct
  misc_feature 1..23: note = Description of Artificial Sequence: Synthetic Antisense oligonucleotide
  modified_base 1: mod_base = OTHER; note = bicyclic nucleic acid (BNA)
  source 1..23: mol_type = other RNA
catcaaggaagatggcatttcta

SEQ ID NO: 1888 - RNA, 22 nt, synthetic construct
  misc_feature 1..22: note = Description of Artificial Sequence: Synthetic Antisense oligonucleotide
  modified_base 1: mod_base = OTHER; note = bicyclic nucleic acid (BNA)
  source 1..22: mol_type = other RNA
catcaaggaagatggcatttct

SEQ ID NO: 1889 - RNA, 21 nt, synthetic construct
  misc_feature 1..21: note = Description of Artificial Sequence: Synthetic Antisense oligonucleotide
  modified_base 1: mod_base = OTHER; note = bicyclic nucleic acid (BNA)
  source 1..21: mol_type = other RNA
catcaaggaagatggcatttc

SEQ ID NO: 1890 - RNA, 20 nt, synthetic construct
  misc_feature 1..20: note = Description of Artificial Sequence: Synthetic Antisense oligonucleotide
  modified_base 1: mod_base = OTHER; note = bicyclic nucleic acid (BNA)
  source 1..20: mol_type = other RNA
catcaaggaagatggcattt

SEQ ID NO: 1891 - RNA, 19 nt, synthetic construct
  misc_feature 1..19: note = Description of Artificial Sequence: Synthetic Antisense oligonucleotide
  modified_base 1: mod_base = OTHER; note = bicyclic nucleic acid (BNA)
  source 1..19: mol_type = other RNA
catcaaggaagatggcatt

SEQ ID NO: 1892 - RNA, 18 nt, synthetic construct
  misc_feature 1..18: note = Description of Artificial Sequence: Synthetic Antisense oligonucleotide
  modified_base 1: mod_base = OTHER; note = bicyclic nucleic acid (BNA)
  source 1..18: mol_type = other RNA
catcaaggaagatggcat

SEQ ID NO: 1893 - RNA, 17 nt, synthetic construct
  misc_feature 1..17: note = Description of Artificial Sequence: Synthetic Antisense oligonucleotide
  modified_base 1: mod_base = OTHER; note = bicyclic nucleic acid (BNA)
  source 1..17: mol_type = other RNA
catcaaggaagatggca

SEQ ID NO: 1894 - RNA, 16 nt, synthetic construct
  misc_feature 1..16: note = Description of Artificial Sequence: Synthetic Antisense oligonucleotide
  modified_base 1: mod_base = OTHER; note = bicyclic nucleic acid (BNA)
  source 1..16: mol_type = other RNA
catcaaggaagatggc

SEQ ID NO: 1895 - RNA, 15 nt, synthetic construct
  misc_feature 1..15: note = Description of Artificial Sequence: Synthetic Antisense oligonucleotide
  modified_base 1: mod_base = OTHER; note = bicyclic nucleic acid (BNA)
  source 1..15: mol_type = other RNA
catcaaggaagatgg

SEQ ID NO: 1896 - RNA, 14 nt, synthetic construct
  misc_feature 1..14: note = Description of Artificial Sequence: Synthetic Antisense oligonucleotide
  modified_base 1: mod_base = OTHER; note = bicyclic nucleic acid (BNA)
  source 1..14: mol_type = other RNA
catcaaggaagatg

SEQ ID NO: 1897 - RNA, 13 nt, synthetic construct
  misc_feature 1..13: note = Description of Artificial Sequence: Synthetic Antisense oligonucleotide
  modified_base 1: mod_base = OTHER; note = bicyclic nucleic acid (BNA)
  source 1..13: mol_type = other RNA
catcaaggaagat

SEQ ID NO: 1898 - RNA, 12 nt, synthetic construct
  misc_feature 1..12: note = Description of Artificial Sequence: Synthetic Antisense oligonucleotide
  modified_base 1: mod_base = OTHER; note = bicyclic nucleic acid (BNA)
  source 1..12: mol_type = other RNA
catcaaggaaga

SEQ ID NO: 1899 - RNA, 11 nt, synthetic construct
  misc_feature 1..11: note = Description of Artificial Sequence: Synthetic Antisense oligonucleotide
  modified_base 1: mod_base = OTHER; note = bicyclic nucleic acid (BNA)
  source 1..11: mol_type = other RNA
catcaaggaag

SEQ ID NO: 1900 - RNA, 23 nt, synthetic construct
  misc_feature 1..23: note = Description of Artificial Sequence: Synthetic Antisense oligonucleotide
  modified_base 1: mod_base = OTHER; note = bicyclic nucleic acid (BNA)
  source 1..23: mol_type = other RNA
atcaaggaagatggcatttctag

SEQ ID NO: 1901 - RNA, 22 nt, synthetic construct
  misc_feature 1..22: note = Description of Artificial Sequence: Synthetic Antisense oligonucleotide
  modified_base 1: mod_base = OTHER; note = bicyclic nucleic acid (BNA)
  source 1..22: mol_type = other RNA
atcaaggaagatggcatttcta

SEQ ID NO: 1902 - RNA, 21 nt, synthetic construct
  misc_feature 1..21: note = Description of Artificial Sequence: Synthetic Antisense oligonucleotide
  modified_base 1: mod_base = OTHER; note = bicyclic nucleic acid (BNA)
  source 1..21: mol_type = other RNA
atcaaggaagatggcatttct

SEQ ID NO: 1903 - RNA, 20 nt, synthetic construct
  misc_feature 1..20: note = Description of Artificial Sequence: Synthetic Antisense oligonucleotide
  modified_base 1: mod_base = OTHER; note = bicyclic nucleic acid (BNA)
  source 1..20: mol_type = other RNA
atcaaggaagatggcatttc

SEQ ID NO: 1904 - RNA, 19 nt, synthetic construct
  misc_feature 1..19: note = Description of Artificial Sequence: Synthetic Antisense oligonucleotide
  modified_base 1: mod_base = OTHER; note = bicyclic nucleic acid (BNA)
  source 1..19: mol_type = other RNA
atcaaggaagatggcattt

SEQ ID NO: 1905 - RNA, 18 nt, synthetic construct
  misc_feature 1..18: note = Description of Artificial Sequence: Synthetic Antisense oligonucleotide
  modified_base 1: mod_base = OTHER; note = bicyclic nucleic acid (BNA)
  source 1..18: mol_type = other RNA
atcaaggaagatggcatt

SEQ ID NO: 1906 - RNA, 17 nt, synthetic construct
  misc_feature 1..17: note = Description of Artificial Sequence: Synthetic Antisense oligonucleotide
  modified_base 1: mod_base = OTHER; note = bicyclic nucleic acid (BNA)
  source 1..17: mol_type = other RNA
atcaaggaagatggcat

SEQ ID NO: 1907 - RNA, 16 nt, synthetic construct
  misc_feature 1..16: note = Description of Artificial Sequence: Synthetic Antisense oligonucleotide
  modified_base 1: mod_base = OTHER; note = bicyclic nucleic acid (BNA)
  source 1..16: mol_type = other RNA
atcaaggaagatggca

SEQ ID NO: 1908 - RNA, 15 nt, synthetic construct
  misc_feature 1..15: note = Description of Artificial Sequence: Synthetic Antisense oligonucleotide
  modified_base 1: mod_base = OTHER; note = bicyclic nucleic acid (BNA)
  source 1..15: mol_type = other RNA
atcaaggaagatggc

SEQ ID NO: 1909 - RNA, 14 nt, synthetic construct
  misc_feature 1..14: note = Description of Artificial Sequence: Synthetic Antisense oligonucleotide
  modified_base 1: mod_base = OTHER; note = bicyclic nucleic acid (BNA)
  source 1..14: mol_type = other RNA
atcaaggaagatgg

SEQ ID NO: 1910 - RNA, 13 nt, synthetic construct
  misc_feature 1..13: note = Description of Artificial Sequence: Synthetic Antisense oligonucleotide
  modified_base 1: mod_base = OTHER; note = bicyclic nucleic acid (BNA)
  source 1..13: mol_type = other RNA
atcaaggaagatg

SEQ ID NO: 1911 - RNA, 12 nt, synthetic construct
  misc_feature 1..12: note = Description of Artificial Sequence: Synthetic Antisense oligonucleotide
  modified_base 1: mod_base = OTHER; note = bicyclic nucleic acid (BNA)
  source 1..12: mol_type = other RNA
atcaaggaagat

SEQ ID NO: 1912 - RNA, 11 nt, synthetic construct
  misc_feature 1..11: note = Description of Artificial Sequence: Synthetic Antisense oligonucleotide
  modified_base 1: mod_base = OTHER; note = bicyclic nucleic acid (BNA)
  source 1..11: mol_type = other RNA
atcaaggaaga

SEQ ID NO: 1913 - RNA, 10 nt, synthetic construct
  misc_feature 1..10: note = Description of Artificial Sequence: Synthetic Antisense oligonucleotide
  modified_base 1: mod_base = OTHER; note = bicyclic nucleic acid (BNA)
  source 1..10: mol_type = other RNA
atcaaggaag

SEQ ID NO: 1914 - RNA, 18 nt, synthetic construct
  misc_feature 1..18: note = Description of Artificial Sequence: Synthetic Antisense oligonucleotide
  modified_base 18: mod_base = OTHER; note = bicyclic nucleic acid (BNA)
  source 1..18: mol_type = other RNA
ggtaagttctgtccaagc

SEQ ID NO: 1915 - RNA, 18 nt, synthetic construct
  misc_feature 1..18: note = Description of Artificial Sequence: Synthetic Antisense oligonucleotide
  modified_base 18: mod_base = OTHER; note = bicyclic nucleic acid (BNA)
  source 1..18: mol_type = other RNA
gtaagttctgtccaagcc

SEQ ID NO: 1916 - RNA, 18 nt, synthetic construct
  misc_feature 1..18: note = Description of Artificial Sequence: Synthetic Antisense oligonucleotide
  modified_base 18: mod_base = OTHER; note = bicyclic nucleic acid (BNA)
  source 1..18: mol_type = other RNA
agtcggtaagttctgtcc

SEQ ID NO: 1917 - RNA, 18 nt, synthetic construct
  misc_feature 1..18: note = Description of Artificial Sequence: Synthetic Antisense oligonucleotide
  modified_base 18: mod_base = OTHER; note = bicyclic nucleic acid (BNA)
  source 1..18: mol_type = other RNA
ctgtccaagcccggttga

SEQ ID NO: 1918 - RNA, 15 nt, synthetic construct
  misc_feature 1..15: note = Description of Artificial Sequence: Synthetic Antisense oligonucleotide
  modified_base 15: mod_base = OTHER; note = bicyclic nucleic acid (BNA)
  source 1..15: mol_type = other RNA
taagttctgtccaag

SEQ ID NO: 1919 - RNA, 20 nt, synthetic construct
  misc_feature 1..20: note = Description of Artificial Sequence: Synthetic Antisense oligonucleotide
  modified_base 20: mod_base = OTHER; note = bicyclic nucleic acid (BNA)
  source 1..20: mol_type = other RNA
ttctgtccaagcccggttga

SEQ ID NO: 1920 - RNA, 19 nt, synthetic construct
  misc_feature 1..19: note = Description of Artificial Sequence: Synthetic Antisense oligonucleotide
  modified_base 19: mod_base = OTHER; note = bicyclic nucleic acid (BNA)
  source 1..19: mol_type = other RNA
ttctgtccaagcccggttg

SEQ ID NO: 1921 - DNA, 18 bp, synthetic construct
  misc_feature 1..18: note = Description of Artificial Sequence: Synthetic Antisense oligonucleotide
  misc_feature 1..18: note = Original Sequence: uucuguccaagcccggut
  modified_base 18: mod_base = OTHER; note = bicyclic nucleic acid (BNA)
  source 1..18: mol_type = other DNA
  modified_base 1: mod_base = OTHER; note = Uracil
  modified_base 2: mod_base = OTHER; note = Uracil
  modified_base 4: mod_base = OTHER; note = Uracil
  modified_base 6: mod_base = OTHER; note = Uracil
  modified_base 17: mod_base = OTHER; note = Uracil
ttctgtccaagcccggtt

SEQ ID NO: 1922 - DNA, 17 bp, synthetic construct
  misc_feature 1..17: note = Description of Artificial Sequence: Synthetic Antisense oligonucleotide
  misc_feature 1..17: note = Original Sequence: uucuguccaagcccggt
  modified_base 17: mod_base = OTHER; note = bicyclic nucleic acid (BNA)
  source 1..17: mol_type = other DNA
  modified_base 1: mod_base = OTHER; note = Uracil
  modified_base 2: mod_base = OTHER; note = Uracil
  modified_base 4: mod_base = OTHER; note = Uracil
  modified_base 6: mod_base = OTHER; note = Uracil
ttctgtccaagcccggt

SEQ ID NO: 1923 - RNA, 16 nt, synthetic construct
  misc_feature 1..16: note = Description of Artificial Sequence: Synthetic Antisense oligonucleotide
  modified_base 16: mod_base = OTHER; note = bicyclic nucleic acid (BNA)
  source 1..16: mol_type = other RNA
ttctgtccaagcccgg

SEQ ID NO: 1924 - RNA, 15 nt, synthetic construct
  misc_feature 1..15: note = Description of Artificial Sequence: Synthetic Antisense oligonucleotide
  modified_base 15: mod_base = OTHER; note = bicyclic nucleic acid (BNA)
  source 1..15: mol_type = other RNA
ttctgtccaagcccg

SEQ ID NO: 1925 - RNA, 14 nt, synthetic construct
  misc_feature 1..14: note = Description of Artificial Sequence: Synthetic Antisense oligonucleotide
  modified_base 14: mod_base = OTHER; note = bicyclic nucleic acid (BNA)
  source 1..14: mol_type = other RNA
ttctgtccaagccc

SEQ ID NO: 1926 - RNA, 13 nt, synthetic construct
  misc_feature 1..13: note = Description of Artificial Sequence: Synthetic Antisense oligonucleotide
  modified_base 13: mod_base = OTHER; note = bicyclic nucleic acid (BNA)
  source 1..13: mol_type = other RNA
ttctgtccaagcc

SEQ ID NO: 1927 - RNA, 12 nt, synthetic construct
  misc_feature 1..12: note = Description of Artificial Sequence: Synthetic Antisense oligonucleotide
  modified_base 12: mod_base = OTHER; note = bicyclic nucleic acid (BNA)
  source 1..12: mol_type = other RNA
ttctgtccaagc

SEQ ID NO: 1928 - RNA, 11 nt, synthetic construct
  misc_feature 1..11: note = Description of Artificial Sequence: Synthetic Antisense oligonucleotide
  modified_base 11: mod_base = OTHER; note = bicyclic nucleic acid (BNA)
  source 1..11: mol_type = other RNA
ttctgtccaag

SEQ ID NO: 1929 - RNA, 10 nt, synthetic construct
  misc_feature 1..10: note = Description of Artificial Sequence: Synthetic Antisense oligonucleotide
  modified_base 10: mod_base = OTHER; note = bicyclic nucleic acid (BNA)
  source 1..10: mol_type = other RNA
ttctgtccaa

SEQ ID NO: 1930-1931 - skipped (2 entries)

SEQ ID NO: 1932 - RNA, 19 nt, synthetic construct
  misc_feature 1..19: note = Description of Artificial Sequence: Synthetic Antisense oligonucleotide
  modified_base 19: mod_base = OTHER; note = bicyclic nucleic acid (BNA)
  source 1..19: mol_type = other RNA
tctgtccaagcccggttga

SEQ ID NO: 1933 - RNA, 18 nt, synthetic construct
  misc_feature 1..18: note = Description of Artificial Sequence: Synthetic Antisense oligonucleotide
  modified_base 18: mod_base = OTHER; note = bicyclic nucleic acid (BNA)
  source 1..18: mol_type = other RNA
tctgtccaagcccggttg

SEQ ID NO: 1934 - DNA, 17 bp, synthetic construct
  misc_feature 1..17: note = Description of Artificial Sequence: Synthetic Antisense oligonucleotide
  misc_feature 1..17: note = Original Sequence: ucuguccaagcccggut
  modified_base 17: mod_base = OTHER; note = bicyclic nucleic acid (BNA)
  source 1..17: mol_type = other DNA
  modified_base 1: mod_base = OTHER; note = Uracil
  modified_base 3: mod_base = OTHER; note = Uracil
  modified_base 5: mod_base = OTHER; note = Uracil
  modified_base 16: mod_base = OTHER; note = Uracil
tctgtccaagcccggtt

SEQ ID NO: 1935 - DNA, 16 bp, synthetic construct
  misc_feature 1..16: note = Description of Artificial Sequence: Synthetic Antisense oligonucleotide
  misc_feature 1..16: note = Original Sequence: ucuguccaagcccggt
  modified_base 16: mod_base = OTHER; note = bicyclic nucleic acid (BNA)
  source 1..16: mol_type = other DNA
  modified_base 1: mod_base = OTHER; note = Uracil
  modified_base 3: mod_base = OTHER; note = Uracil
  modified_base 5: mod_base = OTHER; note = Uracil
tctgtccaagcccggt

SEQ ID NO: 1936 - RNA, 15 nt, synthetic construct
  misc_feature 1..15: note = Description of Artificial Sequence: Synthetic Antisense oligonucleotide
  modified_base 15: mod_base = OTHER; note = bicyclic nucleic acid (BNA)
  source 1..15: mol_type = other RNA
tctgtccaagcccgg

SEQ ID NO: 1937 - RNA, 14 nt, synthetic construct
  misc_feature 1..14: note = Description of Artificial Sequence: Synthetic Antisense oligonucleotide
  modified_base 14: mod_base = OTHER; note = bicyclic nucleic acid (BNA)
  source 1..14: mol_type = other RNA
tctgtccaagcccg

SEQ ID NO: 1938 - RNA, 13 nt, synthetic construct
  misc_feature 1..13: note = Description of Artificial Sequence: Synthetic Antisense oligonucleotide
  modified_base 13: mod_base = OTHER; note = bicyclic nucleic acid (BNA)
  source 1..13: mol_type = other RNA
tctgtccaagccc

SEQ ID NO: 1939 - RNA, 12 nt, synthetic construct
  misc_feature 1..12: note = Description of Artificial Sequence: Synthetic Antisense oligonucleotide
  modified_base 12: mod_base = OTHER; note = bicyclic nucleic acid (BNA)
  source 1..12: mol_type = other RNA
tctgtccaagcc

SEQ ID NO: 1940 - RNA, 11 nt, synthetic construct
  misc_feature 1..11: note = Description of Artificial Sequence: Synthetic Antisense oligonucleotide
  modified_base 11: mod_base = OTHER; note = bicyclic nucleic acid (BNA)
  source 1..11: mol_type = other RNA
tctgtccaagc

SEQ ID NO: 1941 - RNA, 10 nt, synthetic construct
  misc_feature 1..10: note = Description of Artificial Sequence: Synthetic Antisense oligonucleotide
  modified_base 10: mod_base = OTHER; note = bicyclic nucleic acid (BNA)
  source 1..10: mol_type = other RNA
tctgtccaag

SEQ ID NO: 1942-1943 - skipped (2 entries)

SEQ ID NO: 1944 - RNA, 17 nt, synthetic construct
  misc_feature 1..17: note = Description of Artificial Sequence: Synthetic Antisense oligonucleotide
  modified_base 17: mod_base = OTHER; note = bicyclic nucleic acid (BNA)
  source 1..17: mol_type = other RNA
ctgtccaagcccggttg

SEQ ID NO: 1945 - DNA, 16 bp, synthetic construct
  misc_feature 1..16: note = Description of Artificial Sequence: Synthetic Antisense oligonucleotide
  misc_feature 1..16: note = Original Sequence: cuguccaagcccggut
  modified_base 16: mod_base = OTHER; note = bicyclic nucleic acid (BNA)
  source 1..16: mol_type = other DNA
  modified_base 2: mod_base = OTHER; note = Uracil
  modified_base 4: mod_base = OTHER; note = Uracil
  modified_base 15: mod_base = OTHER; note = Uracil
ctgtccaagcccggtt

SEQ ID NO: 1946 - DNA, 15 bp, synthetic construct
  misc_feature 1..15: note = Description of Artificial Sequence: Synthetic Antisense oligonucleotide
  misc_feature 1..15: note = Original Sequence: cuguccaagcccggt
  modified_base 15: mod_base = OTHER; note = bicyclic nucleic acid (BNA)
  source 1..15: mol_type = other DNA
  modified_base 2: mod_base = OTHER; note = Uracil
  modified_base 4: mod_base = OTHER; note = Uracil
ctgtccaagcccggt

SEQ ID NO: 1947 - RNA, 14 nt, synthetic construct
  misc_feature 1..14: note = Description of Artificial Sequence: Synthetic Antisense oligonucleotide
  modified_base 14: mod_base = OTHER; note = bicyclic nucleic acid (BNA)
  source 1..14: mol_type = other RNA
ctgtccaagcccgg

SEQ ID NO: 1948 - RNA, 13 nt, synthetic construct
  misc_feature 1..13: note = Description of Artificial Sequence: Synthetic Antisense oligonucleotide
  modified_base 13: mod_base = OTHER; note = bicyclic nucleic acid (BNA)
  source 1..13: mol_type = other RNA
ctgtccaagcccg

SEQ ID NO: 1949 - RNA, 12 nt, synthetic construct
  misc_feature 1..12: note = Description of Artificial Sequence: Synthetic Antisense oligonucleotide
  modified_base 12: mod_base = OTHER; note = bicyclic nucleic acid (BNA)
  source 1..12: mol_type = other RNA
ctgtccaagccc

SEQ ID NO: 1950 - RNA, 11 nt, synthetic construct
  misc_feature 1..11: note = Description of Artificial Sequence: Synthetic Antisense oligonucleotide
  modified_base 11: mod_base = OTHER; note = bicyclic nucleic acid (BNA)
  source 1..11: mol_type = other RNA
ctgtccaagcc

SEQ ID NO: 1951 - RNA, 10 nt, synthetic construct
  misc_feature 1..10: note = Description of Artificial Sequence: Synthetic Antisense oligonucleotide
  modified_base 10: mod_base = OTHER; note = bicyclic nucleic acid (BNA)
  source 1..10: mol_type = other RNA
ctgtccaagc

SEQ ID NO: 1952-1953 - skipped (2 entries)

SEQ ID NO: 1954 - RNA, 20 nt, synthetic construct
  misc_feature 1..20: note = Description of Artificial Sequence: Synthetic Antisense oligonucleotide
  modified_base 20: mod_base = OTHER; note = bicyclic nucleic acid (BNA)
  source 1..20: mol_type = other RNA
gttctgtccaagcccggttg

SEQ ID NO: 1955 - DNA, 19 bp, synthetic construct
  misc_feature 1..19: note = Description of Artificial Sequence: Synthetic Antisense oligonucleotide
  misc_feature 1..19: note = Original Sequence: guucuguccaagcccggut
  modified_base 19: mod_base = OTHER; note = bicyclic nucleic acid (BNA)
  source 1..19: mol_type = other DNA
  modified_base 2: mod_base = OTHER; note = Uracil
  modified_base 3: mod_base = OTHER; note = Uracil
  modified_base 5: mod_base = OTHER; note = Uracil
  modified_base 7: mod_base = OTHER; note = Uracil
  modified_base 18: mod_base = OTHER; note = Uracil
gttctgtccaagcccggtt

SEQ ID NO: 1956 - DNA, 18 bp, synthetic construct
  misc_feature 1..18: note = Description of Artificial Sequence: Synthetic Antisense oligonucleotide
  misc_feature 1..18: note = Original Sequence: guucuguccaagcccggt
  modified_base 18: mod_base = OTHER; note = bicyclic nucleic acid (BNA)
  source 1..18: mol_type = other DNA
  modified_base 2: mod_base = OTHER; note = Uracil
  modified_base 3: mod_base = OTHER; note = Uracil
  modified_base 5: mod_base = OTHER; note = Uracil
  modified_base 7: mod_base = OTHER; note = Uracil
gttctgtccaagcccggt

SEQ ID NO: 1957 - RNA, 17 nt, synthetic construct
  misc_feature 1..17: note = Description of Artificial Sequence: Synthetic Antisense oligonucleotide
  modified_base 17: mod_base = OTHER; note = bicyclic nucleic acid (BNA)
  source 1..17: mol_type = other RNA
gttctgtccaagcccgg

SEQ ID NO: 1958 - RNA, 16 nt, synthetic construct
  misc_feature 1..16: note = Description of Artificial Sequence: Synthetic Antisense oligonucleotide
  modified_base 16: mod_base = OTHER; note = bicyclic nucleic acid (BNA)
  source 1..16: mol_type = other RNA
gttctgtccaagcccg

SEQ ID NO: 1959 - RNA, 15 nt, synthetic construct
  misc_feature 1..15: note = Description of Artificial Sequence: Synthetic Antisense oligonucleotide
  modified_base 15: mod_base = OTHER; note = bicyclic nucleic acid (BNA)
  source 1..15: mol_type = other RNA
gttctgtccaagccc

SEQ ID NO: 1960 - RNA, 14 nt, synthetic construct
  misc_feature 1..14: note = Description of Artificial Sequence: Synthetic Antisense oligonucleotide
  modified_base 14: mod_base = OTHER; note = bicyclic nucleic acid (BNA)
  source 1..14: mol_type = other RNA
gttctgtccaagcc

SEQ ID NO: 1961 - RNA, 13 nt, synthetic construct
  misc_feature 1..13: note = Description of Artificial Sequence: Synthetic Antisense oligonucleotide
  modified_base 13: mod_base = OTHER; note = bicyclic nucleic acid (BNA)
  source 1..13: mol_type = other RNA
gttctgtccaagc

SEQ ID NO: 1962 - RNA, 12 nt, synthetic construct
  misc_feature 1..12: note = Description of Artificial Sequence: Synthetic Antisense oligonucleotide
  modified_base 12: mod_base = OTHER; note = bicyclic nucleic acid (BNA)
  source 1..12: mol_type = other RNA
gttctgtccaag

SEQ ID NO: 1963 - RNA, 11 nt, synthetic construct
  misc_feature 1..11: note = Description of Artificial Sequence: Synthetic Antisense oligonucleotide
  modified_base 11: mod_base = OTHER; note = bicyclic nucleic acid (BNA)
  source 1..11: mol_type = other RNA
gttctgtccaa

SEQ ID NO: 1964 - RNA, 10 nt, synthetic construct
  misc_feature 1..10: note = Description of Artificial Sequence: Synthetic Antisense oligonucleotide
  modified_base 10: mod_base = OTHER; note = bicyclic nucleic acid (BNA)
  source 1..10: mol_type = other RNA
gttctgtcca

SEQ ID NO: 1965-1966 - skipped (2 entries)

SEQ ID NO: 1967 - DNA, 20 bp, synthetic construct
  misc_feature 1..20: note = Description of Artificial Sequence: Synthetic Antisense oligonucleotide
  misc_feature 1..20: note = Original Sequence: aguucuguccaagcccggut
  modified_base 20: mod_base = OTHER; note = bicyclic nucleic acid (BNA)
  source 1..20: mol_type = other DNA
  modified_base 3: mod_base = OTHER; note = Uracil
  modified_base 4: mod_base = OTHER; note = Uracil
  modified_base 6: mod_base = OTHER; note = Uracil
  modified_base 8: mod_base = OTHER; note = Uracil
  modified_base 19: mod_base = OTHER; note = Uracil
agttctgtccaagcccggtt

SEQ ID NO: 1968 - DNA, 19 bp, synthetic construct
  misc_feature 1..19: note = Description of Artificial Sequence: Synthetic Antisense oligonucleotide
  misc_feature 1..19: note = Original Sequence: aguucuguccaagcccggt
  modified_base 19: mod_base = OTHER; note = bicyclic nucleic acid (BNA)
  source 1..19: mol_type = other DNA
  modified_base 3: mod_base = OTHER; note = Uracil
  modified_base 4: mod_base = OTHER; note = Uracil
  modified_base 6: mod_base = OTHER; note = Uracil
  modified_base 8: mod_base = OTHER; note = Uracil
agttctgtccaagcccggt

SEQ ID NO: 1969 - RNA, 18 nt, synthetic construct
  misc_feature 1..18: note = Description of Artificial Sequence: Synthetic Antisense oligonucleotide
  modified_base 18: mod_base = OTHER; note = bicyclic nucleic acid (BNA)
  source 1..18: mol_type = other RNA
agttctgtccaagcccgg

SEQ ID NO: 1970 - RNA, 17 nt, synthetic construct
  misc_feature 1..17: note = Description of Artificial Sequence: Synthetic Antisense oligonucleotide
  modified_base 17: mod_base = OTHER; note = bicyclic nucleic acid (BNA)
  source 1..17: mol_type = other RNA
agttctgtccaagcccg

SEQ ID NO: 1971 - RNA, 16 nt, synthetic construct
  misc_feature 1..16: note = Description of Artificial Sequence: Synthetic Antisense oligonucleotide
  modified_base 16: mod_base = OTHER; note = bicyclic nucleic acid (BNA)
  source 1..16: mol_type = other RNA
agttctgtccaagccc

SEQ ID NO: 1972 - RNA, 15 nt, synthetic construct
  misc_feature 1..15: note = Description of Artificial Sequence: Synthetic Antisense oligonucleotide
  modified_base 15: mod_base = OTHER; note = bicyclic nucleic acid (BNA)
  source 1..15: mol_type = other RNA
agttctgtccaagcc

SEQ ID NO: 1973 - RNA, 14 nt, synthetic construct
  misc_feature 1..14: note = Description of Artificial Sequence: Synthetic Antisense oligonucleotide
  modified_base 14: mod_base = OTHER; note = bicyclic nucleic acid (BNA)
  source 1..14: mol_type = other RNA
agttctgtccaagc

SEQ ID NO: 1974 - RNA, 13 nt, synthetic construct
  misc_feature 1..13: note = Description of Artificial Sequence: Synthetic Antisense oligonucleotide
  modified_base 13: mod_base = OTHER; note = bicyclic nucleic acid (BNA)
  source 1..13: mol_type = other RNA
agttctgtccaag

SEQ ID NO: 1975 - RNA, 12 nt, synthetic construct
  misc_feature 1..12: note = Description of Artificial Sequence: Synthetic Antisense oligonucleotide
  modified_base 12: mod_base = OTHER; note = bicyclic nucleic acid (BNA)
  source 1..12: mol_type = other RNA
agttctgtccaa

SEQ ID NO: 1976 - RNA, 11 nt, synthetic construct
  misc_feature 1..11: note = Description of Artificial Sequence: Synthetic Antisense oligonucleotide
  modified_base 11: mod_base = OTHER; note = bicyclic nucleic acid (BNA)
  source 1..11: mol_type = other RNA
agttctgtcca

SEQ ID NO: 1977 - RNA, 10 nt, synthetic construct
  misc_feature 1..10: note = Description of Artificial Sequence: Synthetic Antisense oligonucleotide
  modified_base 10: mod_base = OTHER; note = bicyclic nucleic acid (BNA)
  source 1..10: mol_type = other RNA
agttctgtcc

SEQ ID NO: 1978-1979 - skipped (2 entries)

SEQ ID NO: 1980 - DNA, 20 bp, synthetic construct
  misc_feature 1..20: note = Description of Artificial Sequence: Synthetic Antisense oligonucleotide
  misc_feature 1..20: note = Original Sequence: aaguucuguccaagcccggt
  modified_base 20: mod_base = OTHER; note = bicyclic nucleic acid (BNA)
  source 1..20: mol_type = other DNA
  modified_base 4: mod_base = OTHER; note = Uracil
  modified_base 5: mod_base = OTHER; note = Uracil
  modified_base 7: mod_base = OTHER; note = Uracil
  modified_base 9: mod_base = OTHER; note = Uracil
aagttctgtccaagcccggt

SEQ ID NO: 1981 - RNA, 19 nt, synthetic construct
  misc_feature 1..19: note = Description of Artificial Sequence: Synthetic Antisense oligonucleotide
  modified_base 19: mod_base = OTHER; note = bicyclic nucleic acid (BNA)
  source 1..19: mol_type = other RNA
aagttctgtccaagcccgg

SEQ ID NO: 1982 - RNA, 18 nt, synthetic construct
  misc_feature 1..18: note = Description of Artificial Sequence: Synthetic Antisense oligonucleotide
  modified_base 18: mod_base = OTHER; note = bicyclic nucleic acid (BNA)
  source 1..18: mol_type = other RNA
aagttctgtccaagcccg

SEQ ID NO: 1983 - RNA, 17 nt, synthetic construct
  misc_feature 1..17: note = Description of Artificial Sequence: Synthetic Antisense oligonucleotide
  modified_base 17: mod_base = OTHER; note = bicyclic nucleic acid (BNA)
  source 1..17: mol_type = other RNA
aagttctgtccaagccc

SEQ ID NO: 1984 - RNA, 16 nt, synthetic construct
  misc_feature 1..16: note = Description of Artificial Sequence: Synthetic Antisense oligonucleotide
  modified_base 16: mod_base = OTHER; note = bicyclic nucleic acid (BNA)
  source 1..16: mol_type = other RNA
aagttctgtccaagcc

SEQ ID NO: 1985 - RNA, 15 nt, synthetic construct
  misc_feature 1..15: note = Description of Artificial Sequence: Synthetic Antisense oligonucleotide
  modified_base 15: mod_base = OTHER; note = bicyclic nucleic acid (BNA)
  source 1..15: mol_type = other RNA
aagttctgtccaagc

SEQ ID NO: 1986 - RNA, 14 nt, synthetic construct
  misc_feature 1..14: note = Description of Artificial Sequence: Synthetic Antisense oligonucleotide
  modified_base 14: mod_base = OTHER; note = bicyclic nucleic acid (BNA)
  source 1..14: mol_type = other RNA
aagttctgtccaag

SEQ ID NO: 1987 - RNA, 13 nt, synthetic construct
  misc_feature 1..13: note = Description of Artificial Sequence: Synthetic Antisense oligonucleotide
  modified_base 13: mod_base = OTHER; note = bicyclic nucleic acid (BNA)
  source 1..13: mol_type = other RNA
aagttctgtccaa

SEQ ID NO: 1988 - RNA, 12 nt, synthetic construct
  misc_feature 1..12: note = Description of Artificial Sequence: Synthetic Antisense oligonucleotide
  modified_base 12: mod_base = OTHER; note = bicyclic nucleic acid (BNA)
  source 1..12: mol_type = other RNA
aagttctgtcca

SEQ ID NO: 1989 - RNA, 11 nt, synthetic construct
  misc_feature 1..11: note = Description of Artificial Sequence: Synthetic Antisense oligonucleotide
  modified_base 11: mod_base = OTHER; note = bicyclic nucleic acid (BNA)
  source 1..11: mol_type = other RNA
aagttctgtcc

SEQ ID NO: 1990 - RNA, 10 nt, synthetic construct
  misc_feature 1..10: note = Description of Artificial Sequence: Synthetic Antisense oligonucleotide
  modified_base 10: mod_base = OTHER; note = bicyclic nucleic acid (BNA)
  source 1..10: mol_type = other RNA
aagttctgtc

SEQ ID NO: 1991-1992 - skipped (2 entries)

SEQ ID NO: 1993 - RNA, 20 nt, synthetic construct
  misc_feature 1..20: note = Description of Artificial Sequence: Synthetic Antisense oligonucleotide
  modified_base 20: mod_base = OTHER; note = bicyclic nucleic acid (BNA)
  source 1..20: mol_type = other RNA
taagttctgtccaagcccgg

SEQ ID NO: 1994 - RNA, 19 nt, synthetic construct
  misc_feature 1..19: note = Description of Artificial Sequence: Synthetic Antisense oligonucleotide
  modified_base 19: mod_base = OTHER; note = bicyclic nucleic acid (BNA)
  source 1..19: mol_type = other RNA
taagttctgtccaagcccg

SEQ ID NO: 1995 - RNA, 18 nt, synthetic construct
  misc_feature 1..18: note = Description of Artificial Sequence: Synthetic Antisense oligonucleotide
  modified_base 18: mod_base = OTHER; note = bicyclic nucleic acid (BNA)
  source 1..18: mol_type = other RNA
taagttctgtccaagccc

SEQ ID NO: 1996 - RNA, 17 nt, synthetic construct
  misc_feature 1..17: note = Description of Artificial Sequence: Synthetic Antisense oligonucleotide
  modified_base 17: mod_base = OTHER; note = bicyclic nucleic acid (BNA)
  source 1..17: mol_type = other RNA
taagttctgtccaagcc

SEQ ID NO: 1997 - RNA, 16 nt, synthetic construct
  misc_feature 1..16: note = Description of Artificial Sequence: Synthetic Antisense oligonucleotide
  modified_base 16: mod_base = OTHER; note = bicyclic nucleic acid (BNA)
  source 1..16: mol_type = other RNA
taagttctgtccaagc

SEQ ID NO: 1998 - RNA, 14 nt, synthetic construct
  misc_feature 1..14: note = Description of Artificial Sequence: Synthetic Antisense oligonucleotide
  modified_base 14: mod_base = OTHER; note = bicyclic nucleic acid (BNA)
  source 1..14: mol_type = other RNA
taagttctgtccaa

SEQ ID NO: 1999 - RNA, 13 nt, synthetic construct
  misc_feature 1..13: note = Description of Artificial Sequence: Synthetic Antisense oligonucleotide
  modified_base 13: mod_base = OTHER; note = bicyclic nucleic acid (BNA)
  source 1..13: mol_type = other RNA
taagttctgtcca

SEQ ID NO: 2000 - RNA, 12 nt, synthetic construct
  misc_feature 1..12: note = Description of Artificial Sequence: Synthetic Antisense oligonucleotide
  modified_base 12: mod_base = OTHER; note = bicyclic nucleic acid (BNA)
  source 1..12: mol_type = other RNA
taagttctgtcc

SEQ ID NO: 2001 - RNA, 11 nt, synthetic construct
  misc_feature 1..11: note = Description of Artificial Sequence: Synthetic Antisense oligonucleotide
  modified_base 11: mod_base = OTHER; note = bicyclic nucleic acid (BNA)
  source 1..11: mol_type = other RNA
taagttctgtc

SEQ ID NO: 2002 - DNA, 10 bp, synthetic construct
  misc_feature 1..10: note = Description of Artificial Sequence: Synthetic Antisense oligonucleotide
  misc_feature 1..10: note = Original Sequence: uaaguucugt
  modified_base 10: mod_base = OTHER; note = bicyclic nucleic acid (BNA)
  source 1..10: mol_type = other DNA
  modified_base 1: mod_base = OTHER; note = Uracil
  modified_base 5: mod_base = OTHER; note = Uracil
  modified_base 6: mod_base = OTHER; note = Uracil
  modified_base 8: mod_base = OTHER; note = Uracil
taagttctgt

SEQ ID NO: 2003-2004 - skipped (2 entries)

SEQ ID NO: 2005 - RNA, 20 nt, synthetic construct
  misc_feature 1..20: note = Description of Artificial Sequence: Synthetic Antisense oligonucleotide
  modified_base 20: mod_base = OTHER; note = bicyclic nucleic acid (BNA)
  source 1..20: mol_type = other RNA
gtaagttctgtccaagcccg

SEQ ID NO: 2006 - RNA, 19 nt, synthetic construct
  misc_feature 1..19: note = Description of Artificial Sequence: Synthetic Antisense oligonucleotide
  modified_base 19: mod_base = OTHER; note = bicyclic nucleic acid (BNA)
  source 1..19: mol_type = other RNA
gtaagttctgtccaagccc

SEQ ID NO: 2007 - RNA, 17 nt, synthetic construct
  misc_feature 1..17: note = Description of Artificial Sequence: Synthetic Antisense oligonucleotide
  modified_base 17: mod_base = OTHER; note = bicyclic nucleic acid (BNA)
  source 1..17: mol_type = other RNA
gtaagttctgtccaagc

SEQ ID NO: 2008 - RNA, 16 nt, synthetic construct
  misc_feature 1..16: note = Description of Artificial Sequence: Synthetic Antisense oligonucleotide
  modified_base 16: mod_base = OTHER; note = bicyclic nucleic acid (BNA)
  source 1..16: mol_type = other RNA
gtaagttctgtccaag

SEQ ID NO: 2009 - RNA, 15 nt, synthetic construct
  misc_feature 1..15: note = Description of Artificial Sequence: Synthetic Antisense oligonucleotide
  modified_base 15: mod_base = OTHER; note = bicyclic nucleic acid (BNA)
  source 1..15: mol_type = other RNA
gtaagttctgtccaa

SEQ ID NO: 2010 - RNA, 14 nt, synthetic construct
  misc_feature 1..14: note = Description of Artificial Sequence: Synthetic Antisense oligonucleotide
  modified_base 14: mod_base = OTHER; note = bicyclic nucleic acid (BNA)
  source 1..14: mol_type = other RNA
gtaagttctgtcca

SEQ ID NO: 2011 - RNA, 13 nt, synthetic construct
  misc_feature 1..13: note = Description of Artificial Sequence: Synthetic Antisense oligonucleotide
  modified_base 13: mod_base = OTHER; note = bicyclic nucleic acid (BNA)
  source 1..13: mol_type = other RNA
gtaagttctgtcc

SEQ ID NO: 2012 - RNA, 12 nt, synthetic construct
  misc_feature 1..12: note = Description of Artificial Sequence: Synthetic Antisense oligonucleotide
  modified_base 12: mod_base = OTHER; note = bicyclic nucleic acid (BNA)
  source 1..12: mol_type = other RNA
gtaagttctgtc

SEQ ID NO: 2013 - DNA, 11 bp, synthetic construct
  misc_feature 1..11: note = Description of Artificial Sequence: Synthetic Antisense oligonucleotide
  misc_feature 1..11: note = Original Sequence: guaaguucugt
  modified_base 11: mod_base = OTHER; note = bicyclic nucleic acid (BNA)
  source 1..11: mol_type = other DNA
  modified_base 2: mod_base = OTHER; note = Uracil
  modified_base 6: mod_base = OTHER; note = Uracil
  modified_base 7: mod_base = OTHER; note = Uracil
  modified_base 9: mod_base = OTHER; note = Uracil
gtaagttctgt

SEQ ID NO: 2014 - RNA, 10 nt, synthetic construct
  misc_feature 1..10: note = Description of Artificial Sequence: Synthetic Antisense oligonucleotide
  modified_base 10: mod_base = OTHER; note = bicyclic nucleic acid (BNA)
  source 1..10: mol_type = other RNA
gtaagttctg

SEQ ID NO: 2015-2016 - skipped (2 entries)

SEQ ID NO: 2017 - RNA, 20 nt, synthetic construct
  misc_feature 1..20: note = Description of Artificial Sequence: Synthetic Antisense oligonucleotide
  modified_base 20: mod_base = OTHER; note = bicyclic nucleic acid (BNA)
  source 1..20: mol_type = other RNA
ggtaagttctgtccaagccc

SEQ ID NO: 2018 - RNA, 19 nt, synthetic construct
  misc_feature 1..19: note = Description of Artificial Sequence: Synthetic Antisense oligonucleotide
  modified_base 19: mod_base = OTHER; note = bicyclic nucleic acid (BNA)
  source 1..19: mol_type = other RNA
ggtaagttctgtccaagcc

SEQ ID NO: 2019 - RNA, 17 nt, synthetic construct
  misc_feature 1..17: note = Description of Artificial Sequence: Synthetic Antisense oligonucleotide
  modified_base 17: mod_base = OTHER; note = bicyclic nucleic acid (BNA)
  source 1..17: mol_type = other RNA
ggtaagttctgtccaag

SEQ ID NO: 2020 - RNA, 16 nt, synthetic construct
  misc_feature 1..16: note = Description of Artificial Sequence: Synthetic Antisense oligonucleotide
  modified_base 16: mod_base = OTHER; note = bicyclic nucleic acid (BNA)
  source 1..16: mol_type = other RNA
ggtaagttctgtccaa

SEQ ID NO: 2021 - RNA, 15 nt, synthetic construct
  misc_feature 1..15: note = Description of Artificial Sequence: Synthetic Antisense oligonucleotide
  modified_base 15: mod_base = OTHER; note = bicyclic nucleic acid (BNA)
  source 1..15: mol_type = other RNA
ggtaagttctgtcca

SEQ ID NO: 2022 - RNA, 14 nt, synthetic construct
  misc_feature 1..14: note = Description of Artificial Sequence: Synthetic Antisense oligonucleotide
  modified_base 14: mod_base = OTHER; note = bicyclic nucleic acid (BNA)
  source 1..14: mol_type = other RNA
ggtaagttctgtcc

SEQ ID NO: 2023 - RNA, 13 nt, synthetic construct
  misc_feature 1..13: note = Description of Artificial Sequence: Synthetic Antisense oligonucleotide
  modified_base 13: mod_base = OTHER; note = bicyclic nucleic acid (BNA)
  source 1..13: mol_type = other RNA
ggtaagttctgtc

SEQ ID NO: 2024 - DNA, 12 bp, synthetic construct
  misc_feature 1..12: note = Description of Artificial Sequence: Synthetic Antisense oligonucleotide
  misc_feature 1..12: note = Original Sequence: gguaaguucugt
  modified_base 12: mod_base = OTHER; note = bicyclic nucleic acid (BNA)
  source 1..12: mol_type = other DNA
  modified_base 3: mod_base = OTHER; note = Uracil
  modified_base 7: mod_base = OTHER; note = Uracil
  modified_base 8: mod_base = OTHER; note = Uracil
  modified_base 10: mod_base = OTHER; note = Uracil
ggtaagttctgt

SEQ ID NO: 2025 - RNA, 11 nt, synthetic construct
  misc_feature 1..11: note = Description of Artificial Sequence: Synthetic Antisense oligonucleotide
  modified_base 11: mod_base = OTHER; note = bicyclic nucleic acid (BNA)
  source 1..11: mol_type = other RNA
ggtaagttctg

SEQ ID NO: 2026 - DNA, 10 bp, synthetic construct
  misc_feature 1..10: note = Description of Artificial Sequence: Synthetic Antisense oligonucleotide
  misc_feature 1..10: note = Original Sequence: gguaaguuct
  modified_base 10: mod_base = OTHER; note = bicyclic nucleic acid (BNA)
  source 1..10: mol_type = other DNA
  modified_base 3: mod_base = OTHER; note = Uracil
  modified_base 7: mod_base = OTHER; note = Uracil
  modified_base 8: mod_base = OTHER; note = Uracil
ggtaagttct

SEQ ID NO: 2027-2028 - skipped (2 entries)

SEQ ID NO: 2029 - RNA, 20 nt, synthetic construct
  misc_feature 1..20: note = Description of Artificial Sequence: Synthetic Antisense oligonucleotide
  modified_base 20: mod_base = OTHER; note = bicyclic nucleic acid (BNA)
  source 1..20: mol_type = other RNA
cggtaagttctgtccaagcc

SEQ ID NO: 2030 - RNA, 19 nt, synthetic construct
  misc_feature 1..19: note = Description of Artificial Sequence: Synthetic Antisense oligonucleotide
  modified_base 19: mod_base = OTHER; note = bicyclic nucleic acid (BNA)
  source 1..19: mol_type = other RNA
cggtaagttctgtccaagc

SEQ ID NO: 2031 - RNA, 18 nt, synthetic construct
  misc_feature 1..18: note = Description of Artificial Sequence: Synthetic Antisense oligonucleotide
  modified_base 18: mod_base = OTHER; note = bicyclic nucleic acid (BNA)
  source 1..18: mol_type = other RNA
cggtaagttctgtccaag

SEQ ID NO: 2032 - RNA, 17 nt, synthetic construct
  misc_feature 1..17: note = Description of Artificial Sequence: Synthetic Antisense oligonucleotide
  modified_base 17: mod_base = OTHER; note = bicyclic nucleic acid (BNA)
  source 1..17: mol_type = other RNA
cggtaagttctgtccaa

SEQ ID NO: 2033 - RNA, 16 nt, synthetic construct
  misc_feature 1..16: note = Description of Artificial Sequence: Synthetic Antisense oligonucleotide
  modified_base 16: mod_base = OTHER; note = bicyclic nucleic acid (BNA)
  source 1..16: mol_type = other RNA
cggtaagttctgtcca

SEQ ID NO: 2034 - RNA, 15 nt, synthetic construct
  misc_feature 1..15: note = Description of Artificial Sequence: Synthetic Antisense oligonucleotide
  modified_base 15: mod_base = OTHER; note = bicyclic nucleic acid (BNA)
  source 1..15: mol_type = other RNA
cggtaagttctgtcc

SEQ ID NO: 2035 - RNA, 14 nt, synthetic construct
  misc_feature 1..14: note = Description of Artificial Sequence: Synthetic Antisense oligonucleotide
  modified_base 14: mod_base = OTHER; note = bicyclic nucleic acid (BNA)
  source 1..14: mol_type = other RNA
cggtaagttctgtc

SEQ ID NO: 2036 - DNA, 13 bp, synthetic construct
  misc_feature 1..13: note = Description of Artificial Sequence: Synthetic Antisense oligonucleotide
  misc_feature 1..13: note = Original Sequence: cgguaaguucugt
  modified_base 13: mod_base = OTHER; note = bicyclic nucleic acid (BNA)
  source 1..13: mol_type = other DNA
  modified_base 4: mod_base = OTHER; note = Uracil
  modified_base 8: mod_base = OTHER; note = Uracil
  modified_base 9: mod_base = OTHER; note = Uracil
  modified_base 11: mod_base = OTHER; note = Uracil
cggtaagttctgt

SEQ ID NO: 2037 - RNA, 12 nt, synthetic construct
  misc_feature 1..12: note = Description of Artificial Sequence: Synthetic Antisense oligonucleotide
  modified_base 12: mod_base = OTHER; note = bicyclic nucleic acid (BNA)
  source 1..12: mol_type = other RNA
cggtaagttctg

SEQ ID NO: 2038 - DNA, 11 bp, synthetic construct
  misc_feature 1..11: note = Description of Artificial Sequence: Synthetic Antisense oligonucleotide
  misc_feature 1..11: note = Original Sequence: cgguaaguuct
  modified_base 11: mod_base = OTHER; note = bicyclic nucleic acid (BNA)
  source 1..11: mol_type = other DNA
  modified_base 4: mod_base = OTHER; note = Uracil
  modified_base 8: mod_base = OTHER; note = Uracil
  modified_base 9: mod_base = OTHER; note = Uracil
cggtaagttct

SEQ ID NO: 2039 - RNA, 10 nt, synthetic construct
  misc_feature 1..10: note = Description of Artificial Sequence: Synthetic Antisense oligonucleotide
  modified_base 10: mod_base = OTHER; note = bicyclic nucleic acid (BNA)
  source 1..10: mol_type = other RNA
cggtaagttc

SEQ ID NO: 2040-2041 - skipped (2 entries)

SEQ ID NO: 2042 - RNA, 20 nt, synthetic construct
  misc_feature 1..20: note = Description of Artificial Sequence: Synthetic Antisense oligonucleotide
  modified_base 20: mod_base = OTHER; note = bicyclic nucleic acid (BNA)
  source 1..20: mol_type = other RNA
tcggtaagttctgtccaagc

SEQ ID NO: 2043 - RNA, 19 nt, synthetic construct
  misc_feature 1..19: note = Description of Artificial Sequence: Synthetic Antisense oligonucleotide
  modified_base 19: mod_base = OTHER; note = bicyclic nucleic acid (BNA)
  source 1..19: mol_type = other RNA
tcggtaagttctgtccaag

SEQ ID NO: 2044 - RNA, 18 nt, synthetic construct
  misc_feature 1..18: note = Description of Artificial Sequence: Synthetic Antisense oligonucleotide
  modified_base 18: mod_base = OTHER; note = bicyclic nucleic acid (BNA)
  source 1..18: mol_type = other RNA
tcggtaagttctgtccaa

SEQ ID NO: 2045 - RNA, 17 nt, synthetic construct
  misc_feature 1..17: note = Description of Artificial Sequence: Synthetic Antisense oligonucleotide
  modified_base 17: mod_base = OTHER; note = bicyclic nucleic acid (BNA)
  source 1..17: mol_type = other RNA
tcggtaagttctgtcca

SEQ ID NO: 2046 - RNA, 16 nt, synthetic construct
  misc_feature 1..16: note = Description of Artificial Sequence: Synthetic Antisense oligonucleotide
  modified_base 16: mod_base = OTHER; note = bicyclic nucleic acid (BNA)
  source 1..16: mol_type = other RNA
tcggtaagttctgtcc

SEQ ID NO: 2047 - RNA, 15 nt, synthetic construct
  misc_feature 1..15: note = Description of Artificial Sequence: Synthetic Antisense oligonucleotide
  modified_base 15: mod_base = OTHER; note = bicyclic nucleic acid (BNA)
  source 1..15: mol_type = other RNA
tcggtaagttctgtc

SEQ ID NO: 2048 - DNA, 14 bp, synthetic construct
  misc_feature 1..14: note = Description of Artificial Sequence: Synthetic Antisense oligonucleotide
  misc_feature 1..14: note = Original Sequence: ucgguaaguucugt
  modified_base 14: mod_base = OTHER; note = bicyclic nucleic acid (BNA)
  source 1..14: mol_type = other DNA
  modified_base 1: mod_base = OTHER; note = Uracil
  modified_base 5: mod_base = OTHER; note = Uracil
  modified_base 9: mod_base = OTHER; note = Uracil
  modified_base 10: mod_base = OTHER; note = Uracil
  modified_base 12: mod_base = OTHER; note = Uracil
tcggtaagttctgt

SEQ ID NO: 2049 - RNA, 13 nt, synthetic construct
  misc_feature 1..13: note = Description of Artificial Sequence: Synthetic Antisense oligonucleotide
  modified_base 13: mod_base = OTHER; note = bicyclic nucleic acid (BNA)
  source 1..13: mol_type = other RNA
tcggtaagttctg

SEQ ID NO: 2050 - DNA, 12 bp, synthetic construct
  misc_feature 1..12: note = Description of Artificial Sequence: Synthetic Antisense oligonucleotide
  misc_feature 1..12: note = Original Sequence: ucgguaaguuct
  modified_base 12: mod_base = OTHER; note = bicyclic nucleic acid (BNA)
  source 1..12: mol_type = other DNA
  modified_base 1: mod_base = OTHER; note = Uracil
  modified_base 5: mod_base = OTHER; note = Uracil
  modified_base 9: mod_base = OTHER; note = Uracil
  modified_base 10: mod_base = OTHER; note = Uracil
tcggtaagttct

SEQ ID NO: 2051 - RNA, 11 nt, synthetic construct
  misc_feature 1..11: note = Description of Artificial Sequence: Synthetic Antisense oligonucleotide
  modified_base 11: mod_base = OTHER; note = bicyclic nucleic acid (BNA)
  source 1..11: mol_type = other RNA
tcggtaagttc

SEQ ID NO: 2052 - DNA, 10 bp, synthetic construct
  misc_feature 1..10: note = Description of Artificial Sequence: Synthetic Antisense oligonucleotide
  misc_feature 1..10: note = Original Sequence: ucgguaagut
  modified_base 10: mod_base = OTHER; note = bicyclic nucleic acid (BNA)
  source 1..10: mol_type = other DNA
  modified_base 1: mod_base = OTHER; note = Uracil
  modified_base 5: mod_base = OTHER; note = Uracil
  modified_base 9: mod_base = OTHER; note = Uracil
tcggtaagtt

SEQ ID NO: 2053 - skipped

SEQ ID NO: 2054 - RNA, 20 nt, synthetic construct
  misc_feature 1..20: note = Description of Artificial Sequence: Synthetic Antisense oligonucleotide
  modified_base 20: mod_base = OTHER; note = bicyclic nucleic acid (BNA)
  source 1..20: mol_type = other RNA
gtcggtaagttctgtccaag

SEQ ID NO: 2055 - RNA, 19 nt, synthetic construct
  misc_feature 1..19: note = Description of Artificial Sequence: Synthetic Antisense oligonucleotide
  modified_base 19: mod_base = OTHER; note = bicyclic nucleic acid (BNA)
  source 1..19: mol_type = other RNA
gtcggtaagttctgtccaa

SEQ ID NO: 2056 - RNA, 18 nt, synthetic construct
  misc_feature 1..18: note = Description of Artificial Sequence: Synthetic Antisense oligonucleotide
  modified_base 18: mod_base = OTHER; note = bicyclic nucleic acid (BNA)
  source 1..18: mol_type = other RNA
gtcggtaagttctgtcca

SEQ ID NO: 2057 - RNA, 17 nt, synthetic construct
  misc_feature 1..17: note = Description of Artificial Sequence: Synthetic Antisense oligonucleotide
  modified_base 17: mod_base = OTHER; note = bicyclic nucleic acid (BNA)
  source 1..17: mol_type = other RNA
gtcggtaagttctgtcc

SEQ ID NO: 2058 - RNA, 16 nt, synthetic construct
  misc_feature 1..16: note = Description of Artificial Sequence: Synthetic Antisense oligonucleotide
  modified_base 16: mod_base = OTHER; note = bicyclic nucleic acid (BNA)
  source 1..16: mol_type = other RNA
gtcggtaagttctgtc

SEQ ID NO: 2059 - DNA, 15 bp, synthetic construct
  misc_feature 1..15: note = Description of Artificial Sequence: Synthetic Antisense oligonucleotide
  misc_feature 1..15: note = Original Sequence: gucgguaaguucugt
  modified_base 15: mod_base = OTHER; note = bicyclic nucleic acid (BNA)
  source 1..15: mol_type = other DNA
  modified_base 2: mod_base = OTHER; note = Uracil
  modified_base 6: mod_base = OTHER; note = Uracil
  modified_base 10: mod_base = OTHER; note = Uracil
  modified_base 11: mod_base = OTHER; note = Uracil
  modified_base 13: mod_base = OTHER; note = Uracil
gtcggtaagttctgt

SEQ ID NO: 2060 - RNA, 14 nt, synthetic construct
  misc_feature 1..14: note = Description of Artificial Sequence: Synthetic Antisense oligonucleotide
  modified_base 14: mod_base = OTHER; note = bicyclic nucleic acid (BNA)
  source 1..14: mol_type = other RNA
gtcggtaagttctg

SEQ ID NO: 2061 - DNA, 13 bp, synthetic construct
  misc_feature 1..13: note = Description of Artificial Sequence: Synthetic Antisense oligonucleotide
  misc_feature 1..13: note = Original Sequence: gucgguaaguuct
  modified_base 13: mod_base = OTHER; note = bicyclic nucleic acid (BNA)
  source 1..13: mol_type = other DNA
  modified_base 2: mod_base = OTHER; note = Uracil
  modified_base 6: mod_base = OTHER; note = Uracil
  modified_base 10: mod_base = OTHER; note = Uracil
  modified_base 11: mod_base = OTHER; note = Uracil
gtcggtaagttct

SEQ ID NO: 2062 - RNA, 12 nt, synthetic construct
  misc_feature 1..12: note = Description of Artificial Sequence: Synthetic Antisense oligonucleotide
  modified_base 12: mod_base = OTHER; note = bicyclic nucleic acid (BNA)
  source 1..12: mol_type = other RNA
gtcggtaagttc

SEQ ID NO: 2063 - DNA, 11 bp, synthetic construct
  misc_feature 1..11: note = Description of Artificial Sequence: Synthetic Antisense oligonucleotide
  misc_feature 1..11: note = Original Sequence: gucgguaagut
  modified_base 11: mod_base = OTHER; note = bicyclic nucleic acid (BNA)
  source 1..11: mol_type = other DNA
  modified_base 2: mod_base = OTHER; note = Uracil
  modified_base 6: mod_base = OTHER; note = Uracil
  modified_base 10: mod_base = OTHER; note = Uracil
gtcggtaagtt

SEQ ID NO: 2064 - DNA, 10 bp, synthetic construct
  misc_feature 1..10: note = Description of Artificial Sequence: Synthetic Antisense oligonucleotide
  misc_feature 1..10: note = Original Sequence: gucgguaagt
  modified_base 10: mod_base = OTHER; note = bicyclic nucleic acid (BNA)
  source 1..10: mol_type = other DNA
  modified_base 2: mod_base = OTHER; note = Uracil
  modified_base 6: mod_base = OTHER; note = Uracil
gtcggtaagt

SEQ ID NO: 2065 - RNA, 20 nt, synthetic construct
  misc_feature 1..20: note = Description of Artificial Sequence: Synthetic Antisense oligonucleotide
  modified_base 20: mod_base = OTHER; note = bicyclic nucleic acid (BNA)
  source 1..20: mol_type = other RNA
agtcggtaagttctgtccaa

SEQ ID NO: 2066 - RNA, 19 nt, synthetic construct
  misc_feature 1..19: note = Description of Artificial Sequence: Synthetic Antisense oligonucleotide
  modified_base 19: mod_base = OTHER; note = bicyclic nucleic acid (BNA)
  source 1..19: mol_type = other RNA
agtcggtaagttctgtcca

SEQ ID NO: 2067 - RNA, 17 nt, synthetic construct
  misc_feature 1..17: note = Description of Artificial Sequence: Synthetic Antisense oligonucleotide
  modified_base 17: mod_base = OTHER; note = bicyclic nucleic acid (BNA)
  source 1..17: mol_type = other RNA
agtcggtaagttctgtc

SEQ ID NO: 2068 - DNA, 16 bp, synthetic construct
  misc_feature 1..16: note = Description of Artificial Sequence: Synthetic Antisense oligonucleotide
  misc_feature 1..16: note = Original Sequence: agucgguaaguucugt
  modified_base 16: mod_base = OTHER; note = bicyclic nucleic acid (BNA)
  source 1..16: mol_type = other DNA
  modified_base 3: mod_base = OTHER; note = Uracil
  modified_base 7: mod_base = OTHER; note = Uracil
  modified_base 11: mod_base = OTHER; note = Uracil
  modified_base 12: mod_base = OTHER; note = Uracil
  modified_base 14: mod_base = OTHER; note = Uracil
agtcggtaagttctgt

SEQ ID NO: 2069 - RNA, 15 nt, synthetic construct
  misc_feature 1..15: note = Description of Artificial Sequence: Synthetic Antisense oligonucleotide
  modified_base 15: mod_base = OTHER; note = bicyclic nucleic acid (BNA)
  source 1..15: mol_type = other RNA
agtcggtaagttctg

SEQ ID NO: 2070 - DNA, 14 bp, synthetic construct
  misc_feature 1..14: note = Description of Artificial Sequence: Synthetic Antisense oligonucleotide
  misc_feature 1..14: note = Original Sequence: agucgguaaguuct
  modified_base 14: mod_base = OTHER; note = bicyclic nucleic acid (BNA)
  source 1..14: mol_type = other DNA
  modified_base 3: mod_base = OTHER; note = Uracil
  modified_base 7: mod_base = OTHER; note = Uracil
  modified_base 11: mod_base = OTHER; note = Uracil
  modified_base 12: mod_base = OTHER; note = Uracil
agtcggtaagttct

SEQ ID NO: 2071 - RNA, 13 nt, synthetic construct
  misc_feature 1..13: note = Description of Artificial Sequence: Synthetic Antisense oligonucleotide
  modified_base 13: mod_base = OTHER; note = bicyclic nucleic acid (BNA)
  source 1..13: mol_type = other RNA
agtcggtaagttc

SEQ ID NO: 2072 - DNA, 12 bp, synthetic construct
  misc_feature 1..12: note = Description of Artificial Sequence: Synthetic Antisense oligonucleotide
  misc_feature 1..12: note = Original Sequence: agucgguaagut
  modified_base 12: mod_base = OTHER; note = bicyclic nucleic acid (BNA)
  source 1..12: mol_type = other DNA
  modified_base 3: mod_base = OTHER; note = Uracil
  modified_base 7: mod_base = OTHER; note = Uracil
  modified_base 11: mod_base = OTHER; note = Uracil
agtcggtaagtt

SEQ ID NO: 2073 - DNA, 11 bp, synthetic construct
  misc_feature 1..11: note = Description of Artificial Sequence: Synthetic Antisense oligonucleotide
  misc_feature 1..11: note = Original Sequence: agucgguaagt
  modified_base 11: mod_base = OTHER; note = bicyclic nucleic acid (BNA)
  source 1..11: mol_type = other DNA
  modified_base 3: mod_base = OTHER; note = Uracil
  modified_base 7: mod_base = OTHER; note = Uracil
agtcggtaagt

SEQ ID NO: 2074 - RNA, 20 nt, synthetic construct
  misc_feature 1..20: note = Description of Artificial Sequence: Synthetic Antisense oligonucleotide
  modified_base 20: mod_base = OTHER; note = bicyclic nucleic acid (BNA)
  source 1..20: mol_type = other RNA
cagtcggtaagttctgtcca

SEQ ID NO: 2075 - RNA, 19 nt, synthetic construct
  misc_feature 1..19: note = Description of Artificial Sequence: Synthetic Antisense oligonucleotide
  modified_base 19: mod_base = OTHER; note = bicyclic nucleic acid (BNA)
  source 1..19: mol_type = other RNA
cagtcggtaagttctgtcc

SEQ ID NO: 2076 - RNA, 18 nt, synthetic construct
  misc_feature 1..18: note = Description of Artificial Sequence: Synthetic Antisense oligonucleotide
  modified_base 18: mod_base = OTHER; note = bicyclic nucleic acid (BNA)
  source 1..18: mol_type = other RNA
cagtcggtaagttctgtc

SEQ ID NO: 2077 - DNA, 17 bp, synthetic construct
  misc_feature 1..17: note = Description of Artificial Sequence: Synthetic Antisense oligonucleotide
  misc_feature 1..17: note = Original Sequence: cagucgguaaguucugt
  modified_base 17: mod_base = OTHER; note = bicyclic nucleic acid (BNA)
  source 1..17: mol_type = other DNA
  modified_base 4: mod_base = OTHER; note = Uracil
  modified_base 8: mod_base = OTHER; note = Uracil
  modified_base 12: mod_base = OTHER; note = Uracil
  modified_base 13: mod_base = OTHER; note = Uracil
  modified_base 15: mod_base = OTHER; note = Uracil
cagtcggtaagttctgt

SEQ ID NO: 2078 - RNA, 16 nt, synthetic construct
  misc_feature 1..16: note = Description of Artificial Sequence: Synthetic Antisense oligonucleotide
  modified_base 16: mod_base = OTHER; note = bicyclic nucleic acid (BNA)
  source 1..16: mol_type = other RNA
cagtcggtaagttctg

SEQ ID NO: 2079 - DNA, 15 bp, synthetic construct
  misc_feature 1..15: note = Description of Artificial Sequence: Synthetic Antisense oligonucleotide
  misc_feature 1..15: note = Original Sequence: cagucgguaaguuct
  modified_base 15: mod_base = OTHER; note = bicyclic nucleic acid (BNA)
  source 1..15: mol_type = other DNA
  modified_base 4: mod_base = OTHER; note = Uracil
  modified_base 8: mod_base = OTHER; note = Uracil
  modified_base 12: mod_base = OTHER; note = Uracil
  modified_base 13: mod_base = OTHER; note = Uracil
cagtcggtaagttct

SEQ ID NO: 2080 - RNA, 14 nt, synthetic construct
  misc_feature 1..14: note = Description of Artificial Sequence: Synthetic Antisense oligonucleotide
  modified_base 14: mod_base = OTHER; note = bicyclic nucleic acid (BNA)
  source 1..14: mol_type = other RNA
cagtcggtaagttc

SEQ ID NO: 2081 - DNA, 13 bp, synthetic construct
  misc_feature 1..13: note = Description of Artificial Sequence: Synthetic Antisense oligonucleotide
  misc_feature 1..13: note = Original Sequence: cagucgguaagut
  modified_base 13: mod_base = OTHER; note = bicyclic nucleic acid (BNA)
  source 1..13: mol_type = other DNA
  modified_base 4: mod_base = OTHER; note = Uracil
  modified_base 8: mod_base = OTHER; note = Uracil
  modified_base 12: mod_base = OTHER; note = Uracil
cagtcggtaagtt

SEQ ID NO: 2082 - DNA, 12 bp, synthetic construct
  misc_feature 1..12: note = Description of Artificial Sequence: Synthetic Antisense oligonucleotide
  misc_feature 1..12: note = Original Sequence: cagucgguaagt
  modified_base 12: mod_base = OTHER; note = bicyclic nucleic acid (BNA)
  source 1..12: mol_type = other DNA
  modified_base 4: mod_base = OTHER; note = Uracil
  modified_base 8: mod_base = OTHER; note = Uracil
cagtcggtaagt

SEQ ID NO: 2083 - RNA, 20 nt, synthetic construct
  misc_feature 1..20: note = Description of Artificial Sequence: Synthetic Antisense oligonucleotide
  modified_base 20: mod_base = OTHER; note = bicyclic nucleic acid (BNA)
  source 1..20: mol_type = other RNA
ccagtcggtaagttctgtcc

SEQ ID NO: 2084 - RNA, 19 nt, synthetic construct
  misc_feature 1..19: note = Description of Artificial Sequence: Synthetic Antisense oligonucleotide
  modified_base 19: mod_base = OTHER; note = bicyclic nucleic acid (BNA)
  source 1..19: mol_type = other RNA
ccagtcggtaagttctgtc

SEQ ID NO: 2085 - DNA, 18 bp, synthetic construct
  misc_feature 1..18: note = Description of Artificial Sequence: Synthetic Antisense oligonucleotide
  misc_feature 1..18: note = Original Sequence: ccagucgguaaguucugt
  modified_base 18: mod_base = OTHER; note = bicyclic nucleic acid (BNA)
  source 1..18: mol_type = other DNA
  modified_base 5: mod_base = OTHER; note = Uracil
  modified_base 9: mod_base = OTHER; note = Uracil
  modified_base 13: mod_base = OTHER; note = Uracil
  modified_base 14: mod_base = OTHER; note = Uracil
  modified_base 16: mod_base = OTHER; note = Uracil
ccagtcggtaagttctgt

SEQ ID NO: 2086 - RNA, 17 nt, synthetic construct
  misc_feature 1..17: note = Description of Artificial Sequence: Synthetic Antisense oligonucleotide
  modified_base 17: mod_base = OTHER; note = bicyclic nucleic acid (BNA)
  source 1..17: mol_type = other RNA
ccagtcggtaagttctg

SEQ ID NO: 2087 - DNA, 16 bp, synthetic construct
  misc_feature 1..16: note = Description of Artificial Sequence: Synthetic Antisense oligonucleotide
  misc_feature 1..16: note = Original Sequence: ccagucgguaaguuct
  modified_base 16: mod_base = OTHER; note = bicyclic nucleic acid (BNA)
  source 1..16: mol_type = other DNA
  modified_base 5: mod_base = OTHER; note = Uracil
  modified_base 9: mod_base = OTHER; note = Uracil
  modified_base 13: mod_base = OTHER; note = Uracil
  modified_base 14: mod_base = OTHER; note = Uracil
ccagtcggtaagttct

SEQ ID NO: 2088 - RNA, 15 nt, synthetic construct
  misc_feature 1..15: note = Description of Artificial Sequence: Synthetic Antisense oligonucleotide
  modified_base 15: mod_base = OTHER; note = bicyclic nucleic acid (BNA)
  source 1..15: mol_type = other RNA
ccagtcggtaagttc

SEQ ID NO: 2089 - DNA, 14 bp, synthetic construct
  misc_feature 1..14: note = Description of Artificial Sequence: Synthetic Antisense oligonucleotide
  misc_feature 1..14: note = Original Sequence: ccagucgguaagut
  modified_base 14: mod_base = OTHER; note = bicyclic nucleic acid (BNA)
  source 1..14: mol_type = other DNA
  modified_base 5: mod_base = OTHER; note = Uracil
  modified_base 9: mod_base = OTHER; note = Uracil
  modified_base 13: mod_base = OTHER; note = Uracil
ccagtcggtaagtt

SEQ ID NO: 2090 - DNA, 13 bp, synthetic construct
  misc_feature 1..13: note = Description of Artificial Sequence: Synthetic Antisense oligonucleotide
  misc_feature 1..13: note = Original Sequence: ccagucgguaagt
  modified_base 13: mod_base = OTHER; note = bicyclic nucleic acid (BNA)
  source 1..13: mol_type = other DNA
  modified_base 5: mod_base = OTHER; note = Uracil
  modified_base 9: mod_base = OTHER; note = Uracil
ccagtcggtaagt

SEQ ID NO: 2091 - RNA, 20 nt, synthetic construct
  misc_feature 1..20: note = Description of Artificial Sequence: Synthetic Antisense oligonucleotide
  modified_base 20: mod_base = OTHER; note = bicyclic nucleic acid (BNA)
  source 1..20: mol_type = other RNA
gccagtcggtaagttctgtc

SEQ ID NO: 2092 - DNA, 19 bp, synthetic construct
  misc_feature 1..19: note = Description of Artificial Sequence: Synthetic Antisense oligonucleotide
  misc_feature 1..19: note = Original Sequence: gccagucgguaaguucugt
  modified_base 19: mod_base = OTHER; note = bicyclic nucleic acid (BNA)
  source 1..19: mol_type = other DNA
  modified_base 6: mod_base = OTHER; note = Uracil
  modified_base 10: mod_base = OTHER; note = Uracil
  modified_base 14: mod_base = OTHER; note = Uracil
  modified_base 15: mod_base = OTHER; note = Uracil
  modified_base 17: mod_base = OTHER; note = Uracil
gccagtcggtaagttctgt

SEQ ID NO: 2093 - RNA, 18 nt, synthetic construct
  misc_feature 1..18: note = Description of Artificial Sequence: Synthetic Antisense oligonucleotide
  modified_base 18: mod_base = OTHER; note = bicyclic nucleic acid (BNA)
  source 1..18: mol_type = other RNA
gccagtcggtaagttctg

SEQ ID NO: 2094 - DNA, 17 bp, synthetic construct
  misc_feature 1..17: note = Description of Artificial Sequence: Synthetic Antisense oligonucleotide
  misc_feature 1..17: note = Original Sequence: gccagucgguaaguuct
  modified_base 17: mod_base = OTHER; note = bicyclic nucleic acid (BNA)
  source 1..17: mol_type = other DNA
  modified_base 6: mod_base = OTHER; note = Uracil
  modified_base 10: mod_base = OTHER; note = Uracil
  modified_base 14: mod_base = OTHER; note = Uracil
  modified_base 15: mod_base = OTHER; note = Uracil
gccagtcggtaagttct

SEQ ID NO: 2095 - RNA, 16 nt, synthetic construct
  misc_feature 1..16: note = Description of Artificial Sequence: Synthetic Antisense oligonucleotide
  modified_base 16: mod_base = OTHER; note = bicyclic nucleic acid (BNA)
  source 1..16: mol_type = other RNA
gccagtcggtaagttc

SEQ ID NO: 2096 - DNA, 15 bp, synthetic construct
  misc_feature 1..15: note = Description of Artificial Sequence: Synthetic Antisense oligonucleotide
  misc_feature 1..15: note = Original Sequence: gccagucgguaagut
  modified_base 15: mod_base = OTHER; note = bicyclic nucleic acid (BNA)
  source 1..15: mol_type = other DNA
  modified_base 6: mod_base = OTHER; note = Uracil
  modified_base 10: mod_base = OTHER; note = Uracil
  modified_base 14: mod_base = OTHER; note = Uracil
gccagtcggtaagtt

SEQ ID NO: 2097 - DNA, 14 bp, synthetic construct
  misc_feature 1..14: note = Description of Artificial Sequence: Synthetic Antisense oligonucleotide
  misc_feature 1..14: note = Original Sequence: gccagucgguaagt
  modified_base 14: mod_base = OTHER; note = bicyclic nucleic acid (BNA)
  source 1..14: mol_type = other DNA
  modified_base 6: mod_base = OTHER; note = Uracil
  modified_base 10: mod_base = OTHER; note = Uracil
gccagtcggtaagt

SEQ ID NO: 2098 - DNA, 20 bp, synthetic construct
  misc_feature 1..20: note = Description of Artificial Sequence: Synthetic Antisense oligonucleotide
  misc_feature 1..20: note = Original Sequence: ucaaggaagauggcauuuct
  modified_base 20: mod_base = OTHER; note = bicyclic nucleic acid (BNA)
  source 1..20: mol_type = other DNA
  modified_base 1: mod_base = OTHER; note = Uracil
  modified_base 11: mod_base = OTHER; note = Uracil
  modified_base 16: mod_base = OTHER; note = Uracil
  modified_base 17: mod_base = OTHER; note = Uracil
  modified_base 18: mod_base = OTHER; note = Uracil
tcaaggaagatggcatttct

SEQ ID NO: 2099 - RNA, 22 nt, synthetic construct
  misc_feature 1..22: note = Description of Artificial Sequence: Synthetic Antisense oligonucleotide
  modified_base 22: mod_base = OTHER; note = bicyclic nucleic acid (BNA)
  source 1..22: mol_type = other RNA
tcaaggaagatggcatttctag

SEQ ID NO: 2100 - DNA, 16 bp, synthetic construct
  misc_feature 1..16: note = Description of Artificial Sequence: Synthetic Antisense oligonucleotide
  misc_feature 1..16: note = Original Sequence: ucaaggaagauggcat
  modified_base 16: mod_base = OTHER; note = bicyclic nucleic acid (BNA)
  source 1..16: mol_type = other DNA
  modified_base 1: mod_base = OTHER; note = Uracil
  modified_base 11: mod_base = OTHER; note = Uracil
tcaaggaagatggcat

SEQ ID NO: 2101 - DNA, 15 bp, synthetic construct
  misc_feature 1..15: note = Description of Artificial Sequence: Synthetic Antisense oligonucleotide
  misc_feature 1..15: note = Original Sequence: gaagauggcauuuct
  modified_base 15: mod_base = OTHER; note = bicyclic nucleic acid (BNA)
  source 1..15: mol_type = other DNA
  modified_base 6: mod_base = OTHER; note = Uracil
  modified_base 11: mod_base = OTHER; note = Uracil
  modified_base 12: mod_base = OTHER; note = Uracil
  modified_base 13: mod_base = OTHER; note = Uracil
gaagatggcatttct

SEQ ID NO: 2102 - RNA, 21 nt, synthetic construct
  misc_feature 1..21: note = Description of Artificial Sequence: Synthetic Antisense oligonucleotide
  modified_base 21: mod_base = OTHER; note = bicyclic nucleic acid (BNA)
  source 1..21: mol_type = other RNA
tcaaggaagatggcatttcta

SEQ ID NO: 2103 - RNA, 19 nt, synthetic construct
  misc_feature 1..19: note = Description of Artificial Sequence: Synthetic Antisense oligonucleotide
  modified_base 19: mod_base = OTHER; note = bicyclic nucleic acid (BNA)
  source 1..19: mol_type = other RNA
tcaaggaagatggcatttc

SEQ ID NO: 2104 - DNA, 18 bp, synthetic construct
  misc_feature 1..18: note = Description of Artificial Sequence: Synthetic Antisense oligonucleotide
  misc_feature 1..18: note = Original Sequence: ucaaggaagauggcauut
  modified_base 18: mod_base = OTHER; note = bicyclic nucleic acid (BNA)
  source 1..18: mol_type = other DNA
  modified_base 1: mod_base = OTHER; note = Uracil
  modified_base 11: mod_base = OTHER; note = Uracil
  modified_base 16: mod_base = OTHER; note = Uracil
  modified_base 17: mod_base = OTHER; note = Uracil
tcaaggaagatggcattt

SEQ ID NO: 2105 - DNA, 17 bp, synthetic construct
  misc_feature 1..17: note = Description of Artificial Sequence: Synthetic Antisense oligonucleotide
  misc_feature 1..17: note = Original Sequence: ucaaggaagauggcaut
  modified_base 17: mod_base = OTHER; note = bicyclic nucleic acid (BNA)
  source 1..17: mol_type = other DNA
  modified_base 1: mod_base = OTHER; note = Uracil
  modified_base 11: mod_base = OTHER; note = Uracil
  modified_base 16: mod_base = OTHER; note = Uracil
tcaaggaagatggcatt

SEQ ID NO: 2106 - RNA, 15 nt, synthetic construct
  misc_feature 1..15: note = Description of Artificial Sequence: Synthetic Antisense oligonucleotide
  modified_base 15: mod_base = OTHER; note = bicyclic nucleic acid (BNA)
  source 1..15: mol_type = other RNA
tcaaggaagatggca

SEQ ID NO: 2107 - RNA, 14 nt, synthetic construct
  misc_feature 1..14: note = Description of Artificial Sequence: Synthetic Antisense oligonucleotide
  modified_base 14: mod_base = OTHER; note = bicyclic nucleic acid (BNA)
  source 1..14: mol_type = other RNA
tcaaggaagatggc

SEQ ID NO: 2108 - RNA, 13 nt, synthetic construct
  misc_feature 1..13: note = Description of Artificial Sequence: Synthetic Antisense oligonucleotide
  modified_base 13: mod_base = OTHER; note = bicyclic nucleic acid (BNA)
  source 1..13: mol_type = other RNA
tcaaggaagatgg

SEQ ID NO: 2109 - RNA, 12 nt, synthetic construct
  misc_feature 1..12: note = Description of Artificial Sequence: Synthetic Antisense oligonucleotide
  modified_base 12: mod_base = OTHER; note = bicyclic nucleic acid (BNA)
  source 1..12: mol_type = other RNA
tcaaggaagatg

SEQ ID NO: 2110 - DNA, 11 bp, synthetic construct
  misc_feature 1..11: note = Description of Artificial Sequence: Synthetic Antisense oligonucleotide
  misc_feature 1..11: note = Original Sequence: ucaaggaagat
  modified_base 11: mod_base = OTHER; note = bicyclic nucleic acid (BNA)
  source 1..11: mol_type = other DNA
  modified_base 1: mod_base = OTHER; note = Uracil
tcaaggaagat

SEQ ID NO: 2111 - RNA, 10 nt, synthetic construct
  misc_feature 1..10: note = Description of Artificial Sequence: Synthetic Antisense oligonucleotide
  modified_base 10: mod_base = OTHER; note = bicyclic nucleic acid (BNA)
  source 1..10: mol_type = other RNA
tcaaggaaga

SEQ ID NO: 2112 - skipped

SEQ ID NO: 2113 - RNA, 21 nt, synthetic construct
  misc_feature 1..21: note = Description of Artificial Sequence: Synthetic Antisense oligonucleotide
  modified_base 21: mod_base = OTHER; note = bicyclic nucleic acid (BNA)
  source 1..21: mol_type = other RNA
caaggaagatggcatttctag

SEQ ID NO: 2114 - RNA, 20 nt, synthetic construct
  misc_feature 1..20: note = Description of Artificial Sequence: Synthetic Antisense oligonucleotide
  modified_base 20: mod_base = OTHER; note = bicyclic nucleic acid (BNA)
  source 1..20: mol_type = other RNA
caaggaagatggcatttcta

SEQ ID NO: 2115 - DNA, 19 bp, synthetic construct
  misc_feature 1..19: note = Description of Artificial Sequence: Synthetic Antisense oligonucleotide
  misc_feature 1..19: note = Original Sequence: caaggaagauggcauuuct
  modified_base 19: mod_base = OTHER; note = bicyclic nucleic acid (BNA)
  source 1..19: mol_type = other DNA
  modified_base 10: mod_base = OTHER; note = Uracil
  modified_base 15: mod_base = OTHER; note = Uracil
  modified_base 16: mod_base = OTHER; note = Uracil
  modified_base 17: mod_base = OTHER; note = Uracil
caaggaagatggcatttct

SEQ ID NO: 2116 - RNA, 18 nt, synthetic construct
  misc_feature 1..18: note = Description of Artificial Sequence: Synthetic Antisense oligonucleotide
  modified_base 18: mod_base = OTHER; note = bicyclic nucleic acid (BNA)
  source 1..18: mol_type = other RNA
caaggaagatggcatttc

SEQ ID NO: 2117 - DNA, 17 bp, synthetic construct
  misc_feature 1..17: note = Description of Artificial Sequence: Synthetic Antisense oligonucleotide
  misc_feature 1..17: note = Original Sequence: caaggaagauggcauut
  modified_base 17: mod_base = OTHER; note = bicyclic nucleic acid (BNA)
  source 1..17: mol_type = other DNA
  modified_base 10: mod_base = OTHER; note = Uracil
  modified_base 15: mod_base = OTHER; note = Uracil
  modified_base 16: mod_base = OTHER; note = Uracil
caaggaagatggcattt

SEQ ID NO: 2118 - DNA, 16 bp, synthetic construct
  misc_feature 1..16: note = Description of Artificial Sequence: Synthetic Antisense oligonucleotide
  misc_feature 1..16: note = Original Sequence: caaggaagauggcaut
  modified_base 16: mod_base = OTHER; note = bicyclic nucleic acid (BNA)
  source 1..16: mol_type = other DNA
  modified_base 10: mod_base = OTHER; note = Uracil
  modified_base 15: mod_base = OTHER; note = Uracil
caaggaagatggcatt

SEQ ID NO: 2119 - DNA, 15 bp, synthetic construct
  misc_feature 1..15: note = Description of Artificial Sequence: Synthetic Antisense oligonucleotide
  misc_feature 1..15: note = Original Sequence: caaggaagauggcat
  modified_base 15: mod_base = OTHER; note = bicyclic nucleic acid (BNA)
  source 1..15: mol_type = other DNA
  modified_base 10: mod_base = OTHER; note = Uracil
caaggaagatggcat

SEQ ID NO: 2120 - RNA, 14 nt, synthetic construct
  misc_feature 1..14: note = Description of Artificial Sequence: Synthetic Antisense oligonucleotide
  modified_base 14: mod_base = OTHER; note = bicyclic nucleic acid (BNA)
  source 1..14: mol_type = other RNA
caaggaagatggca

SEQ ID NO: 2121 - RNA, 13 nt, synthetic construct
  misc_feature 1..13: note = Description of Artificial Sequence: Synthetic Antisense oligonucleotide
  modified_base 13: mod_base = OTHER; note = bicyclic nucleic acid (BNA)
  source 1..13: mol_type = other RNA
caaggaagatggc

SEQ ID NO: 2122 - RNA, 12 nt, synthetic construct
  misc_feature 1..12: note = Description of Artificial Sequence: Synthetic Antisense oligonucleotide
  modified_base 12: mod_base = OTHER; note = bicyclic nucleic acid (BNA)
  source 1..12: mol_type = other RNA
caaggaagatgg

SEQ ID NO: 2123 - RNA, 11 nt, synthetic construct
  misc_feature 1..11: note = Description of Artificial Sequence: Synthetic Antisense oligonucleotide
  modified_base 11: mod_base = OTHER; note = bicyclic nucleic acid (BNA)
  source 1..11: mol_type = other RNA
caaggaagatg

SEQ ID NO: 2124 - DNA, 10 bp, synthetic construct
  misc_feature 1..10: note = Description of Artificial Sequence: Synthetic Antisense oligonucleotide
  modified_base 10: mod_base = OTHER; note = bicyclic nucleic acid (BNA)
  source 1..10: mol_type = other DNA
caaggaagat

SEQ ID NO: 2125-2126 - skipped (2 entries)

SEQ ID NO: 2127 - RNA, 20 nt, synthetic construct
  misc_feature 1..20: note = Description of Artificial Sequence: Synthetic Antisense oligonucleotide
  modified_base 20: mod_base = OTHER; note = bicyclic nucleic acid (BNA)
  source 1..20: mol_type = other RNA
aaggaagatggcatttctag

SEQ ID NO: 2128 - RNA, 19 nt, synthetic construct
  misc_feature 1..19: note = Description of Artificial Sequence: Synthetic Antisense oligonucleotide
  modified_base 19: mod_base = OTHER; note = bicyclic nucleic acid (BNA)
  source 1..19: mol_type = other RNA
aaggaagatggcatttcta

SEQ ID NO: 2129 - DNA, 18 bp, synthetic construct
  misc_feature 1..18: note = Description of Artificial Sequence: Synthetic Antisense oligonucleotide
  misc_feature 1..18: note = Original Sequence: aaggaagauggcauuuct
  modified_base 18: mod_base = OTHER; note = bicyclic nucleic acid (BNA)
  source 1..18: mol_type = other DNA
  modified_base 9: mod_base = OTHER; note = Uracil
  modified_base 14: mod_base = OTHER; note = Uracil
  modified_base 15: mod_base = OTHER; note = Uracil
  modified_base 16: mod_base = OTHER; note = Uracil
aaggaagatggcatttct

SEQ ID NO: 2130 - RNA, 17 nt, synthetic construct
  misc_feature 1..17: note = Description of Artificial Sequence: Synthetic Antisense oligonucleotide
  modified_base 17: mod_base = OTHER; note = bicyclic nucleic acid (BNA)
  source 1..17: mol_type = other RNA
aaggaagatggcatttc

SEQ ID NO: 2131 - DNA, 16 bp, synthetic construct
  misc_feature 1..16: note = Description of Artificial Sequence: Synthetic Antisense oligonucleotide
  misc_feature 1..16: note = Original Sequence: aaggaagauggcauut
  modified_base 16: mod_base = OTHER; note = bicyclic nucleic acid (BNA)
  source 1..16: mol_type = other DNA
  modified_base 9: mod_base = OTHER; note = Uracil
  modified_base 14: mod_base = OTHER; note = Uracil
  modified_base 15: mod_base = OTHER; note = Uracil
aaggaagatggcattt

SEQ ID NO: 2132 - DNA, 15 bp, synthetic construct
  misc_feature 1..15: note = Description of Artificial Sequence: Synthetic Antisense oligonucleotide
  misc_feature 1..15: note = Original Sequence: aaggaagauggcaut
  modified_base 15: mod_base = OTHER; note = bicyclic nucleic acid (BNA)
  source 1..15: mol_type = other DNA
  modified_base 9: mod_base = OTHER; note = Uracil
  modified_base 14: mod_base = OTHER; note = Uracil
aaggaagatggcatt

SEQ ID NO: 2133 - DNA, 14 bp, synthetic construct
  misc_feature 1..14: note = Description of Artificial Sequence: Synthetic Antisense oligonucleotide
  misc_feature 1..14: note = Original Sequence: aaggaagauggcat
  modified_base 14: mod_base = OTHER; note = bicyclic nucleic acid (BNA)
  source 1..14: mol_type = other DNA
  modified_base 9: mod_base = OTHER; note = Uracil
aaggaagatggcat

SEQ ID NO: 2134 - RNA, 13 nt, synthetic construct
  misc_feature 1..13: note = Description of Artificial Sequence: Synthetic Antisense oligonucleotide
  modified_base 13: mod_base = OTHER; note = bicyclic nucleic acid (BNA)
  source 1..13: mol_type = other RNA
aaggaagatggca

SEQ ID NO: 2135 - RNA, 12 nt, synthetic construct
  misc_feature 1..12: note = Description of Artificial Sequence: Synthetic Antisense oligonucleotide
  modified_base 12: mod_base = OTHER; note = bicyclic nucleic acid (BNA)
  source 1..12: mol_type = other RNA
aaggaagatggc

SEQ ID NO: 2136 - RNA, 11 nt, synthetic construct
  misc_feature 1..11: note = Description of Artificial Sequence: Synthetic Antisense oligonucleotide
  modified_base 11: mod_base = OTHER; note = bicyclic nucleic acid (BNA)
  source 1..11: mol_type = other RNA
aaggaagatgg

SEQ ID NO: 2137 - RNA, 10 nt, synthetic construct
  misc_feature 1..10: note = Description of Artificial Sequence: Synthetic Antisense oligonucleotide
  modified_base 10: mod_base = OTHER; note = bicyclic nucleic acid (BNA)
  source 1..10: mol_type = other RNA
aaggaagatg

SEQ ID NO: 2138-2139 - skipped (2 entries)

SEQ ID NO: 2140 - RNA, 19 nt, synthetic construct
  misc_feature 1..19: note = Description of Artificial Sequence: Synthetic Antisense oligonucleotide
  modified_base 19: mod_base = OTHER; note = bicyclic nucleic acid (BNA)
  source 1..19: mol_type = other RNA
aggaagatggcatttctag

SEQ ID NO: 2141 - RNA, 18 nt, synthetic construct
  misc_feature 1..18: note = Description of Artificial Sequence: Synthetic Antisense oligonucleotide
  modified_base 18: mod_base = OTHER; note = bicyclic nucleic acid (BNA)
  source 1..18: mol_type = other RNA
aggaagatggcatttcta

SEQ ID NO: 2142 - DNA, 17 bp, synthetic construct
  misc_feature 1..17: note = Description of Artificial Sequence: Synthetic Antisense oligonucleotide
  misc_feature 1..17: note = Original Sequence: aggaagauggcauuuct
  modified_base 17: mod_base = OTHER; note = bicyclic nucleic acid (BNA)
  source 1..17: mol_type = other DNA
  modified_base 8: mod_base = OTHER; note = Uracil
  modified_base 13: mod_base = OTHER; note = Uracil
  modified_base 14: mod_base = OTHER; note = Uracil
  modified_base 15: mod_base = OTHER; note = Uracil
aggaagatggcatttct

SEQ ID NO: 2143 - RNA, 16 nt, synthetic construct
  misc_feature 1..16: note = Description of Artificial Sequence: Synthetic Antisense oligonucleotide
  modified_base 16: mod_base = OTHER; note = bicyclic nucleic acid (BNA)
  source 1..16: mol_type = other RNA
aggaagatggcatttc

SEQ ID NO: 2144 - DNA, 15 bp, synthetic construct
  misc_feature 1..15: note = Description of Artificial Sequence: Synthetic Antisense oligonucleotide
  misc_feature 1..15: note = Original Sequence: aggaagauggcauut
  modified_base 15: mod_base = OTHER; note = bicyclic nucleic acid (BNA)
  source 1..15: mol_type = other DNA
  modified_base 8: mod_base = OTHER; note = Uracil
  modified_base 13: mod_base = OTHER; note = Uracil
  modified_base 14: mod_base = OTHER; note = Uracil
aggaagatggcattt

SEQ ID NO: 2145 - DNA, 14 bp, synthetic construct
  misc_feature 1..14: note = Description of Artificial Sequence: Synthetic Antisense oligonucleotide
  misc_feature 1..14: note = Original Sequence: aggaagauggcaut
  modified_base 14: mod_base = OTHER; note = bicyclic nucleic acid (BNA)
  source 1..14: mol_type = other DNA
  modified_base 8: mod_base = OTHER; note = Uracil
  modified_base 13: mod_base = OTHER; note = Uracil
aggaagatggcatt

SEQ ID NO: 2146 - DNA, 13 bp, synthetic construct
  misc_feature 1..13: note = Description of Artificial Sequence: Synthetic Antisense oligonucleotide
  misc_feature 1..13: note = Original Sequence: aggaagauggcat
  modified_base 13: mod_base = OTHER; note = bicyclic nucleic acid (BNA)
  source 1..13: mol_type = other DNA
  modified_base 8: mod_base = OTHER; note = Uracil
aggaagatggcat

SEQ ID NO: 2147 - RNA, 12 nt, synthetic construct
  misc_feature 1..12: note = Description of Artificial Sequence: Synthetic Antisense oligonucleotide
  modified_base 12: mod_base = OTHER; note = bicyclic nucleic acid (BNA)
  source 1..12: mol_type = other RNA
aggaagatggca

SEQ ID NO: 2148 - RNA, 10 nt, synthetic construct
  misc_feature 1..10: note = Description of Artificial Sequence: Synthetic Antisense oligonucleotide
  modified_base 10: mod_base = OTHER; note = bicyclic nucleic acid (BNA)
  source 1..10: mol_type = other RNA
aggaagatgg

SEQ ID NO: 2149-2150 - skipped (2 entries)

SEQ ID NO: 2151 - RNA, 18 nt, synthetic construct
  misc_feature 1..18: note = Description of Artificial Sequence: Synthetic Antisense oligonucleotide
  modified_base 18: mod_base = OTHER; note = bicyclic nucleic acid (BNA)
  source 1..18: mol_type = other RNA
ggaagatggcatttctag

SEQ ID NO: 2152 - RNA, 17 nt, synthetic construct
  misc_feature 1..17: note = Description of Artificial Sequence: Synthetic Antisense oligonucleotide
  modified_base 17: mod_base = OTHER; note = bicyclic nucleic acid (BNA)
  source 1..17: mol_type = other RNA
ggaagatggcatttcta

SEQ ID NO: 2153 - DNA, 16 bp, synthetic construct
  misc_feature 1..16: note = Description of Artificial Sequence: Synthetic Antisense oligonucleotide
  misc_feature 1..16: note = Original Sequence: ggaagauggcauuuct
  modified_base 16: mod_base = OTHER; note = bicyclic nucleic acid (BNA)
  source 1..16: mol_type = other DNA
  modified_base 7: mod_base = OTHER; note = Uracil
  modified_base 12: mod_base = OTHER; note = Uracil
  modified_base 13: mod_base = OTHER; note = Uracil
  modified_base 14: mod_base = OTHER; note = Uracil
ggaagatggcatttct

SEQ ID NO: 2154 - RNA, 15 nt, synthetic construct
  misc_feature 1..15: note = Description of Artificial Sequence: Synthetic Antisense oligonucleotide
  modified_base 15: mod_base = OTHER; note = bicyclic nucleic acid (BNA)
  source 1..15: mol_type = other RNA
ggaagatggcatttc

SEQ ID NO: 2155 - DNA, 14 bp, synthetic construct
  misc_feature 1..14: note = Description of Artificial Sequence: Synthetic Antisense oligonucleotide
  misc_feature 1..14: note = Original Sequence: ggaagauggcauut
  modified_base 14: mod_base = OTHER; note = bicyclic nucleic acid (BNA)
  source 1..14: mol_type = other DNA
  modified_base 7: mod_base = OTHER; note = Uracil
  modified_base 12: mod_base = OTHER; note = Uracil
  modified_base 13: mod_base = OTHER; note = Uracil
ggaagatggcattt

SEQ ID NO: 2156 - DNA, 13 bp, synthetic construct
  misc_feature 1..13: note = Description of Artificial Sequence: Synthetic Antisense oligonucleotide
  misc_feature 1..13: note = Original Sequence: ggaagauggcaut
  modified_base 13: mod_base = OTHER; note = bicyclic nucleic acid (BNA)
  source 1..13: mol_type = other DNA
  modified_base 7: mod_base = OTHER; note = Uracil
  modified_base 12: mod_base = OTHER; note = Uracil
ggaagatggcatt

SEQ ID NO: 2157 - DNA, 12 bp, synthetic construct
  misc_feature 1..12: note = Description of Artificial Sequence: Synthetic Antisense oligonucleotide
  misc_feature 1..12: note = Original Sequence: ggaagauggcat
  modified_base 12: mod_base = OTHER; note = bicyclic nucleic acid (BNA)
  source 1..12: mol_type = other DNA
  modified_base 7: mod_base = OTHER; note = Uracil
ggaagatggcat

SEQ ID NO: 2158 - RNA, 11 nt, synthetic construct
  misc_feature 1..11: note = Description of Artificial Sequence: Synthetic Antisense oligonucleotide
  modified_base 11: mod_base = OTHER; note = bicyclic nucleic acid (BNA)
  source 1..11: mol_type = other RNA
ggaagatggca

SEQ ID NO: 2159 - RNA, 10 nt, synthetic construct
  misc_feature 1..10: note = Description of Artificial Sequence: Synthetic Antisense oligonucleotide
  modified_base 10: mod_base = OTHER; note = bicyclic nucleic acid (BNA)
  source 1..10: mol_type = other RNA
ggaagatggc

SEQ ID NO: 2160 - skipped

SEQ ID NO: 2161 - RNA, 17 nt, synthetic construct
  misc_feature 1..17: note = Description of Artificial Sequence: Synthetic Antisense oligonucleotide
  modified_base 17: mod_base = OTHER; note = bicyclic nucleic acid (BNA)
  source 1..17: mol_type = other RNA
gaagatggcatttctag

SEQ ID NO: 2162 - RNA, 16 nt, synthetic construct
  misc_feature 1..16: note = Description of Artificial Sequence: Synthetic Antisense oligonucleotide
  modified_base 16: mod_base = OTHER; note = bicyclic nucleic acid (BNA)
  source 1..16: mol_type = other RNA
gaagatggcatttcta

SEQ ID NO: 2163 - RNA, 14 nt, synthetic construct
  misc_feature 1..14: note = Description of Artificial Sequence: Synthetic Antisense oligonucleotide
  modified_base 14: mod_base = OTHER; note = bicyclic nucleic acid (BNA)
  source 1..14: mol_type = other RNA
gaagatggcatttc

SEQ ID NO: 2164 - DNA, 13 bp, synthetic construct
  misc_feature 1..13: note = Description of Artificial Sequence: Synthetic Antisense oligonucleotide
  misc_feature 1..13: note = Original Sequence: gaagauggcauut
  modified_base 13: mod_base = OTHER; note = bicyclic nucleic acid (BNA)
  source 1..13: mol_type = other DNA
  modified_base 6: mod_base = OTHER; note = Uracil
  modified_base 11: mod_base = OTHER; note = Uracil
  modified_base 12: mod_base = OTHER; note = Uracil
gaagatggcattt

SEQ ID NO: 2165 - DNA, 12 bp, synthetic construct
  misc_feature 1..12: note = Description of Artificial Sequence: Synthetic Antisense oligonucleotide
  misc_feature 1..12: note = Original Sequence: gaagauggcaut
  modified_base 12: mod_base = OTHER; note = bicyclic nucleic acid (BNA)
  source 1..12: mol_type = other DNA
  modified_base 6: mod_base = OTHER; note = Uracil
  modified_base 11: mod_base = OTHER; note = Uracil
gaagatggcatt

SEQ ID NO: 2166 - DNA, 11 bp, synthetic construct
  misc_feature 1..11: note = Description of Artificial Sequence: Synthetic Antisense oligonucleotide
  misc_feature 1..11: note = Original Sequence: gaagauggcat
  modified_base 11: mod_base = OTHER; note = bicyclic nucleic acid (BNA)
  source 1..11: mol_type = other DNA
  modified_base 6: mod_base = OTHER; note = Uracil
gaagatggcat

SEQ ID NO: 2167 - RNA, 10 nt, synthetic construct
  misc_feature 1..10: note = Description of Artificial Sequence: Synthetic Antisense oligonucleotide
  modified_base 10: mod_base = OTHER; note = bicyclic nucleic acid (BNA)
  source 1..10: mol_type = other RNA
gaagatggca

SEQ ID NO: 2168-2169 - skipped (2 entries)

SEQ ID NO: 2170 - RNA, 16 nt, synthetic construct
  misc_feature 1..16: note = Description of Artificial Sequence: Synthetic Antisense oligonucleotide
  modified_base 16: mod_base = OTHER; note = bicyclic nucleic acid (BNA)
  source 1..16: mol_type = other RNA
aagatggcatttctag

SEQ ID NO: 2171 - RNA, 15 nt, synthetic construct
  misc_feature 1..15: note = Description of Artificial Sequence: Synthetic Antisense oligonucleotide
  modified_base 15: mod_base = OTHER; note = bicyclic nucleic acid (BNA)
  source 1..15: mol_type = other RNA
aagatggcatttcta

SEQ ID NO: 2172 - DNA, 14 bp, synthetic construct
  misc_feature 1..14: note = Description of Artificial Sequence: Synthetic Antisense oligonucleotide
  misc_feature 1..14: note = Original Sequence: aagauggcauuuct
  modified_base 14: mod_base = OTHER; note = bicyclic nucleic acid (BNA)
  source 1..14: mol_type = other DNA
  modified_base 5: mod_base = OTHER; note = Uracil
  modified_base 10: mod_base = OTHER; note = Uracil
  modified_base 11: mod_base = OTHER; note = Uracil
  modified_base 12: mod_base = OTHER; note = Uracil
aagatggcatttct

SEQ ID NO: 2173 - RNA, 13 nt, synthetic construct
  misc_feature 1..13: note = Description of Artificial Sequence: Synthetic Antisense oligonucleotide
  modified_base 13: mod_base = OTHER; note = bicyclic nucleic acid (BNA)
  source 1..13: mol_type = other RNA
aagatggcatttc

SEQ ID NO: 2174 - DNA, 12 bp, synthetic construct
  misc_feature 1..12: note = Description of Artificial Sequence: Synthetic Antisense oligonucleotide
  misc_feature 1..12: note = Original Sequence: aagauggcauut
  modified_base 12: mod_base = OTHER; note = bicyclic nucleic acid (BNA)
  source 1..12: mol_type = other DNA
  modified_base 5: mod_base = OTHER; note = Uracil
  modified_base 10: mod_base = OTHER; note = Uracil
  modified_base 11: mod_base = OTHER; note = Uracil
aagatggcattt

SEQ ID NO: 2175 - DNA, 11 bp, synthetic construct
  misc_feature 1..11: note = Description of Artificial Sequence: Synthetic Antisense oligonucleotide
  misc_feature 1..11: note = Original Sequence: aagauggcaut
  modified_base 11: mod_base = OTHER; note = bicyclic nucleic acid (BNA)
  source 1..11: mol_type = other DNA
  modified_base 5: mod_base = OTHER; note = Uracil
  modified_base 10: mod_base = OTHER; note = Uracil
aagatggcatt

SEQ ID NO: 2176 - DNA, 10 bp, synthetic construct
  misc_feature 1..10: note = Description of Artificial Sequence: Synthetic Antisense oligonucleotide
  misc_feature 1..10: note = Original Sequence: aagauggcat
  modified_base 10: mod_base = OTHER; note = bicyclic nucleic acid (BNA)
  source 1..10: mol_type = other DNA
  modified_base 5: mod_base = OTHER; note = Uracil
aagatggcat

SEQ ID NO: 2177-2178 - skipped (2 entries)

SEQ ID NO: 2179 - RNA, 15 nt, synthetic construct
  misc_feature 1..15: note = Description of Artificial Sequence: Synthetic Antisense oligonucleotide
  modified_base 15: mod_base = OTHER; note = bicyclic nucleic acid (BNA)
  source 1..15: mol_type = other RNA
agatggcatttctag

SEQ ID NO: 2180 - RNA, 14 nt, synthetic construct
  misc_feature 1..14: note = Description of Artificial Sequence: Synthetic Antisense oligonucleotide
  modified_base 14: mod_base = OTHER; note = bicyclic nucleic acid (BNA)
  source 1..14: mol_type = other RNA
agatggcatttcta

SEQ ID NO: 2181 - DNA, 13 bp, synthetic construct
  misc_feature 1..13: note = Description of Artificial Sequence: Synthetic Antisense oligonucleotide
  misc_feature 1..13: note = Original Sequence: agauggcauuuct
  modified_base 13: mod_base = OTHER; note = bicyclic nucleic acid (BNA)
  source 1..13: mol_type = other DNA
  modified_base 4: mod_base = OTHER; note = Uracil
  modified_base 9: mod_base = OTHER; note = Uracil
  modified_base 10: mod_base = OTHER; note = Uracil
  modified_base 11: mod_base = OTHER; note = Uracil
agatggcatttct

SEQ ID NO: 2182 - RNA, 12 nt, synthetic construct
  misc_feature 1..12: note = Description of Artificial Sequence: Synthetic Antisense oligonucleotide
  modified_base 12: mod_base = OTHER; note = bicyclic nucleic acid (BNA)
  source 1..12: mol_type = other RNA
agatggcatttc

SEQ ID NO: 2183 - DNA, 11 bp, synthetic construct
  misc_feature 1..11: note = Description of Artificial Sequence: Synthetic Antisense oligonucleotide
  misc_feature 1..11: note = Original Sequence: agauggcauut
  modified_base 11: mod_base = OTHER; note = bicyclic nucleic acid (BNA)
  source 1..11: mol_type = other DNA
  modified_base 4: mod_base = OTHER; note = Uracil
  modified_base 9: mod_base = OTHER; note = Uracil
  modified_base 10: mod_base = OTHER; note = Uracil
agatggcattt

SEQ ID NO: 2184 - DNA, 10 bp, synthetic construct
  misc_feature 1..10: note = Description of Artificial Sequence: Synthetic Antisense oligonucleotide
  misc_feature 1..10: note = Original Sequence: agauggcaut
  modified_base 10: mod_base = OTHER; note = bicyclic nucleic acid (BNA)
  source 1..10: mol_type = other DNA
  modified_base 4: mod_base = OTHER; note = Uracil
  modified_base 9: mod_base = OTHER; note = Uracil
agatggcatt

SEQ ID NO: 2185-2186 - skipped (2 entries)

SEQ ID NO: 2187 - RNA, 30 nt, synthetic construct; identical to SEQ ID NO: 287
  misc_feature 1..30: note = Description of Artificial Sequence: Synthetic Antisense oligonucleotide
  modified_base 30: mod_base = OTHER; note = bicyclic nucleic acid (BNA)
  source 1..30: mol_type = other RNA

SEQ ID NO: 2188 - RNA, 29 nt, synthetic construct
  misc_feature 1..29: note = Description of Artificial Sequence: Synthetic Antisense oligonucleotide
  modified_base 29: mod_base = OTHER; note = bicyclic nucleic acid (BNA)
  source 1..29: mol_type = other RNA
ctccaacatcaaggaagatggcatttcta

SEQ ID NO: 2189 - DNA, 28 bp, synthetic construct
  misc_feature 1..28: note = Description of Artificial Sequence: Synthetic Antisense oligonucleotide
  misc_feature 1..28: note = Original Sequence: cuccaacaucaaggaagauggcauuuct
  modified_base 28: mod_base = OTHER; note = bicyclic nucleic acid (BNA)
  source 1..28: mol_type = other DNA
  modified_base 2: mod_base = OTHER; note = Uracil
  modified_base 9: mod_base = OTHER; note = Uracil
  modified_base 19: mod_base = OTHER; note = Uracil
  modified_base 24: mod_base = OTHER; note = Uracil
  modified_base 25: mod_base = OTHER; note = Uracil
  modified_base 26: mod_base = OTHER; note = Uracil
ctccaacatcaaggaagatggcatttct

SEQ ID NO: 2190 - RNA, 27 nt, synthetic construct
  misc_feature 1..27: note = Description of Artificial Sequence: Synthetic Antisense oligonucleotide
  modified_base 27: mod_base = OTHER; note = bicyclic nucleic acid (BNA)
  source 1..27: mol_type = other RNA
ctccaacatcaaggaagatggcatttc

SEQ ID NO: 2191 - DNA, 26 bp, synthetic construct
  misc_feature 1..26: note = Description of Artificial Sequence: Synthetic Antisense oligonucleotide
  misc_feature 1..26: note = Original Sequence: cuccaacaucaaggaagauggcauut
  modified_base 26: mod_base = OTHER; note = bicyclic nucleic acid (BNA)
  source 1..26: mol_type = other DNA
  modified_base 2: mod_base = OTHER; note = Uracil
  modified_base 9: mod_base = OTHER; note = Uracil
  modified_base 19: mod_base = OTHER; note = Uracil
  modified_base 24: mod_base = OTHER; note = Uracil
  modified_base 25: mod_base = OTHER; note = Uracil
ctccaacatcaaggaagatggcattt

SEQ ID NO: 2192 - DNA, 25 bp, synthetic construct
  misc_feature 1..25: note = Description of Artificial Sequence: Synthetic Antisense oligonucleotide
  misc_feature 1..25: note = Original Sequence: cuccaacaucaaggaagauggcaut
  modified_base 25: mod_base = OTHER; note = bicyclic nucleic acid (BNA)
  source 1..25: mol_type = other DNA
  modified_base 2: mod_base = OTHER; note = Uracil
  modified_base 9: mod_base = OTHER; note = Uracil
  modified_base 19: mod_base = OTHER; note = Uracil
  modified_base 24: mod_base = OTHER; note = Uracil
ctccaacatcaaggaagatggcatt

SEQ ID NO: 2193 - DNA, 24 bp, synthetic construct
  misc_feature 1..24: note = Description of Artificial Sequence: Synthetic Antisense oligonucleotide
  misc_feature 1..24: note = Original Sequence: cuccaacaucaaggaagauggcat
  modified_base 24: mod_base = OTHER; note = bicyclic nucleic acid (BNA)
  source 1..24: mol_type = other DNA
  modified_base 2: mod_base = OTHER; note = Uracil
  modified_base 9: mod_base = OTHER; note = Uracil
  modified_base 19: mod_base = OTHER; note = Uracil
ctccaacatcaaggaagatggcat

SEQ ID NO: 2194 - RNA, 23 nt, synthetic construct
  misc_feature 1..23: note = Description of Artificial Sequence: Synthetic Antisense oligonucleotide
  modified_base 23: mod_base = OTHER; note = bicyclic nucleic acid (BNA)
  source 1..23: mol_type = other RNA
ctccaacatcaaggaagatggca

SEQ ID NO: 2195 - RNA, 22 nt, synthetic construct
  misc_feature 1..22: note = Description of Artificial Sequence: Synthetic Antisense oligonucleotide
  modified_base 22: mod_base = OTHER; note = bicyclic nucleic acid (BNA)
  source 1..22: mol_type = other RNA
ctccaacatcaaggaagatggc

SEQ ID NO: 2196 - RNA, 21 nt, synthetic construct
  misc_feature 1..21: note = Description of Artificial Sequence: Synthetic Antisense oligonucleotide
  modified_base 21: mod_base = OTHER; note = bicyclic nucleic acid (BNA)
  source 1..21: mol_type = other RNA
ctccaacatcaaggaagatgg

SEQ ID NO: 2197 - RNA, 20 nt, synthetic construct
  misc_feature 1..20: note = Description of Artificial Sequence: Synthetic Antisense oligonucleotide
  modified_base 20: mod_base = OTHER; note = bicyclic nucleic acid (BNA)
  source 1..20: mol_type = other RNA
ctccaacatcaaggaagatg

SEQ ID NO: 2198 - DNA, 19 bp, synthetic construct
  misc_feature 1..19: note = Description of Artificial Sequence: Synthetic Antisense oligonucleotide
  misc_feature 1..19: note = Original Sequence: cuccaacaucaaggaagat
  modified_base 19: mod_base = OTHER; note = bicyclic nucleic acid (BNA)
  source 1..19: mol_type = other DNA
  modified_base 2: mod_base = OTHER; note = Uracil
  modified_base 9: mod_base = OTHER; note = Uracil
ctccaacatcaaggaagat

SEQ ID NO: 2199 - RNA, 18 nt, synthetic construct
  misc_feature 1..18: note = Description of Artificial Sequence: Synthetic Antisense oligonucleotide
  modified_base 18: mod_base = OTHER; note = bicyclic nucleic acid (BNA)
  source 1..18: mol_type = other RNA
ctccaacatcaaggaaga

SEQ ID NO: 2200 - RNA, 17 nt, synthetic construct
  misc_feature 1..17: note = Description of Artificial Sequence: Synthetic Antisense oligonucleotide
  modified_base 17: mod_base = OTHER; note = bicyclic nucleic acid (BNA)
  source 1..17: mol_type = other RNA
ctccaacatcaaggaag

SEQ ID NO: 2201 - RNA, 29 nt, synthetic construct
  misc_feature 1..29: note = Description of Artificial Sequence: Synthetic Antisense oligonucleotide
  modified_base 29: mod_base = OTHER; note = bicyclic nucleic acid (BNA)
  source 1..29: mol_type = other RNA
tccaacatcaaggaagatggcatttctag

SEQ ID NO: 2202 - RNA, 28 nt, synthetic construct
  misc_feature 1..28: note = Description of Artificial Sequence: Synthetic Antisense oligonucleotide
  modified_base 28: mod_base = OTHER; note = bicyclic nucleic acid (BNA)
  source 1..28: mol_type = other RNA
tccaacatcaaggaagatggcatttcta

SEQ ID NO: 2203 - DNA, 27 bp, synthetic construct
  misc_feature 1..27: note = Description of Artificial Sequence: Synthetic Antisense oligonucleotide
  misc_feature 1..27: note = Original Sequence: uccaacaucaaggaagauggcauuuct
  modified_base 27: mod_base = OTHER; note = bicyclic nucleic acid (BNA)
  source 1..27: mol_type = other DNA
  modified_base 1: mod_base = OTHER; note = Uracil
  modified_base 8: mod_base = OTHER; note = Uracil
  modified_base 18: mod_base = OTHER; note = Uracil
  modified_base 23: mod_base = OTHER; note = Uracil
  modified_base 24: mod_base = OTHER; note = Uracil
  modified_base 25: mod_base = OTHER; note = Uracil
tccaacatcaaggaagatggcatttct

SEQ ID NO: 2204 - RNA, 26 nt, synthetic construct
  misc_feature 1..26: note = Description of Artificial Sequence: Synthetic Antisense oligonucleotide
  modified_base 26: mod_base = OTHER; note = bicyclic nucleic acid (BNA)
  source 1..26: mol_type = other RNA
tccaacatcaaggaagatggcatttc

SEQ ID NO: 2205 - DNA, 25 bp, synthetic construct
  misc_feature 1..25: note = Description of Artificial Sequence: Synthetic Antisense oligonucleotide
  misc_feature 1..25: note = Original Sequence: uccaacaucaaggaagauggcauut
  modified_base 25: mod_base = OTHER; note = bicyclic nucleic acid (BNA)
  source 1..25: mol_type = other DNA
  modified_base 1: mod_base = OTHER; note = Uracil
  modified_base 8: mod_base = OTHER; note = Uracil
  modified_base 18: mod_base = OTHER; note = Uracil
  modified_base 23: mod_base = OTHER; note = Uracil
  modified_base 24: mod_base = OTHER; note = Uracil
tccaacatcaaggaagatggcattt

SEQ ID NO: 2206 - DNA, 24 bp, synthetic construct
  misc_feature 1..24: note = Description of Artificial Sequence: Synthetic Antisense oligonucleotide
  misc_feature 1..24: note = Original Sequence: uccaacaucaaggaagauggcaut
  modified_base 24: mod_base = OTHER; note = bicyclic nucleic acid (BNA)
  source 1..24: mol_type = other DNA
  modified_base 1: mod_base = OTHER; note = Uracil
  modified_base 8: mod_base = OTHER; note = Uracil
  modified_base 18: mod_base = OTHER; note = Uracil
  modified_base 23: mod_base = OTHER; note = Uracil
tccaacatcaaggaagatggcatt

SEQ ID NO: 2207 - DNA, 23 bp, synthetic construct
  misc_feature 1..23: note = Description of Artificial Sequence: Synthetic Antisense oligonucleotide
  misc_feature 1..23: note = Original Sequence: uccaacaucaaggaagauggcat
  modified_base 23: mod_base = OTHER; note = bicyclic nucleic acid (BNA)
  source 1..23: mol_type = other DNA
  modified_base 1: mod_base = OTHER; note = Uracil
  modified_base 8: mod_base = OTHER; note = Uracil
  modified_base 18: mod_base = OTHER; note = Uracil
tccaacatcaaggaagatggcat

SEQ ID NO: 2208 - RNA, 22 nt, synthetic construct
  misc_feature 1..22: note = Description of Artificial Sequence: Synthetic Antisense oligonucleotide
  modified_base 22: mod_base = OTHER; note = bicyclic nucleic acid (BNA)
  source 1..22: mol_type = other RNA
tccaacatcaaggaagatggca

SEQ ID NO: 2209 - RNA, 21 nt, synthetic construct
  misc_feature 1..21: note = Description of Artificial Sequence: Synthetic Antisense oligonucleotide
  modified_base 21: mod_base = OTHER; note = bicyclic nucleic acid (BNA)
  source 1..21: mol_type = other RNA
tccaacatcaaggaagatggc

SEQ ID NO: 2210 - RNA, 20 nt, synthetic construct
  misc_feature 1..20: note = Description of Artificial Sequence: Synthetic Antisense oligonucleotide
  modified_base 20: mod_base = OTHER; note = bicyclic nucleic acid (BNA)
  source 1..20: mol_type = other RNA
tccaacatcaaggaagatgg

SEQ ID NO: 2211 - RNA, 19 nt, synthetic construct
  misc_feature 1..19: note = Description of Artificial Sequence: Synthetic Antisense oligonucleotide
  modified_base 19: mod_base = OTHER; note = bicyclic nucleic acid (BNA)
  source 1..19: mol_type = other RNA
tccaacatcaaggaagatg

SEQ ID NO: 2212 - DNA, 18 bp, synthetic construct
  misc_feature 1..18: note = Description of Artificial Sequence: Synthetic Antisense oligonucleotide
  misc_feature 1..18: note = Original Sequence: uccaacaucaaggaagat
  modified_base 18: mod_base = OTHER; note = bicyclic nucleic acid (BNA)
  source 1..18: mol_type = other DNA
  modified_base 1: mod_base = OTHER; note = Uracil
  modified_base 8: mod_base = OTHER; note = Uracil
tccaacatcaaggaagat

SEQ ID NO: 2213 - RNA, 17 nt, synthetic construct
  misc_feature 1..17: note = Description of Artificial Sequence: Synthetic Antisense oligonucleotide
  modified_base 17: mod_base = OTHER; note = bicyclic nucleic acid (BNA)
  source 1..17: mol_type = other RNA
tccaacatcaaggaaga

SEQ ID NO: 2214 - RNA, 16 nt, synthetic construct
  misc_feature 1..16: note = Description of Artificial Sequence: Synthetic Antisense oligonucleotide
  modified_base 16: mod_base = OTHER; note = bicyclic nucleic acid (BNA)
  source 1..16: mol_type = other RNA
tccaacatcaaggaag

SEQ ID NO: 2215 - RNA, 28 nt, synthetic construct
  misc_feature 1..28: note = Description of Artificial Sequence: Synthetic Antisense oligonucleotide
  modified_base 28: mod_base = OTHER; note = bicyclic nucleic acid (BNA)
  source 1..28: mol_type = other RNA
ccaacatcaaggaagatggcatttctag

SEQ ID NO: 2216 - RNA, 27 nt, synthetic construct
  misc_feature 1..27: note = Description of Artificial Sequence: Synthetic Antisense oligonucleotide
  modified_base 27: mod_base = OTHER; note = bicyclic nucleic acid (BNA)
  source 1..27: mol_type = other RNA
ccaacatcaaggaagatggcatttcta

SEQ ID NO: 2217 - DNA, 26 bp, synthetic construct
  misc_feature 1..26: note = Description of Artificial Sequence: Synthetic Antisense oligonucleotide
  misc_feature 1..26: note = Original Sequence: ccaacaucaaggaagauggcauuuct
  modified_base 26: mod_base = OTHER; note = bicyclic nucleic acid (BNA)
  source 1..26: mol_type = other DNA
  modified_base 7: mod_base = OTHER; note = Uracil
  modified_base 17: mod_base = OTHER; note = Uracil
  modified_base 22: mod_base = OTHER; note = Uracil
  modified_base 23: mod_base = OTHER; note = Uracil
  modified_base 24: mod_base = OTHER; note = Uracil
ccaacatcaaggaagatggcatttct

SEQ ID NO: 2218 - RNA, 25 nt, synthetic construct
  misc_feature 1..25: note = Description of Artificial Sequence: Synthetic Antisense oligonucleotide
  modified_base 25: mod_base = OTHER; note = bicyclic nucleic acid (BNA)
  source 1..25: mol_type = other RNA
ccaacatcaaggaagatggcatttc

SEQ ID NO: 2219 - DNA, 24 bp, synthetic construct
  misc_feature 1..24: note = Description of Artificial Sequence: Synthetic Antisense oligonucleotide
  misc_feature 1..24: note = Original Sequence: ccaacaucaaggaagauggcauut
  modified_base 24: mod_base = OTHER; note = bicyclic nucleic acid (BNA)
  source 1..24: mol_type = other DNA
  modified_base 7: mod_base = OTHER; note = Uracil
  modified_base 17: mod_base = OTHER; note = Uracil
  modified_base 22: mod_base = OTHER; note = Uracil
  modified_base 23: mod_base = OTHER; note = Uracil
ccaacatcaaggaagatggcattt

SEQ ID NO: 2220 - DNA, 23 bp, synthetic construct
  misc_feature 1..23: note = Description of Artificial Sequence: Synthetic Antisense oligonucleotide
  misc_feature 1..23: note = Original Sequence: ccaacaucaaggaagauggcaut
  modified_base 23: mod_base = OTHER; note = bicyclic nucleic acid (BNA)
  source 1..23: mol_type = other DNA
  modified_base 7: mod_base = OTHER; note = Uracil
  modified_base 17: mod_base = OTHER; note = Uracil
  modified_base 22: mod_base = OTHER; note = Uracil
ccaacatcaaggaagatggcatt

SEQ ID NO: 2221 - DNA, 22 bp, synthetic construct
  misc_feature 1..22: note = Description of Artificial Sequence: Synthetic Antisense oligonucleotide
  misc_feature 1..22: note = Original Sequence: ccaacaucaaggaagauggcat
  modified_base 22: mod_base = OTHER; note = bicyclic nucleic acid (BNA)
  source 1..22: mol_type = other DNA
  modified_base 7: mod_base = OTHER; note = Uracil
  modified_base 17: mod_base = OTHER; note = Uracil
ccaacatcaaggaagatggcat

SEQ ID NO: 2222 - RNA, 21 nt, synthetic construct
  misc_feature 1..21: note = Description of Artificial Sequence: Synthetic Antisense oligonucleotide
  modified_base 21: mod_base = OTHER; note = bicyclic nucleic acid (BNA)
  source 1..21: mol_type = other RNA
ccaacatcaaggaagatggca

SEQ ID NO: 2223 - RNA, 20 nt, synthetic construct
  misc_feature 1..20: note = Description of Artificial Sequence: Synthetic Antisense oligonucleotide
  modified_base 20: mod_base = OTHER; note = bicyclic nucleic acid (BNA)
  source 1..20: mol_type = other RNA
ccaacatcaaggaagatggc

SEQ ID NO: 2224 - RNA, 19 nt, synthetic construct
  misc_feature 1..19: note = Description of Artificial Sequence: Synthetic Antisense oligonucleotide
  modified_base 19: mod_base = OTHER; note = bicyclic nucleic acid (BNA)
  source 1..19: mol_type = other RNA
ccaacatcaaggaagatgg

SEQ ID NO: 2225 - RNA, 18 nt, synthetic construct
  misc_feature 1..18: note = Description of Artificial Sequence: Synthetic Antisense oligonucleotide
  modified_base 18: mod_base = OTHER; note = bicyclic nucleic acid (BNA)
  source 1..18: mol_type = other RNA
ccaacatcaaggaagatg

SEQ ID NO: 2226 - DNA, 17 bp, synthetic construct
  misc_feature 1..17: note = Description of Artificial Sequence: Synthetic Antisense oligonucleotide
  misc_feature 1..17: note = Original Sequence: ccaacaucaaggaagat
  modified_base 17: mod_base = OTHER; note = bicyclic nucleic acid (BNA)
  source 1..17: mol_type = other DNA
  modified_base 7: mod_base = OTHER; note = Uracil
ccaacatcaaggaagat

SEQ ID NO: 2227 - RNA, 16 nt, synthetic construct
  misc_feature 1..16: note = Description of Artificial Sequence: Synthetic Antisense oligonucleotide
  modified_base 16: mod_base = OTHER; note = bicyclic nucleic acid (BNA)
  source 1..16: mol_type = other RNA
ccaacatcaaggaaga

SEQ ID NO: 2228 - RNA, 15 nt, synthetic construct
  misc_feature 1..15: note = Description of Artificial Sequence: Synthetic Antisense oligonucleotide
  modified_base 15: mod_base = OTHER; note = bicyclic nucleic acid (BNA)
  source 1..15: mol_type = other RNA
ccaacatcaaggaag

SEQ ID NO: 2229 - RNA, 27 nt, synthetic construct
  misc_feature 1..27: note = Description of Artificial Sequence: Synthetic Antisense oligonucleotide
  modified_base 27: mod_base = OTHER; note = bicyclic nucleic acid (BNA)
  source 1..27: mol_type = other RNA
caacatcaaggaagatggcatttctag

SEQ ID NO: 2230 - RNA, 26 nt, synthetic construct
  misc_feature 1..26: note = Description of Artificial Sequence: Synthetic Antisense oligonucleotide
  modified_base 26: mod_base = OTHER; note = bicyclic nucleic acid (BNA)
  source 1..26: mol_type = other RNA
caacatcaaggaagatggcatttcta

SEQ ID NO: 2231 - DNA, 25 bp, synthetic construct
  misc_feature 1..25: note = Description of Artificial Sequence: Synthetic Antisense oligonucleotide
  misc_feature 1..25: note = Original Sequence: caacaucaaggaagauggcauuuct
  modified_base 25: mod_base = OTHER; note = bicyclic nucleic acid (BNA)
  source 1..25: mol_type = other DNA
  modified_base 6: mod_base = OTHER; note = Uracil
  modified_base 16: mod_base = OTHER; note = Uracil
  modified_base 21: mod_base = OTHER; note = Uracil
  modified_base 22: mod_base = OTHER; note = Uracil
  modified_base 23: mod_base = OTHER; note = Uracil
caacatcaaggaagatggcatttct

SEQ ID NO: 2232 - RNA, 24 nt, synthetic construct
  misc_feature 1..24: note = Description of Artificial Sequence: Synthetic Antisense oligonucleotide
  modified_base 24: mod_base = OTHER; note = bicyclic nucleic acid (BNA)
  source 1..24: mol_type = other RNA
caacatcaaggaagatggcatttc

SEQ ID NO: 2233 - DNA, 23 bp, synthetic construct
  misc_feature 1..23: note = Description of Artificial Sequence: Synthetic Antisense oligonucleotide
  misc_feature 1..23: note = Original Sequence: caacaucaaggaagauggcauut
  modified_base 23: mod_base = OTHER; note = bicyclic nucleic acid (BNA)
  source 1..23: mol_type = other DNA
  modified_base 6: mod_base = OTHER; note = Uracil
  modified_base 16: mod_base = OTHER; note = Uracil
  modified_base 21: mod_base = OTHER; note = Uracil
  modified_base 22: mod_base = OTHER; note = Uracil
caacatcaaggaagatggcattt

SEQ ID NO: 2234 - DNA, 22 bp, synthetic construct
  misc_feature 1..22: note = Description of Artificial Sequence: Synthetic Antisense oligonucleotide
  misc_feature 1..22: note = Original Sequence: caacaucaaggaagauggcaut
  modified_base 22: mod_base = OTHER; note = bicyclic nucleic acid (BNA)
  source 1..22: mol_type = other DNA
  modified_base 6: mod_base = OTHER; note = Uracil
  modified_base 16: mod_base = OTHER; note = Uracil
  modified_base 21: mod_base = OTHER; note = Uracil
caacatcaaggaagatggcatt

SEQ ID NO: 2235 - DNA, 21 bp, synthetic construct
  misc_feature 1..21: note = Description of Artificial Sequence: Synthetic Antisense oligonucleotide
  misc_feature 1..21: note = Original Sequence: caacaucaaggaagauggcat
  modified_base 21: mod_base = OTHER; note = bicyclic nucleic acid (BNA)
  source 1..21: mol_type = other DNA
  modified_base 6: mod_base = OTHER; note = Uracil
  modified_base 16: mod_base = OTHER; note = Uracil
caacatcaaggaagatggcat

SEQ ID NO: 2236 - RNA, 20 nt, synthetic construct
  misc_feature 1..20: note = Description of Artificial Sequence: Synthetic Antisense oligonucleotide
  modified_base 20: mod_base = OTHER; note = bicyclic nucleic acid (BNA)
  source 1..20: mol_type = other RNA
caacatcaaggaagatggca

SEQ ID NO: 2237 - RNA, 19 nt, synthetic construct
  misc_feature 1..19: note = Description of Artificial Sequence: Synthetic Antisense oligonucleotide
  modified_base 19: mod_base = OTHER; note = bicyclic nucleic acid (BNA)
  source 1..19: mol_type = other RNA
caacatcaaggaagatggc

SEQ ID NO: 2238 - RNA, 18 nt, synthetic construct
  misc_feature 1..18: note = Description of Artificial Sequence: Synthetic Antisense oligonucleotide
  modified_base 18: mod_base = OTHER; note = bicyclic nucleic acid (BNA)
  source 1..18: mol_type = other RNA
caacatcaaggaagatgg

SEQ ID NO: 2239 - RNA, 17 nt, synthetic construct
  misc_feature 1..17: note = Description of Artificial Sequence: Synthetic Antisense oligonucleotide
  modified_base 17: mod_base = OTHER; note = bicyclic nucleic acid (BNA)
  source 1..17: mol_type = other RNA
caacatcaaggaagatg

SEQ ID NO: 2240 - DNA, 16 bp, synthetic construct
  misc_feature 1..16: note = Description of Artificial Sequence: Synthetic Antisense oligonucleotide
  misc_feature 1..16: note = Original Sequence: caacaucaaggaagat
  modified_base 16: mod_base = OTHER; note = bicyclic nucleic acid (BNA)
  source 1..16: mol_type = other DNA
  modified_base 6: mod_base = OTHER; note = Uracil
caacatcaaggaagat

SEQ ID NO: 2241 - RNA, 15 nt, synthetic construct
  misc_feature 1..15: note = Description of Artificial Sequence: Synthetic Antisense oligonucleotide
  modified_base 15: mod_base = OTHER; note = bicyclic nucleic acid (BNA)
  source 1..15: mol_type = other RNA
caacatcaaggaaga

SEQ ID NO: 2242 - RNA, 14 nt, synthetic construct
  misc_feature 1..14: note = Description of Artificial Sequence: Synthetic Antisense oligonucleotide
  modified_base 14: mod_base = OTHER; note = bicyclic nucleic acid (BNA)
  source 1..14: mol_type = other RNA
caacatcaaggaag

SEQ ID NO: 2243 - RNA, 26 nt, synthetic construct
  misc_feature 1..26: note = Description of Artificial Sequence: Synthetic Antisense oligonucleotide
  modified_base 26: mod_base = OTHER; note = bicyclic nucleic acid (BNA)
  source 1..26: mol_type = other RNA
aacatcaaggaagatggcatttctag

SEQ ID NO: 2244 - RNA, 25 nt, synthetic construct
  misc_feature 1..25: note = Description of Artificial Sequence: Synthetic Antisense oligonucleotide
  modified_base 25: mod_base = OTHER; note = bicyclic nucleic acid (BNA)
  source 1..25: mol_type = other RNA
aacatcaaggaagatggcatttcta

SEQ ID NO: 2245 - DNA, 24 bp, synthetic construct
  misc_feature 1..24: note = Description of Artificial Sequence: Synthetic Antisense oligonucleotide
  misc_feature 1..24: note = Original Sequence: aacaucaaggaagauggcauuuct
  modified_base 24: mod_base = OTHER; note = bicyclic nucleic acid (BNA)
  source 1..24: mol_type = other DNA
  modified_base 5: mod_base = OTHER; note = Uracil
  modified_base 15: mod_base = OTHER; note = Uracil
  modified_base 20: mod_base = OTHER; note = Uracil
  modified_base 21: mod_base = OTHER; note = Uracil
  modified_base 22: mod_base = OTHER; note = Uracil
aacatcaaggaagatggcatttct

SEQ ID NO: 2246 - RNA, 23 nt, synthetic construct
  misc_feature 1..23: note = Description of Artificial Sequence: Synthetic Antisense oligonucleotide
  modified_base 23: mod_base = OTHER; note = bicyclic nucleic acid (BNA)
  source 1..23: mol_type = other RNA
aacatcaaggaagatggcatttc

SEQ ID NO: 2247 - DNA, 22 bp, synthetic construct
  misc_feature 1..22: note = Description of Artificial Sequence: Synthetic Antisense oligonucleotide
  misc_feature 1..22: note = Original Sequence: aacaucaaggaagauggcauut
  modified_base 22: mod_base = OTHER; note = bicyclic nucleic acid (BNA)
  source 1..22: mol_type = other DNA
  modified_base 5: mod_base = OTHER; note = Uracil
  modified_base 15: mod_base = OTHER; note = Uracil
  modified_base 20: mod_base = OTHER; note = Uracil
  modified_base 21: mod_base = OTHER; note = Uracil
aacatcaaggaagatggcattt

SEQ ID NO: 2248 - DNA, 21 bp, synthetic construct
  misc_feature 1..21: note = Description of Artificial Sequence: Synthetic Antisense oligonucleotide
  misc_feature 1..21: note = Original Sequence: aacaucaaggaagauggcaut
  modified_base 21: mod_base = OTHER; note = bicyclic nucleic acid (BNA)
  source 1..21: mol_type = other DNA
  modified_base 5: mod_base = OTHER; note = Uracil
  modified_base 15: mod_base = OTHER; note = Uracil
  modified_base 20: mod_base = OTHER; note = Uracil
aacatcaaggaagatggcatt

SEQ ID NO: 2249 - DNA, 20 bp, synthetic construct
  misc_feature 1..20: note = Description of Artificial Sequence: Synthetic Antisense oligonucleotide
  misc_feature 1..20: note = Original Sequence: aacaucaaggaagauggcat
  modified_base 20: mod_base = OTHER; note = bicyclic nucleic acid (BNA)
  source 1..20: mol_type = other DNA
  modified_base 5: mod_base = OTHER; note = Uracil
  modified_base 15: mod_base = OTHER; note = Uracil
aacatcaaggaagatggcat

SEQ ID NO: 2250 - RNA, 19 nt, synthetic construct
  misc_feature 1..19: note = Description of Artificial Sequence: Synthetic Antisense oligonucleotide
  modified_base 19: mod_base = OTHER; note = bicyclic nucleic acid (BNA)
  source 1..19: mol_type = other RNA
aacatcaaggaagatggca

SEQ ID NO: 2251 - RNA, 18 nt, synthetic construct
  misc_feature 1..18: note = Description of Artificial Sequence: Synthetic Antisense oligonucleotide
  modified_base 18: mod_base = OTHER; note = bicyclic nucleic acid (BNA)
  source 1..18: mol_type = other RNA
aacatcaaggaagatggc

SEQ ID NO: 2252 - RNA, 17 nt, synthetic construct
  misc_feature 1..17: note = Description of Artificial Sequence: Synthetic Antisense oligonucleotide
  modified_base 17: mod_base = OTHER; note = bicyclic nucleic acid (BNA)
  source 1..17: mol_type = other RNA
aacatcaaggaagatgg

SEQ ID NO: 2253 - RNA, 16 nt, synthetic construct
  misc_feature 1..16: note = Description of Artificial Sequence: Synthetic Antisense oligonucleotide
  modified_base 16: mod_base = OTHER; note = bicyclic nucleic acid (BNA)
  source 1..16: mol_type = other RNA
aacatcaaggaagatg

SEQ ID NO: 2254 - DNA, 15 bp, synthetic construct
  misc_feature 1..15: note = Description of Artificial Sequence: Synthetic Antisense oligonucleotide
  misc_feature 1..15: note = Original Sequence: aacaucaaggaagat
  modified_base 15: mod_base = OTHER; note = bicyclic nucleic acid (BNA)
  source 1..15: mol_type = other DNA
  modified_base 5: mod_base = OTHER; note = Uracil
aacatcaaggaagat

SEQ ID NO: 2255 - RNA, 14 nt, synthetic construct
  misc_feature 1..14: note = Description of Artificial Sequence: Synthetic Antisense oligonucleotide
  modified_base 14: mod_base = OTHER; note = bicyclic nucleic acid (BNA)
  source 1..14: mol_type = other RNA
aacatcaaggaaga

SEQ ID NO: 2256 - RNA, 13 nt, synthetic construct
  misc_feature 1..13: note = Description of Artificial Sequence: Synthetic Antisense oligonucleotide
  modified_base 13: mod_base = OTHER; note = bicyclic nucleic acid (BNA)
  source 1..13: mol_type = other RNA
aacatcaaggaag

SEQ ID NO: 2257 - RNA, 25 nt, synthetic construct
  misc_feature 1..25: note = Description of Artificial Sequence: Synthetic Antisense oligonucleotide
  modified_base 25: mod_base = OTHER; note = bicyclic nucleic acid (BNA)
  source 1..25: mol_type = other RNA
acatcaaggaagatggcatttctag

SEQ ID NO: 2258 - RNA, 24 nt, synthetic construct
  misc_feature 1..24: note = Description of Artificial Sequence: Synthetic Antisense oligonucleotide
  modified_base 24: mod_base = OTHER; note = bicyclic nucleic acid (BNA)
  source 1..24: mol_type = other RNA
acatcaaggaagatggcatttcta

SEQ ID NO: 2259 - DNA, 23 bp, synthetic construct
  misc_feature 1..23: note = Description of Artificial Sequence: Synthetic Antisense oligonucleotide
  misc_feature 1..23: note = Original Sequence: acaucaaggaagauggcauuuct
  modified_base 23: mod_base = OTHER; note = bicyclic nucleic acid (BNA)
  source 1..23: mol_type = other DNA
  modified_base 4: mod_base = OTHER; note = Uracil
  modified_base 14: mod_base = OTHER; note = Uracil
  modified_base 19: mod_base = OTHER; note = Uracil
  modified_base 20: mod_base = OTHER; note = Uracil
  modified_base 21: mod_base = OTHER; note = Uracil
acatcaaggaagatggcatttct

SEQ ID NO: 2260 - RNA, 22 nt, synthetic construct
  misc_feature 1..22: note = Description of Artificial Sequence: Synthetic Antisense oligonucleotide
  modified_base 22: mod_base = OTHER; note = bicyclic nucleic acid (BNA)
  source 1..22: mol_type = other RNA
acatcaaggaagatggcatttc

SEQ ID NO: 2261 - DNA, 21 bp, synthetic construct
  misc_feature 1..21: note = Description of Artificial Sequence: Synthetic Antisense oligonucleotide
  misc_feature 1..21: note = Original Sequence: acaucaaggaagauggcauut
  modified_base 21: mod_base = OTHER; note = bicyclic nucleic acid (BNA)
  source 1..21: mol_type = other DNA
  modified_base 4: mod_base = OTHER; note = Uracil
  modified_base 14: mod_base = OTHER; note = Uracil
  modified_base 19: mod_base = OTHER; note = Uracil
  modified_base 20: mod_base = OTHER; note = Uracil
acatcaaggaagatggcattt

SEQ ID NO: 2262 - DNA, 20 bp, synthetic construct
  misc_feature 1..20: note = Description of Artificial Sequence: Synthetic Antisense oligonucleotide
  misc_feature 1..20: note = Original Sequence: acaucaaggaagauggcaut
  modified_base 20: mod_base = OTHER; note = bicyclic nucleic acid (BNA)
  source 1..20: mol_type = other DNA
  modified_base 4: mod_base = OTHER; note = Uracil
  modified_base 14: mod_base = OTHER; note = Uracil
  modified_base 19: mod_base = OTHER; note = Uracil
acatcaaggaagatggcatt

SEQ ID NO: 2263 - DNA, 19 bp, synthetic construct
  misc_feature 1..19: note = Description of Artificial Sequence: Synthetic Antisense oligonucleotide
  misc_feature 1..19: note = Original Sequence: acaucaaggaagauggcat
  modified_base 19: mod_base = OTHER; note = bicyclic nucleic acid (BNA)
  source 1..19: mol_type = other DNA
  modified_base 4: mod_base = OTHER; note = Uracil
  modified_base 14: mod_base = OTHER; note = Uracil
acatcaaggaagatggcat

SEQ ID NO: 2264 - RNA, 18 nt, synthetic construct
  misc_feature 1..18: note = Description of Artificial Sequence: Synthetic Antisense oligonucleotide
  modified_base 18: mod_base = OTHER; note = bicyclic nucleic acid (BNA)
  source 1..18: mol_type = other RNA
acatcaaggaagatggca

SEQ ID NO: 2265 - RNA, 17 nt, synthetic construct
  misc_feature 1..17: note = Description of Artificial Sequence: Synthetic Antisense oligonucleotide
  modified_base 17: mod_base = OTHER; note = bicyclic nucleic acid (BNA)
  source 1..17: mol_type = other RNA
acatcaaggaagatggc

SEQ ID NO: 2266 - RNA, 16 nt, synthetic construct
  misc_feature 1..16: note = Description of Artificial Sequence: Synthetic Antisense oligonucleotide
  modified_base 16: mod_base = OTHER; note = bicyclic nucleic acid (BNA)
  source 1..16: mol_type = other RNA
acatcaaggaagatgg

SEQ ID NO: 2267 - RNA, 15 nt, synthetic construct
  misc_feature 1..15: note = Description of Artificial Sequence: Synthetic Antisense oligonucleotide
  modified_base 15: mod_base = OTHER; note = bicyclic nucleic acid (BNA)
  source 1..15: mol_type = other RNA
acatcaaggaagatg

SEQ ID NO: 2268 - DNA, 14 bp, synthetic construct
  misc_feature 1..14: note = Description of Artificial Sequence: Synthetic Antisense oligonucleotide
  misc_feature 1..14: note = Original Sequence: acaucaaggaagat
  modified_base 14: mod_base = OTHER; note = bicyclic nucleic acid (BNA)
  source 1..14: mol_type = other DNA
  modified_base 4: mod_base = OTHER; note = Uracil
acatcaaggaagat

SEQ ID NO: 2269 - RNA, 13 nt, synthetic construct
  misc_feature 1..13: note = Description of Artificial Sequence: Synthetic Antisense oligonucleotide
  modified_base 13: mod_base = OTHER; note = bicyclic nucleic acid (BNA)
  source 1..13: mol_type = other RNA
acatcaaggaaga

SEQ ID NO: 2270 - RNA, 12 nt, synthetic construct
  misc_feature 1..12: note = Description of Artificial Sequence: Synthetic Antisense oligonucleotide
  modified_base 12: mod_base = OTHER; note = bicyclic nucleic acid (BNA)
  source 1..12: mol_type = other RNA
acatcaaggaag

SEQ ID NO: 2271 - RNA, 24 nt, synthetic construct
  misc_feature 1..24: note = Description of Artificial Sequence: Synthetic Antisense oligonucleotide
  modified_base 24: mod_base = OTHER; note = bicyclic nucleic acid (BNA)
  source 1..24: mol_type = other RNA
catcaaggaagatggcatttctag

SEQ ID NO: 2272 - RNA, 23 nt, synthetic construct
  misc_feature 1..23: note = Description of Artificial Sequence: Synthetic Antisense oligonucleotide
  modified_base 23: mod_base = OTHER; note = bicyclic nucleic acid (BNA)
  source 1..23: mol_type = other RNA
catcaaggaagatggcatttcta

SEQ ID NO: 2273 - DNA, 22 bp, synthetic construct
  misc_feature 1..22: note = Description of Artificial Sequence: Synthetic Antisense oligonucleotide
  misc_feature 1..22: note = Original Sequence: caucaaggaagauggcauuuct
  modified_base 22: mod_base = OTHER; note = bicyclic nucleic acid (BNA)
  source 1..22: mol_type = other DNA
  modified_base 3: mod_base = OTHER; note = Uracil
  modified_base 13: mod_base = OTHER; note = Uracil
  modified_base 18: mod_base = OTHER; note = Uracil
  modified_base 19: mod_base = OTHER; note = Uracil
  modified_base 20: mod_base = OTHER; note = Uracil
catcaaggaagatggcatttct

SEQ ID NO: 2274 - RNA, 21 nt, synthetic construct
  misc_feature 1..21: note = Description of Artificial Sequence: Synthetic Antisense oligonucleotide
  modified_base 21: mod_base = OTHER; note = bicyclic nucleic acid (BNA)
  source 1..21: mol_type = other RNA
catcaaggaagatggcatttc

SEQ ID NO: 2275 - DNA, 20 bp, synthetic construct
  misc_feature 1..20: note = Description of Artificial Sequence: Synthetic Antisense oligonucleotide
  misc_feature 1..20: note = Original Sequence: caucaaggaagauggcauut
  modified_base 20: mod_base = OTHER; note = bicyclic nucleic acid (BNA)
  source 1..20: mol_type = other DNA
  modified_base 3: mod_base = OTHER; note = Uracil
  modified_base 13: mod_base = OTHER; note = Uracil
  modified_base 18: mod_base = OTHER; note = Uracil
  modified_base 19: mod_base = OTHER; note = Uracil
catcaaggaagatggcattt

SEQ ID NO: 2276 - DNA, 19 bp, synthetic construct
  misc_feature 1..19: note = Description of Artificial Sequence: Synthetic Antisense oligonucleotide
  misc_feature 1..19: note = Original Sequence: caucaaggaagauggcaut
  modified_base 19: mod_base = OTHER; note = bicyclic nucleic acid (BNA)
  source 1..19: mol_type = other DNA
  modified_base 3: mod_base = OTHER; note = Uracil
  modified_base 13: mod_base = OTHER; note = Uracil
  modified_base 18: mod_base = OTHER; note = Uracil
catcaaggaagatggcatt

SEQ ID NO: 2277 - DNA, 18 bp, synthetic construct
  misc_feature 1..18: note = Description of Artificial Sequence: Synthetic Antisense oligonucleotide
  misc_feature 1..18: note = Original Sequence: caucaaggaagauggcat
  modified_base 18: mod_base = OTHER; note = bicyclic nucleic acid (BNA)
  source 1..18: mol_type = other DNA
  modified_base 3: mod_base = OTHER; note = Uracil
  modified_base 13: mod_base = OTHER; note = Uracil
catcaaggaagatggcat

SEQ ID NO: 2278 - RNA, 17 nt, synthetic construct
  misc_feature 1..17: note = Description of Artificial Sequence: Synthetic Antisense oligonucleotide
  modified_base 17: mod_base = OTHER; note = bicyclic nucleic acid (BNA)
  source 1..17: mol_type = other RNA
catcaaggaagatggca

SEQ ID NO: 2279 - RNA, 16 nt, synthetic construct
  misc_feature 1..16: note = Description of Artificial Sequence: Synthetic Antisense oligonucleotide
  modified_base 16: mod_base = OTHER; note = bicyclic nucleic acid (BNA)
  source 1..16: mol_type = other RNA
catcaaggaagatggc

SEQ ID NO: 2280 - RNA, 15 nt, synthetic construct
  misc_feature 1..15: note = Description of Artificial Sequence: Synthetic Antisense oligonucleotide
  modified_base 15: mod_base = OTHER; note = bicyclic nucleic acid (BNA)
  source 1..15: mol_type = other RNA
catcaaggaagatgg

SEQ ID NO: 2281 - RNA, 14 nt, synthetic construct
  misc_feature 1..14: note = Description of Artificial Sequence: Synthetic Antisense oligonucleotide
  modified_base 14: mod_base = OTHER; note = bicyclic nucleic acid (BNA)
  source 1..14: mol_type = other RNA
catcaaggaagatg

SEQ ID NO: 2282 - DNA, 13 bp, synthetic construct
  misc_feature 1..13: note = Description of Artificial Sequence: Synthetic Antisense oligonucleotide
  misc_feature 1..13: note = Original Sequence: caucaaggaagat
  modified_base 13: mod_base = OTHER; note = bicyclic nucleic acid (BNA)
  source 1..13: mol_type = other DNA
  modified_base 3: mod_base = OTHER; note = Uracil
catcaaggaagat

SEQ ID NO: 2283 - RNA, 12 nt, synthetic construct
  misc_feature 1..12: note = Description of Artificial Sequence: Synthetic Antisense oligonucleotide
  modified_base 12: mod_base = OTHER; note = bicyclic nucleic acid (BNA)
  source 1..12: mol_type = other RNA
catcaaggaaga

SEQ ID NO: 2284 - RNA, 11 nt, synthetic construct
  misc_feature 1..11: note = Description of Artificial Sequence: Synthetic Antisense oligonucleotide
  modified_base 11: mod_base = OTHER; note = bicyclic nucleic acid (BNA)
  source 1..11: mol_type = other RNA
catcaaggaag

SEQ ID NO: 2285 - RNA, 23 nt, synthetic construct
  misc_feature 1..23: note = Description of Artificial Sequence: Synthetic Antisense oligonucleotide
  modified_base 23: mod_base = OTHER; note = bicyclic nucleic acid (BNA)
  source 1..23: mol_type = other RNA
atcaaggaagatggcatttctag

SEQ ID NO: 2286 - RNA, 22 nt, synthetic construct
  misc_feature 1..22: note = Description of Artificial Sequence: Synthetic Antisense oligonucleotide
  modified_base 22: mod_base = OTHER; note = bicyclic nucleic acid (BNA)
  source 1..22: mol_type = other RNA
atcaaggaagatggcatttcta

SEQ ID NO: 2287 - DNA, 21 bp, synthetic construct
  misc_feature 1..21: note = Description of Artificial Sequence: Synthetic Antisense oligonucleotide
  misc_feature 1..21: note = Original Sequence: aucaaggaagauggcauuuct
  modified_base 21: mod_base = OTHER; note = bicyclic nucleic acid (BNA)
  source 1..21: mol_type = other DNA
  modified_base 2: mod_base = OTHER; note = Uracil
  modified_base 12: mod_base = OTHER; note = Uracil
  modified_base 17: mod_base = OTHER; note = Uracil
  modified_base 18: mod_base = OTHER; note = Uracil
  modified_base 19: mod_base = OTHER; note = Uracil
atcaaggaagatggcatttct

SEQ ID NO: 2288 - RNA, 20 nt, synthetic construct
  misc_feature 1..20: note = Description of Artificial Sequence: Synthetic Antisense oligonucleotide
  modified_base 20: mod_base = OTHER; note = bicyclic nucleic acid (BNA)
  source 1..20: mol_type = other RNA
atcaaggaagatggcatttc

SEQ ID NO: 2289 - DNA, 19 bp, synthetic construct
  misc_feature 1..19: note = Description of Artificial Sequence: Synthetic Antisense oligonucleotide
  misc_feature 1..19: note = Original Sequence: aucaaggaagauggcauut
  modified_base 19: mod_base = OTHER; note = bicyclic nucleic acid (BNA)
  source 1..19: mol_type = other DNA
  modified_base 2: mod_base = OTHER; note = Uracil
  modified_base 12: mod_base = OTHER; note = Uracil
  modified_base 17: mod_base = OTHER; note = Uracil
  modified_base 18: mod_base = OTHER; note = Uracil
atcaaggaagatggcattt

SEQ ID NO: 2290 - DNA, 18 bp, synthetic construct
  misc_feature 1..18: note = Description of Artificial Sequence: Synthetic Antisense oligonucleotide
  misc_feature 1..18: note = Original Sequence: aucaaggaagauggcaut
  modified_base 18: mod_base = OTHER; note = bicyclic nucleic acid (BNA)
  source 1..18: mol_type = other DNA
  modified_base 2: mod_base = OTHER; note = Uracil
  modified_base 12: mod_base = OTHER; note = Uracil
  modified_base 17: mod_base = OTHER; note = Uracil
atcaaggaagatggcatt

SEQ ID NO: 2291 - DNA, 17 bp, synthetic construct
  misc_feature 1..17: note = Description of Artificial Sequence: Synthetic Antisense oligonucleotide
  misc_feature 1..17: note = Original Sequence: aucaaggaagauggcat
  modified_base 17: mod_base = OTHER; note = bicyclic nucleic acid (BNA)
  source 1..17: mol_type = other DNA
  modified_base 2: mod_base = OTHER; note = Uracil
  modified_base 12: mod_base = OTHER; note = Uracil
atcaaggaagatggcat

SEQ ID NO: 2292 - RNA, 16 nt, synthetic construct
  misc_feature 1..16: note = Description of Artificial Sequence: Synthetic Antisense oligonucleotide
  modified_base 16: mod_base = OTHER; note = bicyclic nucleic acid (BNA)
  source 1..16: mol_type = other RNA
atcaaggaagatggca

SEQ ID NO: 2293 - RNA, 15 nt, synthetic construct
  misc_feature 1..15: note = Description of Artificial Sequence: Synthetic Antisense oligonucleotide
  modified_base 15: mod_base = OTHER; note = bicyclic nucleic acid (BNA)
  source 1..15: mol_type = other RNA
atcaaggaagatggc

SEQ ID NO: 2294 - RNA, 14 nt, synthetic construct
  misc_feature 1..14: note = Description of Artificial Sequence: Synthetic Antisense oligonucleotide
  modified_base 14: mod_base = OTHER; note = bicyclic nucleic acid (BNA)
  source 1..14: mol_type = other RNA
atcaaggaagatgg

SEQ ID NO: 2295 - RNA, 13 nt, synthetic construct
  misc_feature 1..13: note = Description of Artificial Sequence: Synthetic Antisense oligonucleotide
  modified_base 13: mod_base = OTHER; note = bicyclic nucleic acid (BNA)
  source 1..13: mol_type = other RNA
atcaaggaagatg

SEQ ID NO: 2296 - DNA, 12 bp, synthetic construct
  misc_feature 1..12: note = Description of Artificial Sequence: Synthetic Antisense oligonucleotide
  misc_feature 1..12: note = Original Sequence: aucaaggaagat
  modified_base 12: mod_base = OTHER; note = bicyclic nucleic acid (BNA)
  source 1..12: mol_type = other DNA
  modified_base 2: mod_base = OTHER; note = Uracil
atcaaggaagat

SEQ ID NO: 2297 - RNA, 11 nt, synthetic construct
  misc_feature 1..11: note = Description of Artificial Sequence: Synthetic Antisense oligonucleotide
  modified_base 11: mod_base = OTHER; note = bicyclic nucleic acid (BNA)
  source 1..11: mol_type = other RNA
atcaaggaaga

SEQ ID NO: 2298 - RNA, 10 nt, synthetic construct
  misc_feature 1..10: note = Description of Artificial Sequence: Synthetic Antisense oligonucleotide
  modified_base 10: mod_base = OTHER; note = bicyclic nucleic acid (BNA)
  source 1..10: mol_type = other RNA
atcaaggaag

SEQ ID NO: 2299 - RNA, 18 nt, synthetic construct
  misc_feature 1..18: note = Description of Artificial Sequence: Synthetic Antisense oligonucleotide
  modified_base 1: mod_base = OTHER; note = bicyclic nucleic acid (BNA)
  modified_base 18: mod_base = OTHER; note = bicyclic nucleic acid (BNA)
  source 1..18: mol_type = other RNA
ggtaagttctgtccaagc

SEQ ID NO: 2300 - RNA, 18 nt, synthetic construct
  misc_feature 1..18: note = Description of Artificial Sequence: Synthetic Antisense oligonucleotide
  modified_base 1: mod_base = OTHER; note = bicyclic nucleic acid (BNA)
  modified_base 18: mod_base = OTHER; note = bicyclic nucleic acid (BNA)
  source 1..18: mol_type = other RNA
gtaagttctgtccaagcc

SEQ ID NO: 2301 - RNA, 18 nt, synthetic construct
  misc_feature 1..18: note = Description of Artificial Sequence: Synthetic Antisense oligonucleotide
  modified_base 1: mod_base = OTHER; note = bicyclic nucleic acid (BNA)
  modified_base 18: mod_base = OTHER; note = bicyclic nucleic acid (BNA)
  source 1..18: mol_type = other RNA
agtcggtaagttctgtcc

SEQ ID NO: 2302 - RNA, 18 nt, synthetic construct
  misc_feature 1..18: note = Description of Artificial Sequence: Synthetic Antisense oligonucleotide
  modified_base 1: mod_base = OTHER; note = bicyclic nucleic acid (BNA)
  modified_base 18: mod_base = OTHER; note = bicyclic nucleic acid (BNA)
  source 1..18: mol_type = other RNA
ctgtccaagcccggttga

SEQ ID NO: 2303 - DNA, 15 bp, synthetic construct
  misc_feature 1..15: note = Description of Artificial Sequence: Synthetic Antisense oligonucleotide
  misc_feature 1..15: note = Original Sequence: taaguucuguccaag
  modified_base 1: mod_base = OTHER; note = bicyclic nucleic acid (BNA)
  modified_base 15: mod_base = OTHER; note = bicyclic nucleic acid (BNA)
  source 1..15: mol_type = other DNA
  modified_base 5: mod_base = OTHER; note = Uracil
  modified_base 6: mod_base = OTHER; note = Uracil
  modified_base 8: mod_base = OTHER; note = Uracil
  modified_base 10: mod_base = OTHER; note = Uracil
taagttctgtccaag

SEQ ID NO: 2304 - DNA, 20 bp, synthetic construct
  misc_feature 1..20: note = Description of Artificial Sequence: Synthetic Antisense oligonucleotide
  misc_feature 1..20: note = Original Sequence: tucuguccaagcccgguuga
  modified_base 1: mod_base = OTHER; note = bicyclic nucleic acid (BNA)
  modified_base 20: mod_base = OTHER; note = bicyclic nucleic acid (BNA)
  source 1..20: mol_type = other DNA
  modified_base 2: mod_base = OTHER; note = Uracil
  modified_base 4: mod_base = OTHER; note = Uracil
  modified_base 6: mod_base = OTHER; note = Uracil
  modified_base 17: mod_base = OTHER; note = Uracil
  modified_base 18: mod_base = OTHER; note = Uracil
ttctgtccaagcccggttga

SEQ ID NO: 2305 - DNA, 19 bp, synthetic construct
  misc_feature 1..19: note = Description of Artificial Sequence: Synthetic Antisense oligonucleotide
  misc_feature 1..19: note = Original Sequence: tucuguccaagcccgguug
  modified_base 1: mod_base = OTHER; note = bicyclic nucleic acid (BNA)
  modified_base 19: mod_base = OTHER; note = bicyclic nucleic acid (BNA)
  source 1..19: mol_type = other DNA
  modified_base 2: mod_base = OTHER; note = Uracil
  modified_base 4: mod_base = OTHER; note = Uracil
  modified_base 6: mod_base = OTHER; note = Uracil
  modified_base 17: mod_base = OTHER; note = Uracil
  modified_base 18: mod_base = OTHER; note = Uracil
ttctgtccaagcccggttg

SEQ ID NO: 2306 - DNA, 18 bp, synthetic construct
  misc_feature 1..18: note = Description of Artificial Sequence: Synthetic Antisense oligonucleotide
  misc_feature 1..18: note = Original Sequence: tucuguccaagcccggut
  modified_base 1: mod_base = OTHER; note = bicyclic nucleic acid (BNA)
  modified_base 18: mod_base = OTHER; note = bicyclic nucleic acid (BNA)
  source 1..18: mol_type = other DNA
  modified_base 2: mod_base = OTHER; note = Uracil
  modified_base 4: mod_base = OTHER; note = Uracil
  modified_base 6: mod_base = OTHER; note = Uracil
  modified_base 17: mod_base = OTHER; note = Uracil
ttctgtccaagcccggtt

SEQ ID NO: 2307 - DNA, 17 bp, synthetic construct
  misc_feature 1..17: note = Description of Artificial Sequence: Synthetic Antisense oligonucleotide
  misc_feature 1..17: note = Original Sequence: tucuguccaagcccggt
  modified_base 1: mod_base = OTHER; note = bicyclic nucleic acid (BNA)
  modified_base 17: mod_base = OTHER; note = bicyclic nucleic acid (BNA)
  source 1..17: mol_type = other DNA
  modified_base 2: mod_base = OTHER; note = Uracil
  modified_base 4: mod_base = OTHER; note = Uracil
  modified_base 6: mod_base = OTHER; note = Uracil
ttctgtccaagcccggt

SEQ ID NO: 2308 - DNA, 16 bp, synthetic construct
  misc_feature 1..16: note = Description of Artificial Sequence: Synthetic Antisense oligonucleotide
  misc_feature 1..16: note = Original Sequence: tucuguccaagcccgg
  modified_base 1: mod_base = OTHER; note = bicyclic nucleic acid (BNA)
  modified_base 16: mod_base = OTHER; note = bicyclic nucleic acid (BNA)
  source 1..16: mol_type = other DNA
  modified_base 2: mod_base = OTHER; note = Uracil
  modified_base 4: mod_base = OTHER; note = Uracil
  modified_base 6: mod_base = OTHER; note = Uracil
ttctgtccaagcccgg

SEQ ID NO: 2309 - DNA, 15 bp, synthetic construct
  misc_feature 1..15: note = Description of Artificial Sequence: Synthetic Antisense oligonucleotide
  misc_feature 1..15: note = Original Sequence: tucuguccaagcccg
  modified_base 1: mod_base = OTHER; note = bicyclic nucleic acid (BNA)
  modified_base 15: mod_base = OTHER; note = bicyclic nucleic acid (BNA)
  source 1..15: mol_type = other DNA
  modified_base 2: mod_base = OTHER; note = Uracil
  modified_base 4: mod_base = OTHER; note = Uracil
  modified_base 6: mod_base = OTHER; note = Uracil
ttctgtccaagcccg

SEQ ID NO: 2310 - DNA, 14 bp, synthetic construct
  misc_feature 1..14: note = Description of Artificial Sequence: Synthetic Antisense oligonucleotide
  misc_feature 1..14: note = Original Sequence: tucuguccaagccc
  modified_base 1: mod_base = OTHER; note = bicyclic nucleic acid (BNA)
  modified_base 14: mod_base = OTHER; note = bicyclic nucleic acid (BNA)
  source 1..14: mol_type = other DNA
  modified_base 2: mod_base = OTHER; note = Uracil
  modified_base 4: mod_base = OTHER; note = Uracil
  modified_base 6: mod_base = OTHER; note = Uracil
ttctgtccaagccc

SEQ ID NO: 2311 - DNA, 13 bp, synthetic construct
  misc_feature 1..13: note = Description of Artificial Sequence: Synthetic Antisense oligonucleotide
  misc_feature 1..13: note = Original Sequence: tucuguccaagcc
  modified_base 1: mod_base = OTHER; note = bicyclic nucleic acid (BNA)
  modified_base 13: mod_base = OTHER; note = bicyclic nucleic acid (BNA)
  source 1..13: mol_type = other DNA
  modified_base 2: mod_base = OTHER; note = Uracil
  modified_base 4: mod_base = OTHER; note = Uracil
  modified_base 6: mod_base = OTHER; note = Uracil
ttctgtccaagcc

SEQ ID NO: 2312 - DNA, 12 bp, synthetic construct
  misc_feature 1..12: note = Description of Artificial Sequence: Synthetic Antisense oligonucleotide
  misc_feature 1..12: note = Original Sequence: tucuguccaagc
  modified_base 1: mod_base = OTHER; note = bicyclic nucleic acid (BNA)
  modified_base 12: mod_base = OTHER; note = bicyclic nucleic acid (BNA)
  source 1..12: mol_type = other DNA
  modified_base 2: mod_base = OTHER; note = Uracil
  modified_base 4: mod_base = OTHER; note = Uracil
  modified_base 6: mod_base = OTHER; note = Uracil
ttctgtccaagc

SEQ ID NO: 2313 - DNA, 11 bp, synthetic construct
  misc_feature 1..11: note = Description of Artificial Sequence: Synthetic Antisense oligonucleotide
  misc_feature 1..11: note = Original Sequence: tucuguccaag
  modified_base 1: mod_base = OTHER; note = bicyclic nucleic acid (BNA)
  modified_base 11: mod_base = OTHER; note = bicyclic nucleic acid (BNA)
  source 1..11: mol_type = other DNA
  modified_base 2: mod_base = OTHER; note = Uracil
  modified_base 4: mod_base = OTHER; note = Uracil
  modified_base 6: mod_base = OTHER; note = Uracil
ttctgtccaag

SEQ ID NO: 2314 - DNA, 10 bp, synthetic construct
  misc_feature 1..10: note = Description of Artificial Sequence: Synthetic Antisense oligonucleotide
  misc_feature 1..10: note = Original Sequence: tucuguccaa
  modified_base 1: mod_base = OTHER; note = bicyclic nucleic acid (BNA)
  modified_base 10: mod_base = OTHER; note = bicyclic nucleic acid (BNA)
  source 1..10: mol_type = other DNA
  modified_base 2: mod_base = OTHER; note = Uracil
  modified_base 4: mod_base = OTHER; note = Uracil
  modified_base 6: mod_base = OTHER; note = Uracil
ttctgtccaa

SEQ ID NO: 2315-2316 - skipped (2 entries)

SEQ ID NO: 2317 - DNA, 19 bp, synthetic construct
  misc_feature 1..19: note = Description of Artificial Sequence: Synthetic Antisense oligonucleotide
  misc_feature 1..19: note = Original Sequence: tcuguccaagcccgguuga
  modified_base 1: mod_base = OTHER; note = bicyclic nucleic acid (BNA)
  modified_base 19: mod_base = OTHER; note = bicyclic nucleic acid (BNA)
  source 1..19: mol_type = other DNA
  modified_base 3: mod_base = OTHER; note = Uracil
  modified_base 5: mod_base = OTHER; note = Uracil
  modified_base 16: mod_base = OTHER; note = Uracil
  modified_base 17: mod_base = OTHER; note = Uracil
tctgtccaagcccggttga

SEQ ID NO: 2318 - DNA, 18 bp, synthetic construct
  misc_feature 1..18: note = Description of Artificial Sequence: Synthetic Antisense oligonucleotide
  misc_feature 1..18: note = Original Sequence: tcuguccaagcccgguug
  modified_base 1: mod_base = OTHER; note = bicyclic nucleic acid (BNA)
  modified_base 18: mod_base = OTHER; note = bicyclic nucleic acid (BNA)
  source 1..18: mol_type = other DNA
  modified_base 3: mod_base = OTHER; note = Uracil
  modified_base 5: mod_base = OTHER; note = Uracil
  modified_base 16: mod_base = OTHER; note = Uracil
  modified_base 17: mod_base = OTHER; note = Uracil
tctgtccaagcccggttg

SEQ ID NO: 2319 - DNA, 17 bp, synthetic construct
  misc_feature 1..17: note = Description of Artificial Sequence: Synthetic Antisense oligonucleotide
  misc_feature 1..17: note = Original Sequence: tcuguccaagcccggut
  modified_base 1: mod_base = OTHER; note = bicyclic nucleic acid (BNA)
  modified_base 17: mod_base = OTHER; note = bicyclic nucleic acid (BNA)
  source 1..17: mol_type = other DNA
  modified_base 3: mod_base = OTHER; note = Uracil
  modified_base 5: mod_base = OTHER; note = Uracil
  modified_base 16: mod_base = OTHER; note = Uracil
tctgtccaagcccggtt

SEQ ID NO: 2320 - DNA, 16 bp, synthetic construct
  misc_feature 1..16: note = Description of Artificial Sequence: Synthetic Antisense oligonucleotide
  misc_feature 1..16: note = Original Sequence: tcuguccaagcccggt
  modified_base 1: mod_base = OTHER; note = bicyclic nucleic acid (BNA)
  modified_base 16: mod_base = OTHER; note = bicyclic nucleic acid (BNA)
  source 1..16: mol_type = other DNA
  modified_base 3: mod_base = OTHER; note = Uracil
  modified_base 5: mod_base = OTHER; note = Uracil
tctgtccaagcccggt

SEQ ID NO: 2321 - DNA, 15 bp, synthetic construct
  misc_feature 1..15: note = Description of Artificial Sequence: Synthetic Antisense oligonucleotide
  misc_feature 1..15: note = Original Sequence: tcuguccaagcccgg
  modified_base 1: mod_base = OTHER; note = bicyclic nucleic acid (BNA)
  modified_base 15: mod_base = OTHER; note = bicyclic nucleic acid (BNA)
  source 1..15: mol_type = other DNA
  modified_base 3: mod_base = OTHER; note = Uracil
  modified_base 5: mod_base = OTHER; note = Uracil
tctgtccaagcccgg

SEQ ID NO: 2322 - DNA, 14 bp, synthetic construct
  misc_feature 1..14: note = Description of Artificial Sequence: Synthetic Antisense oligonucleotide
  misc_feature 1..14: note = Original Sequence: tcuguccaagcccg
  modified_base 1: mod_base = OTHER; note = bicyclic nucleic acid (BNA)
  modified_base 14: mod_base = OTHER; note = bicyclic nucleic acid (BNA)
  source 1..14: mol_type = other DNA
  modified_base 3: mod_base = OTHER; note = Uracil
  modified_base 5: mod_base = OTHER; note = Uracil
tctgtccaagcccg

SEQ ID NO: 2323 - DNA, 13 bp, synthetic construct
  misc_feature 1..13: note = Description of Artificial Sequence: Synthetic Antisense oligonucleotide
  misc_feature 1..13: note = Original Sequence: tcuguccaagccc
  modified_base 1: mod_base = OTHER; note = bicyclic nucleic acid (BNA)
  modified_base 13: mod_base = OTHER; note = bicyclic nucleic acid (BNA)
  source 1..13: mol_type = other DNA
  modified_base 3: mod_base = OTHER; note = Uracil
  modified_base 5: mod_base = OTHER; note = Uracil
tctgtccaagccc

SEQ ID NO: 2324 - DNA, 12 bp, synthetic construct
  misc_feature 1..12: note = Description of Artificial Sequence: Synthetic Antisense oligonucleotide
  misc_feature 1..12: note = Original Sequence: tcuguccaagcc
  modified_base 1: mod_base = OTHER; note = bicyclic nucleic acid (BNA)
  modified_base 12: mod_base = OTHER; note = bicyclic nucleic acid (BNA)
  source 1..12: mol_type = other DNA
  modified_base 3: mod_base = OTHER; note = Uracil
  modified_base 5: mod_base = OTHER; note = Uracil
tctgtccaagcc

SEQ ID NO: 2325 - DNA, 11 bp, synthetic construct
  misc_feature 1..11: note = Description of Artificial Sequence: Synthetic Antisense oligonucleotide
  misc_feature 1..11: note = Original Sequence: tcuguccaagc
  modified_base 1: mod_base = OTHER; note = bicyclic nucleic acid (BNA)
  modified_base 11: mod_base = OTHER; note = bicyclic nucleic acid (BNA)
  source 1..11: mol_type = other DNA
  modified_base 3: mod_base = OTHER; note = Uracil
  modified_base 5: mod_base = OTHER; note = Uracil
tctgtccaagc

SEQ ID NO: 2326 - DNA, 10 bp, synthetic construct
  misc_feature 1..10: note = Description of Artificial Sequence: Synthetic Antisense oligonucleotide
  misc_feature 1..10: note = Original Sequence: tcuguccaag
  modified_base 1: mod_base = OTHER; note = bicyclic nucleic acid (BNA)
  modified_base 10: mod_base = OTHER; note = bicyclic nucleic acid (BNA)
  source 1..10: mol_type = other DNA
  modified_base 3: mod_base = OTHER; note = Uracil
  modified_base 5: mod_base = OTHER; note = Uracil
tctgtccaag

SEQ ID NO: 2327-2328 - skipped (2 entries)

SEQ ID NO: 2329 - RNA, 17 nt, synthetic construct
  misc_feature 1..17: note = Description of Artificial Sequence: Synthetic Antisense oligonucleotide
  modified_base 1: mod_base = OTHER; note = bicyclic nucleic acid (BNA)
  modified_base 17: mod_base = OTHER; note = bicyclic nucleic acid (BNA)
  source 1..17: mol_type = other RNA
ctgtccaagcccggttg

SEQ ID NO: 2330 - DNA, 16 bp, synthetic construct
  misc_feature 1..16: note = Description of Artificial Sequence: Synthetic Antisense oligonucleotide
  misc_feature 1..16: note = Original Sequence: cuguccaagcccggut
  modified_base 1: mod_base = OTHER; note = bicyclic nucleic acid (BNA)
  modified_base 16: mod_base = OTHER; note = bicyclic nucleic acid (BNA)
  source 1..16: mol_type = other DNA
  modified_base 2: mod_base = OTHER; note = Uracil
  modified_base 4: mod_base = OTHER; note = Uracil
  modified_base 15: mod_base = OTHER; note = Uracil
ctgtccaagcccggtt

SEQ ID NO: 2331 - DNA, 15 bp, synthetic construct
  misc_feature 1..15: note = Description of Artificial Sequence: Synthetic Antisense oligonucleotide
  misc_feature 1..15: note = Original Sequence: cuguccaagcccggt
  modified_base 1: mod_base = OTHER; note = bicyclic nucleic acid (BNA)
  modified_base 15: mod_base = OTHER; note = bicyclic nucleic acid (BNA)
  source 1..15: mol_type = other DNA
  modified_base 2: mod_base = OTHER; note = Uracil
  modified_base 4: mod_base = OTHER; note = Uracil
ctgtccaagcccggt

SEQ ID NO: 2332 - RNA, 14 nt, synthetic construct
  misc_feature 1..14: note = Description of Artificial Sequence: Synthetic Antisense oligonucleotide
  modified_base 1: mod_base = OTHER; note = bicyclic nucleic acid (BNA)
  modified_base 14: mod_base = OTHER; note = bicyclic nucleic acid (BNA)
  source 1..14: mol_type = other RNA
ctgtccaagcccgg

SEQ ID NO: 2333 - RNA, 13 nt, synthetic construct
  misc_feature 1..13: note = Description of Artificial Sequence: Synthetic Antisense oligonucleotide
  modified_base 1: mod_base = OTHER; note = bicyclic nucleic acid (BNA)
  modified_base 13: mod_base = OTHER; note = bicyclic nucleic acid (BNA)
  source 1..13: mol_type = other RNA
ctgtccaagcccg

SEQ ID NO: 2334 - RNA, 12 nt, synthetic construct
  misc_feature 1..12: note = Description of Artificial Sequence: Synthetic Antisense oligonucleotide
  modified_base 1: mod_base = OTHER; note = bicyclic nucleic acid (BNA)
  modified_base 12: mod_base = OTHER; note = bicyclic nucleic acid (BNA)
  source 1..12: mol_type = other RNA
ctgtccaagccc

SEQ ID NO: 2335 - RNA, 11 nt, synthetic construct
  misc_feature 1..11: note = Description of Artificial Sequence: Synthetic Antisense oligonucleotide
  modified_base 1: mod_base = OTHER; note = bicyclic nucleic acid (BNA)
  modified_base 11: mod_base = OTHER; note = bicyclic nucleic acid (BNA)
  source 1..11: mol_type = other RNA
ctgtccaagcc

SEQ ID NO: 2336 - RNA, 10 nt, synthetic construct
  misc_feature 1..10: note = Description of Artificial Sequence: Synthetic Antisense oligonucleotide
  modified_base 1: mod_base = OTHER; note = bicyclic nucleic acid (BNA)
  modified_base 10: mod_base = OTHER; note = bicyclic nucleic acid (BNA)
  source 1..10: mol_type = other RNA
ctgtccaagc

SEQ ID NO: 2337-2338 - skipped (2 entries)

SEQ ID NO: 2339 - RNA, 20 nt, synthetic construct
  misc_feature 1..20: note = Description of Artificial Sequence: Synthetic Antisense oligonucleotide
  modified_base 1: mod_base = OTHER; note = bicyclic nucleic acid (BNA)
  modified_base 20: mod_base = OTHER; note = bicyclic nucleic acid (BNA)
  source 1..20: mol_type = other RNA
gttctgtccaagcccggttg

SEQ ID NO: 2340 - DNA, 19 bp, synthetic construct
  misc_feature 1..19: note = Description of Artificial Sequence: Synthetic Antisense oligonucleotide
  misc_feature 1..19: note = Original Sequence: guucuguccaagcccggut
  modified_base 1: mod_base = OTHER; note = bicyclic nucleic acid (BNA)
  modified_base 19: mod_base = OTHER; note = bicyclic nucleic acid (BNA)
  source 1..19: mol_type = other DNA
  modified_base 2: mod_base = OTHER; note = Uracil
  modified_base 3: mod_base = OTHER; note = Uracil
  modified_base 5: mod_base = OTHER; note = Uracil
  modified_base 7: mod_base = OTHER; note = Uracil
  modified_base 18: mod_base = OTHER; note = Uracil
gttctgtccaagcccggtt

SEQ ID NO: 2341 - DNA, 18 bp, synthetic construct
  misc_feature 1..18: note = Description of Artificial Sequence: Synthetic Antisense oligonucleotide
  misc_feature 1..18: note = Original Sequence: guucuguccaagcccggt
  modified_base 1: mod_base = OTHER; note = bicyclic nucleic acid (BNA)
  modified_base 18: mod_base = OTHER; note = bicyclic nucleic acid (BNA)
  source 1..18: mol_type = other DNA
  modified_base 2: mod_base = OTHER; note = Uracil
  modified_base 3: mod_base = OTHER; note = Uracil
  modified_base 5: mod_base = OTHER; note = Uracil
  modified_base 7: mod_base = OTHER; note = Uracil
gttctgtccaagcccggt

SEQ ID NO: 2342 - RNA, 17 nt, synthetic construct
  misc_feature 1..17: note = Description of Artificial Sequence: Synthetic Antisense oligonucleotide
  modified_base 1: mod_base = OTHER; note = bicyclic nucleic acid (BNA)
  modified_base 17: mod_base = OTHER; note = bicyclic nucleic acid (BNA)
  source 1..17: mol_type = other RNA
gttctgtccaagcccgg

SEQ ID NO: 2343 - RNA, 16 nt, synthetic construct
  misc_feature 1..16: note = Description of Artificial Sequence: Synthetic Antisense oligonucleotide
  modified_base 1: mod_base = OTHER; note = bicyclic nucleic acid (BNA)
  modified_base 16: mod_base = OTHER; note = bicyclic nucleic acid (BNA)
  source 1..16: mol_type = other RNA
gttctgtccaagcccg

SEQ ID NO: 2344 - RNA, 15 nt, synthetic construct
  misc_feature 1..15: note = Description of Artificial Sequence: Synthetic Antisense oligonucleotide
  modified_base 1: mod_base = OTHER; note = bicyclic nucleic acid (BNA)
  modified_base 15: mod_base = OTHER; note = bicyclic nucleic acid (BNA)
  source 1..15: mol_type = other RNA
gttctgtccaagccc

SEQ ID NO: 2345 - RNA, 14 nt, synthetic construct
  misc_feature 1..14: note = Description of Artificial Sequence: Synthetic Antisense oligonucleotide
  modified_base 1: mod_base = OTHER; note = bicyclic nucleic acid (BNA)
  modified_base 14: mod_base = OTHER; note = bicyclic nucleic acid (BNA)
  source 1..14: mol_type = other RNA
gttctgtccaagcc

SEQ ID NO: 2346 - RNA, 13 nt, synthetic construct
  misc_feature 1..13: note = Description of Artificial Sequence: Synthetic Antisense oligonucleotide
  modified_base 1: mod_base = OTHER; note = bicyclic nucleic acid (BNA)
  modified_base 13: mod_base = OTHER; note = bicyclic nucleic acid (BNA)
  source 1..13: mol_type = other RNA
gttctgtccaagc

SEQ ID NO: 2347 - RNA, 12 nt, synthetic construct
  misc_feature 1..12: note = Description of Artificial Sequence: Synthetic Antisense oligonucleotide
  modified_base 1: mod_base = OTHER; note = bicyclic nucleic acid (BNA)
  modified_base 12: mod_base = OTHER; note = bicyclic nucleic acid (BNA)
  source 1..12: mol_type = other RNA
gttctgtccaag

SEQ ID NO: 2348 - RNA, 11 nt, synthetic construct
  misc_feature 1..11: note = Description of Artificial Sequence: Synthetic Antisense oligonucleotide
  modified_base 1: mod_base = OTHER; note = bicyclic nucleic acid (BNA)
  modified_base 11: mod_base = OTHER; note = bicyclic nucleic acid (BNA)
  source 1..11: mol_type = other RNA
gttctgtccaa

SEQ ID NO: 2349 - RNA, 10 nt, synthetic construct
  misc_feature 1..10: note = Description of Artificial Sequence: Synthetic Antisense oligonucleotide
  modified_base 1: mod_base = OTHER; note = bicyclic nucleic acid (BNA)
  modified_base 10: mod_base = OTHER; note = bicyclic nucleic acid (BNA)
  source 1..10: mol_type = other RNA
gttctgtcca

SEQ ID NO: 2350-2351 - skipped (2 entries)

SEQ ID NO: 2352 - DNA, 20 bp, synthetic construct
  misc_feature 1..20: note = Description of Artificial Sequence: Synthetic Antisense oligonucleotide
  misc_feature 1..20: note = Original Sequence: aguucuguccaagcccggut
  modified_base 1: mod_base = OTHER; note = bicyclic nucleic acid (BNA)
  modified_base 20: mod_base = OTHER; note = bicyclic nucleic acid (BNA)
  source 1..20: mol_type = other DNA
  modified_base 3: mod_base = OTHER; note = Uracil
  modified_base 4: mod_base = OTHER; note = Uracil
  modified_base 6: mod_base = OTHER; note = Uracil
  modified_base 8: mod_base = OTHER; note = Uracil
  modified_base 19: mod_base = OTHER; note = Uracil
agttctgtccaagcccggtt

SEQ ID NO: 2353 - DNA, 19 bp, synthetic construct
  misc_feature 1..19: note = Description of Artificial Sequence: Synthetic Antisense oligonucleotide
  misc_feature 1..19: note = Original Sequence: aguucuguccaagcccggt
  modified_base 1: mod_base = OTHER; note = bicyclic nucleic acid (BNA)
  modified_base 19: mod_base = OTHER; note = bicyclic nucleic acid (BNA)
  source 1..19: mol_type = other DNA
  modified_base 3: mod_base = OTHER; note = Uracil
  modified_base 4: mod_base = OTHER; note = Uracil
  modified_base 6: mod_base = OTHER; note = Uracil
  modified_base 8: mod_base = OTHER; note = Uracil
agttctgtccaagcccggt

SEQ ID NO: 2354 - RNA, 18 nt, synthetic construct
  misc_feature 1..18: note = Description of Artificial Sequence: Synthetic Antisense oligonucleotide
  modified_base 1: mod_base = OTHER; note = bicyclic nucleic acid (BNA)
  modified_base 18: mod_base = OTHER; note = bicyclic nucleic acid (BNA)
  source 1..18: mol_type = other RNA
agttctgtccaagcccgg

SEQ ID NO: 2355 - RNA, 17 nt, synthetic construct
  misc_feature 1..17: note = Description of Artificial Sequence: Synthetic Antisense oligonucleotide
  modified_base 1: mod_base = OTHER; note = bicyclic nucleic acid (BNA)
  modified_base 17: mod_base = OTHER; note = bicyclic nucleic acid (BNA)
  source 1..17: mol_type = other RNA
agttctgtccaagcccg

SEQ ID NO: 2356 - RNA, 16 nt, synthetic construct
  misc_feature 1..16: note = Description of Artificial Sequence: Synthetic Antisense oligonucleotide
  modified_base 1: mod_base = OTHER; note = bicyclic nucleic acid (BNA)
  modified_base 16: mod_base = OTHER; note = bicyclic nucleic acid (BNA)
  source 1..16: mol_type = other RNA
agttctgtccaagccc

SEQ ID NO: 2357 - RNA, 15 nt, synthetic construct
  misc_feature 1..15: note = Description of Artificial Sequence: Synthetic Antisense oligonucleotide
  modified_base 1: mod_base = OTHER; note = bicyclic nucleic acid (BNA)
  modified_base 15: mod_base = OTHER; note = bicyclic nucleic acid (BNA)
  source 1..15: mol_type = other RNA
agttctgtccaagcc

SEQ ID NO: 2358 - RNA, 14 nt, synthetic construct
  misc_feature 1..14: note = Description of Artificial Sequence: Synthetic Antisense oligonucleotide
  modified_base 1: mod_base = OTHER; note = bicyclic nucleic acid (BNA)
  modified_base 14: mod_base = OTHER; note = bicyclic nucleic acid (BNA)
  source 1..14: mol_type = other RNA
agttctgtccaagc

SEQ ID NO: 2359 - RNA, 13 nt, synthetic construct
  misc_feature 1..13: note = Description of Artificial Sequence: Synthetic Antisense oligonucleotide
  modified_base 1: mod_base = OTHER; note = bicyclic nucleic acid (BNA)
  modified_base 13: mod_base = OTHER; note = bicyclic nucleic acid (BNA)
  source 1..13: mol_type = other RNA
agttctgtccaag

SEQ ID NO: 2360 - RNA, 12 nt, synthetic construct
  misc_feature 1..12: note = Description of Artificial Sequence: Synthetic Antisense oligonucleotide
  modified_base 1: mod_base = OTHER; note = bicyclic nucleic acid (BNA)
  modified_base 12: mod_base = OTHER; note = bicyclic nucleic acid (BNA)
  source 1..12: mol_type = other RNA
agttctgtccaa

SEQ ID NO: 2361 - RNA, 11 nt, synthetic construct
  misc_feature 1..11: note = Description of Artificial Sequence: Synthetic Antisense oligonucleotide
  modified_base 1: mod_base = OTHER; note = bicyclic nucleic acid (BNA)
  modified_base 11: mod_base = OTHER; note = bicyclic nucleic acid (BNA)
  source 1..11: mol_type = other RNA
agttctgtcca

SEQ ID NO: 2362 - RNA, 10 nt, synthetic construct
  misc_feature 1..10: note = Description of Artificial Sequence: Synthetic Antisense oligonucleotide
  modified_base 1: mod_base = OTHER; note = bicyclic nucleic acid (BNA)
  modified_base 10: mod_base = OTHER; note = bicyclic nucleic acid (BNA)
  source 1..10: mol_type = other RNA
agttctgtcc

SEQ ID NO: 2363-2364 - skipped (2 entries)

SEQ ID NO: 2365 - DNA, 20 bp, synthetic construct
  misc_feature 1..20: note = Description of Artificial Sequence: Synthetic Antisense oligonucleotide
  misc_feature 1..20: note = Original Sequence: aaguucuguccaagcccggt
  modified_base 1: mod_base = OTHER; note = bicyclic nucleic acid (BNA)
  modified_base 20: mod_base = OTHER; note = bicyclic nucleic acid (BNA)
  source 1..20: mol_type = other DNA
  modified_base 4: mod_base = OTHER; note = Uracil
  modified_base 5: mod_base = OTHER; note = Uracil
  modified_base 7: mod_base = OTHER; note = Uracil
  modified_base 9: mod_base = OTHER; note = Uracil
aagttctgtccaagcccggt

SEQ ID NO: 2366 - RNA, 19 nt, synthetic construct
  misc_feature 1..19: note = Description of Artificial Sequence: Synthetic Antisense oligonucleotide
  modified_base 1: mod_base = OTHER; note = bicyclic nucleic acid (BNA)
  modified_base 19: mod_base = OTHER; note = bicyclic nucleic acid (BNA)
  source 1..19: mol_type = other RNA
aagttctgtccaagcccgg

SEQ ID NO: 2367 - RNA, 18 nt, synthetic construct
  misc_feature 1..18: note = Description of Artificial Sequence: Synthetic Antisense oligonucleotide
  modified_base 1: mod_base = OTHER; note = bicyclic nucleic acid (BNA)
  modified_base 18: mod_base = OTHER; note = bicyclic nucleic acid (BNA)
  source 1..18: mol_type = other RNA
aagttctgtccaagcccg

SEQ ID NO: 2368 - RNA, 17 nt, synthetic construct
  misc_feature 1..17: note = Description of Artificial Sequence: Synthetic Antisense oligonucleotide
  modified_base 1: mod_base = OTHER; note = bicyclic nucleic acid (BNA)
  modified_base 17: mod_base = OTHER; note = bicyclic nucleic acid (BNA)
  source 1..17: mol_type = other RNA
aagttctgtccaagccc

SEQ ID NO: 2369 - RNA, 16 nt, synthetic construct
  misc_feature 1..16: note = Description of Artificial Sequence: Synthetic Antisense oligonucleotide
  modified_base 1: mod_base = OTHER; note = bicyclic nucleic acid (BNA)
  modified_base 16: mod_base = OTHER; note = bicyclic nucleic acid (BNA)
  source 1..16: mol_type = other RNA
aagttctgtccaagcc

SEQ ID NO: 2370 - RNA, 15 nt, synthetic construct
  misc_feature 1..15: note = Description of Artificial Sequence: Synthetic Antisense oligonucleotide
  modified_base 1: mod_base = OTHER; note = bicyclic nucleic acid (BNA)
  modified_base 15: mod_base = OTHER; note = bicyclic nucleic acid (BNA)
  source 1..15: mol_type = other RNA
aagttctgtccaagc

SEQ ID NO: 2371 - RNA, 14 nt, synthetic construct
  misc_feature 1..14: note = Description of Artificial Sequence: Synthetic Antisense oligonucleotide
  modified_base 1: mod_base = OTHER; note = bicyclic nucleic acid (BNA)
  modified_base 14: mod_base = OTHER; note = bicyclic nucleic acid (BNA)
  source 1..14: mol_type = other RNA
aagttctgtccaag

SEQ ID NO: 2372 - RNA, 13 nt, synthetic construct
  misc_feature 1..13: note = Description of Artificial Sequence: Synthetic Antisense oligonucleotide
  modified_base 1: mod_base = OTHER; note = bicyclic nucleic acid (BNA)
  modified_base 13: mod_base = OTHER; note = bicyclic nucleic acid (BNA)
  source 1..13: mol_type = other RNA
aagttctgtccaa

SEQ ID NO: 2373 - RNA, 12 nt, synthetic construct
  misc_feature 1..12: note = Description of Artificial Sequence: Synthetic Antisense oligonucleotide
  modified_base 1: mod_base = OTHER; note = bicyclic nucleic acid (BNA)
  modified_base 12: mod_base = OTHER; note = bicyclic nucleic acid (BNA)
  source 1..12: mol_type = other RNA
aagttctgtcca

SEQ ID NO: 2374 - RNA, 11 nt, synthetic construct
  misc_feature 1..11: note = Description of Artificial Sequence: Synthetic Antisense oligonucleotide
  modified_base 1: mod_base = OTHER; note = bicyclic nucleic acid (BNA)
  modified_base 11: mod_base = OTHER; note = bicyclic nucleic acid (BNA)
  source 1..11: mol_type = other RNA
aagttctgtcc

SEQ ID NO: 2375 - RNA, 10 nt, synthetic construct
  misc_feature 1..10: note = Description of Artificial Sequence: Synthetic Antisense oligonucleotide
  modified_base 1: mod_base = OTHER; note = bicyclic nucleic acid (BNA)
  modified_base 10: mod_base = OTHER; note = bicyclic nucleic acid (BNA)
  source 1..10: mol_type = other RNA
aagttctgtc

SEQ ID NO: 2376-2377 - skipped (2 entries)

SEQ ID NO: 2378 - DNA, 20 bp, synthetic construct
  misc_feature 1..20: note = Description of Artificial Sequence: Synthetic Antisense oligonucleotide
  misc_feature 1..20: note = Original Sequence: taaguucuguccaagcccgg
  modified_base 1: mod_base = OTHER; note = bicyclic nucleic acid (BNA)
  modified_base 20: mod_base = OTHER; note = bicyclic nucleic acid (BNA)
  source 1..20: mol_type = other DNA
  modified_base 5: mod_base = OTHER; note = Uracil
  modified_base 6: mod_base = OTHER; note = Uracil
  modified_base 8: mod_base = OTHER; note = Uracil
  modified_base 10: mod_base = OTHER; note = Uracil
taagttctgtccaagcccgg

SEQ ID NO: 2379 - DNA, 19 bp, synthetic construct
  misc_feature 1..19: note = Description of Artificial Sequence: Synthetic Antisense oligonucleotide
  misc_feature 1..19: note = Original Sequence: taaguucuguccaagcccg
  modified_base 1: mod_base = OTHER; note = bicyclic nucleic acid (BNA)
  modified_base 19: mod_base = OTHER; note = bicyclic nucleic acid (BNA)
  source 1..19: mol_type = other DNA
  modified_base 5: mod_base = OTHER; note = Uracil
  modified_base 6: mod_base = OTHER; note = Uracil
  modified_base 8: mod_base = OTHER; note = Uracil
  modified_base 10: mod_base = OTHER; note = Uracil
taagttctgtccaagcccg

SEQ ID NO: 2380 - DNA, 18 bp, synthetic construct
  misc_feature 1..18: note = Description of Artificial Sequence: Synthetic Antisense oligonucleotide
  misc_feature 1..18: note = Original Sequence: taaguucuguccaagccc
  modified_base 1: mod_base = OTHER; note = bicyclic nucleic acid (BNA)
  modified_base 18: mod_base = OTHER; note = bicyclic nucleic acid (BNA)
  source 1..18: mol_type = other DNA
  modified_base 5: mod_base = OTHER; note = Uracil
  modified_base 6: mod_base = OTHER; note = Uracil
  modified_base 8: mod_base = OTHER; note = Uracil
  modified_base 10: mod_base = OTHER; note = Uracil
taagttctgtccaagccc

SEQ ID NO: 2381 - DNA, 17 bp, synthetic construct
  misc_feature 1..17: note = Description of Artificial Sequence: Synthetic Antisense oligonucleotide
  misc_feature 1..17: note = Original Sequence: taaguucuguccaagcc
  modified_base 1: mod_base = OTHER; note = bicyclic nucleic acid (BNA)
  modified_base 17: mod_base = OTHER; note = bicyclic nucleic acid (BNA)
  source 1..17: mol_type = other DNA
  modified_base 5: mod_base = OTHER; note = Uracil
  modified_base 6: mod_base = OTHER; note = Uracil
  modified_base 8: mod_base = OTHER; note = Uracil
  modified_base 10: mod_base = OTHER; note = Uracil
taagttctgtccaagcc

SEQ ID NO: 2382 - DNA, 16 bp, synthetic construct
  misc_feature 1..16: note = Description of Artificial Sequence: Synthetic Antisense oligonucleotide
  misc_feature 1..16: note = Original Sequence: taaguucuguccaagc
  modified_base 1: mod_base = OTHER; note = bicyclic nucleic acid (BNA)
  modified_base 16: mod_base = OTHER; note = bicyclic nucleic acid (BNA)
  source 1..16: mol_type = other DNA
  modified_base 5: mod_base = OTHER; note = Uracil
  modified_base 6: mod_base = OTHER; note = Uracil
  modified_base 8: mod_base = OTHER; note = Uracil
  modified_base 10: mod_base = OTHER; note = Uracil
taagttctgtccaagc

SEQ ID NO: 2383 - DNA, 14 bp, synthetic construct
  misc_feature 1..14: note = Description of Artificial Sequence: Synthetic Antisense oligonucleotide
  misc_feature 1..14: note = Original Sequence: taaguucuguccaa
  modified_base 1: mod_base = OTHER; note = bicyclic nucleic acid (BNA)
  modified_base 14: mod_base = OTHER; note = bicyclic nucleic acid (BNA)
  source 1..14: mol_type = other DNA
  modified_base 5: mod_base = OTHER; note = Uracil
  modified_base 6: mod_base = OTHER; note = Uracil
  modified_base 8: mod_base = OTHER; note = Uracil
  modified_base 10: mod_base = OTHER; note = Uracil
taagttctgtccaa

SEQ ID NO: 2384 - DNA, 13 bp, synthetic construct
  misc_feature 1..13: note = Description of Artificial Sequence: Synthetic Antisense oligonucleotide
  misc_feature 1..13: note = Original Sequence: taaguucugucca
  modified_base 1: mod_base = OTHER; note = bicyclic nucleic acid (BNA)
  modified_base 13: mod_base = OTHER; note = bicyclic nucleic acid (BNA)
  source 1..13: mol_type = other DNA
  modified_base 5: mod_base = OTHER; note = Uracil
  modified_base 6: mod_base = OTHER; note = Uracil
  modified_base 8: mod_base = OTHER; note = Uracil
  modified_base 10: mod_base = OTHER; note = Uracil
taagttctgtcca

SEQ ID NO: 2385 - DNA, 12 bp, synthetic construct
  misc_feature 1..12: note = Description of Artificial Sequence: Synthetic Antisense oligonucleotide
  misc_feature 1..12: note = Original Sequence: taaguucugucc
  modified_base 1: mod_base = OTHER; note = bicyclic nucleic acid (BNA)
  modified_base 12: mod_base = OTHER; note = bicyclic nucleic acid (BNA)
  source 1..12: mol_type = other DNA
  modified_base 5: mod_base = OTHER; note = Uracil
  modified_base 6: mod_base = OTHER; note = Uracil
  modified_base 8: mod_base = OTHER; note = Uracil
  modified_base 10: mod_base = OTHER; note = Uracil
taagttctgtcc

SEQ ID NO: 2386 - DNA, 11 bp, synthetic construct
  misc_feature 1..11: note = Description of Artificial Sequence: Synthetic Antisense oligonucleotide
  misc_feature 1..11: note = Original Sequence: taaguucuguc
  modified_base 1: mod_base = OTHER; note = bicyclic nucleic acid (BNA)
  modified_base 11: mod_base = OTHER; note = bicyclic nucleic acid (BNA)
  source 1..11: mol_type = other DNA
  modified_base 5: mod_base = OTHER; note = Uracil
  modified_base 6: mod_base = OTHER; note = Uracil
  modified_base 8: mod_base = OTHER; note = Uracil
  modified_base 10: mod_base = OTHER; note = Uracil
taagttctgtc

SEQ ID NO: 2387 - DNA, 10 bp, synthetic construct
  misc_feature 1..10: note = Description of Artificial Sequence: Synthetic Antisense oligonucleotide
  misc_feature 1..10: note = Original Sequence: taaguucugt
  modified_base 1: mod_base = OTHER; note = bicyclic nucleic acid (BNA)
  modified_base 10: mod_base = OTHER; note = bicyclic nucleic acid (BNA)
  source 1..10: mol_type = other DNA
  modified_base 5: mod_base = OTHER; note = Uracil
  modified_base 6: mod_base = OTHER; note = Uracil
  modified_base 8: mod_base = OTHER; note = Uracil
taagttctgt

SEQ ID NO: 2388-2389 - skipped (2 entries)

SEQ ID NO: 2390 - RNA, 20 nt, synthetic construct
  misc_feature 1..20: note = Description of Artificial Sequence: Synthetic Antisense oligonucleotide
  modified_base 1: mod_base = OTHER; note = bicyclic nucleic acid (BNA)
  modified_base 20: mod_base = OTHER; note = bicyclic nucleic acid (BNA)
  source 1..20: mol_type = other RNA
gtaagttctgtccaagcccg

SEQ ID NO: 2391 - RNA, 19 nt, synthetic construct
  misc_feature 1..19: note = Description of Artificial Sequence: Synthetic Antisense oligonucleotide
  modified_base 1: mod_base = OTHER; note = bicyclic nucleic acid (BNA)
  modified_base 19: mod_base = OTHER; note = bicyclic nucleic acid (BNA)
  source 1..19: mol_type = other RNA
gtaagttctgtccaagccc

SEQ ID NO: 2392 - RNA, 17 nt, synthetic construct
  misc_feature 1..17: note = Description of Artificial Sequence: Synthetic Antisense oligonucleotide
  modified_base 1: mod_base = OTHER; note = bicyclic nucleic acid (BNA)
  modified_base 17: mod_base = OTHER; note = bicyclic nucleic acid (BNA)
  source 1..17: mol_type = other RNA
gtaagttctgtccaagc

SEQ ID NO: 2393 - RNA, 16 nt, synthetic construct
  misc_feature 1..16: note = Description of Artificial Sequence: Synthetic Antisense oligonucleotide
  modified_base 1: mod_base = OTHER; note = bicyclic nucleic acid (BNA)
  modified_base 16: mod_base = OTHER; note = bicyclic nucleic acid (BNA)
  source 1..16: mol_type = other RNA
gtaagttctgtccaag

SEQ ID NO: 2394 - RNA, 15 nt, synthetic construct
  misc_feature 1..15: note = Description of Artificial Sequence: Synthetic Antisense oligonucleotide
  modified_base 1: mod_base = OTHER; note = bicyclic nucleic acid (BNA)
  modified_base 15: mod_base = OTHER; note = bicyclic nucleic acid (BNA)
  source 1..15: mol_type = other RNA
gtaagttctgtccaa

SEQ ID NO: 2395 - RNA, 14 nt, synthetic construct
  misc_feature 1..14: note = Description of Artificial Sequence: Synthetic Antisense oligonucleotide
  modified_base 1: mod_base = OTHER; note = bicyclic nucleic acid (BNA)
  modified_base 14: mod_base = OTHER; note = bicyclic nucleic acid (BNA)
  source 1..14: mol_type = other RNA
gtaagttctgtcca

SEQ ID NO: 2396 - RNA, 13 nt, synthetic construct
  misc_feature 1..13: note = Description of Artificial Sequence: Synthetic Antisense oligonucleotide
  modified_base 1: mod_base = OTHER; note = bicyclic nucleic acid (BNA)
  modified_base 13: mod_base = OTHER; note = bicyclic nucleic acid (BNA)
  source 1..13: mol_type = other RNA
gtaagttctgtcc

SEQ ID NO: 2397 - RNA, 12 nt, synthetic construct
  misc_feature 1..12: note = Description of Artificial Sequence: Synthetic Antisense oligonucleotide
  modified_base 1: mod_base = OTHER; note = bicyclic nucleic acid (BNA)
  modified_base 12: mod_base = OTHER; note = bicyclic nucleic acid (BNA)
  source 1..12: mol_type = other RNA
gtaagttctgtc

SEQ ID NO: 2398 - DNA, 11 bp, synthetic construct
  misc_feature 1..11: note = Description of Artificial Sequence: Synthetic Antisense oligonucleotide
  misc_feature 1..11: note = Original Sequence: guaaguucugt
  modified_base 1: mod_base = OTHER; note = bicyclic nucleic acid (BNA)
  modified_base 11: mod_base = OTHER; note = bicyclic nucleic acid (BNA)
  source 1..11: mol_type = other DNA
  modified_base 2: mod_base = OTHER; note = Uracil
  modified_base 6: mod_base = OTHER; note = Uracil
  modified_base 7: mod_base = OTHER; note = Uracil
  modified_base 9: mod_base = OTHER; note = Uracil
gtaagttctgt

SEQ ID NO: 2399 - RNA, 10 nt, synthetic construct
  misc_feature 1..10: note = Description of Artificial Sequence: Synthetic Antisense oligonucleotide
  modified_base 1: mod_base = OTHER; note = bicyclic nucleic acid (BNA)
  modified_base 10: mod_base = OTHER; note = bicyclic nucleic acid (BNA)
  source 1..10: mol_type = other RNA
gtaagttctg

SEQ ID NO: 2400-2401 - skipped (2 entries)

SEQ ID NO: 2402 - RNA, 20 nt, synthetic construct
  misc_feature 1..20: note = Description of Artificial Sequence: Synthetic Antisense oligonucleotide
  modified_base 1: mod_base = OTHER; note = bicyclic nucleic acid (BNA)
  modified_base 20: mod_base = OTHER; note = bicyclic nucleic acid (BNA)
  source 1..20: mol_type = other RNA
ggtaagttctgtccaagccc

SEQ ID NO: 2403 - RNA, 19 nt, synthetic construct
  misc_feature 1..19: note = Description of Artificial Sequence: Synthetic Antisense oligonucleotide
  modified_base 1: mod_base = OTHER; note = bicyclic nucleic acid (BNA)
  modified_base 19: mod_base = OTHER; note = bicyclic nucleic acid (BNA)
  source 1..19: mol_type = other RNA
ggtaagttctgtccaagcc

SEQ ID NO: 2404 - RNA, 17 nt, synthetic construct
  misc_feature 1..17: note = Description of Artificial Sequence: Synthetic Antisense oligonucleotide
  modified_base 1: mod_base = OTHER; note = bicyclic nucleic acid (BNA)
  modified_base 17: mod_base = OTHER; note = bicyclic nucleic acid (BNA)
  source 1..17: mol_type = other RNA
ggtaagttctgtccaag

SEQ ID NO: 2405 - RNA, 16 nt, synthetic construct
  misc_feature 1..16: note = Description of Artificial Sequence: Synthetic Antisense oligonucleotide
  modified_base 1: mod_base = OTHER; note = bicyclic nucleic acid (BNA)
  modified_base 16: mod_base = OTHER; note = bicyclic nucleic acid (BNA)
  source 1..16: mol_type = other RNA
ggtaagttctgtccaa

SEQ ID NO: 2406 - RNA, 15 nt, synthetic construct
  misc_feature 1..15: note = Description of Artificial Sequence: Synthetic Antisense oligonucleotide
  modified_base 1: mod_base = OTHER; note = bicyclic nucleic acid (BNA)
  modified_base 15: mod_base = OTHER; note = bicyclic nucleic acid (BNA)
  source 1..15: mol_type = other RNA
ggtaagttctgtcca

SEQ ID NO: 2407 - RNA, 14 nt, synthetic construct
  misc_feature 1..14: note = Description of Artificial Sequence: Synthetic Antisense oligonucleotide
  modified_base 1: mod_base = OTHER; note = bicyclic nucleic acid (BNA)
  modified_base 14: mod_base = OTHER; note = bicyclic nucleic acid (BNA)
  source 1..14: mol_type = other RNA
ggtaagttctgtcc

SEQ ID NO: 2408 - RNA, 13 nt, synthetic construct
  misc_feature 1..13: note = Description of Artificial Sequence: Synthetic Antisense oligonucleotide
  modified_base 1: mod_base = OTHER; note = bicyclic nucleic acid (BNA)
  modified_base 13: mod_base = OTHER; note = bicyclic nucleic acid (BNA)
  source 1..13: mol_type = other RNA
ggtaagttctgtc

SEQ ID NO: 2409 - DNA, 12 bp, synthetic construct
  misc_feature 1..12: note = Description of Artificial Sequence: Synthetic Antisense oligonucleotide
  misc_feature 1..12: note = Original Sequence: gguaaguucugt
  modified_base 1: mod_base = OTHER; note = bicyclic nucleic acid (BNA)
  modified_base 12: mod_base = OTHER; note = bicyclic nucleic acid (BNA)
  source 1..12: mol_type = other DNA
  modified_base 3: mod_base = OTHER; note = Uracil
  modified_base 7: mod_base = OTHER; note = Uracil
  modified_base 8: mod_base = OTHER; note = Uracil
  modified_base 10: mod_base = OTHER; note = Uracil
ggtaagttctgt

SEQ ID NO: 2410 - RNA, 11 nt, synthetic construct
  misc_feature 1..11: note = Description of Artificial Sequence: Synthetic Antisense oligonucleotide
  modified_base 1: mod_base = OTHER; note = bicyclic nucleic acid (BNA)
  modified_base 11: mod_base = OTHER; note = bicyclic nucleic acid (BNA)
  source 1..11: mol_type = other RNA
ggtaagttctg

SEQ ID NO: 2411 - DNA, 10 bp, synthetic construct
  misc_feature 1..10: note = Description of Artificial Sequence: Synthetic Antisense oligonucleotide
  misc_feature 1..10: note = Original Sequence: gguaaguuct
  modified_base 1: mod_base = OTHER; note = bicyclic nucleic acid (BNA)
  modified_base 10: mod_base = OTHER; note = bicyclic nucleic acid (BNA)
  source 1..10: mol_type = other DNA
  modified_base 3: mod_base = OTHER; note = Uracil
  modified_base 7: mod_base = OTHER; note = Uracil
  modified_base 8: mod_base = OTHER; note = Uracil
ggtaagttct

SEQ ID NO: 2412-2413 - skipped (2 entries)

SEQ ID NO: 2414 - RNA, 20 nt, synthetic construct
  misc_feature 1..20: note = Description of Artificial Sequence: Synthetic Antisense oligonucleotide
  modified_base 1: mod_base = OTHER; note = bicyclic nucleic acid (BNA)
  modified_base 20: mod_base = OTHER; note = bicyclic nucleic acid (BNA)
  source 1..20: mol_type = other RNA
cggtaagttctgtccaagcc

SEQ ID NO: 2415 - RNA, 19 nt, synthetic construct
  misc_feature 1..19: note = Description of Artificial Sequence: Synthetic Antisense oligonucleotide
  modified_base 1: mod_base = OTHER; note = bicyclic nucleic acid (BNA)
  modified_base 19: mod_base = OTHER; note = bicyclic nucleic acid (BNA)
  source 1..19: mol_type = other RNA
cggtaagttctgtccaagc

SEQ ID NO: 2416 - RNA, 18 nt, synthetic construct
  misc_feature 1..18: note = Description of Artificial Sequence: Synthetic Antisense oligonucleotide
  modified_base 1: mod_base = OTHER; note = bicyclic nucleic acid (BNA)
  modified_base 18: mod_base = OTHER; note = bicyclic nucleic acid (BNA)
  source 1..18: mol_type = other RNA
cggtaagttctgtccaag

SEQ ID NO: 2417 - RNA, 17 nt, synthetic construct
  misc_feature 1..17: note = Description of Artificial Sequence: Synthetic Antisense oligonucleotide
  modified_base 1: mod_base = OTHER; note = bicyclic nucleic acid (BNA)
  modified_base 17: mod_base = OTHER; note = bicyclic nucleic acid (BNA)
  source 1..17: mol_type = other RNA
cggtaagttctgtccaa

SEQ ID NO: 2418 - RNA, 16 nt, synthetic construct
  misc_feature 1..16: note = Description of Artificial Sequence: Synthetic Antisense oligonucleotide
  modified_base 1: mod_base = OTHER; note = bicyclic nucleic acid (BNA)
  modified_base 16: mod_base = OTHER; note = bicyclic nucleic acid (BNA)
  source 1..16: mol_type = other RNA
cggtaagttctgtcca

SEQ ID NO: 2419 - RNA, 15 nt, synthetic construct
  misc_feature 1..15: note = Description of Artificial Sequence: Synthetic Antisense oligonucleotide
  modified_base 1: mod_base = OTHER; note = bicyclic nucleic acid (BNA)
  modified_base 15: mod_base = OTHER; note = bicyclic nucleic acid (BNA)
  source 1..15: mol_type = other RNA
cggtaagttctgtcc

SEQ ID NO: 2420 - RNA, 14 nt, synthetic construct
  misc_feature 1..14: note = Description of Artificial Sequence: Synthetic Antisense oligonucleotide
  modified_base 1: mod_base = OTHER; note = bicyclic nucleic acid (BNA)
  modified_base 14: mod_base = OTHER; note = bicyclic nucleic acid (BNA)
  source 1..14: mol_type = other RNA
cggtaagttctgtc

SEQ ID NO: 2421 - DNA, 13 bp, synthetic construct
  misc_feature 1..13: note = Description of Artificial Sequence: Synthetic Antisense oligonucleotide
  misc_feature 1..13: note = Original Sequence: cgguaaguucugt
  modified_base 1: mod_base = OTHER; note = bicyclic nucleic acid (BNA)
  modified_base 13: mod_base = OTHER; note = bicyclic nucleic acid (BNA)
  source 1..13: mol_type = other DNA
  modified_base 4: mod_base = OTHER; note = Uracil
  modified_base 8: mod_base = OTHER; note = Uracil
  modified_base 9: mod_base = OTHER; note = Uracil
  modified_base 11: mod_base = OTHER; note = Uracil
cggtaagttctgt

SEQ ID NO: 2422 - RNA, 12 nt, synthetic construct
  misc_feature 1..12: note = Description of Artificial Sequence: Synthetic Antisense oligonucleotide
  modified_base 1: mod_base = OTHER; note = bicyclic nucleic acid (BNA)
  modified_base 12: mod_base = OTHER; note = bicyclic nucleic acid (BNA)
  source 1..12: mol_type = other RNA
cggtaagttctg

SEQ ID NO: 2423 - DNA, 11 bp, synthetic construct
  misc_feature 1..11: note = Description of Artificial Sequence: Synthetic Antisense oligonucleotide
  misc_feature 1..11: note = Original Sequence: cgguaaguuct
  modified_base 1: mod_base = OTHER; note = bicyclic nucleic acid (BNA)
  modified_base 11: mod_base = OTHER; note = bicyclic nucleic acid (BNA)
  source 1..11: mol_type = other DNA
  modified_base 4: mod_base = OTHER; note = Uracil
  modified_base 8: mod_base = OTHER; note = Uracil
  modified_base 9: mod_base = OTHER; note = Uracil
cggtaagttct

SEQ ID NO: 2424 - RNA, 10 nt, synthetic construct
  misc_feature 1..10: note = Description of Artificial Sequence: Synthetic Antisense oligonucleotide
  modified_base 1: mod_base = OTHER; note = bicyclic nucleic acid (BNA)
  modified_base 10: mod_base = OTHER; note = bicyclic nucleic acid (BNA)
  source 1..10: mol_type = other RNA
cggtaagttc

SEQ ID NO: 2425-2426 - skipped (2 entries)

SEQ ID NO: 2427 - DNA, 20 bp, synthetic construct
  misc_feature 1..20: note = Description of Artificial Sequence: Synthetic Antisense oligonucleotide
  misc_feature 1..20: note = Original Sequence: tcgguaaguucuguccaagc
  modified_base 1: mod_base = OTHER; note = bicyclic nucleic acid (BNA)
  modified_base 20: mod_base = OTHER; note = bicyclic nucleic acid (BNA)
  source 1..20: mol_type = other DNA
  modified_base 5: mod_base = OTHER; note = Uracil
  modified_base 9: mod_base = OTHER; note = Uracil
  modified_base 10: mod_base = OTHER; note = Uracil
  modified_base 12: mod_base = OTHER; note = Uracil
  modified_base 14: mod_base = OTHER; note = Uracil
tcggtaagttctgtccaagc

SEQ ID NO: 2428 - DNA, 19 bp, synthetic construct
  misc_feature 1..19: note = Description of Artificial Sequence: Synthetic Antisense oligonucleotide
  misc_feature 1..19: note = Original Sequence: tcgguaaguucuguccaag
  modified_base 1: mod_base = OTHER; note = bicyclic nucleic acid (BNA)
  modified_base 19: mod_base = OTHER; note = bicyclic nucleic acid (BNA)
  source 1..19: mol_type = other DNA
  modified_base 5: mod_base = OTHER; note = Uracil
  modified_base 9: mod_base = OTHER; note = Uracil
  modified_base 10: mod_base = OTHER; note = Uracil
  modified_base 12: mod_base = OTHER; note = Uracil
  modified_base 14: mod_base = OTHER; note = Uracil
tcggtaagttctgtccaag

SEQ ID NO: 2429 - DNA, 18 bp, synthetic construct
  misc_feature 1..18: note = Description of Artificial Sequence: Synthetic Antisense oligonucleotide
  misc_feature 1..18: note = Original Sequence: tcgguaaguucuguccaa
  modified_base 1: mod_base = OTHER; note = bicyclic nucleic acid (BNA)
  modified_base 18: mod_base = OTHER; note = bicyclic nucleic acid (BNA)
  source 1..18: mol_type = other DNA
  modified_base 5: mod_base = OTHER; note = Uracil
  modified_base 9: mod_base = OTHER; note = Uracil
  modified_base 10: mod_base = OTHER; note = Uracil
  modified_base 12: mod_base = OTHER; note = Uracil
  modified_base 14: mod_base = OTHER; note = Uracil
tcggtaagttctgtccaa

SEQ ID NO: 2430 - DNA, 17 bp, synthetic construct
  misc_feature 1..17: note = Description of Artificial Sequence: Synthetic Antisense oligonucleotide
  misc_feature 1..17: note = Original Sequence: tcgguaaguucugucca
  modified_base 1: mod_base = OTHER; note = bicyclic nucleic acid (BNA)
  modified_base 17: mod_base = OTHER; note = bicyclic nucleic acid (BNA)
  source 1..17: mol_type = other DNA
  modified_base 5: mod_base = OTHER; note = Uracil
  modified_base 9: mod_base = OTHER; note = Uracil
  modified_base 10: mod_base = OTHER; note = Uracil
  modified_base 12: mod_base = OTHER; note = Uracil
  modified_base 14: mod_base = OTHER; note = Uracil
tcggtaagttctgtcca

SEQ ID NO: 2431 - DNA, 16 bp, synthetic construct
  misc_feature 1..16: note = Description of Artificial Sequence: Synthetic Antisense oligonucleotide
  misc_feature 1..16: note = Original Sequence: tcgguaaguucugucc
  modified_base 1: mod_base = OTHER; note = bicyclic nucleic acid (BNA)
  modified_base 16: mod_base = OTHER; note = bicyclic nucleic acid (BNA)
  source 1..16: mol_type = other DNA
  modified_base 5: mod_base = OTHER; note = Uracil
  modified_base 9: mod_base = OTHER; note = Uracil
  modified_base 10: mod_base = OTHER; note = Uracil
  modified_base 12: mod_base = OTHER; note = Uracil
  modified_base 14: mod_base = OTHER; note = Uracil
tcggtaagttctgtcc

SEQ ID NO: 2432 - DNA, 15 bp, synthetic construct
  misc_feature 1..15: note = Description of Artificial Sequence: Synthetic Antisense oligonucleotide
  misc_feature 1..15: note = Original Sequence: tcgguaaguucuguc
  modified_base 1: mod_base = OTHER; note = bicyclic nucleic acid (BNA)
  modified_base 15: mod_base = OTHER; note = bicyclic nucleic acid (BNA)
  source 1..15: mol_type = other DNA
  modified_base 5: mod_base = OTHER; note = Uracil
  modified_base 9: mod_base = OTHER; note = Uracil
  modified_base 10: mod_base = OTHER; note = Uracil
  modified_base 12: mod_base = OTHER; note = Uracil
  modified_base 14: mod_base = OTHER; note = Uracil
tcggtaagttctgtc

SEQ ID NO: 2433 - DNA, 14 bp, synthetic construct
  misc_feature 1..14: note = Description of Artificial Sequence: Synthetic Antisense oligonucleotide
  misc_feature 1..14: note = Original Sequence: tcgguaaguucugt
  modified_base 1: mod_base = OTHER; note = bicyclic nucleic acid (BNA)
  modified_base 14: mod_base = OTHER; note = bicyclic nucleic acid (BNA)
  source 1..14: mol_type = other DNA
  modified_base 5: mod_base = OTHER; note = Uracil
  modified_base 9: mod_base = OTHER; note = Uracil
  modified_base 10: mod_base = OTHER; note = Uracil
  modified_base 12: mod_base = OTHER; note = Uracil
tcggtaagttctgt

SEQ ID NO: 2434 - DNA, 13 bp, synthetic construct
  misc_feature 1..13: note = Description of Artificial Sequence: Synthetic Antisense oligonucleotide
  misc_feature 1..13: note = Original Sequence: tcgguaaguucug
  modified_base 1: mod_base = OTHER; note = bicyclic nucleic acid (BNA)
  modified_base 13: mod_base = OTHER; note = bicyclic nucleic acid (BNA)
  source 1..13: mol_type = other DNA
  modified_base 5: mod_base = OTHER; note = Uracil
  modified_base 9: mod_base = OTHER; note = Uracil
  modified_base 10: mod_base = OTHER; note = Uracil
  modified_base 12: mod_base = OTHER; note = Uracil
tcggtaagttctg

SEQ ID NO: 2435 - DNA, 12 bp, synthetic construct
  misc_feature 1..12: note = Description of Artificial Sequence: Synthetic Antisense oligonucleotide
  misc_feature 1..12: note = Original Sequence: tcgguaaguuct
  modified_base 1: mod_base = OTHER; note = bicyclic nucleic acid (BNA)
  modified_base 12: mod_base = OTHER; note = bicyclic nucleic acid (BNA)
  source 1..12: mol_type = other DNA
  modified_base 5: mod_base = OTHER; note = Uracil
  modified_base 9: mod_base = OTHER; note = Uracil
  modified_base 10: mod_base = OTHER; note = Uracil
tcggtaagttct

SEQ ID NO: 2436 - DNA, 11 bp, synthetic construct
  misc_feature 1..11: note = Description of Artificial Sequence: Synthetic Antisense oligonucleotide
  misc_feature 1..11: note = Original Sequence: tcgguaaguuc
  modified_base 1: mod_base = OTHER; note = bicyclic nucleic acid (BNA)
  modified_base 11: mod_base = OTHER; note = bicyclic nucleic acid (BNA)
  source 1..11: mol_type = other DNA
  modified_base 5: mod_base = OTHER; note = Uracil
  modified_base 9: mod_base = OTHER; note = Uracil
  modified_base 10: mod_base = OTHER; note = Uracil
tcggtaagttc

SEQ ID NO: 2437 - DNA, 10 bp, synthetic construct
  misc_feature 1..10: note = Description of Artificial Sequence: Synthetic Antisense oligonucleotide
  misc_feature 1..10: note = Original Sequence: tcgguaagut
  modified_base 1: mod_base = OTHER; note = bicyclic nucleic acid (BNA)
  modified_base 10: mod_base = OTHER; note = bicyclic nucleic acid (BNA)
  source 1..10: mol_type = other DNA
  modified_base 5: mod_base = OTHER; note = Uracil
  modified_base 9: mod_base = OTHER; note = Uracil
tcggtaagtt

SEQ ID NO: 2438 - skipped

SEQ ID NO: 2439 - RNA, 20 nt, synthetic construct
  misc_feature 1..20: note = Description of Artificial Sequence: Synthetic Antisense oligonucleotide
  modified_base 1: mod_base = OTHER; note = bicyclic nucleic acid (BNA)
  modified_base 20: mod_base = OTHER; note = bicyclic nucleic acid (BNA)
  source 1..20: mol_type = other RNA
gtcggtaagttctgtccaag

SEQ ID NO: 2440 - RNA, 19 nt, synthetic construct
  misc_feature 1..19: note = Description of Artificial Sequence: Synthetic Antisense oligonucleotide
  modified_base 1: mod_base = OTHER; note = bicyclic nucleic acid (BNA)
  modified_base 19: mod_base = OTHER; note = bicyclic nucleic acid (BNA)
  source 1..19: mol_type = other RNA
gtcggtaagttctgtccaa

SEQ ID NO: 2441 - RNA, 18 nt, synthetic construct
  misc_feature 1..18: note = Description of Artificial Sequence: Synthetic Antisense oligonucleotide
  modified_base 1: mod_base = OTHER; note = bicyclic nucleic acid (BNA)
  modified_base 18: mod_base = OTHER; note = bicyclic nucleic acid (BNA)
  source 1..18: mol_type = other RNA
gtcggtaagttctgtcca

SEQ ID NO: 2442 - RNA, 17 nt, synthetic construct
  misc_feature 1..17: note = Description of Artificial Sequence: Synthetic Antisense oligonucleotide
  modified_base 1: mod_base = OTHER; note = bicyclic nucleic acid (BNA)
  modified_base 17: mod_base = OTHER; note = bicyclic nucleic acid (BNA)
  source 1..17: mol_type = other RNA
gtcggtaagttctgtcc

SEQ ID NO: 2443 - RNA, 16 nt, synthetic construct
  misc_feature 1..16: note = Description of Artificial Sequence: Synthetic Antisense oligonucleotide
  modified_base 1: mod_base = OTHER; note = bicyclic nucleic acid (BNA)
  modified_base 16: mod_base = OTHER; note = bicyclic nucleic acid (BNA)
  source 1..16: mol_type = other RNA
gtcggtaagttctgtc

SEQ ID NO: 2444 - DNA, 15 bp, synthetic construct
  misc_feature 1..15: note = Description of Artificial Sequence: Synthetic Antisense oligonucleotide
  misc_feature 1..15: note = Original Sequence: gucgguaaguucugt
  modified_base 1: mod_base = OTHER; note = bicyclic nucleic acid (BNA)
  modified_base 15: mod_base = OTHER; note = bicyclic nucleic acid (BNA)
  source 1..15: mol_type = other DNA
  modified_base 2: mod_base = OTHER; note = Uracil
  modified_base 6: mod_base = OTHER; note = Uracil
  modified_base 10: mod_base = OTHER; note = Uracil
  modified_base 11: mod_base = OTHER; note = Uracil
  modified_base 13: mod_base = OTHER; note = Uracil
gtcggtaagttctgt

SEQ ID NO: 2445 - RNA, 14 nt, synthetic construct
  misc_feature 1..14: note = Description of Artificial Sequence: Synthetic Antisense oligonucleotide
  modified_base 1: mod_base = OTHER; note = bicyclic nucleic acid (BNA)
  modified_base 14: mod_base = OTHER; note = bicyclic nucleic acid (BNA)
  source 1..14: mol_type = other RNA
gtcggtaagttctg

SEQ ID NO: 2446 - DNA, 13 bp, synthetic construct
  misc_feature 1..13: note = Description of Artificial Sequence: Synthetic Antisense oligonucleotide
  misc_feature 1..13: note = Original Sequence: gucgguaaguuct
  modified_base 1: mod_base = OTHER; note = bicyclic nucleic acid (BNA)
  modified_base 13: mod_base = OTHER; note = bicyclic nucleic acid (BNA)
  source 1..13: mol_type = other DNA
  modified_base 2: mod_base = OTHER; note = Uracil
  modified_base 6: mod_base = OTHER; note = Uracil
  modified_base 10: mod_base = OTHER; note = Uracil
  modified_base 11: mod_base = OTHER; note = Uracil
gtcggtaagttct

SEQ ID NO: 2447 - RNA, 12 nt, synthetic construct
  misc_feature 1..12: note = Description of Artificial Sequence: Synthetic Antisense oligonucleotide
  modified_base 1: mod_base = OTHER; note = bicyclic nucleic acid (BNA)
  modified_base 12: mod_base = OTHER; note = bicyclic nucleic acid (BNA)
  source 1..12: mol_type = other RNA
gtcggtaagttc

SEQ ID NO: 2448 - DNA, 11 bp, synthetic construct
  misc_feature 1..11: note = Description of Artificial Sequence: Synthetic Antisense oligonucleotide
  misc_feature 1..11: note = Original Sequence: gucgguaagut
  modified_base 1: mod_base = OTHER; note = bicyclic nucleic acid (BNA)
  modified_base 11: mod_base = OTHER; note = bicyclic nucleic acid (BNA)
  source 1..11: mol_type = other DNA
  modified_base 2: mod_base = OTHER; note = Uracil
  modified_base 6: mod_base = OTHER; note = Uracil
  modified_base 10: mod_base = OTHER; note = Uracil
gtcggtaagtt

SEQ ID NO: 2449 - DNA, 10 bp, synthetic construct
  misc_feature 1..10: note = Description of Artificial Sequence: Synthetic Antisense oligonucleotide
  misc_feature 1..10: note = Original Sequence: gucgguaagt
  modified_base 1: mod_base = OTHER; note = bicyclic nucleic acid (BNA)
  modified_base 10: mod_base = OTHER; note = bicyclic nucleic acid (BNA)
  source 1..10: mol_type = other DNA
  modified_base 2: mod_base = OTHER; note = Uracil
  modified_base 6: mod_base = OTHER; note = Uracil
gtcggtaagt

SEQ ID NO: 2450 - RNA, 20 nt, synthetic construct
  misc_feature 1..20: note = Description of Artificial Sequence: Synthetic Antisense oligonucleotide
  modified_base 1: mod_base = OTHER; note = bicyclic nucleic acid (BNA)
  modified_base 20: mod_base = OTHER; note = bicyclic nucleic acid (BNA)
  source 1..20: mol_type = other RNA
agtcggtaagttctgtccaa

SEQ ID NO: 2451 - RNA, 19 nt, synthetic construct
  misc_feature 1..19: note = Description of Artificial Sequence: Synthetic Antisense oligonucleotide
  modified_base 1: mod_base = OTHER; note = bicyclic nucleic acid (BNA)
  modified_base 19: mod_base = OTHER; note = bicyclic nucleic acid (BNA)
  source 1..19: mol_type = other RNA
agtcggtaagttctgtcca

SEQ ID NO: 2452 - RNA, 17 nt, synthetic construct
  misc_feature 1..17: note = Description of Artificial Sequence: Synthetic Antisense oligonucleotide
  modified_base 1: mod_base = OTHER; note = bicyclic nucleic acid (BNA)
  modified_base 17: mod_base = OTHER; note = bicyclic nucleic acid (BNA)
  source 1..17: mol_type = other RNA
agtcggtaagttctgtc

SEQ ID NO: 2453 - DNA, 16 bp, synthetic construct
  misc_feature 1..16: note = Description of Artificial Sequence: Synthetic Antisense oligonucleotide
  misc_feature 1..16: note = Original Sequence: agucgguaaguucugt
  modified_base 1: mod_base = OTHER; note = bicyclic nucleic acid (BNA)
  modified_base 16: mod_base = OTHER; note = bicyclic nucleic acid (BNA)
  source 1..16: mol_type = other DNA
  modified_base 3: mod_base = OTHER; note = Uracil
  modified_base 7: mod_base = OTHER; note = Uracil
  modified_base 11: mod_base = OTHER; note = Uracil
  modified_base 12: mod_base = OTHER; note = Uracil
  modified_base 14: mod_base = OTHER; note = Uracil
agtcggtaagttctgt

SEQ ID NO: 2454 - RNA, 15 nt, synthetic construct
  misc_feature 1..15: note = Description of Artificial Sequence: Synthetic Antisense oligonucleotide
  modified_base 1: mod_base = OTHER; note = bicyclic nucleic acid (BNA)
  modified_base 15: mod_base = OTHER; note = bicyclic nucleic acid (BNA)
  source 1..15: mol_type = other RNA
agtcggtaagttctg

SEQ ID NO: 2455 - DNA, 14 bp, synthetic construct
  misc_feature 1..14: note = Description of Artificial Sequence: Synthetic Antisense oligonucleotide
  misc_feature 1..14: note = Original Sequence: agucgguaaguuct
  modified_base 1: mod_base = OTHER; note = bicyclic nucleic acid (BNA)
  modified_base 14: mod_base = OTHER; note = bicyclic nucleic acid (BNA)
  source 1..14: mol_type = other DNA
  modified_base 3: mod_base = OTHER; note = Uracil
  modified_base 7: mod_base = OTHER; note = Uracil
  modified_base 11: mod_base = OTHER; note = Uracil
  modified_base 12: mod_base = OTHER; note = Uracil
agtcggtaagttct

SEQ ID NO: 2456 - RNA, 13 nt, synthetic construct
  misc_feature 1..13: note = Description of Artificial Sequence: Synthetic Antisense oligonucleotide
  modified_base 1: mod_base = OTHER; note = bicyclic nucleic acid (BNA)
  modified_base 13: mod_base = OTHER; note = bicyclic nucleic acid (BNA)
  source 1..13: mol_type = other RNA
agtcggtaagttc

SEQ ID NO: 2457 - DNA, 12 bp, synthetic construct
  misc_feature 1..12: note = Description of Artificial Sequence: Synthetic Antisense oligonucleotide
  misc_feature 1..12: note = Original Sequence: agucgguaagut
  modified_base 1: mod_base = OTHER; note = bicyclic nucleic acid (BNA)
  modified_base 12: mod_base = OTHER; note = bicyclic nucleic acid (BNA)
  source 1..12: mol_type = other DNA
  modified_base 3: mod_base = OTHER; note = Uracil
  modified_base 7: mod_base = OTHER; note = Uracil
  modified_base 11: mod_base = OTHER; note = Uracil
agtcggtaagtt

SEQ ID NO: 2458 - DNA, 11 bp, synthetic construct
  misc_feature 1..11: note = Description of Artificial Sequence: Synthetic Antisense oligonucleotide
  misc_feature 1..11: note = Original Sequence: agucgguaagt
  modified_base 1: mod_base = OTHER; note = bicyclic nucleic acid (BNA)
  modified_base 11: mod_base = OTHER; note = bicyclic nucleic acid (BNA)
  source 1..11: mol_type = other DNA
  modified_base 3: mod_base = OTHER; note = Uracil
  modified_base 7: mod_base = OTHER; note = Uracil
agtcggtaagt

SEQ ID NO: 2459 - RNA, 20 nt, synthetic construct
  misc_feature 1..20: note = Description of Artificial Sequence: Synthetic Antisense oligonucleotide
  modified_base 1: mod_base = OTHER; note = bicyclic nucleic acid (BNA)
  modified_base 20: mod_base = OTHER; note = bicyclic nucleic acid (BNA)
  source 1..20: mol_type = other RNA
cagtcggtaagttctgtcca

SEQ ID NO: 2460 - RNA, 19 nt, synthetic construct
  misc_feature 1..19: note = Description of Artificial Sequence: Synthetic Antisense oligonucleotide
  modified_base 1: mod_base = OTHER; note = bicyclic nucleic acid (BNA)
  modified_base 19: mod_base = OTHER; note = bicyclic nucleic acid (BNA)
  source 1..19: mol_type = other RNA
cagtcggtaagttctgtcc

SEQ ID NO: 2461 - RNA, 18 nt, synthetic construct
  misc_feature 1..18: note = Description of Artificial Sequence: Synthetic Antisense oligonucleotide
  modified_base 1: mod_base = OTHER; note = bicyclic nucleic acid (BNA)
  modified_base 18: mod_base = OTHER; note = bicyclic nucleic acid (BNA)
  source 1..18: mol_type = other RNA
cagtcggtaagttctgtc

SEQ ID NO: 2462 - DNA, 17 bp, synthetic construct
  misc_feature 1..17: note = Description of Artificial Sequence: Synthetic Antisense oligonucleotide
  misc_feature 1..17: note = Original Sequence: cagucgguaaguucugt
  modified_base 1: mod_base = OTHER; note = bicyclic nucleic acid (BNA)
  modified_base 17: mod_base = OTHER; note = bicyclic nucleic acid (BNA)
  source 1..17: mol_type = other DNA
  modified_base 4: mod_base = OTHER; note = Uracil
  modified_base 8: mod_base = OTHER; note = Uracil
  modified_base 12: mod_base = OTHER; note = Uracil
  modified_base 13: mod_base = OTHER; note = Uracil
  modified_base 15: mod_base = OTHER; note = Uracil
cagtcggtaagttctgt

SEQ ID NO: 2463 - RNA, 16 nt, synthetic construct
  misc_feature 1..16: note = Description of Artificial Sequence: Synthetic Antisense oligonucleotide
  modified_base 1: mod_base = OTHER; note = bicyclic nucleic acid (BNA)
  modified_base 16: mod_base = OTHER; note = bicyclic nucleic acid (BNA)
  source 1..16: mol_type = other RNA
cagtcggtaagttctg

SEQ ID NO: 2464 - DNA, 15 bp, synthetic construct
  misc_feature 1..15: note = Description of Artificial Sequence: Synthetic Antisense oligonucleotide
  misc_feature 1..15: note = Original Sequence: cagucgguaaguuct
  modified_base 1: mod_base = OTHER; note = bicyclic nucleic acid (BNA)
  modified_base 15: mod_base = OTHER; note = bicyclic nucleic acid (BNA)
  source 1..15: mol_type = other DNA
  modified_base 4: mod_base = OTHER; note = Uracil
  modified_base 8: mod_base = OTHER; note = Uracil
  modified_base 12: mod_base = OTHER; note = Uracil
  modified_base 13: mod_base = OTHER; note = Uracil
cagtcggtaagttct

SEQ ID NO: 2465 - RNA, 14 nt, synthetic construct
  misc_feature 1..14: note = Description of Artificial Sequence: Synthetic Antisense oligonucleotide
  modified_base 1: mod_base = OTHER; note = bicyclic nucleic acid (BNA)
  modified_base 14: mod_base = OTHER; note = bicyclic nucleic acid (BNA)
  source 1..14: mol_type = other RNA
cagtcggtaagttc

SEQ ID NO: 2466 - DNA, 13 bp, synthetic construct
  misc_feature 1..13: note = Description of Artificial Sequence: Synthetic Antisense oligonucleotide
  misc_feature 1..13: note = Original Sequence: cagucgguaagut
  modified_base 1: mod_base = OTHER; note = bicyclic nucleic acid (BNA)
  modified_base 13: mod_base = OTHER; note = bicyclic nucleic acid (BNA)
  source 1..13: mol_type = other DNA
  modified_base 4: mod_base = OTHER; note = Uracil
  modified_base 8: mod_base = OTHER; note = Uracil
  modified_base 12: mod_base = OTHER; note = Uracil
cagtcggtaagtt

SEQ ID NO: 2467 - DNA, 12 bp, synthetic construct
  misc_feature 1..12: note = Description of Artificial Sequence: Synthetic Antisense oligonucleotide
  misc_feature 1..12: note = Original Sequence: cagucgguaagt
  modified_base 1: mod_base = OTHER; note = bicyclic nucleic acid (BNA)
  modified_base 12: mod_base = OTHER; note = bicyclic nucleic acid (BNA)
  source 1..12: mol_type = other DNA
  modified_base 4: mod_base = OTHER; note = Uracil
  modified_base 8: mod_base = OTHER; note = Uracil
cagtcggtaagt

SEQ ID NO: 2468 - RNA, 20 nt, synthetic construct
  misc_feature 1..20: note = Description of Artificial Sequence: Synthetic Antisense oligonucleotide
  modified_base 1: mod_base = OTHER; note = bicyclic nucleic acid (BNA)
  modified_base 20: mod_base = OTHER; note = bicyclic nucleic acid (BNA)
  source 1..20: mol_type = other RNA
ccagtcggtaagttctgtcc

SEQ ID NO: 2469 - RNA, 19 nt, synthetic construct
  misc_feature 1..19: note = Description of Artificial Sequence: Synthetic Antisense oligonucleotide
  modified_base 1: mod_base = OTHER; note = bicyclic nucleic acid (BNA)
  modified_base 19: mod_base = OTHER; note = bicyclic nucleic acid (BNA)
  source 1..19: mol_type = other RNA
ccagtcggtaagttctgtc

SEQ ID NO: 2470 - DNA, 18 bp, synthetic construct
  misc_feature 1..18: note = Description of Artificial Sequence: Synthetic Antisense oligonucleotide
  misc_feature 1..18: note = Original Sequence: ccagucgguaaguucugt
  modified_base 1: mod_base = OTHER; note = bicyclic nucleic acid (BNA)
  modified_base 18: mod_base = OTHER; note = bicyclic nucleic acid (BNA)
  source 1..18: mol_type = other DNA
  modified_base 5: mod_base = OTHER; note = Uracil
  modified_base 9: mod_base = OTHER; note = Uracil
  modified_base 13: mod_base = OTHER; note = Uracil
  modified_base 14: mod_base = OTHER; note = Uracil
  modified_base 16: mod_base = OTHER; note = Uracil
ccagtcggtaagttctgt

SEQ ID NO: 2471 - RNA, 17 nt, synthetic construct
  misc_feature 1..17: note = Description of Artificial Sequence: Synthetic Antisense oligonucleotide
  modified_base 1: mod_base = OTHER; note = bicyclic nucleic acid (BNA)
  modified_base 17: mod_base = OTHER; note = bicyclic nucleic acid (BNA)
  source 1..17: mol_type = other RNA
ccagtcggtaagttctg

SEQ ID NO: 2472 - DNA, 16 bp, synthetic construct
  misc_feature 1..16: note = Description of Artificial Sequence: Synthetic Antisense oligonucleotide
  misc_feature 1..16: note = Original Sequence: ccagucgguaaguuct
  modified_base 1: mod_base = OTHER; note = bicyclic nucleic acid (BNA)
  modified_base 16: mod_base = OTHER; note = bicyclic nucleic acid (BNA)
  source 1..16: mol_type = other DNA
  modified_base 5: mod_base = OTHER; note = Uracil
  modified_base 9: mod_base = OTHER; note = Uracil
  modified_base 13: mod_base = OTHER; note = Uracil
  modified_base 14: mod_base = OTHER; note = Uracil
ccagtcggtaagttct

SEQ ID NO: 2473 - RNA, 15 nt, synthetic construct
  misc_feature 1..15: note = Description of Artificial Sequence: Synthetic Antisense oligonucleotide
  modified_base 1: mod_base = OTHER; note = bicyclic nucleic acid (BNA)
  modified_base 15: mod_base = OTHER; note = bicyclic nucleic acid (BNA)
  source 1..15: mol_type = other RNA
ccagtcggtaagttc

SEQ ID NO: 2474 - DNA, 14 bp, synthetic construct
  misc_feature 1..14: note = Description of Artificial Sequence: Synthetic Antisense oligonucleotide
  misc_feature 1..14: note = Original Sequence: ccagucgguaagut
  modified_base 1: mod_base = OTHER; note = bicyclic nucleic acid (BNA)
  modified_base 14: mod_base = OTHER; note = bicyclic nucleic acid (BNA)
  source 1..14: mol_type = other DNA
  modified_base 5: mod_base = OTHER; note = Uracil
  modified_base 9: mod_base = OTHER; note = Uracil
  modified_base 13: mod_base = OTHER; note = Uracil
ccagtcggtaagtt

SEQ ID NO: 2475 - DNA, 13 bp, synthetic construct
  misc_feature 1..13: note = Description of Artificial Sequence: Synthetic Antisense oligonucleotide
  misc_feature 1..13: note = Original Sequence: ccagucgguaagt
  modified_base 1: mod_base = OTHER; note = bicyclic nucleic acid (BNA)
  modified_base 13: mod_base = OTHER; note = bicyclic nucleic acid (BNA)
  source 1..13: mol_type = other DNA
  modified_base 5: mod_base = OTHER; note = Uracil
  modified_base 9: mod_base = OTHER; note = Uracil
ccagtcggtaagt

SEQ ID NO: 2476 - RNA, 20 nt, synthetic construct
  misc_feature 1..20: note = Description of Artificial Sequence: Synthetic Antisense oligonucleotide
  modified_base 1: mod_base = OTHER; note = bicyclic nucleic acid (BNA)
  modified_base 20: mod_base = OTHER; note = bicyclic nucleic acid (BNA)
  source 1..20: mol_type = other RNA
gccagtcggtaagttctgtc

SEQ ID NO: 2477 - DNA, 19 bp, synthetic construct
  misc_feature 1..19: note = Description of Artificial Sequence: Synthetic Antisense oligonucleotide
  misc_feature 1..19: note = Original Sequence: gccagucgguaaguucugt
  modified_base 1: mod_base = OTHER; note = bicyclic nucleic acid (BNA)
  modified_base 19: mod_base = OTHER; note = bicyclic nucleic acid (BNA)
  source 1..19: mol_type = other DNA
  modified_base 6: mod_base = OTHER; note = Uracil
  modified_base 10: mod_base = OTHER; note = Uracil
  modified_base 14: mod_base = OTHER; note = Uracil
  modified_base 15: mod_base = OTHER; note = Uracil
  modified_base 17: mod_base = OTHER; note = Uracil
gccagtcggtaagttctgt

SEQ ID NO: 2478 - RNA, 18 nt, synthetic construct
  misc_feature 1..18: note = Description of Artificial Sequence: Synthetic Antisense oligonucleotide
  modified_base 1: mod_base = OTHER; note = bicyclic nucleic acid (BNA)
  modified_base 18: mod_base = OTHER; note = bicyclic nucleic acid (BNA)
  source 1..18: mol_type = other RNA
gccagtcggtaagttctg

SEQ ID NO: 2479 - DNA, 17 bp, synthetic construct
  misc_feature 1..17: note = Description of Artificial Sequence: Synthetic Antisense oligonucleotide
  misc_feature 1..17: note = Original Sequence: gccagucgguaaguuct
  modified_base 1: mod_base = OTHER; note = bicyclic nucleic acid (BNA)
  modified_base 17: mod_base = OTHER; note = bicyclic nucleic acid (BNA)
  source 1..17: mol_type = other DNA
  modified_base 6: mod_base = OTHER; note = Uracil
  modified_base 10: mod_base = OTHER; note = Uracil
  modified_base 14: mod_base = OTHER; note = Uracil
  modified_base 15: mod_base = OTHER; note = Uracil
gccagtcggtaagttct

SEQ ID NO: 2480 - RNA, 16 nt, synthetic construct
  misc_feature 1..16: note = Description of Artificial Sequence: Synthetic Antisense oligonucleotide
  modified_base 1: mod_base = OTHER; note = bicyclic nucleic acid (BNA)
  modified_base 16: mod_base = OTHER; note = bicyclic nucleic acid (BNA)
  source 1..16: mol_type = other RNA
gccagtcggtaagttc

SEQ ID NO: 2481 - DNA, 15 bp, synthetic construct
  misc_feature 1..15: note = Description of Artificial Sequence: Synthetic Antisense oligonucleotide
  misc_feature 1..15: note = Original Sequence: gccagucgguaagut
  modified_base 1: mod_base = OTHER; note = bicyclic nucleic acid (BNA)
  modified_base 15: mod_base = OTHER; note = bicyclic nucleic acid (BNA)
  source 1..15: mol_type = other DNA
  modified_base 6: mod_base = OTHER; note = Uracil
  modified_base 10: mod_base = OTHER; note = Uracil
  modified_base 14: mod_base = OTHER; note = Uracil
gccagtcggtaagtt

SEQ ID NO: 2482 - DNA, 14 bp, synthetic construct
  misc_feature 1..14: note = Description of Artificial Sequence: Synthetic Antisense oligonucleotide
  misc_feature 1..14: note = Original Sequence: gccagucgguaagt
  modified_base 1: mod_base = OTHER; note = bicyclic nucleic acid (BNA)
  modified_base 14: mod_base = OTHER; note = bicyclic nucleic acid (BNA)
  source 1..14: mol_type = other DNA
  modified_base 6: mod_base = OTHER; note = Uracil
  modified_base 10: mod_base = OTHER; note = Uracil
gccagtcggtaagt

SEQ ID NO: 2483 - DNA, 20 bp, synthetic construct
  misc_feature 1..20: note = Description of Artificial Sequence: Synthetic Antisense oligonucleotide
  misc_feature 1..20: note = Original Sequence: tcaaggaagauggcauuuct
  modified_base 1: mod_base = OTHER; note = bicyclic nucleic acid (BNA)
  modified_base 20: mod_base = OTHER; note = bicyclic nucleic acid (BNA)
  source 1..20: mol_type = other DNA
  modified_base 11: mod_base = OTHER; note = Uracil
  modified_base 16: mod_base = OTHER; note = Uracil
  modified_base 17: mod_base = OTHER; note = Uracil
  modified_base 18: mod_base = OTHER; note = Uracil
tcaaggaagatggcatttct

SEQ ID NO: 2484 - DNA, 22 bp, synthetic construct
  misc_feature 1..22: note = Description of Artificial Sequence: Synthetic Antisense oligonucleotide
  misc_feature 1..22: note = Original Sequence: tcaaggaagauggcauuucuag
  modified_base 1: mod_base = OTHER; note = bicyclic nucleic acid (BNA)
  modified_base 22: mod_base = OTHER; note = bicyclic nucleic acid (BNA)
  source 1..22: mol_type = other DNA
  modified_base 11: mod_base = OTHER; note = Uracil
  modified_base 16: mod_base = OTHER; note = Uracil
  modified_base 17: mod_base = OTHER; note = Uracil
  modified_base 18: mod_base = OTHER; note = Uracil
  modified_base 20: mod_base = OTHER; note = Uracil
tcaaggaagatggcatttctag

SEQ ID NO: 2485 - DNA, 16 bp, synthetic construct
  misc_feature 1..16: note = Description of Artificial Sequence: Synthetic Antisense oligonucleotide
  misc_feature 1..16: note = Original Sequence: tcaaggaagauggcat
  modified_base 1: mod_base = OTHER; note = bicyclic nucleic acid (BNA)
  modified_base 16: mod_base = OTHER; note = bicyclic nucleic acid (BNA)
  source 1..16: mol_type = other DNA
  modified_base 11: mod_base = OTHER; note = Uracil
tcaaggaagatggcat

SEQ ID NO: 2486 - DNA, 15 bp, synthetic construct
  misc_feature 1..15: note = Description of Artificial Sequence: Synthetic Antisense oligonucleotide
  misc_feature 1..15: note = Original Sequence: gaagauggcauuuct
  modified_base 1: mod_base = OTHER; note = bicyclic nucleic acid (BNA)
  modified_base 15: mod_base = OTHER; note = bicyclic nucleic acid (BNA)
  source 1..15: mol_type = other DNA
  modified_base 6: mod_base = OTHER; note = Uracil
  modified_base 11: mod_base = OTHER; note = Uracil
  modified_base 12: mod_base = OTHER; note = Uracil
  modified_base 13: mod_base = OTHER; note = Uracil
gaagatggcatttct

SEQ ID NO: 2487 - DNA, 21 bp, synthetic construct
  misc_feature 1..21: note = Description of Artificial Sequence: Synthetic Antisense oligonucleotide
  misc_feature 1..21: note = Original Sequence: tcaaggaagauggcauuucua
  modified_base 1: mod_base = OTHER; note = bicyclic nucleic acid (BNA)
  modified_base 21: mod_base = OTHER; note = bicyclic nucleic acid (BNA)
  source 1..21: mol_type = other DNA
  modified_base 11: mod_base = OTHER; note = Uracil
  modified_base 16: mod_base = OTHER; note = Uracil
  modified_base 17: mod_base = OTHER; note = Uracil
  modified_base 18: mod_base = OTHER; note = Uracil
  modified_base 20: mod_base = OTHER; note = Uracil
tcaaggaagatggcatttcta

SEQ ID NO: 2488 - DNA, 19 bp, synthetic construct
  misc_feature 1..19: note = Description of Artificial Sequence: Synthetic Antisense oligonucleotide
  misc_feature 1..19: note = Original Sequence: tcaaggaagauggcauuuc
  modified_base 1: mod_base = OTHER; note = bicyclic nucleic acid (BNA)
  modified_base 19: mod_base = OTHER; note = bicyclic nucleic acid (BNA)
  source 1..19: mol_type = other DNA
  modified_base 11: mod_base = OTHER; note = Uracil
  modified_base 16: mod_base = OTHER; note = Uracil
  modified_base 17: mod_base = OTHER; note = Uracil
  modified_base 18: mod_base = OTHER; note = Uracil
tcaaggaagatggcatttc

SEQ ID NO: 2489 - DNA, 18 bp, synthetic construct
  misc_feature 1..18: note = Description of Artificial Sequence: Synthetic Antisense oligonucleotide
  misc_feature 1..18: note = Original Sequence: tcaaggaagauggcauut
  modified_base 1: mod_base = OTHER; note = bicyclic nucleic acid (BNA)
  modified_base 18: mod_base = OTHER; note = bicyclic nucleic acid (BNA)
  source 1..18: mol_type = other DNA
  modified_base 11: mod_base = OTHER; note = Uracil
  modified_base 16: mod_base = OTHER; note = Uracil
  modified_base 17: mod_base = OTHER; note = Uracil
tcaaggaagatggcattt

SEQ ID NO: 2490 - DNA, 17 bp, synthetic construct
  misc_feature 1..17: note = Description of Artificial Sequence: Synthetic Antisense oligonucleotide
  misc_feature 1..17: note = Original Sequence: tcaaggaagauggcaut
  modified_base 1: mod_base = OTHER; note = bicyclic nucleic acid (BNA)
  modified_base 17: mod_base = OTHER; note = bicyclic nucleic acid (BNA)
  source 1..17: mol_type = other DNA
  modified_base 11: mod_base = OTHER; note = Uracil
  modified_base 16: mod_base = OTHER; note = Uracil
tcaaggaagatggcatt

SEQ ID NO: 2491 - DNA, 15 bp, synthetic construct
  misc_feature 1..15: note = Description of Artificial Sequence: Synthetic Antisense oligonucleotide
  misc_feature 1..15: note = Original Sequence: tcaaggaagauggca
  modified_base 1: mod_base = OTHER; note = bicyclic nucleic acid (BNA)
  modified_base 15: mod_base = OTHER; note = bicyclic nucleic acid (BNA)
  source 1..15: mol_type = other DNA
  modified_base 11: mod_base = OTHER; note = Uracil
tcaaggaagatggca

SEQ ID NO: 2492 - DNA, 14 bp, synthetic construct
  misc_feature 1..14: note = Description of Artificial Sequence: Synthetic Antisense oligonucleotide
  misc_feature 1..14: note = Original Sequence: tcaaggaagauggc
  modified_base 1: mod_base = OTHER; note = bicyclic nucleic acid (BNA)
  modified_base 14: mod_base = OTHER; note = bicyclic nucleic acid (BNA)
  source 1..14: mol_type = other DNA
  modified_base 11: mod_base = OTHER; note = Uracil
tcaaggaagatggc

SEQ ID NO: 2493 - DNA, 13 bp, synthetic construct
  misc_feature 1..13: note = Description of Artificial Sequence: Synthetic Antisense oligonucleotide
  misc_feature 1..13: note = Original Sequence: tcaaggaagaugg
  modified_base 1: mod_base = OTHER; note = bicyclic nucleic acid (BNA)
  modified_base 13: mod_base = OTHER; note = bicyclic nucleic acid (BNA)
  source 1..13: mol_type = other DNA
  modified_base 11: mod_base = OTHER; note = Uracil
tcaaggaagatgg

SEQ ID NO: 2494 - DNA, 12 bp, synthetic construct
  misc_feature 1..12: note = Description of Artificial Sequence: Synthetic Antisense oligonucleotide
  misc_feature 1..12: note = Original Sequence: tcaaggaagaug
  modified_base 1: mod_base = OTHER; note = bicyclic nucleic acid (BNA)
  modified_base 12: mod_base = OTHER; note = bicyclic nucleic acid (BNA)
  source 1..12: mol_type = other DNA
  modified_base 11: mod_base = OTHER; note = Uracil
tcaaggaagatg

SEQ ID NO: 2495 - DNA, 11 bp, synthetic construct
  misc_feature 1..11: note = Description of Artificial Sequence: Synthetic Antisense oligonucleotide
  modified_base 1: mod_base = OTHER; note = bicyclic nucleic acid (BNA)
  modified_base 11: mod_base = OTHER; note = bicyclic nucleic acid (BNA)
  source 1..11: mol_type = other DNA
tcaaggaagat

SEQ ID NO: 2496 - DNA, 10 bp, synthetic construct
  misc_feature 1..10: note = Description of Artificial Sequence: Synthetic Antisense oligonucleotide
  modified_base 1: mod_base = OTHER; note = bicyclic nucleic acid (BNA)
  modified_base 10: mod_base = OTHER; note = bicyclic nucleic acid (BNA)
  source 1..10: mol_type = other DNA
tcaaggaaga

SEQ ID NO: 2497 - skipped

SEQ ID NO: 2498 - RNA, 21 nt, synthetic construct
  misc_feature 1..21: note = Description of Artificial Sequence: Synthetic Antisense oligonucleotide
  modified_base 1: mod_base = OTHER; note = bicyclic nucleic acid (BNA)
  modified_base 21: mod_base = OTHER; note = bicyclic nucleic acid (BNA)
  source 1..21: mol_type = other RNA
caaggaagatggcatttctag

SEQ ID NO: 2499 - RNA, 20 nt, synthetic construct
  misc_feature 1..20: note = Description of Artificial Sequence: Synthetic Antisense oligonucleotide
  modified_base 1: mod_base = OTHER; note = bicyclic nucleic acid (BNA)
  modified_base 20: mod_base = OTHER; note = bicyclic nucleic acid (BNA)
  source 1..20: mol_type = other RNA
caaggaagatggcatttcta

SEQ ID NO: 2500 - DNA, 19 bp, synthetic construct
  misc_feature 1..19: note = Description of Artificial Sequence: Synthetic Antisense oligonucleotide
  misc_feature 1..19: note = Original Sequence: caaggaagauggcauuuct
  modified_base 1: mod_base = OTHER; note = bicyclic nucleic acid (BNA)
  modified_base 19: mod_base = OTHER; note = bicyclic nucleic acid (BNA)
  source 1..19: mol_type = other DNA
  modified_base 10: mod_base = OTHER; note = Uracil
  modified_base 15: mod_base = OTHER; note = Uracil
  modified_base 16: mod_base = OTHER; note = Uracil
  modified_base 17: mod_base = OTHER; note = Uracil
caaggaagatggcatttct

SEQ ID NO: 2501 - RNA, 18 nt, synthetic construct
  misc_feature 1..18: note = Description of Artificial Sequence: Synthetic Antisense oligonucleotide
  modified_base 1: mod_base = OTHER; note = bicyclic nucleic acid (BNA)
  modified_base 18: mod_base = OTHER; note = bicyclic nucleic acid (BNA)
  source 1..18: mol_type = other RNA
caaggaagatggcatttc

SEQ ID NO: 2502 - DNA, 17 bp, synthetic construct
  misc_feature 1..17: note = Description of Artificial Sequence: Synthetic Antisense oligonucleotide
  misc_feature 1..17: note = Original Sequence: caaggaagauggcauut
  modified_base 1: mod_base = OTHER; note = bicyclic nucleic acid (BNA)
  modified_base 17: mod_base = OTHER; note = bicyclic nucleic acid (BNA)
  source 1..17: mol_type = other DNA
  modified_base 10: mod_base = OTHER; note = Uracil
  modified_base 15: mod_base = OTHER; note = Uracil
  modified_base 16: mod_base = OTHER; note = Uracil
caaggaagatggcattt

SEQ ID NO: 2503 - DNA, 16 bp, synthetic construct
  misc_feature 1..16: note = Description of Artificial Sequence: Synthetic Antisense oligonucleotide
  misc_feature 1..16: note = Original Sequence: caaggaagauggcaut
  modified_base 1: mod_base = OTHER; note = bicyclic nucleic acid (BNA)
  modified_base 16: mod_base = OTHER; note = bicyclic nucleic acid (BNA)
  source 1..16: mol_type = other DNA
  modified_base 10: mod_base = OTHER; note = Uracil
  modified_base 15: mod_base = OTHER; note = Uracil
caaggaagatggcatt

SEQ ID NO: 2504 - DNA, 15 bp, synthetic construct
  misc_feature 1..15: note = Description of Artificial Sequence: Synthetic Antisense oligonucleotide
  misc_feature 1..15: note = Original Sequence: caaggaagauggcat
  modified_base 1: mod_base = OTHER; note = bicyclic nucleic acid (BNA)
  modified_base 15: mod_base = OTHER; note = bicyclic nucleic acid (BNA)
  source 1..15: mol_type = other DNA
  modified_base 10: mod_base = OTHER; note = Uracil
caaggaagatggcat

SEQ ID NO: 2505 - RNA, 14 nt, synthetic construct
  misc_feature 1..14: note = Description of Artificial Sequence: Synthetic Antisense oligonucleotide
  modified_base 1: mod_base = OTHER; note = bicyclic nucleic acid (BNA)
  modified_base 14: mod_base = OTHER; note = bicyclic nucleic acid (BNA)
  source 1..14: mol_type = other RNA
caaggaagatggca

SEQ ID NO: 2506 - RNA, 13 nt, synthetic construct
  misc_feature 1..13: note = Description of Artificial Sequence: Synthetic Antisense oligonucleotide
  modified_base 1: mod_base = OTHER; note = bicyclic nucleic acid (BNA)
  modified_base 13: mod_base = OTHER; note = bicyclic nucleic acid (BNA)
  source 1..13: mol_type = other RNA
caaggaagatggc

SEQ ID NO: 2507 - RNA, 12 nt, synthetic construct
  misc_feature 1..12: note = Description of Artificial Sequence: Synthetic Antisense oligonucleotide
  modified_base 1: mod_base = OTHER; note = bicyclic nucleic acid (BNA)
  modified_base 12: mod_base = OTHER; note = bicyclic nucleic acid (BNA)
  source 1..12: mol_type = other RNA
caaggaagatgg

SEQ ID NO: 2508 - RNA, 11 nt, synthetic construct
  misc_feature 1..11: note = Description of Artificial Sequence: Synthetic Antisense oligonucleotide
  modified_base 1: mod_base = OTHER; note = bicyclic nucleic acid (BNA)
  modified_base 11: mod_base = OTHER; note = bicyclic nucleic acid (BNA)
  source 1..11: mol_type = other RNA
caaggaagatg

SEQ ID NO: 2509 - DNA, 10 bp, synthetic construct
  misc_feature 1..10: note = Description of Artificial Sequence: Synthetic Antisense oligonucleotide
  modified_base 1: mod_base = OTHER; note = bicyclic nucleic acid (BNA)
  modified_base 10: mod_base = OTHER; note = bicyclic nucleic acid (BNA)
  source 1..10: mol_type = other DNA
caaggaagat

SEQ ID NO: 2510-2511 - skipped (2 entries)

SEQ ID NO: 2512 - RNA, 20 nt, synthetic construct
  misc_feature 1..20: note = Description of Artificial Sequence: Synthetic Antisense oligonucleotide
  modified_base 1: mod_base = OTHER; note = bicyclic nucleic acid (BNA)
  modified_base 20: mod_base = OTHER; note = bicyclic nucleic acid (BNA)
  source 1..20: mol_type = other RNA
aaggaagatggcatttctag

SEQ ID NO: 2513 - RNA, 19 nt, synthetic construct
  misc_feature 1..19: note = Description of Artificial Sequence: Synthetic Antisense oligonucleotide
  modified_base 1: mod_base = OTHER; note = bicyclic nucleic acid (BNA)
  modified_base 19: mod_base = OTHER; note = bicyclic nucleic acid (BNA)
  source 1..19: mol_type = other RNA
aaggaagatggcatttcta

SEQ ID NO: 2514 - DNA, 18 bp, synthetic construct
  misc_feature 1..18: note = Description of Artificial Sequence: Synthetic Antisense oligonucleotide
  misc_feature 1..18: note = Original Sequence: aaggaagauggcauuuct
  modified_base 1: mod_base = OTHER; note = bicyclic nucleic acid (BNA)
  modified_base 18: mod_base = OTHER; note = bicyclic nucleic acid (BNA)
  source 1..18: mol_type = other DNA
  modified_base 9: mod_base = OTHER; note = Uracil
  modified_base 14: mod_base = OTHER; note = Uracil
  modified_base 15: mod_base = OTHER; note = Uracil
  modified_base 16: mod_base = OTHER; note = Uracil
aaggaagatggcatttct

SEQ ID NO: 2515 - RNA, 17 nt, synthetic construct
  misc_feature 1..17: note = Description of Artificial Sequence: Synthetic Antisense oligonucleotide
  modified_base 1: mod_base = OTHER; note = bicyclic nucleic acid (BNA)
  modified_base 17: mod_base = OTHER; note = bicyclic nucleic acid (BNA)
  source 1..17: mol_type = other RNA
aaggaagatggcatttc

SEQ ID NO: 2516 - DNA, 16 bp, synthetic construct
  misc_feature 1..16: note = Description of Artificial Sequence: Synthetic Antisense oligonucleotide
  misc_feature 1..16: note = Original Sequence: aaggaagauggcauut
  modified_base 1: mod_base = OTHER; note = bicyclic nucleic acid (BNA)
  modified_base 16: mod_base = OTHER; note = bicyclic nucleic acid (BNA)
  source 1..16: mol_type = other DNA
  modified_base 9: mod_base = OTHER; note = Uracil
  modified_base 14: mod_base = OTHER; note = Uracil
  modified_base 15: mod_base = OTHER; note = Uracil
aaggaagatggcattt

SEQ ID NO: 2517 - DNA, 15 bp, synthetic construct
  misc_feature 1..15: note = Description of Artificial Sequence: Synthetic Antisense oligonucleotide
  misc_feature 1..15: note = Original Sequence: aaggaagauggcaut
  modified_base 1: mod_base = OTHER; note = bicyclic nucleic acid (BNA)
  modified_base 15: mod_base = OTHER; note = bicyclic nucleic acid (BNA)
  source 1..15: mol_type = other DNA
  modified_base 9: mod_base = OTHER; note = Uracil
  modified_base 14: mod_base = OTHER; note = Uracil
aaggaagatggcatt

SEQ ID NO: 2518 - DNA, 14 bp, synthetic construct
  misc_feature 1..14: note = Description of Artificial Sequence: Synthetic Antisense oligonucleotide
  misc_feature 1..14: note = Original Sequence: aaggaagauggcat
  modified_base 1: mod_base = OTHER; note = bicyclic nucleic acid (BNA)
  modified_base 14: mod_base = OTHER; note = bicyclic nucleic acid (BNA)
  source 1..14: mol_type = other DNA
  modified_base 9: mod_base = OTHER; note = Uracil
aaggaagatggcat

SEQ ID NO: 2519 - RNA, 13 nt, synthetic construct
  misc_feature 1..13: note = Description of Artificial Sequence: Synthetic Antisense oligonucleotide
  modified_base 1: mod_base = OTHER; note = bicyclic nucleic acid (BNA)
  modified_base 13: mod_base = OTHER; note = bicyclic nucleic acid (BNA)
  source 1..13: mol_type = other RNA
aaggaagatggca

SEQ ID NO: 2520 - RNA, 12 nt, synthetic construct
  misc_feature 1..12: note = Description of Artificial Sequence: Synthetic Antisense oligonucleotide
  modified_base 1: mod_base = OTHER; note = bicyclic nucleic acid (BNA)
  modified_base 12: mod_base = OTHER; note = bicyclic nucleic acid (BNA)
  source 1..12: mol_type = other RNA
aaggaagatggc

SEQ ID NO: 2521 - RNA, 11 nt, synthetic construct
  misc_feature 1..11: note = Description of Artificial Sequence: Synthetic Antisense oligonucleotide
  modified_base 1: mod_base = OTHER; note = bicyclic nucleic acid (BNA)
  modified_base 11: mod_base = OTHER; note = bicyclic nucleic acid (BNA)
  source 1..11: mol_type = other RNA
aaggaagatgg

SEQ ID NO: 2522 - RNA, 10 nt, synthetic construct
  misc_feature 1..10: note = Description of Artificial Sequence: Synthetic Antisense oligonucleotide
  modified_base 1: mod_base = OTHER; note = bicyclic nucleic acid (BNA)
  modified_base 10: mod_base = OTHER; note = bicyclic nucleic acid (BNA)
  source 1..10: mol_type = other RNA
aaggaagatg

SEQ ID NO: 2523-2524 - skipped (2 entries)

SEQ ID NO: 2525 - RNA, 19 nt, synthetic construct
  misc_feature 1..19: note = Description of Artificial Sequence: Synthetic Antisense oligonucleotide
  modified_base 1: mod_base = OTHER; note = bicyclic nucleic acid (BNA)
  modified_base 19: mod_base = OTHER; note = bicyclic nucleic acid (BNA)
  source 1..19: mol_type = other RNA
aggaagatggcatttctag

SEQ ID NO: 2526 - RNA, 18 nt, synthetic construct
  misc_feature 1..18: note = Description of Artificial Sequence: Synthetic Antisense oligonucleotide
  modified_base 1: mod_base = OTHER; note = bicyclic nucleic acid (BNA)
  modified_base 18: mod_base = OTHER; note = bicyclic nucleic acid (BNA)
  source 1..18: mol_type = other RNA
aggaagatggcatttcta

SEQ ID NO: 2527 - DNA, 17 bp, synthetic construct
  misc_feature 1..17: note = Description of Artificial Sequence: Synthetic Antisense oligonucleotide
  misc_feature 1..17: note = Original Sequence: aggaagauggcauuuct
  modified_base 1: mod_base = OTHER; note = bicyclic nucleic acid (BNA)
  modified_base 17: mod_base = OTHER; note = bicyclic nucleic acid (BNA)
  source 1..17: mol_type = other DNA
  modified_base 8: mod_base = OTHER; note = Uracil
  modified_base 13: mod_base = OTHER; note = Uracil
  modified_base 14: mod_base = OTHER; note = Uracil
  modified_base 15: mod_base = OTHER; note = Uracil
aggaagatggcatttct

SEQ ID NO: 2528 - RNA, 16 nt, synthetic construct
  misc_feature 1..16: note = Description of Artificial Sequence: Synthetic Antisense oligonucleotide
  modified_base 1: mod_base = OTHER; note = bicyclic nucleic acid (BNA)
  modified_base 16: mod_base = OTHER; note = bicyclic nucleic acid (BNA)
  source 1..16: mol_type = other RNA
aggaagatggcatttc

SEQ ID NO: 2529 - DNA, 15 bp, synthetic construct
  misc_feature 1..15: note = Description of Artificial Sequence: Synthetic Antisense oligonucleotide
  misc_feature 1..15: note = Original Sequence: aggaagauggcauut
  modified_base 1: mod_base = OTHER; note = bicyclic nucleic acid (BNA)
  modified_base 15: mod_base = OTHER; note = bicyclic nucleic acid (BNA)
  source 1..15: mol_type = other DNA
  modified_base 8: mod_base = OTHER; note = Uracil
  modified_base 13: mod_base = OTHER; note = Uracil
  modified_base 14: mod_base = OTHER; note = Uracil
aggaagatggcattt

SEQ ID NO: 2530 - DNA, 14 bp, synthetic construct
  misc_feature 1..14: note = Description of Artificial Sequence: Synthetic Antisense oligonucleotide
  misc_feature 1..14: note = Original Sequence: aggaagauggcaut
  modified_base 1: mod_base = OTHER; note = bicyclic nucleic acid (BNA)
  modified_base 14: mod_base = OTHER; note = bicyclic nucleic acid (BNA)
  source 1..14: mol_type = other DNA
  modified_base 8: mod_base = OTHER; note = Uracil
  modified_base 13: mod_base = OTHER; note = Uracil
aggaagatggcatt

SEQ ID NO: 2531 - DNA, 13 bp, synthetic construct
  misc_feature 1..13: note = Description of Artificial Sequence: Synthetic Antisense oligonucleotide
  misc_feature 1..13: note = Original Sequence: aggaagauggcat
  modified_base 1: mod_base = OTHER; note = bicyclic nucleic acid (BNA)
  modified_base 13: mod_base = OTHER; note = bicyclic nucleic acid (BNA)
  source 1..13: mol_type = other DNA
  modified_base 8: mod_base = OTHER; note = Uracil
aggaagatggcat

SEQ ID NO: 2532 - RNA, 12 nt, synthetic construct
  misc_feature 1..12: note = Description of Artificial Sequence: Synthetic Antisense oligonucleotide
  modified_base 1: mod_base = OTHER; note = bicyclic nucleic acid (BNA)
  modified_base 12: mod_base = OTHER; note = bicyclic nucleic acid (BNA)
  source 1..12: mol_type = other RNA
aggaagatggca

SEQ ID NO: 2533 - RNA, 10 nt, synthetic construct
  misc_feature 1..10: note = Description of Artificial Sequence: Synthetic Antisense oligonucleotide
  modified_base 1: mod_base = OTHER; note = bicyclic nucleic acid (BNA)
  modified_base 10: mod_base = OTHER; note = bicyclic nucleic acid (BNA)
  source 1..10: mol_type = other RNA
aggaagatgg

SEQ ID NO: 2534-2535 - skipped (2 entries)

SEQ ID NO: 2536 - RNA, 18 nt, synthetic construct
  misc_feature 1..18: note = Description of Artificial Sequence: Synthetic Antisense oligonucleotide
  modified_base 1: mod_base = OTHER; note = bicyclic nucleic acid (BNA)
  modified_base 18: mod_base = OTHER; note = bicyclic nucleic acid (BNA)
  source 1..18: mol_type = other RNA
ggaagatggcatttctag

SEQ ID NO: 2537 - RNA, 17 nt, synthetic construct
  misc_feature 1..17: note = Description of Artificial Sequence: Synthetic Antisense oligonucleotide
  modified_base 1: mod_base = OTHER; note = bicyclic nucleic acid (BNA)
  modified_base 17: mod_base = OTHER; note = bicyclic nucleic acid (BNA)
  source 1..17: mol_type = other RNA
ggaagatggcatttcta

SEQ ID NO: 2538 - DNA, 16 bp, synthetic construct
  misc_feature 1..16: note = Description of Artificial Sequence: Synthetic Antisense oligonucleotide
  misc_feature 1..16: note = Original Sequence: ggaagauggcauuuct
  modified_base 1: mod_base = OTHER; note = bicyclic nucleic acid (BNA)
  modified_base 16: mod_base = OTHER; note = bicyclic nucleic acid (BNA)
  source 1..16: mol_type = other DNA
  modified_base 7: mod_base = OTHER; note = Uracil
  modified_base 12: mod_base = OTHER; note = Uracil
  modified_base 13: mod_base = OTHER; note = Uracil
  modified_base 14: mod_base = OTHER; note = Uracil
ggaagatggcatttct

SEQ ID NO: 2539 - RNA, 15 nt, synthetic construct
  misc_feature 1..15: note = Description of Artificial Sequence: Synthetic Antisense oligonucleotide
  modified_base 1: mod_base = OTHER; note = bicyclic nucleic acid (BNA)
  modified_base 15: mod_base = OTHER; note = bicyclic nucleic acid (BNA)
  source 1..15: mol_type = other RNA
ggaagatggcatttc

SEQ ID NO: 2540 - DNA, 14 bp, synthetic construct
  misc_feature 1..14: note = Description of Artificial Sequence: Synthetic Antisense oligonucleotide
  misc_feature 1..14: note = Original Sequence: ggaagauggcauut
  modified_base 1: mod_base = OTHER; note = bicyclic nucleic acid (BNA)
  modified_base 14: mod_base = OTHER; note = bicyclic nucleic acid (BNA)
  source 1..14: mol_type = other DNA
  modified_base 7: mod_base = OTHER; note = Uracil
  modified_base 12: mod_base = OTHER; note = Uracil
  modified_base 13: mod_base = OTHER; note = Uracil
ggaagatggcattt

SEQ ID NO: 2541 - DNA, 13 bp, synthetic construct
  misc_feature 1..13: note = Description of Artificial Sequence: Synthetic Antisense oligonucleotide
  misc_feature 1..13: note = Original Sequence: ggaagauggcaut
  modified_base 1: mod_base = OTHER; note = bicyclic nucleic acid (BNA)
  modified_base 13: mod_base = OTHER; note = bicyclic nucleic acid (BNA)
  source 1..13: mol_type = other DNA
  modified_base 7: mod_base = OTHER; note = Uracil
  modified_base 12: mod_base = OTHER; note = Uracil
ggaagatggcatt

SEQ ID NO: 2542 - DNA, 12 bp, synthetic construct
  misc_feature 1..12: note = Description of Artificial Sequence: Synthetic Antisense oligonucleotide
  misc_feature 1..12: note = Original Sequence: ggaagauggcat
  modified_base 1: mod_base = OTHER; note = bicyclic nucleic acid (BNA)
  modified_base 12: mod_base = OTHER; note = bicyclic nucleic acid (BNA)
  source 1..12: mol_type = other DNA
  modified_base 7: mod_base = OTHER; note = Uracil
ggaagatggcat

SEQ ID NO: 2543 - RNA, 11 nt, synthetic construct
  misc_feature 1..11: note = Description of Artificial Sequence: Synthetic Antisense oligonucleotide
  modified_base 1: mod_base = OTHER; note = bicyclic nucleic acid (BNA)
  modified_base 11: mod_base = OTHER; note = bicyclic nucleic acid (BNA)
  source 1..11: mol_type = other RNA
ggaagatggca

SEQ ID NO: 2544 - RNA, 10 nt, synthetic construct
  misc_feature 1..10: note = Description of Artificial Sequence: Synthetic Antisense oligonucleotide
  modified_base 1: mod_base = OTHER; note = bicyclic nucleic acid (BNA)
  modified_base 10: mod_base = OTHER; note = bicyclic nucleic acid (BNA)
  source 1..10: mol_type = other RNA
ggaagatggc

SEQ ID NO: 2545 - skipped

SEQ ID NO: 2546 - RNA, 17 nt, synthetic construct
  misc_feature 1..17: note = Description of Artificial Sequence: Synthetic Antisense oligonucleotide
  modified_base 1: mod_base = OTHER; note = bicyclic nucleic acid (BNA)
  modified_base 17: mod_base = OTHER; note = bicyclic nucleic acid (BNA)
  source 1..17: mol_type = other RNA
gaagatggcatttctag

SEQ ID NO: 2547 - RNA, 16 nt, synthetic construct
  misc_feature 1..16: note = Description of Artificial Sequence: Synthetic Antisense oligonucleotide
  modified_base 1: mod_base = OTHER; note = bicyclic nucleic acid (BNA)
  modified_base 16: mod_base = OTHER; note = bicyclic nucleic acid (BNA)
  source 1..16: mol_type = other RNA
gaagatggcatttcta

SEQ ID NO: 2548 - RNA, 14 nt, synthetic construct
  misc_feature 1..14: note = Description of Artificial Sequence: Synthetic Antisense oligonucleotide
  modified_base 1: mod_base = OTHER; note = bicyclic nucleic acid (BNA)
  modified_base 14: mod_base = OTHER; note = bicyclic nucleic acid (BNA)
  source 1..14: mol_type = other RNA
gaagatggcatttc

SEQ ID NO: 2549 - DNA, 13 bp, synthetic construct
  misc_feature 1..13: note = Description of Artificial Sequence: Synthetic Antisense oligonucleotide
  misc_feature 1..13: note = Original Sequence: gaagauggcauut
  modified_base 1: mod_base = OTHER; note = bicyclic nucleic acid (BNA)
  modified_base 13: mod_base = OTHER; note = bicyclic nucleic acid (BNA)
  source 1..13: mol_type = other DNA
  modified_base 6: mod_base = OTHER; note = Uracil
  modified_base 11: mod_base = OTHER; note = Uracil
  modified_base 12: mod_base = OTHER; note = Uracil
gaagatggcattt

SEQ ID NO: 2550 - DNA, 12 bp, synthetic construct
  misc_feature 1..12: note = Description of Artificial Sequence: Synthetic Antisense oligonucleotide
  misc_feature 1..12: note = Original Sequence: gaagauggcaut
  modified_base 1: mod_base = OTHER; note = bicyclic nucleic acid (BNA)
  modified_base 12: mod_base = OTHER; note = bicyclic nucleic acid (BNA)
  source 1..12: mol_type = other DNA
  modified_base 6: mod_base = OTHER; note = Uracil
  modified_base 11: mod_base = OTHER; note = Uracil
gaagatggcatt

SEQ ID NO: 2551 - DNA, 11 bp, synthetic construct
  misc_feature 1..11: note = Description of Artificial Sequence: Synthetic Antisense oligonucleotide
  misc_feature 1..11: note = Original Sequence: gaagauggcat
  modified_base 1: mod_base = OTHER; note = bicyclic nucleic acid (BNA)
  modified_base 11: mod_base = OTHER; note = bicyclic nucleic acid (BNA)
  source 1..11: mol_type = other DNA
  modified_base 6: mod_base = OTHER; note = Uracil
gaagatggcat

SEQ ID NO: 2552 - RNA, 10 nt, synthetic construct
  misc_feature 1..10: note = Description of Artificial Sequence: Synthetic Antisense oligonucleotide
  modified_base 1: mod_base = OTHER; note = bicyclic nucleic acid (BNA)
  modified_base 10: mod_base = OTHER; note = bicyclic nucleic acid (BNA)
  source 1..10: mol_type = other RNA
gaagatggca

SEQ ID NO: 2553-2554 - skipped (2 entries)

SEQ ID NO: 2555 - RNA, 16 nt, synthetic construct
  misc_feature 1..16: note = Description of Artificial Sequence: Synthetic Antisense oligonucleotide
  modified_base 1: mod_base = OTHER; note = bicyclic nucleic acid (BNA)
  modified_base 16: mod_base = OTHER; note = bicyclic nucleic acid (BNA)
  source 1..16: mol_type = other RNA
aagatggcatttctag

SEQ ID NO: 2556 - RNA, 15 nt, synthetic construct
  misc_feature 1..15: note = Description of Artificial Sequence: Synthetic Antisense oligonucleotide
  modified_base 1: mod_base = OTHER; note = bicyclic nucleic acid (BNA)
  modified_base 15: mod_base = OTHER; note = bicyclic nucleic acid (BNA)
  source 1..15: mol_type = other RNA
aagatggcatttcta

SEQ ID NO: 2557 - DNA, 14 bp, synthetic construct
  misc_feature 1..14: note = Description of Artificial Sequence: Synthetic Antisense oligonucleotide
  misc_feature 1..14: note = Original Sequence: aagauggcauuuct
  modified_base 1: mod_base = OTHER; note = bicyclic nucleic acid (BNA)
  modified_base 14: mod_base = OTHER; note = bicyclic nucleic acid (BNA)
  source 1..14: mol_type = other DNA
  modified_base 5: mod_base = OTHER; note = Uracil
  modified_base 10: mod_base = OTHER; note = Uracil
  modified_base 11: mod_base = OTHER; note = Uracil
  modified_base 12: mod_base = OTHER; note = Uracil
aagatggcatttct

SEQ ID NO: 2558 - RNA, 13 nt, synthetic construct
  misc_feature 1..13: note = Description of Artificial Sequence: Synthetic Antisense oligonucleotide
  modified_base 1: mod_base = OTHER; note = bicyclic nucleic acid (BNA)
  modified_base 13: mod_base = OTHER; note = bicyclic nucleic acid (BNA)
  source 1..13: mol_type = other RNA
aagatggcatttc

SEQ ID NO: 2559 - DNA, 12 bp, synthetic construct
  misc_feature 1..12: note = Description of Artificial Sequence: Synthetic Antisense oligonucleotide
  misc_feature 1..12: note = Original Sequence: aagauggcauut
  modified_base 1: mod_base = OTHER; note = bicyclic nucleic acid (BNA)
  modified_base 12: mod_base = OTHER; note = bicyclic nucleic acid (BNA)
  source 1..12: mol_type = other DNA
  modified_base 5: mod_base = OTHER; note = Uracil
  modified_base 10: mod_base = OTHER; note = Uracil
  modified_base 11: mod_base = OTHER; note = Uracil
aagatggcattt

SEQ ID NO: 2560 - DNA, 11 bp, synthetic construct
  misc_feature 1..11: note = Description of Artificial Sequence: Synthetic Antisense oligonucleotide
  misc_feature 1..11: note = Original Sequence: aagauggcaut
  modified_base 1: mod_base = OTHER; note = bicyclic nucleic acid (BNA)
  modified_base 11: mod_base = OTHER; note = bicyclic nucleic acid (BNA)
  source 1..11: mol_type = other DNA
  modified_base 5: mod_base = OTHER; note = Uracil
  modified_base 10: mod_base = OTHER; note = Uracil
aagatggcatt

SEQ ID NO: 2561 - DNA, 10 bp, synthetic construct
  misc_feature 1..10: note = Description of Artificial Sequence: Synthetic Antisense oligonucleotide
  misc_feature 1..10: note = Original Sequence: aagauggcat
  modified_base 1: mod_base = OTHER; note = bicyclic nucleic acid (BNA)
  modified_base 10: mod_base = OTHER; note = bicyclic nucleic acid (BNA)
  source 1..10: mol_type = other DNA
  modified_base 5: mod_base = OTHER; note = Uracil
aagatggcat

SEQ ID NO: 2562-2563 - skipped (2 entries)

SEQ ID NO: 2564 - RNA, 15 nt, synthetic construct
  misc_feature 1..15: note = Description of Artificial Sequence: Synthetic Antisense oligonucleotide
  modified_base 1: mod_base = OTHER; note = bicyclic nucleic acid (BNA)
  modified_base 15: mod_base = OTHER; note = bicyclic nucleic acid (BNA)
  source 1..15: mol_type = other RNA
agatggcatttctag

SEQ ID NO: 2565 - RNA, 14 nt, synthetic construct
  misc_feature 1..14: note = Description of Artificial Sequence: Synthetic Antisense oligonucleotide
  modified_base 1: mod_base = OTHER; note = bicyclic nucleic acid (BNA)
  modified_base 14: mod_base = OTHER; note = bicyclic nucleic acid (BNA)
  source 1..14: mol_type = other RNA
agatggcatttcta

SEQ ID NO: 2566 - DNA, 13 bp, synthetic construct
  misc_feature 1..13: note = Description of Artificial Sequence: Synthetic Antisense oligonucleotide
  misc_feature 1..13: note = Original Sequence: agauggcauuuct
  modified_base 1: mod_base = OTHER; note = bicyclic nucleic acid (BNA)
  modified_base 13: mod_base = OTHER; note = bicyclic nucleic acid (BNA)
  source 1..13: mol_type = other DNA
  modified_base 4: mod_base = OTHER; note = Uracil
  modified_base 9: mod_base = OTHER; note = Uracil
  modified_base 10: mod_base = OTHER; note = Uracil
  modified_base 11: mod_base = OTHER; note = Uracil
agatggcatttct

SEQ ID NO: 2567 - RNA, 12 nt, synthetic construct
  misc_feature 1..12: note = Description of Artificial Sequence: Synthetic Antisense oligonucleotide
  modified_base 1: mod_base = OTHER; note = bicyclic nucleic acid (BNA)
  modified_base 12: mod_base = OTHER; note = bicyclic nucleic acid (BNA)
  source 1..12: mol_type = other RNA
agatggcatttc

SEQ ID NO: 2568 - DNA, 11 bp, synthetic construct
  misc_feature 1..11: note = Description of Artificial Sequence: Synthetic Antisense oligonucleotide
  misc_feature 1..11: note = Original Sequence: agauggcauut
  modified_base 1: mod_base = OTHER; note = bicyclic nucleic acid (BNA)
  modified_base 11: mod_base = OTHER; note = bicyclic nucleic acid (BNA)
  source 1..11: mol_type = other DNA
  modified_base 4: mod_base = OTHER; note = Uracil
  modified_base 9: mod_base = OTHER; note = Uracil
  modified_base 10: mod_base = OTHER; note = Uracil
agatggcattt

SEQ ID NO: 2569 - DNA, 10 bp, synthetic construct
  misc_feature 1..10: note = Description of Artificial Sequence: Synthetic Antisense oligonucleotide
  misc_feature 1..10: note = Original Sequence: agauggcaut
  modified_base 1: mod_base = OTHER; note = bicyclic nucleic acid (BNA)
  modified_base 10: mod_base = OTHER; note = bicyclic nucleic acid (BNA)
  source 1..10: mol_type = other DNA
  modified_base 4: mod_base = OTHER; note = Uracil
  modified_base 9: mod_base = OTHER; note = Uracil
agatggcatt

SEQ ID NO: 2570-2571 - skipped (2 entries)

SEQ ID NO: 2572 - RNA, 30 nt, synthetic construct; identical to SEQ ID NO: 287
  misc_feature 1..30: note = Description of Artificial Sequence: Synthetic Antisense oligonucleotide
  modified_base 1: mod_base = OTHER; note = bicyclic nucleic acid (BNA)
  modified_base 30: mod_base = OTHER; note = bicyclic nucleic acid (BNA)
  source 1..30: mol_type = other RNA

SEQ ID NO: 2573 - RNA, 29 nt, synthetic construct
  misc_feature 1..29: note = Description of Artificial Sequence: Synthetic Antisense oligonucleotide
  modified_base 1: mod_base = OTHER; note = bicyclic nucleic acid (BNA)
  modified_base 29: mod_base = OTHER; note = bicyclic nucleic acid (BNA)
  source 1..29: mol_type = other RNA
ctccaacatcaaggaagatggcatttcta

SEQ ID NO: 2574 - DNA, 28 bp, synthetic construct
  misc_feature 1..28: note = Description of Artificial Sequence: Synthetic Antisense oligonucleotide
  misc_feature 1..28: note = Original Sequence: cuccaacaucaaggaagauggcauuuct
  modified_base 1: mod_base = OTHER; note = bicyclic nucleic acid (BNA)
  modified_base 28: mod_base = OTHER; note = bicyclic nucleic acid (BNA)
  source 1..28: mol_type = other DNA
  modified_base 2: mod_base = OTHER; note = Uracil
  modified_base 9: mod_base = OTHER; note = Uracil
  modified_base 19: mod_base = OTHER; note = Uracil
  modified_base 24: mod_base = OTHER; note = Uracil
  modified_base 25: mod_base = OTHER; note = Uracil
  modified_base 26: mod_base = OTHER; note = Uracil
ctccaacatcaaggaagatggcatttct

SEQ ID NO: 2575 - RNA, 27 nt, synthetic construct
  misc_feature 1..27: note = Description of Artificial Sequence: Synthetic Antisense oligonucleotide
  modified_base 1: mod_base = OTHER; note = bicyclic nucleic acid (BNA)
  modified_base 27: mod_base = OTHER; note = bicyclic nucleic acid (BNA)
  source 1..27: mol_type = other RNA
ctccaacatcaaggaagatggcatttc

SEQ ID NO: 2576 - DNA, 26 bp, synthetic construct
  misc_feature 1..26: note = Description of Artificial Sequence: Synthetic Antisense oligonucleotide
  misc_feature 1..26: note = Original Sequence: cuccaacaucaaggaagauggcauut
  modified_base 1: mod_base = OTHER; note = bicyclic nucleic acid (BNA)
  modified_base 26: mod_base = OTHER; note = bicyclic nucleic acid (BNA)
  source 1..26: mol_type = other DNA
  modified_base 2: mod_base = OTHER; note = Uracil
  modified_base 9: mod_base = OTHER; note = Uracil
  modified_base 19: mod_base = OTHER; note = Uracil
  modified_base 24: mod_base = OTHER; note = Uracil
  modified_base 25: mod_base = OTHER; note = Uracil
ctccaacatcaaggaagatggcattt

SEQ ID NO: 2577 - DNA, 25 bp, synthetic construct
  misc_feature 1..25: note = Description of Artificial Sequence: Synthetic Antisense oligonucleotide
  misc_feature 1..25: note = Original Sequence: cuccaacaucaaggaagauggcaut
  modified_base 1: mod_base = OTHER; note = bicyclic nucleic acid (BNA)
  modified_base 25: mod_base = OTHER; note = bicyclic nucleic acid (BNA)
  source 1..25: mol_type = other DNA
  modified_base 2: mod_base = OTHER; note = Uracil
  modified_base 9: mod_base = OTHER; note = Uracil
  modified_base 19: mod_base = OTHER; note = Uracil
  modified_base 24: mod_base = OTHER; note = Uracil
ctccaacatcaaggaagatggcatt

SEQ ID NO: 2578 - DNA, 24 bp, synthetic construct
  misc_feature 1..24: note = Description of Artificial Sequence: Synthetic Antisense oligonucleotide
  misc_feature 1..24: note = Original Sequence: cuccaacaucaaggaagauggcat
  modified_base 1: mod_base = OTHER; note = bicyclic nucleic acid (BNA)
  modified_base 24: mod_base = OTHER; note = bicyclic nucleic acid (BNA)
  source 1..24: mol_type = other DNA
  modified_base 2: mod_base = OTHER; note = Uracil
  modified_base 9: mod_base = OTHER; note = Uracil
  modified_base 19: mod_base = OTHER; note = Uracil
ctccaacatcaaggaagatggcat

SEQ ID NO: 2579 - RNA, 23 nt, synthetic construct
  misc_feature 1..23: note = Description of Artificial Sequence: Synthetic Antisense oligonucleotide
  modified_base 1: mod_base = OTHER; note = bicyclic nucleic acid (BNA)
  modified_base 23: mod_base = OTHER; note = bicyclic nucleic acid (BNA)
  source 1..23: mol_type = other RNA
ctccaacatcaaggaagatggca

SEQ ID NO: 2580 - RNA, 22 nt, synthetic construct
  misc_feature 1..22: note = Description of Artificial Sequence: Synthetic Antisense oligonucleotide
  modified_base 1: mod_base = OTHER; note = bicyclic nucleic acid (BNA)
  modified_base 22: mod_base = OTHER; note = bicyclic nucleic acid (BNA)
  source 1..22: mol_type = other RNA
ctccaacatcaaggaagatggc

SEQ ID NO: 2581 - RNA, 21 nt, synthetic construct
  misc_feature 1..21: note = Description of Artificial Sequence: Synthetic Antisense oligonucleotide
  modified_base 1: mod_base = OTHER; note = bicyclic nucleic acid (BNA)
  modified_base 21: mod_base = OTHER; note = bicyclic nucleic acid (BNA)
  source 1..21: mol_type = other RNA
ctccaacatcaaggaagatgg

SEQ ID NO: 2582 - RNA, 20 nt, synthetic construct
  misc_feature 1..20: note = Description of Artificial Sequence: Synthetic Antisense oligonucleotide
  modified_base 1: mod_base = OTHER; note = bicyclic nucleic acid (BNA)
  modified_base 20: mod_base = OTHER; note = bicyclic nucleic acid (BNA)
  source 1..20: mol_type = other RNA
ctccaacatcaaggaagatg

SEQ ID NO: 2583 - DNA, 19 bp, synthetic construct
  misc_feature 1..19: note = Description of Artificial Sequence: Synthetic Antisense oligonucleotide
  misc_feature 1..19: note = Original Sequence: cuccaacaucaaggaagat
  modified_base 1: mod_base = OTHER; note = bicyclic nucleic acid (BNA)
  modified_base 19: mod_base = OTHER; note = bicyclic nucleic acid (BNA)
  source 1..19: mol_type = other DNA
  modified_base 2: mod_base = OTHER; note = Uracil
  modified_base 9: mod_base = OTHER; note = Uracil
ctccaacatcaaggaagat

SEQ ID NO: 2584 - RNA, 18 nt, synthetic construct
  misc_feature 1..18: note = Description of Artificial Sequence: Synthetic Antisense oligonucleotide
  modified_base 1: mod_base = OTHER; note = bicyclic nucleic acid (BNA)
  modified_base 18: mod_base = OTHER; note = bicyclic nucleic acid (BNA)
  source 1..18: mol_type = other RNA
ctccaacatcaaggaaga

SEQ ID NO: 2585 - RNA, 17 nt, synthetic construct
  misc_feature 1..17: note = Description of Artificial Sequence: Synthetic Antisense oligonucleotide
  modified_base 1: mod_base = OTHER; note = bicyclic nucleic acid (BNA)
  modified_base 17: mod_base = OTHER; note = bicyclic nucleic acid (BNA)
  source 1..17: mol_type = other RNA
ctccaacatcaaggaag

SEQ ID NO: 2586 - DNA, 29 bp, synthetic construct
  misc_feature 1..29: note = Description of Artificial Sequence: Synthetic Antisense oligonucleotide
  misc_feature 1..29: note = Original Sequence: tccaacaucaaggaagauggcauuucuag
  modified_base 1: mod_base = OTHER; note = bicyclic nucleic acid (BNA)
  modified_base 29: mod_base = OTHER; note = bicyclic nucleic acid (BNA)
  source 1..29: mol_type = other DNA
  modified_base 8: mod_base = OTHER; note = Uracil
  modified_base 18: mod_base = OTHER; note = Uracil
  modified_base 23: mod_base = OTHER; note = Uracil
  modified_base 24: mod_base = OTHER; note = Uracil
  modified_base 25: mod_base = OTHER; note = Uracil
  modified_base 27: mod_base = OTHER; note = Uracil
tccaacatcaaggaagatggcatttctag

SEQ ID NO: 2587 - DNA, 28 bp, synthetic construct
  misc_feature 1..28: note = Description of Artificial Sequence: Synthetic Antisense oligonucleotide
  misc_feature 1..28: note = Original Sequence: tccaacaucaaggaagauggcauuucua
  modified_base 1: mod_base = OTHER; note = bicyclic nucleic acid (BNA)
  modified_base 28: mod_base = OTHER; note = bicyclic nucleic acid (BNA)
  source 1..28: mol_type = other DNA
  modified_base 8: mod_base = OTHER; note = Uracil
  modified_base 18: mod_base = OTHER; note = Uracil
  modified_base 23: mod_base = OTHER; note = Uracil
  modified_base 24: mod_base = OTHER; note = Uracil
  modified_base 25: mod_base = OTHER; note = Uracil
  modified_base 27: mod_base = OTHER; note = Uracil
tccaacatcaaggaagatggcatttcta

SEQ ID NO: 2588 - DNA, 27 bp, synthetic construct
  misc_feature 1..27: note = Description of Artificial Sequence: Synthetic Antisense oligonucleotide
  misc_feature 1..27: note = Original Sequence: tccaacaucaaggaagauggcauuuct
  modified_base 1: mod_base = OTHER; note = bicyclic nucleic acid (BNA)
  modified_base 27: mod_base = OTHER; note = bicyclic nucleic acid (BNA)
  source 1..27: mol_type = other DNA
  modified_base 8: mod_base = OTHER; note = Uracil
  modified_base 18: mod_base = OTHER; note = Uracil
  modified_base 23: mod_base = OTHER; note = Uracil
  modified_base 24: mod_base = OTHER; note = Uracil
  modified_base 25: mod_base = OTHER; note = Uracil
tccaacatcaaggaagatggcatttct

SEQ ID NO: 2589 - DNA, 26 bp, synthetic construct
  misc_feature 1..26: note = Description of Artificial Sequence: Synthetic Antisense oligonucleotide
  misc_feature 1..26: note = Original Sequence: tccaacaucaaggaagauggcauuuc
  modified_base 1: mod_base = OTHER; note = bicyclic nucleic acid (BNA)
  modified_base 26: mod_base = OTHER; note = bicyclic nucleic acid (BNA)
  source 1..26: mol_type = other DNA
  modified_base 8: mod_base = OTHER; note = Uracil
  modified_base 18: mod_base = OTHER; note = Uracil
  modified_base 23: mod_base = OTHER; note = Uracil
  modified_base 24: mod_base = OTHER; note = Uracil
  modified_base 25: mod_base = OTHER; note = Uracil
tccaacatcaaggaagatggcatttc

SEQ ID NO: 2590 - DNA, 25 bp, synthetic construct
  misc_feature 1..25: note = Description of Artificial Sequence: Synthetic Antisense oligonucleotide
  misc_feature 1..25: note = Original Sequence: tccaacaucaaggaagauggcauut
  modified_base 1: mod_base = OTHER; note = bicyclic nucleic acid (BNA)
  modified_base 25: mod_base = OTHER; note = bicyclic nucleic acid (BNA)
  source 1..25: mol_type = other DNA
  modified_base 8: mod_base = OTHER; note = Uracil
  modified_base 18: mod_base = OTHER; note = Uracil
  modified_base 23: mod_base = OTHER; note = Uracil
  modified_base 24: mod_base = OTHER; note = Uracil
tccaacatcaaggaagatggcattt

SEQ ID NO: 2591 - DNA, 24 bp, synthetic construct
  misc_feature 1..24: note = Description of Artificial Sequence: Synthetic Antisense oligonucleotide
  misc_feature 1..24: note = Original Sequence: tccaacaucaaggaagauggcaut
  modified_base 1: mod_base = OTHER; note = bicyclic nucleic acid (BNA)
  modified_base 24: mod_base = OTHER; note = bicyclic nucleic acid (BNA)
  source 1..24: mol_type = other DNA
  modified_base 8: mod_base = OTHER; note = Uracil
  modified_base 18: mod_base = OTHER; note = Uracil
  modified_base 23: mod_base = OTHER; note = Uracil
tccaacatcaaggaagatggcatt

SEQ ID NO: 2592 - DNA, 23 bp, synthetic construct
  misc_feature 1..23: note = Description of Artificial Sequence: Synthetic Antisense oligonucleotide
  misc_feature 1..23: note = Original Sequence: tccaacaucaaggaagauggcat
  modified_base 1: mod_base = OTHER; note = bicyclic nucleic acid (BNA)
  modified_base 23: mod_base = OTHER; note = bicyclic nucleic acid (BNA)
  source 1..23: mol_type = other DNA
  modified_base 8: mod_base = OTHER; note = Uracil
  modified_base 18: mod_base = OTHER; note = Uracil
tccaacatcaaggaagatggcat

SEQ ID NO: 2593 - DNA, 22 bp, synthetic construct
  misc_feature 1..22: note = Description of Artificial Sequence: Synthetic Antisense oligonucleotide
  misc_feature 1..22: note = Original Sequence: tccaacaucaaggaagauggca
  modified_base 1: mod_base = OTHER; note = bicyclic nucleic acid (BNA)
  modified_base 22: mod_base = OTHER; note = bicyclic nucleic acid (BNA)
  source 1..22: mol_type = other DNA
  modified_base 8: mod_base = OTHER; note = Uracil
  modified_base 18: mod_base = OTHER; note = Uracil
tccaacatcaaggaagatggca

SEQ ID NO: 2594 - DNA, 21 bp, synthetic construct
  misc_feature 1..21: note = Description of Artificial Sequence: Synthetic Antisense oligonucleotide
  misc_feature 1..21: note = Original Sequence: tccaacaucaaggaagauggc
  modified_base 1: mod_base = OTHER; note = bicyclic nucleic acid (BNA)
  modified_base 21: mod_base = OTHER; note = bicyclic nucleic acid (BNA)
  source 1..21: mol_type = other DNA
  modified_base 8: mod_base = OTHER; note = Uracil
  modified_base 18: mod_base = OTHER; note = Uracil
tccaacatcaaggaagatggc

SEQ ID NO: 2595 - DNA, 20 bp, synthetic construct
  misc_feature 1..20: note = Description of Artificial Sequence: Synthetic Antisense oligonucleotide
  misc_feature 1..20: note = Original Sequence: tccaacaucaaggaagaugg
  modified_base 1: mod_base = OTHER; note = bicyclic nucleic acid (BNA)
  modified_base 20: mod_base = OTHER; note = bicyclic nucleic acid (BNA)
  source 1..20: mol_type = other DNA
  modified_base 8: mod_base = OTHER; note = Uracil
  modified_base 18: mod_base = OTHER; note = Uracil
tccaacatcaaggaagatgg

SEQ ID NO: 2596 - DNA, 19 bp, synthetic construct
  misc_feature 1..19: note = Description of Artificial Sequence: Synthetic Antisense oligonucleotide
  misc_feature 1..19: note = Original Sequence: tccaacaucaaggaagaug
  modified_base 1: mod_base = OTHER; note = bicyclic nucleic acid (BNA)
  modified_base 19: mod_base = OTHER; note = bicyclic nucleic acid (BNA)
  source 1..19: mol_type = other DNA
  modified_base 8: mod_base = OTHER; note = Uracil
  modified_base 18: mod_base = OTHER; note = Uracil
tccaacatcaaggaagatg

SEQ ID NO: 2597 - DNA, 18 bp, synthetic construct
  misc_feature 1..18: note = Description of Artificial Sequence: Synthetic Antisense oligonucleotide
  misc_feature 1..18: note = Original Sequence: tccaacaucaaggaagat
  modified_base 1: mod_base = OTHER; note = bicyclic nucleic acid (BNA)
  modified_base 18: mod_base = OTHER; note = bicyclic nucleic acid (BNA)
  source 1..18: mol_type = other DNA
  modified_base 8: mod_base = OTHER; note = Uracil
tccaacatcaaggaagat

SEQ ID NO: 2598 - DNA, 17 bp, synthetic construct
  misc_feature 1..17: note = Description of Artificial Sequence: Synthetic Antisense oligonucleotide
  misc_feature 1..17: note = Original Sequence: tccaacaucaaggaaga
  modified_base 1: mod_base = OTHER; note = bicyclic nucleic acid (BNA)
  modified_base 17: mod_base = OTHER; note = bicyclic nucleic acid (BNA)
  source 1..17: mol_type = other DNA
  modified_base 8: mod_base = OTHER; note = Uracil
tccaacatcaaggaaga

SEQ ID NO: 2599 - DNA, 16 bp, synthetic construct
  misc_feature 1..16: note = Description of Artificial Sequence: Synthetic Antisense oligonucleotide
  misc_feature 1..16: note = Original Sequence: tccaacaucaaggaag
  modified_base 1: mod_base = OTHER; note = bicyclic nucleic acid (BNA)
  modified_base 16: mod_base = OTHER; note = bicyclic nucleic acid (BNA)
  source 1..16: mol_type = other DNA
  modified_base 8: mod_base = OTHER; note = Uracil
tccaacatcaaggaag

SEQ ID NO: 2600 - RNA, 28 nt, synthetic construct
  misc_feature 1..28: note = Description of Artificial Sequence: Synthetic Antisense oligonucleotide
  modified_base 1: mod_base = OTHER; note = bicyclic nucleic acid (BNA)
  modified_base 28: mod_base = OTHER; note = bicyclic nucleic acid (BNA)
  source 1..28: mol_type = other RNA
ccaacatcaaggaagatggcatttctag

SEQ ID NO: 2601 - RNA, 27 nt, synthetic construct
  misc_feature 1..27: note = Description of Artificial Sequence: Synthetic Antisense oligonucleotide
  modified_base 1: mod_base = OTHER; note = bicyclic nucleic acid (BNA)
  modified_base 27: mod_base = OTHER; note = bicyclic nucleic acid (BNA)
  source 1..27: mol_type = other RNA
ccaacatcaaggaagatggcatttcta

SEQ ID NO: 2602 - DNA, 26 bp, synthetic construct
  misc_feature 1..26: note = Description of Artificial Sequence: Synthetic Antisense oligonucleotide
  misc_feature 1..26: note = Original Sequence: ccaacaucaaggaagauggcauuuct
  modified_base 1: mod_base = OTHER; note = bicyclic nucleic acid (BNA)
  modified_base 26: mod_base = OTHER; note = bicyclic nucleic acid (BNA)
  source 1..26: mol_type = other DNA
  modified_base 7: mod_base = OTHER; note = Uracil
  modified_base 17: mod_base = OTHER; note = Uracil
  modified_base 22: mod_base = OTHER; note = Uracil
  modified_base 23: mod_base = OTHER; note = Uracil
  modified_base 24: mod_base = OTHER; note = Uracil
ccaacatcaaggaagatggcatttct

SEQ ID NO: 2603 - RNA, 25 nt, synthetic construct
  misc_feature 1..25: note = Description of Artificial Sequence: Synthetic Antisense oligonucleotide
  modified_base 1: mod_base = OTHER; note = bicyclic nucleic acid (BNA)
  modified_base 25: mod_base = OTHER; note = bicyclic nucleic acid (BNA)
  source 1..25: mol_type = other RNA
ccaacatcaaggaagatggcatttc

SEQ ID NO: 2604 - DNA, 24 bp, synthetic construct
  misc_feature 1..24: note = Description of Artificial Sequence: Synthetic Antisense oligonucleotide
  misc_feature 1..24: note = Original Sequence: ccaacaucaaggaagauggcauut
  modified_base 1: mod_base = OTHER; note = bicyclic nucleic acid (BNA)
  modified_base 24: mod_base = OTHER; note = bicyclic nucleic acid (BNA)
  source 1..24: mol_type = other DNA
  modified_base 7: mod_base = OTHER; note = Uracil
  modified_base 17: mod_base = OTHER; note = Uracil
  modified_base 22: mod_base = OTHER; note = Uracil
  modified_base 23: mod_base = OTHER; note = Uracil
ccaacatcaaggaagatggcattt

SEQ ID NO: 2605 - DNA, 23 bp, synthetic construct
  misc_feature 1..23: note = Description of Artificial Sequence: Synthetic Antisense oligonucleotide
  misc_feature 1..23: note = Original Sequence: ccaacaucaaggaagauggcaut
  modified_base 1: mod_base = OTHER; note = bicyclic nucleic acid (BNA)
  modified_base 23: mod_base = OTHER; note = bicyclic nucleic acid (BNA)
  source 1..23: mol_type = other DNA
  modified_base 7: mod_base = OTHER; note = Uracil
  modified_base 17: mod_base = OTHER; note = Uracil
  modified_base 22: mod_base = OTHER; note = Uracil
ccaacatcaaggaagatggcatt

SEQ ID NO: 2606 - DNA, 22 bp, synthetic construct
  misc_feature 1..22: note = Description of Artificial Sequence: Synthetic Antisense oligonucleotide
  misc_feature 1..22: note = Original Sequence: ccaacaucaaggaagauggcat
  modified_base 1: mod_base = OTHER; note = bicyclic nucleic acid (BNA)
  modified_base 22: mod_base = OTHER; note = bicyclic nucleic acid (BNA)
  source 1..22: mol_type = other DNA
  modified_base 7: mod_base = OTHER; note = Uracil
  modified_base 17: mod_base = OTHER; note = Uracil
ccaacatcaaggaagatggcat

SEQ ID NO: 2607 - RNA, 21 nt, synthetic construct
  misc_feature 1..21: note = Description of Artificial Sequence: Synthetic Antisense oligonucleotide
  modified_base 1: mod_base = OTHER; note = bicyclic nucleic acid (BNA)
  modified_base 21: mod_base = OTHER; note = bicyclic nucleic acid (BNA)
  source 1..21: mol_type = other RNA
ccaacatcaaggaagatggca

SEQ ID NO: 2608 - RNA, 20 nt, synthetic construct
  misc_feature 1..20: note = Description of Artificial Sequence: Synthetic Antisense oligonucleotide
  modified_base 1: mod_base = OTHER; note = bicyclic nucleic acid (BNA)
  modified_base 20: mod_base = OTHER; note = bicyclic nucleic acid (BNA)
  source 1..20: mol_type = other RNA
ccaacatcaaggaagatggc

SEQ ID NO: 2609 - RNA, 19 nt, synthetic construct
  misc_feature 1..19: note = Description of Artificial Sequence: Synthetic Antisense oligonucleotide
  modified_base 1: mod_base = OTHER; note = bicyclic nucleic acid (BNA)
  modified_base 19: mod_base = OTHER; note = bicyclic nucleic acid (BNA)
  source 1..19: mol_type = other RNA
ccaacatcaaggaagatgg

SEQ ID NO: 2610 - RNA, 18 nt, synthetic construct
  misc_feature 1..18: note = Description of Artificial Sequence: Synthetic Antisense oligonucleotide
  modified_base 1: mod_base = OTHER; note = bicyclic nucleic acid (BNA)
  modified_base 18: mod_base = OTHER; note = bicyclic nucleic acid (BNA)
  source 1..18: mol_type = other RNA
ccaacatcaaggaagatg

SEQ ID NO: 2611 - DNA, 17 bp, synthetic construct
  misc_feature 1..17: note = Description of Artificial Sequence: Synthetic Antisense oligonucleotide
  misc_feature 1..17: note = Original Sequence: ccaacaucaaggaagat
  modified_base 1: mod_base = OTHER; note = bicyclic nucleic acid (BNA)
  modified_base 17: mod_base = OTHER; note = bicyclic nucleic acid (BNA)
  source 1..17: mol_type = other DNA
  modified_base 7: mod_base = OTHER; note = Uracil
ccaacatcaaggaagat

SEQ ID NO: 2612 - RNA, 16 nt, synthetic construct
  misc_feature 1..16: note = Description of Artificial Sequence: Synthetic Antisense oligonucleotide
  modified_base 1: mod_base = OTHER; note = bicyclic nucleic acid (BNA)
  modified_base 16: mod_base = OTHER; note = bicyclic nucleic acid (BNA)
  source 1..16: mol_type = other RNA
ccaacatcaaggaaga

SEQ ID NO: 2613 - RNA, 15 nt, synthetic construct
  misc_feature 1..15: note = Description of Artificial Sequence: Synthetic Antisense oligonucleotide
  modified_base 1: mod_base = OTHER; note = bicyclic nucleic acid (BNA)
  modified_base 15: mod_base = OTHER; note = bicyclic nucleic acid (BNA)
  source 1..15: mol_type = other RNA
ccaacatcaaggaag

SEQ ID NO: 2614 - RNA, 27 nt, synthetic construct
  misc_feature 1..27: note = Description of Artificial Sequence: Synthetic Antisense oligonucleotide
  modified_base 1: mod_base = OTHER; note = bicyclic nucleic acid (BNA)
  modified_base 27: mod_base = OTHER; note = bicyclic nucleic acid (BNA)
  source 1..27: mol_type = other RNA
caacatcaaggaagatggcatttctag

SEQ ID NO: 2615 - RNA, 26 nt, synthetic construct
  misc_feature 1..26: note = Description of Artificial Sequence: Synthetic Antisense oligonucleotide
  modified_base 1: mod_base = OTHER; note = bicyclic nucleic acid (BNA)
  modified_base 26: mod_base = OTHER; note = bicyclic nucleic acid (BNA)
  source 1..26: mol_type = other RNA
caacatcaaggaagatggcatttcta

SEQ ID NO: 2616 - DNA, 25 bp, synthetic construct
  misc_feature 1..25: note = Description of Artificial Sequence: Synthetic Antisense oligonucleotide
  misc_feature 1..25: note = Original Sequence: caacaucaaggaagauggcauuuct
  modified_base 1: mod_base = OTHER; note = bicyclic nucleic acid (BNA)
  modified_base 25: mod_base = OTHER; note = bicyclic nucleic acid (BNA)
  source 1..25: mol_type = other DNA
  modified_base 6: mod_base = OTHER; note = Uracil
  modified_base 16: mod_base = OTHER; note = Uracil
  modified_base 21: mod_base = OTHER; note = Uracil
  modified_base 22: mod_base = OTHER; note = Uracil
  modified_base 23: mod_base = OTHER; note = Uracil
caacatcaaggaagatggcatttct

SEQ ID NO: 2617 - RNA, 24 nt, synthetic construct
  misc_feature 1..24: note = Description of Artificial Sequence: Synthetic Antisense oligonucleotide
  modified_base 1: mod_base = OTHER; note = bicyclic nucleic acid (BNA)
  modified_base 24: mod_base = OTHER; note = bicyclic nucleic acid (BNA)
  source 1..24: mol_type = other RNA
caacatcaaggaagatggcatttc

SEQ ID NO: 2618 - DNA, 23 bp, synthetic construct
  misc_feature 1..23: note = Description of Artificial Sequence: Synthetic Antisense oligonucleotide
  misc_feature 1..23: note = Original Sequence: caacaucaaggaagauggcauut
  modified_base 1: mod_base = OTHER; note = bicyclic nucleic acid (BNA)
  modified_base 23: mod_base = OTHER; note = bicyclic nucleic acid (BNA)
  source 1..23: mol_type = other DNA
  modified_base 6: mod_base = OTHER; note = Uracil
  modified_base 16: mod_base = OTHER; note = Uracil
  modified_base 21: mod_base = OTHER; note = Uracil
  modified_base 22: mod_base = OTHER; note = Uracil
caacatcaaggaagatggcattt

SEQ ID NO: 2619 - DNA, 22 bp, synthetic construct
  misc_feature 1..22: note = Description of Artificial Sequence: Synthetic Antisense oligonucleotide
  misc_feature 1..22: note = Original Sequence: caacaucaaggaagauggcaut
  modified_base 1: mod_base = OTHER; note = bicyclic nucleic acid (BNA)
  modified_base 22: mod_base = OTHER; note = bicyclic nucleic acid (BNA)
  source 1..22: mol_type = other DNA
  modified_base 6: mod_base = OTHER; note = Uracil
  modified_base 16: mod_base = OTHER; note = Uracil
  modified_base 21: mod_base = OTHER; note = Uracil
caacatcaaggaagatggcatt

SEQ ID NO: 2620 - DNA, 21 bp, synthetic construct
  misc_feature 1..21: note = Description of Artificial Sequence: Synthetic Antisense oligonucleotide
  misc_feature 1..21: note = Original Sequence: caacaucaaggaagauggcat
  modified_base 1: mod_base = OTHER; note = bicyclic nucleic acid (BNA)
  modified_base 21: mod_base = OTHER; note = bicyclic nucleic acid (BNA)
  source 1..21: mol_type = other DNA
  modified_base 6: mod_base = OTHER; note = Uracil
  modified_base 16: mod_base = OTHER; note = Uracil
caacatcaaggaagatggcat

SEQ ID NO: 2621 - RNA, 20 nt, synthetic construct
  misc_feature 1..20: note = Description of Artificial Sequence: Synthetic Antisense oligonucleotide
  modified_base 1: mod_base = OTHER; note = bicyclic nucleic acid (BNA)
  modified_base 20: mod_base = OTHER; note = bicyclic nucleic acid (BNA)
  source 1..20: mol_type = other RNA
caacatcaaggaagatggca

SEQ ID NO: 2622 - RNA, 19 nt, synthetic construct
  misc_feature 1..19: note = Description of Artificial Sequence: Synthetic Antisense oligonucleotide
  modified_base 1: mod_base = OTHER; note = bicyclic nucleic acid (BNA)
  modified_base 19: mod_base = OTHER; note = bicyclic nucleic acid (BNA)
  source 1..19: mol_type = other RNA
caacatcaaggaagatggc

SEQ ID NO: 2623 - RNA, 18 nt, synthetic construct
  misc_feature 1..18: note = Description of Artificial Sequence: Synthetic Antisense oligonucleotide
  modified_base 1: mod_base = OTHER; note = bicyclic nucleic acid (BNA)
  modified_base 18: mod_base = OTHER; note = bicyclic nucleic acid (BNA)
  source 1..18: mol_type = other RNA
caacatcaaggaagatgg

SEQ ID NO: 2624 - RNA, 17 nt, synthetic construct
  misc_feature 1..17: note = Description of Artificial Sequence: Synthetic Antisense oligonucleotide
  modified_base 1: mod_base = OTHER; note = bicyclic nucleic acid (BNA)
  modified_base 17: mod_base = OTHER; note = bicyclic nucleic acid (BNA)
  source 1..17: mol_type = other RNA
caacatcaaggaagatg

SEQ ID NO: 2625 - DNA, 16 bp, synthetic construct
  misc_feature 1..16: note = Description of Artificial Sequence: Synthetic Antisense oligonucleotide
  misc_feature 1..16: note = Original Sequence: caacaucaaggaagat
  modified_base 1: mod_base = OTHER; note = bicyclic nucleic acid (BNA)
  modified_base 16: mod_base = OTHER; note = bicyclic nucleic acid (BNA)
  source 1..16: mol_type = other DNA
  modified_base 6: mod_base = OTHER; note = Uracil
caacatcaaggaagat

SEQ ID NO: 2626 - RNA, 15 nt, synthetic construct
  misc_feature 1..15: note = Description of Artificial Sequence: Synthetic Antisense oligonucleotide
  modified_base 1: mod_base = OTHER; note = bicyclic nucleic acid (BNA)
  modified_base 15: mod_base = OTHER; note = bicyclic nucleic acid (BNA)
  source 1..15: mol_type = other RNA
caacatcaaggaaga

SEQ ID NO: 2627 - RNA, 14 nt, synthetic construct
  misc_feature 1..14: note = Description of Artificial Sequence: Synthetic Antisense oligonucleotide
  modified_base 1: mod_base = OTHER; note = bicyclic nucleic acid (BNA)
  modified_base 14: mod_base = OTHER; note = bicyclic nucleic acid (BNA)
  source 1..14: mol_type = other RNA
caacatcaaggaag

SEQ ID NO: 2628 - RNA, 26 nt, synthetic construct
  misc_feature 1..26: note = Description of Artificial Sequence: Synthetic Antisense oligonucleotide
  modified_base 1: mod_base = OTHER; note = bicyclic nucleic acid (BNA)
  modified_base 26: mod_base = OTHER; note = bicyclic nucleic acid (BNA)
  source 1..26: mol_type = other RNA
aacatcaaggaagatggcatttctag

SEQ ID NO: 2629 - RNA, 25 nt, synthetic construct
  misc_feature 1..25: note = Description of Artificial Sequence: Synthetic Antisense oligonucleotide
  modified_base 1: mod_base = OTHER; note = bicyclic nucleic acid (BNA)
  modified_base 25: mod_base = OTHER; note = bicyclic nucleic acid (BNA)
  source 1..25: mol_type = other RNA
aacatcaaggaagatggcatttcta

SEQ ID NO: 2630 - DNA, 24 bp, synthetic construct
  misc_feature 1..24: note = Description of Artificial Sequence: Synthetic Antisense oligonucleotide
  misc_feature 1..24: note = Original Sequence: aacaucaaggaagauggcauuuct
  modified_base 1: mod_base = OTHER; note = bicyclic nucleic acid (BNA)
  modified_base 24: mod_base = OTHER; note = bicyclic nucleic acid (BNA)
  source 1..24: mol_type = other DNA
  modified_base 5: mod_base = OTHER; note = Uracil
  modified_base 15: mod_base = OTHER; note = Uracil
  modified_base 20: mod_base = OTHER; note = Uracil
  modified_base 21: mod_base = OTHER; note = Uracil
  modified_base 22: mod_base = OTHER; note = Uracil
aacatcaaggaagatggcatttct

SEQ ID NO: 2631 - RNA, 23 nt, synthetic construct
  misc_feature 1..23: note = Description of Artificial Sequence: Synthetic Antisense oligonucleotide
  modified_base 1: mod_base = OTHER; note = bicyclic nucleic acid (BNA)
  modified_base 23: mod_base = OTHER; note = bicyclic nucleic acid (BNA)
  source 1..23: mol_type = other RNA
aacatcaaggaagatggcatttc

SEQ ID NO: 2632 - DNA, 22 bp, synthetic construct
  misc_feature 1..22: note = Description of Artificial Sequence: Synthetic Antisense oligonucleotide
  misc_feature 1..22: note = Original Sequence: aacaucaaggaagauggcauut
  modified_base 1: mod_base = OTHER; note = bicyclic nucleic acid (BNA)
  modified_base 22: mod_base = OTHER; note = bicyclic nucleic acid (BNA)
  source 1..22: mol_type = other DNA
  modified_base 5: mod_base = OTHER; note = Uracil
  modified_base 15: mod_base = OTHER; note = Uracil
  modified_base 20: mod_base = OTHER; note = Uracil
  modified_base 21: mod_base = OTHER; note = Uracil
aacatcaaggaagatggcattt

SEQ ID NO: 2633 - DNA, 21 bp, synthetic construct
  misc_feature 1..21: note = Description of Artificial Sequence: Synthetic Antisense oligonucleotide
  misc_feature 1..21: note = Original Sequence: aacaucaaggaagauggcaut
  modified_base 1: mod_base = OTHER; note = bicyclic nucleic acid (BNA)
  modified_base 21: mod_base = OTHER; note = bicyclic nucleic acid (BNA)
  source 1..21: mol_type = other DNA
  modified_base 5: mod_base = OTHER; note = Uracil
  modified_base 15: mod_base = OTHER; note = Uracil
  modified_base 20: mod_base = OTHER; note = Uracil
aacatcaaggaagatggcatt

SEQ ID NO: 2634 - DNA, 20 bp, synthetic construct
  misc_feature 1..20: note = Description of Artificial Sequence: Synthetic Antisense oligonucleotide
  misc_feature 1..20: note = Original Sequence: aacaucaaggaagauggcat
  modified_base 1: mod_base = OTHER; note = bicyclic nucleic acid (BNA)
  modified_base 20: mod_base = OTHER; note = bicyclic nucleic acid (BNA)
  source 1..20: mol_type = other DNA
  modified_base 5: mod_base = OTHER; note = Uracil
  modified_base 15: mod_base = OTHER; note = Uracil
aacatcaaggaagatggcat

SEQ ID NO: 2635 - RNA, 19 nt, synthetic construct
  misc_feature 1..19: note = Description of Artificial Sequence: Synthetic Antisense oligonucleotide
  modified_base 1: mod_base = OTHER; note = bicyclic nucleic acid (BNA)
  modified_base 19: mod_base = OTHER; note = bicyclic nucleic acid (BNA)
  source 1..19: mol_type = other RNA
aacatcaaggaagatggca

SEQ ID NO: 2636 - RNA, 18 nt, synthetic construct
  misc_feature 1..18: note = Description of Artificial Sequence: Synthetic Antisense oligonucleotide
  modified_base 1: mod_base = OTHER; note = bicyclic nucleic acid (BNA)
  modified_base 18: mod_base = OTHER; note = bicyclic nucleic acid (BNA)
  source 1..18: mol_type = other RNA
aacatcaaggaagatggc

SEQ ID NO: 2637 - RNA, 17 nt, synthetic construct
  misc_feature 1..17: note = Description of Artificial Sequence: Synthetic Antisense oligonucleotide
  modified_base 1: mod_base = OTHER; note = bicyclic nucleic acid (BNA)
  modified_base 17: mod_base = OTHER; note = bicyclic nucleic acid (BNA)
  source 1..17: mol_type = other RNA
aacatcaaggaagatgg

SEQ ID NO: 2638 - RNA, 16 nt, synthetic construct
  misc_feature 1..16: note = Description of Artificial Sequence: Synthetic Antisense oligonucleotide
  modified_base 1: mod_base = OTHER; note = bicyclic nucleic acid (BNA)
  modified_base 16: mod_base = OTHER; note = bicyclic nucleic acid (BNA)
  source 1..16: mol_type = other RNA
aacatcaaggaagatg

SEQ ID NO: 2639 - DNA, 15 bp, synthetic construct
  misc_feature 1..15: note = Description of Artificial Sequence: Synthetic Antisense oligonucleotide
  misc_feature 1..15: note = Original Sequence: aacaucaaggaagat
  modified_base 1: mod_base = OTHER; note = bicyclic nucleic acid (BNA)
  modified_base 15: mod_base = OTHER; note = bicyclic nucleic acid (BNA)
  source 1..15: mol_type = other DNA
  modified_base 5: mod_base = OTHER; note = Uracil
aacatcaaggaagat

SEQ ID NO: 2640 - RNA, 14 nt, synthetic construct
  misc_feature 1..14: note = Description of Artificial Sequence: Synthetic Antisense oligonucleotide
  modified_base 1: mod_base = OTHER; note = bicyclic nucleic acid (BNA)
  modified_base 14: mod_base = OTHER; note = bicyclic nucleic acid (BNA)
  source 1..14: mol_type = other RNA
aacatcaaggaaga

SEQ ID NO: 2641 - RNA, 13 nt, synthetic construct
  misc_feature 1..13: note = Description of Artificial Sequence: Synthetic Antisense oligonucleotide
  modified_base 1: mod_base = OTHER; note = bicyclic nucleic acid (BNA)
  modified_base 13: mod_base = OTHER; note = bicyclic nucleic acid (BNA)
  source 1..13: mol_type = other RNA
aacatcaaggaag

SEQ ID NO: 2642 - RNA, 25 nt, synthetic construct
  misc_feature 1..25: note = Description of Artificial Sequence: Synthetic Antisense oligonucleotide
  modified_base 1: mod_base = OTHER; note = bicyclic nucleic acid (BNA)
  modified_base 25: mod_base = OTHER; note = bicyclic nucleic acid (BNA)
  source 1..25: mol_type = other RNA
acatcaaggaagatggcatttctag

SEQ ID NO: 2643 - RNA, 24 nt, synthetic construct
  misc_feature 1..24: note = Description of Artificial Sequence: Synthetic Antisense oligonucleotide
  modified_base 1: mod_base = OTHER; note = bicyclic nucleic acid (BNA)
  modified_base 24: mod_base = OTHER; note = bicyclic nucleic acid (BNA)
  source 1..24: mol_type = other RNA
acatcaaggaagatggcatttcta

SEQ ID NO: 2644 - DNA, 23 bp, synthetic construct
  misc_feature 1..23: note = Description of Artificial Sequence: Synthetic Antisense oligonucleotide
  misc_feature 1..23: note = Original Sequence: acaucaaggaagauggcauuuct
  modified_base 1: mod_base = OTHER; note = bicyclic nucleic acid (BNA)
  modified_base 23: mod_base = OTHER; note = bicyclic nucleic acid (BNA)
  source 1..23: mol_type = other DNA
  modified_base 4: mod_base = OTHER; note = Uracil
  modified_base 14: mod_base = OTHER; note = Uracil
  modified_base 19: mod_base = OTHER; note = Uracil
  modified_base 20: mod_base = OTHER; note = Uracil
  modified_base 21: mod_base = OTHER; note = Uracil
acatcaaggaagatggcatttct

SEQ ID NO: 2645 - RNA, 22 nt, synthetic construct
  misc_feature 1..22: note = Description of Artificial Sequence: Synthetic Antisense oligonucleotide
  modified_base 1: mod_base = OTHER; note = bicyclic nucleic acid (BNA)
  modified_base 22: mod_base = OTHER; note = bicyclic nucleic acid (BNA)
  source 1..22: mol_type = other RNA
acatcaaggaagatggcatttc

SEQ ID NO: 2646 - DNA, 21 bp, synthetic construct
  misc_feature 1..21: note = Description of Artificial Sequence: Synthetic Antisense oligonucleotide
  misc_feature 1..21: note = Original Sequence: acaucaaggaagauggcauut
  modified_base 1: mod_base = OTHER; note = bicyclic nucleic acid (BNA)
  modified_base 21: mod_base = OTHER; note = bicyclic nucleic acid (BNA)
  source 1..21: mol_type = other DNA
  modified_base 4: mod_base = OTHER; note = Uracil
  modified_base 14: mod_base = OTHER; note = Uracil
  modified_base 19: mod_base = OTHER; note = Uracil
  modified_base 20: mod_base = OTHER; note = Uracil
acatcaaggaagatggcattt

SEQ ID NO: 2647 - DNA, 20 bp, synthetic construct
  misc_feature 1..20: note = Description of Artificial Sequence: Synthetic Antisense oligonucleotide
  misc_feature 1..20: note = Original Sequence: acaucaaggaagauggcaut
  modified_base 1: mod_base = OTHER; note = bicyclic nucleic acid (BNA)
  modified_base 20: mod_base = OTHER; note = bicyclic nucleic acid (BNA)
  source 1..20: mol_type = other DNA
  modified_base 4: mod_base = OTHER; note = Uracil
  modified_base 14: mod_base = OTHER; note = Uracil
  modified_base 19: mod_base = OTHER; note = Uracil
acatcaaggaagatggcatt

SEQ ID NO: 2648 - DNA, 19 bp, synthetic construct
  misc_feature 1..19: note = Description of Artificial Sequence: Synthetic Antisense oligonucleotide
  misc_feature 1..19: note = Original Sequence: acaucaaggaagauggcat
  modified_base 1: mod_base = OTHER; note = bicyclic nucleic acid (BNA)
  modified_base 19: mod_base = OTHER; note = bicyclic nucleic acid (BNA)
  source 1..19: mol_type = other DNA
  modified_base 4: mod_base = OTHER; note = Uracil
  modified_base 14: mod_base = OTHER; note = Uracil
acatcaaggaagatggcat

SEQ ID NO: 2649 - RNA, 18 nt, synthetic construct
  misc_feature 1..18: note = Description of Artificial Sequence: Synthetic Antisense oligonucleotide
  modified_base 1: mod_base = OTHER; note = bicyclic nucleic acid (BNA)
  modified_base 18: mod_base = OTHER; note = bicyclic nucleic acid (BNA)
  source 1..18: mol_type = other RNA
acatcaaggaagatggca

SEQ ID NO: 2650 - RNA, 17 nt, synthetic construct
  misc_feature 1..17: note = Description of Artificial Sequence: Synthetic Antisense oligonucleotide
  modified_base 1: mod_base = OTHER; note = bicyclic nucleic acid (BNA)
  modified_base 17: mod_base = OTHER; note = bicyclic nucleic acid (BNA)
  source 1..17: mol_type = other RNA
acatcaaggaagatggc

SEQ ID NO: 2651 - RNA, 16 nt, synthetic construct
  misc_feature 1..16: note = Description of Artificial Sequence: Synthetic Antisense oligonucleotide
  modified_base 1: mod_base = OTHER; note = bicyclic nucleic acid (BNA)
  modified_base 16: mod_base = OTHER; note = bicyclic nucleic acid (BNA)
  source 1..16: mol_type = other RNA
acatcaaggaagatgg

SEQ ID NO: 2652 - RNA, 15 nt, synthetic construct
  misc_feature 1..15: note = Description of Artificial Sequence: Synthetic Antisense oligonucleotide
  modified_base 1: mod_base = OTHER; note = bicyclic nucleic acid (BNA)
  modified_base 15: mod_base = OTHER; note = bicyclic nucleic acid (BNA)
  source 1..15: mol_type = other RNA
acatcaaggaagatg

SEQ ID NO: 2653 - DNA, 14 bp, synthetic construct
  misc_feature 1..14: note = Description of Artificial Sequence: Synthetic Antisense oligonucleotide
  misc_feature 1..14: note = Original Sequence: acaucaaggaagat
  modified_base 1: mod_base = OTHER; note = bicyclic nucleic acid (BNA)
  modified_base 14: mod_base = OTHER; note = bicyclic nucleic acid (BNA)
  source 1..14: mol_type = other DNA
  modified_base 4: mod_base = OTHER; note = Uracil
acatcaaggaagat

SEQ ID NO: 2654 - RNA, 13 nt, synthetic construct
  misc_feature 1..13: note = Description of Artificial Sequence: Synthetic Antisense oligonucleotide
  modified_base 1: mod_base = OTHER; note = bicyclic nucleic acid (BNA)
  modified_base 13: mod_base = OTHER; note = bicyclic nucleic acid (BNA)
  source 1..13: mol_type = other RNA
acatcaaggaaga

SEQ ID NO: 2655 - RNA, 12 nt, synthetic construct
  misc_feature 1..12: note = Description of Artificial Sequence: Synthetic Antisense oligonucleotide
  modified_base 1: mod_base = OTHER; note = bicyclic nucleic acid (BNA)
  modified_base 12: mod_base = OTHER; note = bicyclic nucleic acid (BNA)
  source 1..12: mol_type = other RNA
acatcaaggaag

SEQ ID NO: 2656 - RNA, 24 nt, synthetic construct
  misc_feature 1..24: note = Description of Artificial Sequence: Synthetic Antisense oligonucleotide
  modified_base 1: mod_base = OTHER; note = bicyclic nucleic acid (BNA)
  modified_base 24: mod_base = OTHER; note = bicyclic nucleic acid (BNA)
  source 1..24: mol_type = other RNA
catcaaggaagatggcatttctag

SEQ ID NO: 2657 - RNA, 23 nt, synthetic construct
  misc_feature 1..23: note = Description of Artificial Sequence: Synthetic Antisense oligonucleotide
  modified_base 1: mod_base = OTHER; note = bicyclic nucleic acid (BNA)
  modified_base 23: mod_base = OTHER; note = bicyclic nucleic acid (BNA)
  source 1..23: mol_type = other RNA
catcaaggaagatggcatttcta

SEQ ID NO: 2658 - DNA, 22 bp, synthetic construct
  misc_feature 1..22: note = Description of Artificial Sequence: Synthetic Antisense oligonucleotide
  misc_feature 1..22: note = Original Sequence: caucaaggaagauggcauuuct
  modified_base 1: mod_base = OTHER; note = bicyclic nucleic acid (BNA)
  modified_base 22: mod_base = OTHER; note = bicyclic nucleic acid (BNA)
  source 1..22: mol_type = other DNA
  modified_base 3: mod_base = OTHER; note = Uracil
  modified_base 13: mod_base = OTHER; note = Uracil
  modified_base 18: mod_base = OTHER; note = Uracil
  modified_base 19: mod_base = OTHER; note = Uracil
  modified_base 20: mod_base = OTHER; note = Uracil
catcaaggaagatggcatttct

SEQ ID NO: 2659 - RNA, 21 nt, synthetic construct
  misc_feature 1..21: note = Description of Artificial Sequence: Synthetic Antisense oligonucleotide
  modified_base 1: mod_base = OTHER; note = bicyclic nucleic acid (BNA)
  modified_base 21: mod_base = OTHER; note = bicyclic nucleic acid (BNA)
  source 1..21: mol_type = other RNA
catcaaggaagatggcatttc

SEQ ID NO: 2660 - DNA, 20 bp, synthetic construct
  misc_feature 1..20: note = Description of Artificial Sequence: Synthetic Antisense oligonucleotide
  misc_feature 1..20: note = Original Sequence: caucaaggaagauggcauut
  modified_base 1: mod_base = OTHER; note = bicyclic nucleic acid (BNA)
  modified_base 20: mod_base = OTHER; note = bicyclic nucleic acid (BNA)
  source 1..20: mol_type = other DNA
  modified_base 3: mod_base = OTHER; note = Uracil
  modified_base 13: mod_base = OTHER; note = Uracil
  modified_base 18: mod_base = OTHER; note = Uracil
  modified_base 19: mod_base = OTHER; note = Uracil
catcaaggaagatggcattt

SEQ ID NO: 2661 - DNA, 19 bp, synthetic construct
  misc_feature 1..19: note = Description of Artificial Sequence: Synthetic Antisense oligonucleotide
  misc_feature 1..19: note = Original Sequence: caucaaggaagauggcaut
  modified_base 1: mod_base = OTHER; note = bicyclic nucleic acid (BNA)
  modified_base 19: mod_base = OTHER; note = bicyclic nucleic acid (BNA)
  source 1..19: mol_type = other DNA
  modified_base 3: mod_base = OTHER; note = Uracil
  modified_base 13: mod_base = OTHER; note = Uracil
  modified_base 18: mod_base = OTHER; note = Uracil
catcaaggaagatggcatt

SEQ ID NO: 2662 - DNA, 18 bp, synthetic construct
  misc_feature 1..18: note = Description of Artificial Sequence: Synthetic Antisense oligonucleotide
  misc_feature 1..18: note = Original Sequence: caucaaggaagauggcat
  modified_base 1: mod_base = OTHER; note = bicyclic nucleic acid (BNA)
  modified_base 18: mod_base = OTHER; note = bicyclic nucleic acid (BNA)
  source 1..18: mol_type = other DNA
  modified_base 3: mod_base = OTHER; note = Uracil
  modified_base 13: mod_base = OTHER; note = Uracil
catcaaggaagatggcat

SEQ ID NO: 2663 - RNA, 17 nt, synthetic construct
  misc_feature 1..17: note = Description of Artificial Sequence: Synthetic Antisense oligonucleotide
  modified_base 1: mod_base = OTHER; note = bicyclic nucleic acid (BNA)
  modified_base 17: mod_base = OTHER; note = bicyclic nucleic acid (BNA)
  source 1..17: mol_type = other RNA
catcaaggaagatggca

SEQ ID NO: 2664 - RNA, 16 nt, synthetic construct
  misc_feature 1..16: note = Description of Artificial Sequence: Synthetic Antisense oligonucleotide
  modified_base 1: mod_base = OTHER; note = bicyclic nucleic acid (BNA)
  modified_base 16: mod_base = OTHER; note = bicyclic nucleic acid (BNA)
  source 1..16: mol_type = other RNA
catcaaggaagatggc

SEQ ID NO: 2665 - RNA, 15 nt, synthetic construct
  misc_feature 1..15: note = Description of Artificial Sequence: Synthetic Antisense oligonucleotide
  modified_base 1: mod_base = OTHER; note = bicyclic nucleic acid (BNA)
  modified_base 15: mod_base = OTHER; note = bicyclic nucleic acid (BNA)
  source 1..15: mol_type = other RNA
catcaaggaagatgg

SEQ ID NO: 2666 - RNA, 14 nt, synthetic construct
  misc_feature 1..14: note = Description of Artificial Sequence: Synthetic Antisense oligonucleotide
  modified_base 1: mod_base = OTHER; note = bicyclic nucleic acid (BNA)
  modified_base 14: mod_base = OTHER; note = bicyclic nucleic acid (BNA)
  source 1..14: mol_type = other RNA
catcaaggaagatg

SEQ ID NO: 2667 - DNA, 13 bp, synthetic construct
  misc_feature 1..13: note = Description of Artificial Sequence: Synthetic Antisense oligonucleotide
  misc_feature 1..13: note = Original Sequence: caucaaggaagat
  modified_base 1: mod_base = OTHER; note = bicyclic nucleic acid (BNA)
  modified_base 13: mod_base = OTHER; note = bicyclic nucleic acid (BNA)
  source 1..13: mol_type = other DNA
  modified_base 3: mod_base = OTHER; note = Uracil
catcaaggaagat

SEQ ID NO: 2668 - RNA, 12 nt, synthetic construct
  misc_feature 1..12: note = Description of Artificial Sequence: Synthetic Antisense oligonucleotide
  modified_base 1: mod_base = OTHER; note = bicyclic nucleic acid (BNA)
  modified_base 12: mod_base = OTHER; note = bicyclic nucleic acid (BNA)
  source 1..12: mol_type = other RNA
catcaaggaaga

SEQ ID NO: 2669 - RNA, 11 nt, synthetic construct
  misc_feature 1..11: note = Description of Artificial Sequence: Synthetic Antisense oligonucleotide
  modified_base 1: mod_base = OTHER; note = bicyclic nucleic acid (BNA)
  modified_base 11: mod_base = OTHER; note = bicyclic nucleic acid (BNA)
  source 1..11: mol_type = other RNA
catcaaggaag

SEQ ID NO: 2670 - RNA, 23 nt, synthetic construct
  misc_feature 1..23: note = Description of Artificial Sequence: Synthetic Antisense oligonucleotide
  modified_base 1: mod_base = OTHER; note = bicyclic nucleic acid (BNA)
  modified_base 23: mod_base = OTHER; note = bicyclic nucleic acid (BNA)
  source 1..23: mol_type = other RNA
atcaaggaagatggcatttctag

SEQ ID NO: 2671 - RNA, 22 nt, synthetic construct
  misc_feature 1..22: note = Description of Artificial Sequence: Synthetic Antisense oligonucleotide
  modified_base 1: mod_base = OTHER; note = bicyclic nucleic acid (BNA)
  modified_base 22: mod_base = OTHER; note = bicyclic nucleic acid (BNA)
  source 1..22: mol_type = other RNA
atcaaggaagatggcatttcta

SEQ ID NO: 2672 - DNA, 21 bp, synthetic construct
  misc_feature 1..21: note = Description of Artificial Sequence: Synthetic Antisense oligonucleotide
  misc_feature 1..21: note = Original Sequence: aucaaggaagauggcauuuct
  modified_base 1: mod_base = OTHER; note = bicyclic nucleic acid (BNA)
  modified_base 21: mod_base = OTHER; note = bicyclic nucleic acid (BNA)
  source 1..21: mol_type = other DNA
  modified_base 2: mod_base = OTHER; note = Uracil
  modified_base 12: mod_base = OTHER; note = Uracil
  modified_base 17: mod_base = OTHER; note = Uracil
  modified_base 18: mod_base = OTHER; note = Uracil
  modified_base 19: mod_base = OTHER; note = Uracil
atcaaggaagatggcatttct

SEQ ID NO: 2673 - RNA, 20 nt, synthetic construct
  misc_feature 1..20: note = Description of Artificial Sequence: Synthetic Antisense oligonucleotide
  modified_base 1: mod_base = OTHER; note = bicyclic nucleic acid (BNA)
  modified_base 20: mod_base = OTHER; note = bicyclic nucleic acid (BNA)
  source 1..20: mol_type = other RNA
atcaaggaagatggcatttc

SEQ ID NO: 2674 - DNA, 19 bp, synthetic construct
  misc_feature 1..19: note = Description of Artificial Sequence: Synthetic Antisense oligonucleotide
  misc_feature 1..19: note = Original Sequence: aucaaggaagauggcauut
  modified_base 1: mod_base = OTHER; note = bicyclic nucleic acid (BNA)
  modified_base 19: mod_base = OTHER; note = bicyclic nucleic acid (BNA)
  source 1..19: mol_type = other DNA
  modified_base 2: mod_base = OTHER; note = Uracil
  modified_base 12: mod_base = OTHER; note = Uracil
  modified_base 17: mod_base = OTHER; note = Uracil
  modified_base 18: mod_base = OTHER; note = Uracil
atcaaggaagatggcattt

SEQ ID NO: 2675 - DNA, 18 bp, synthetic construct
  misc_feature 1..18: note = Description of Artificial Sequence: Synthetic Antisense oligonucleotide
  misc_feature 1..18: note = Original Sequence: aucaaggaagauggcaut
  modified_base 1: mod_base = OTHER; note = bicyclic nucleic acid (BNA)
  modified_base 18: mod_base = OTHER; note = bicyclic nucleic acid (BNA)
  source 1..18: mol_type = other DNA
  modified_base 2: mod_base = OTHER; note = Uracil
  modified_base 12: mod_base = OTHER; note = Uracil
  modified_base 17: mod_base = OTHER; note = Uracil
atcaaggaagatggcatt

SEQ ID NO: 2676 - DNA, 17 bp, synthetic construct
  misc_feature 1..17: note = Description of Artificial Sequence: Synthetic Antisense oligonucleotide
  misc_feature 1..17: note = Original Sequence: aucaaggaagauggcat
  modified_base 1: mod_base = OTHER; note = bicyclic nucleic acid (BNA)
  modified_base 17: mod_base = OTHER; note = bicyclic nucleic acid (BNA)
  source 1..17: mol_type = other DNA
  modified_base 2: mod_base = OTHER; note = Uracil
  modified_base 12: mod_base = OTHER; note = Uracil
atcaaggaagatggcat

SEQ ID NO: 2677 - RNA, 16 nt, synthetic construct
  misc_feature 1..16: note = Description of Artificial Sequence: Synthetic Antisense oligonucleotide
  modified_base 1: mod_base = OTHER; note = bicyclic nucleic acid (BNA)
  modified_base 16: mod_base = OTHER; note = bicyclic nucleic acid (BNA)
  source 1..16: mol_type = other RNA
atcaaggaagatggca

SEQ ID NO: 2678 - RNA, 15 nt, synthetic construct
  misc_feature 1..15: note = Description of Artificial Sequence: Synthetic Antisense oligonucleotide
  modified_base 1: mod_base = OTHER; note = bicyclic nucleic acid (BNA)
  modified_base 15: mod_base = OTHER; note = bicyclic nucleic acid (BNA)
  source 1..15: mol_type = other RNA
atcaaggaagatggc

SEQ ID NO: 2679 - RNA, 14 nt, synthetic construct
  misc_feature 1..14: note = Description of Artificial Sequence: Synthetic Antisense oligonucleotide
  modified_base 1: mod_base = OTHER; note = bicyclic nucleic acid (BNA)
  modified_base 14: mod_base = OTHER; note = bicyclic nucleic acid (BNA)
  source 1..14: mol_type = other RNA
atcaaggaagatgg

SEQ ID NO: 2680 - RNA, 13 nt, synthetic construct
  misc_feature 1..13: note = Description of Artificial Sequence: Synthetic Antisense oligonucleotide
  modified_base 1: mod_base = OTHER; note = bicyclic nucleic acid (BNA)
  modified_base 13: mod_base = OTHER; note = bicyclic nucleic acid (BNA)
  source 1..13: mol_type = other RNA
atcaaggaagatg

SEQ ID NO: 2681 - DNA, 12 bp, synthetic construct
  misc_feature 1..12: note = Description of Artificial Sequence: Synthetic Antisense oligonucleotide
  misc_feature 1..12: note = Original Sequence: aucaaggaagat
  modified_base 1: mod_base = OTHER; note = bicyclic nucleic acid (BNA)
  modified_base 12: mod_base = OTHER; note = bicyclic nucleic acid (BNA)
  source 1..12: mol_type = other DNA
  modified_base 2: mod_base = OTHER; note = Uracil
atcaaggaagat

SEQ ID NO: 2682 - RNA, 11 nt, synthetic construct
  misc_feature 1..11: note = Description of Artificial Sequence: Synthetic Antisense oligonucleotide
  modified_base 1: mod_base = OTHER; note = bicyclic nucleic acid (BNA)
  modified_base 11: mod_base = OTHER; note = bicyclic nucleic acid (BNA)
  source 1..11: mol_type = other RNA
atcaaggaaga

SEQ ID NO: 2683 - RNA, 10 nt, synthetic construct
  misc_feature 1..10: note = Description of Artificial Sequence: Synthetic Antisense oligonucleotide
  modified_base 1: mod_base = OTHER; note = bicyclic nucleic acid (BNA)
  modified_base 10: mod_base = OTHER; note = bicyclic nucleic acid (BNA)
  source 1..10: mol_type = other RNA
atcaaggaag

SEQ ID NO: 2684 - RNA, 18 nt, synthetic construct
  misc_feature 1..18: note = Description of Artificial Sequence: Synthetic Antisense oligonucleotide
  modified_base 1..2: mod_base = OTHER; note = bicyclic nucleic acid (BNA)
  source 1..18: mol_type = other RNA
ggtaagttctgtccaagc

SEQ ID NO: 2685 - DNA, 18 bp, synthetic construct
  misc_feature 1..18: note = Description of Artificial Sequence: Synthetic Antisense oligonucleotide
  misc_feature 1..18: note = Original Sequence: gtaaguucuguccaagcc
  modified_base 1..2: mod_base = OTHER; note = bicyclic nucleic acid (BNA)
  source 1..18: mol_type = other DNA
  modified_base 6: mod_base = OTHER; note = Uracil
  modified_base 7: mod_base = OTHER; note = Uracil
  modified_base 9: mod_base = OTHER; note = Uracil
  modified_base 11: mod_base = OTHER; note = Uracil
gtaagttctgtccaagcc

SEQ ID NO: 2686 - RNA, 18 nt, synthetic construct
  misc_feature 1..18: note = Description of Artificial Sequence: Synthetic Antisense oligonucleotide
  modified_base 1..2: mod_base = OTHER; note = bicyclic nucleic acid (BNA)
  source 1..18: mol_type = other RNA
agtcggtaagttctgtcc

SEQ ID NO: 2687 - DNA, 18 bp, synthetic construct
  misc_feature 1..18: note = Description of Artificial Sequence: Synthetic Antisense oligonucleotide
  misc_feature 1..18: note = Original Sequence: ctguccaagcccgguuga
  modified_base 1..2: mod_base = OTHER; note = bicyclic nucleic acid (BNA)
  source 1..18: mol_type = other DNA
  modified_base 4: mod_base = OTHER; note = Uracil
  modified_base 15: mod_base = OTHER; note = Uracil
  modified_base 16: mod_base = OTHER; note = Uracil
ctgtccaagcccggttga

SEQ ID NO: 2688 - DNA, 15 bp, synthetic construct
  misc_feature 1..15: note = Description of Artificial Sequence: Synthetic Antisense oligonucleotide
  misc_feature 1..15: note = Original Sequence: taaguucuguccaag
  modified_base 1..2: mod_base = OTHER; note = bicyclic nucleic acid (BNA)
  source 1..15: mol_type = other DNA
  modified_base 5: mod_base = OTHER; note = Uracil
  modified_base 6: mod_base = OTHER; note = Uracil
  modified_base 8: mod_base = OTHER; note = Uracil
  modified_base 10: mod_base = OTHER; note = Uracil
taagttctgtccaag

SEQ ID NO: 2689 - DNA, 20 bp, synthetic construct
  misc_feature 1..20: note = Description of Artificial Sequence: Synthetic Antisense oligonucleotide
  misc_feature 1..20: note = Original Sequence: ttcuguccaagcccgguuga
  modified_base 1..2: mod_base = OTHER; note = bicyclic nucleic acid (BNA)
  source 1..20: mol_type = other DNA
  modified_base 4: mod_base = OTHER; note = Uracil
  modified_base 6: mod_base = OTHER; note = Uracil
  modified_base 17: mod_base = OTHER; note = Uracil
  modified_base 18: mod_base = OTHER; note = Uracil
ttctgtccaagcccggttga

SEQ ID NO: 2690 - DNA, 19 bp, synthetic construct
  misc_feature 1..19: note = Description of Artificial Sequence: Synthetic Antisense oligonucleotide
  misc_feature 1..19: note = Original Sequence: ttcuguccaagcccgguug
  modified_base 1..2: mod_base = OTHER; note = bicyclic nucleic acid (BNA)
  source 1..19: mol_type = other DNA
  modified_base 4: mod_base = OTHER; note = Uracil
  modified_base 6: mod_base = OTHER; note = Uracil
  modified_base 17: mod_base = OTHER; note = Uracil
  modified_base 18: mod_base = OTHER; note = Uracil
ttctgtccaagcccggttg

SEQ ID NO: 2691 - DNA, 18 bp, synthetic construct
  misc_feature 1..18: note = Description of Artificial Sequence: Synthetic Antisense oligonucleotide
  misc_feature 1..18: note = Original Sequence: ttcuguccaagcccgguu
  modified_base 1..2: mod_base = OTHER; note = bicyclic nucleic acid (BNA)
  source 1..18: mol_type = other DNA
  modified_base 4: mod_base = OTHER; note = Uracil
  modified_base 6: mod_base = OTHER; note = Uracil
  modified_base 17: mod_base = OTHER; note = Uracil
  modified_base 18: mod_base = OTHER; note = Uracil
ttctgtccaagcccggtt

SEQ ID NO: 2692 - DNA, 17 bp, synthetic construct
  misc_feature 1..17: note = Description of Artificial Sequence: Synthetic Antisense oligonucleotide
  misc_feature 1..17: note = Original Sequence: ttcuguccaagcccggu
  modified_base 1..2: mod_base = OTHER; note = bicyclic nucleic acid (BNA)
  source 1..17: mol_type = other DNA
  modified_base 4: mod_base = OTHER; note = Uracil
  modified_base 6: mod_base = OTHER; note = Uracil
  modified_base 17: mod_base = OTHER; note = Uracil
ttctgtccaagcccggt

SEQ ID NO: 2693 - DNA, 16 bp, synthetic construct
  misc_feature 1..16: note = Description of Artificial Sequence: Synthetic Antisense oligonucleotide
  misc_feature 1..16: note = Original Sequence: ttcuguccaagcccgg
  modified_base 1..2: mod_base = OTHER; note = bicyclic nucleic acid (BNA)
  source 1..16: mol_type = other DNA
  modified_base 4: mod_base = OTHER; note = Uracil
  modified_base 6: mod_base = OTHER; note = Uracil
ttctgtccaagcccgg

SEQ ID NO: 2694 - DNA, 15 bp, synthetic construct
  misc_feature 1..15: note = Description of Artificial Sequence: Synthetic Antisense oligonucleotide
  misc_feature 1..15: note = Original Sequence: ttcuguccaagcccg
  modified_base 1..2: mod_base = OTHER; note = bicyclic nucleic acid (BNA)
  source 1..15: mol_type = other DNA
  modified_base 4: mod_base = OTHER; note = Uracil
  modified_base 6: mod_base = OTHER; note = Uracil
ttctgtccaagcccg

SEQ ID NO: 2695 - DNA, 14 bp, synthetic construct
  misc_feature 1..14: note = Description of Artificial Sequence: Synthetic Antisense oligonucleotide
  misc_feature 1..14: note = Original Sequence: ttcuguccaagccc
  modified_base 1..2: mod_base = OTHER; note = bicyclic nucleic acid (BNA)
  source 1..14: mol_type = other DNA
  modified_base 4: mod_base = OTHER; note = Uracil
  modified_base 6: mod_base = OTHER; note = Uracil
ttctgtccaagccc

SEQ ID NO: 2696 - DNA, 13 bp, synthetic construct
  misc_feature 1..13: note = Description of Artificial Sequence: Synthetic Antisense oligonucleotide
  misc_feature 1..13: note = Original Sequence: ttcuguccaagcc
  modified_base 1..2: mod_base = OTHER; note = bicyclic nucleic acid (BNA)
  source 1..13: mol_type = other DNA
  modified_base 4: mod_base = OTHER; note = Uracil
  modified_base 6: mod_base = OTHER; note = Uracil
ttctgtccaagcc

SEQ ID NO: 2697 - DNA, 12 bp, synthetic construct
  misc_feature 1..12: note = Description of Artificial Sequence: Synthetic Antisense oligonucleotide
  misc_feature 1..12: note = Original Sequence: ttcuguccaagc
  modified_base 1..2: mod_base = OTHER; note = bicyclic nucleic acid (BNA)
  source 1..12: mol_type = other DNA
  modified_base 4: mod_base = OTHER; note = Uracil
  modified_base 6: mod_base = OTHER; note = Uracil
ttctgtccaagc

SEQ ID NO: 2698 - DNA, 11 bp, synthetic construct
  misc_feature 1..11: note = Description of Artificial Sequence: Synthetic Antisense oligonucleotide
  misc_feature 1..11: note = Original Sequence: ttcuguccaag
  modified_base 1..2: mod_base = OTHER; note = bicyclic nucleic acid (BNA)
  source 1..11: mol_type = other DNA
  modified_base 4: mod_base = OTHER; note = Uracil
  modified_base 6: mod_base = OTHER; note = Uracil
ttctgtccaag

SEQ ID NO: 2699 - DNA, 10 bp, synthetic construct
  misc_feature 1..10: note = Description of Artificial Sequence: Synthetic Antisense oligonucleotide
  misc_feature 1..10: note = Original Sequence: ttcuguccaa
  modified_base 1..2: mod_base = OTHER; note = bicyclic nucleic acid (BNA)
  source 1..10: mol_type = other DNA
  modified_base 4: mod_base = OTHER; note = Uracil
  modified_base 6: mod_base = OTHER; note = Uracil
ttctgtccaa

SEQ ID NO: 2700-2701 - skipped (2 entries)

SEQ ID NO: 2702 - DNA, 19 bp, synthetic construct
  misc_feature 1..19: note = Description of Artificial Sequence: Synthetic Antisense oligonucleotide
  misc_feature 1..19: note = Original Sequence: tcuguccaagcccgguuga
  modified_base 1..2: mod_base = OTHER; note = bicyclic nucleic acid (BNA)
  source 1..19: mol_type = other DNA
  modified_base 3: mod_base = OTHER; note = Uracil
  modified_base 5: mod_base = OTHER; note = Uracil
  modified_base 16: mod_base = OTHER; note = Uracil
  modified_base 17: mod_base = OTHER; note = Uracil
tctgtccaagcccggttga

SEQ ID NO: 2703 - DNA, 18 bp, synthetic construct
  misc_feature 1..18: note = Description of Artificial Sequence: Synthetic Antisense oligonucleotide
  misc_feature 1..18: note = Original Sequence: tcuguccaagcccgguug
  modified_base 1..2: mod_base = OTHER; note = bicyclic nucleic acid (BNA)
  source 1..18: mol_type = other DNA
  modified_base 3: mod_base = OTHER; note = Uracil
  modified_base 5: mod_base = OTHER; note = Uracil
  modified_base 16: mod_base = OTHER; note = Uracil
  modified_base 17: mod_base = OTHER; note = Uracil
tctgtccaagcccggttg

SEQ ID NO: 2704 - DNA, 17 bp, synthetic construct
  misc_feature 1..17: note = Description of Artificial Sequence: Synthetic Antisense oligonucleotide
  misc_feature 1..17: note = Original Sequence: tcuguccaagcccgguu
  modified_base 1..2: mod_base = OTHER; note = bicyclic nucleic acid (BNA)
  source 1..17: mol_type = other DNA
  modified_base 3: mod_base = OTHER; note = Uracil
  modified_base 5: mod_base = OTHER; note = Uracil
  modified_base 16: mod_base = OTHER; note = Uracil
  modified_base 17: mod_base = OTHER; note = Uracil
tctgtccaagcccggtt

SEQ ID NO: 2705 - DNA, 16 bp, synthetic construct
  misc_feature 1..16: note = Description of Artificial Sequence: Synthetic Antisense oligonucleotide
  misc_feature 1..16: note = Original Sequence: tcuguccaagcccggu
  modified_base 1..2: mod_base = OTHER; note = bicyclic nucleic acid (BNA)
  source 1..16: mol_type = other DNA
  modified_base 3: mod_base = OTHER; note = Uracil
  modified_base 5: mod_base = OTHER; note = Uracil
  modified_base 16: mod_base = OTHER; note = Uracil
tctgtccaagcccggt

SEQ ID NO: 2706 - DNA, 15 bp, synthetic construct
  misc_feature 1..15: note = Description of Artificial Sequence: Synthetic Antisense oligonucleotide
  misc_feature 1..15: note = Original Sequence: tcuguccaagcccgg
  modified_base 1..2: mod_base = OTHER; note = bicyclic nucleic acid (BNA)
  source 1..15: mol_type = other DNA
  modified_base 3: mod_base = OTHER; note = Uracil
  modified_base 5: mod_base = OTHER; note = Uracil
tctgtccaagcccgg

SEQ ID NO: 2707 - DNA, 14 bp, synthetic construct
  misc_feature 1..14: note = Description of Artificial Sequence: Synthetic Antisense oligonucleotide
  misc_feature 1..14: note = Original Sequence: tcuguccaagcccg
  modified_base 1..2: mod_base = OTHER; note = bicyclic nucleic acid (BNA)
  source 1..14: mol_type = other DNA
  modified_base 3: mod_base = OTHER; note = Uracil
  modified_base 5: mod_base = OTHER; note = Uracil
tctgtccaagcccg

SEQ ID NO: 2708 - DNA, 13 bp, synthetic construct
  misc_feature 1..13: note = Description of Artificial Sequence: Synthetic Antisense oligonucleotide
  misc_feature 1..13: note = Original Sequence: tcuguccaagccc
  modified_base 1..2: mod_base = OTHER; note = bicyclic nucleic acid (BNA)
  source 1..13: mol_type = other DNA
  modified_base 3: mod_base = OTHER; note = Uracil
  modified_base 5: mod_base = OTHER; note = Uracil
tctgtccaagccc

SEQ ID NO: 2709 - DNA, 12 bp, synthetic construct
  misc_feature 1..12: note = Description of Artificial Sequence: Synthetic Antisense oligonucleotide
  misc_feature 1..12: note = Original Sequence: tcuguccaagcc
  modified_base 1..2: mod_base = OTHER; note = bicyclic nucleic acid (BNA)
  source 1..12: mol_type = other DNA
  modified_base 3: mod_base = OTHER; note = Uracil
  modified_base 5: mod_base = OTHER; note = Uracil
tctgtccaagcc

SEQ ID NO: 2710 - DNA, 11 bp, synthetic construct
  misc_feature 1..11: note = Description of Artificial Sequence: Synthetic Antisense oligonucleotide
  misc_feature 1..11: note = Original Sequence: tcuguccaagc
  modified_base 1..2: mod_base = OTHER; note = bicyclic nucleic acid (BNA)
  source 1..11: mol_type = other DNA
  modified_base 3: mod_base = OTHER; note = Uracil
  modified_base 5: mod_base = OTHER; note = Uracil
tctgtccaagc

SEQ ID NO: 2711 - DNA, 10 bp, synthetic construct
  misc_feature 1..10: note = Description of Artificial Sequence: Synthetic Antisense oligonucleotide
  misc_feature 1..10: note = Original Sequence: tcuguccaag
  modified_base 1..2: mod_base = OTHER; note = bicyclic nucleic acid (BNA)
  source 1..10: mol_type = other DNA
  modified_base 3: mod_base = OTHER; note = Uracil
  modified_base 5: mod_base = OTHER; note = Uracil
tctgtccaag

SEQ ID NO: 2712-2713 - skipped (2 entries)

SEQ ID NO: 2714 - DNA, 17 bp, synthetic construct
  misc_feature 1..17: note = Description of Artificial Sequence: Synthetic Antisense oligonucleotide
  misc_feature 1..17: note = Original Sequence: ctguccaagcccgguug
  modified_base 1..2: mod_base = OTHER; note = bicyclic nucleic acid (BNA)
  source 1..17: mol_type = other DNA
  modified_base 4: mod_base = OTHER; note = Uracil
  modified_base 15: mod_base = OTHER; note = Uracil
  modified_base 16: mod_base = OTHER; note = Uracil
ctgtccaagcccggttg

SEQ ID NO: 2715 - DNA, 16 bp, synthetic construct
  misc_feature 1..16: note = Description of Artificial Sequence: Synthetic Antisense oligonucleotide
  misc_feature 1..16: note = Original Sequence: ctguccaagcccgguu
  modified_base 1..2: mod_base = OTHER; note = bicyclic nucleic acid (BNA)
  source 1..16: mol_type = other DNA
  modified_base 4: mod_base = OTHER; note = Uracil
  modified_base 15: mod_base = OTHER; note = Uracil
  modified_base 16: mod_base = OTHER; note = Uracil
ctgtccaagcccggtt

SEQ ID NO: 2716 - DNA, 15 bp, synthetic construct
  misc_feature 1..15: note = Description of Artificial Sequence: Synthetic Antisense oligonucleotide
  misc_feature 1..15: note = Original Sequence: ctguccaagcccggu
  modified_base 1..2: mod_base = OTHER; note = bicyclic nucleic acid (BNA)
  source 1..15: mol_type = other DNA
  modified_base 4: mod_base = OTHER; note = Uracil
  modified_base 15: mod_base = OTHER; note = Uracil
ctgtccaagcccggt

SEQ ID NO: 2717 - DNA, 14 bp, synthetic construct
  misc_feature 1..14: note = Description of Artificial Sequence: Synthetic Antisense oligonucleotide
  misc_feature 1..14: note = Original Sequence: ctguccaagcccgg
  modified_base 1..2: mod_base = OTHER; note = bicyclic nucleic acid (BNA)
  source 1..14: mol_type = other DNA
  modified_base 4: mod_base = OTHER; note = Uracil
ctgtccaagcccgg

SEQ ID NO: 2718 - DNA, 13 bp, synthetic construct
  misc_feature 1..13: note = Description of Artificial Sequence: Synthetic Antisense oligonucleotide
  misc_feature 1..13: note = Original Sequence: ctguccaagcccg
  modified_base 1..2: mod_base = OTHER; note = bicyclic nucleic acid (BNA)
  source 1..13: mol_type = other DNA
  modified_base 4: mod_base = OTHER; note = Uracil
ctgtccaagcccg

SEQ ID NO: 2719 - DNA, 12 bp, synthetic construct
  misc_feature 1..12: note = Description of Artificial Sequence: Synthetic Antisense oligonucleotide
  misc_feature 1..12: note = Original Sequence: ctguccaagccc
  modified_base 1..2: mod_base = OTHER; note = bicyclic nucleic acid (BNA)
  source 1..12: mol_type = other DNA
  modified_base 4: mod_base = OTHER; note = Uracil
ctgtccaagccc

SEQ ID NO: 2720 - DNA, 11 bp, synthetic construct
  misc_feature 1..11: note = Description of Artificial Sequence: Synthetic Antisense oligonucleotide
  misc_feature 1..11: note = Original Sequence: ctguccaagcc
  modified_base 1..2: mod_base = OTHER; note = bicyclic nucleic acid (BNA)
  source 1..11: mol_type = other DNA
  modified_base 4: mod_base = OTHER; note = Uracil
ctgtccaagcc

SEQ ID NO: 2721 - DNA, 10 bp, synthetic construct
  misc_feature 1..10: note = Description of Artificial Sequence: Synthetic Antisense oligonucleotide
  misc_feature 1..10: note = Original Sequence: ctguccaagc
  modified_base 1..2: mod_base = OTHER; note = bicyclic nucleic acid (BNA)
  source 1..10: mol_type = other DNA
  modified_base 4: mod_base = OTHER; note = Uracil
ctgtccaagc

SEQ ID NO: 2722-2723 - skipped (2 entries)

SEQ ID NO: 2724 - DNA, 20 bp, synthetic construct
  misc_feature 1..20: note = Description of Artificial Sequence: Synthetic Antisense oligonucleotide
  misc_feature 1..20: note = Original Sequence: gtucuguccaagcccgguug
  modified_base 1..2: mod_base = OTHER; note = bicyclic nucleic acid (BNA)
  source 1..20: mol_type = other DNA
  modified_base 3: mod_base = OTHER; note = Uracil
  modified_base 5: mod_base = OTHER; note = Uracil
  modified_base 7: mod_base = OTHER; note = Uracil
  modified_base 18: mod_base = OTHER; note = Uracil
  modified_base 19: mod_base = OTHER; note = Uracil
gttctgtccaagcccggttg

SEQ ID NO: 2725 - DNA, 19 bp, synthetic construct
  misc_feature 1..19: note = Description of Artificial Sequence: Synthetic Antisense oligonucleotide
  misc_feature 1..19: note = Original Sequence: gtucuguccaagcccgguu
  modified_base 1..2: mod_base = OTHER; note = bicyclic nucleic acid (BNA)
  source 1..19: mol_type = other DNA
  modified_base 3: mod_base = OTHER; note = Uracil
  modified_base 5: mod_base = OTHER; note = Uracil
  modified_base 7: mod_base = OTHER; note = Uracil
  modified_base 18: mod_base = OTHER; note = Uracil
  modified_base 19: mod_base = OTHER; note = Uracil
gttctgtccaagcccggtt

SEQ ID NO: 2726 - DNA, 18 bp, synthetic construct
  misc_feature 1..18: note = Description of Artificial Sequence: Synthetic Antisense oligonucleotide
  misc_feature 1..18: note = Original Sequence: gtucuguccaagcccggu
  modified_base 1..2: mod_base = OTHER; note = bicyclic nucleic acid (BNA)
  source 1..18: mol_type = other DNA
  modified_base 3: mod_base = OTHER; note = Uracil
  modified_base 5: mod_base = OTHER; note = Uracil
  modified_base 7: mod_base = OTHER; note = Uracil
  modified_base 18: mod_base = OTHER; note = Uracil
gttctgtccaagcccggt

SEQ ID NO: 2727 - DNA, 17 bp, synthetic construct
  misc_feature 1..17: note = Description of Artificial Sequence: Synthetic Antisense oligonucleotide
  misc_feature 1..17: note = Original Sequence: gtucuguccaagcccgg
  modified_base 1..2: mod_base = OTHER; note = bicyclic nucleic acid (BNA)
  source 1..17: mol_type = other DNA
  modified_base 3: mod_base = OTHER; note = Uracil
  modified_base 5: mod_base = OTHER; note = Uracil
  modified_base 7: mod_base = OTHER; note = Uracil
gttctgtccaagcccgg

SEQ ID NO: 2728 - DNA, 16 bp, synthetic construct
  misc_feature 1..16: note = Description of Artificial Sequence: Synthetic Antisense oligonucleotide
  misc_feature 1..16: note = Original Sequence: gtucuguccaagcccg
  modified_base 1..2: mod_base = OTHER; note = bicyclic nucleic acid (BNA)
  source 1..16: mol_type = other DNA
  modified_base 3: mod_base = OTHER; note = Uracil
  modified_base 5: mod_base = OTHER; note = Uracil
  modified_base 7: mod_base = OTHER; note = Uracil
gttctgtccaagcccg

SEQ ID NO: 2729 - DNA, 15 bp, synthetic construct
  misc_feature 1..15: note = Description of Artificial Sequence: Synthetic Antisense oligonucleotide
  misc_feature 1..15: note = Original Sequence: gtucuguccaagccc
  modified_base 1..2: mod_base = OTHER; note = bicyclic nucleic acid (BNA)
  source 1..15: mol_type = other DNA
  modified_base 3: mod_base = OTHER; note = Uracil
  modified_base 5: mod_base = OTHER; note = Uracil
  modified_base 7: mod_base = OTHER; note = Uracil
gttctgtccaagccc

SEQ ID NO: 2730 - DNA, 14 bp, synthetic construct
  misc_feature 1..14: note = Description of Artificial Sequence: Synthetic Antisense oligonucleotide
  misc_feature 1..14: note = Original Sequence: gtucuguccaagcc
  modified_base 1..2: mod_base = OTHER; note = bicyclic nucleic acid (BNA)
  source 1..14: mol_type = other DNA
  modified_base 3: mod_base = OTHER; note = Uracil
  modified_base 5: mod_base = OTHER; note = Uracil
  modified_base 7: mod_base = OTHER; note = Uracil
gttctgtccaagcc

SEQ ID NO: 2731 - DNA, 13 bp, synthetic construct
  misc_feature 1..13: note = Description of Artificial Sequence: Synthetic Antisense oligonucleotide
  misc_feature 1..13: note = Original Sequence: gtucuguccaagc
  modified_base 1..2: mod_base = OTHER; note = bicyclic nucleic acid (BNA)
  source 1..13: mol_type = other DNA
  modified_base 3: mod_base = OTHER; note = Uracil
  modified_base 5: mod_base = OTHER; note = Uracil
  modified_base 7: mod_base = OTHER; note = Uracil
gttctgtccaagc

SEQ ID NO: 2732 - DNA, 12 bp, synthetic construct
  misc_feature 1..12: note = Description of Artificial Sequence: Synthetic Antisense oligonucleotide
  misc_feature 1..12: note = Original Sequence: gtucuguccaag
  modified_base 1..2: mod_base = OTHER; note = bicyclic nucleic acid (BNA)
  source 1..12: mol_type = other DNA
  modified_base 3: mod_base = OTHER; note = Uracil
  modified_base 5: mod_base = OTHER; note = Uracil
  modified_base 7: mod_base = OTHER; note = Uracil
gttctgtccaag

SEQ ID NO: 2733 - DNA, 11 bp, synthetic construct
  misc_feature 1..11: note = Description of Artificial Sequence: Synthetic Antisense oligonucleotide
  misc_feature 1..11: note = Original Sequence: gtucuguccaa
  modified_base 1..2: mod_base = OTHER; note = bicyclic nucleic acid (BNA)
  source 1..11: mol_type = other DNA
  modified_base 3: mod_base = OTHER; note = Uracil
  modified_base 5: mod_base = OTHER; note = Uracil
  modified_base 7: mod_base = OTHER; note = Uracil
gttctgtccaa

SEQ ID NO: 2734 - DNA, 10 bp, synthetic construct
  misc_feature 1..10: note = Description of Artificial Sequence: Synthetic Antisense oligonucleotide
  misc_feature 1..10: note = Original Sequence: gtucugucca
  modified_base 1..2: mod_base = OTHER; note = bicyclic nucleic acid (BNA)
  source 1..10: mol_type = other DNA
  modified_base 3: mod_base = OTHER; note = Uracil
  modified_base 5: mod_base = OTHER; note = Uracil
  modified_base 7: mod_base = OTHER; note = Uracil
gttctgtcca

SEQ ID NO: 2735-2736 - skipped (2 entries)

SEQ ID NO: 2737 - RNA, 20 nt, synthetic construct
  misc_feature 1..20: note = Description of Artificial Sequence: Synthetic Antisense oligonucleotide
  modified_base 1..2: mod_base = OTHER; note = bicyclic nucleic acid (BNA)
  source 1..20: mol_type = other RNA
agttctgtccaagcccggtt

SEQ ID NO: 2738 - RNA, 19 nt, synthetic construct
  misc_feature 1..19: note = Description of Artificial Sequence: Synthetic Antisense oligonucleotide
  modified_base 1..2: mod_base = OTHER; note = bicyclic nucleic acid (BNA)
  source 1..19: mol_type = other RNA
agttctgtccaagcccggt

SEQ ID NO: 2739 - RNA, 18 nt, synthetic construct
  misc_feature 1..18: note = Description of Artificial Sequence: Synthetic Antisense oligonucleotide
  modified_base 1..2: mod_base = OTHER; note = bicyclic nucleic acid (BNA)
  source 1..18: mol_type = other RNA
agttctgtccaagcccgg

SEQ ID NO: 2740 - RNA, 17 nt, synthetic construct
  misc_feature 1..17: note = Description of Artificial Sequence: Synthetic Antisense oligonucleotide
  modified_base 1..2: mod_base = OTHER; note = bicyclic nucleic acid (BNA)
  source 1..17: mol_type = other RNA
agttctgtccaagcccg

SEQ ID NO: 2741 - RNA, 16 nt, synthetic construct
  misc_feature 1..16: note = Description of Artificial Sequence: Synthetic Antisense oligonucleotide
  modified_base 1..2: mod_base = OTHER; note = bicyclic nucleic acid (BNA)
  source 1..16: mol_type = other RNA
agttctgtccaagccc

SEQ ID NO: 2742 - RNA, 15 nt, synthetic construct
  misc_feature 1..15: note = Description of Artificial Sequence: Synthetic Antisense oligonucleotide
  modified_base 1..2: mod_base = OTHER; note = bicyclic nucleic acid (BNA)
  source 1..15: mol_type = other RNA
agttctgtccaagcc

SEQ ID NO: 2743 - RNA, 14 nt, synthetic construct
  misc_feature 1..14: note = Description of Artificial Sequence: Synthetic Antisense oligonucleotide
  modified_base 1..2: mod_base = OTHER; note = bicyclic nucleic acid (BNA)
  source 1..14: mol_type = other RNA
agttctgtccaagc

SEQ ID NO: 2744 - RNA, 13 nt, synthetic construct
  misc_feature 1..13: note = Description of Artificial Sequence: Synthetic Antisense oligonucleotide
  modified_base 1..2: mod_base = OTHER; note = bicyclic nucleic acid (BNA)
  source 1..13: mol_type = other RNA
agttctgtccaag

SEQ ID NO: 2745 - RNA, 12 nt, synthetic construct
  misc_feature 1..12: note = Description of Artificial Sequence: Synthetic Antisense oligonucleotide
  modified_base 1..2: mod_base = OTHER; note = bicyclic nucleic acid (BNA)
  source 1..12: mol_type = other RNA
agttctgtccaa

SEQ ID NO: 2746 - RNA, 11 nt, synthetic construct
  misc_feature 1..11: note = Description of Artificial Sequence: Synthetic Antisense oligonucleotide
  modified_base 1..2: mod_base = OTHER; note = bicyclic nucleic acid (BNA)
  source 1..11: mol_type = other RNA
agttctgtcca

SEQ ID NO: 2747 - RNA, 10 nt, synthetic construct
  misc_feature 1..10: note = Description of Artificial Sequence: Synthetic Antisense oligonucleotide
  modified_base 1..2: mod_base = OTHER; note = bicyclic nucleic acid (BNA)
  source 1..10: mol_type = other RNA
agttctgtcc

SEQ ID NO: 2748-2749 - skipped (2 entries)

SEQ ID NO: 2750 - RNA, 20 nt, synthetic construct
  misc_feature 1..20: note = Description of Artificial Sequence: Synthetic Antisense oligonucleotide
  modified_base 1..2: mod_base = OTHER; note = bicyclic nucleic acid (BNA)
  source 1..20: mol_type = other RNA
aagttctgtccaagcccggt

SEQ ID NO: 2751 - RNA, 19 nt, synthetic construct
  misc_feature 1..19: note = Description of Artificial Sequence: Synthetic Antisense oligonucleotide
  modified_base 1..2: mod_base = OTHER; note = bicyclic nucleic acid (BNA)
  source 1..19: mol_type = other RNA
aagttctgtccaagcccgg

SEQ ID NO: 2752 - RNA, 18 nt, synthetic construct
  misc_feature 1..18: note = Description of Artificial Sequence: Synthetic Antisense oligonucleotide
  modified_base 1..2: mod_base = OTHER; note = bicyclic nucleic acid (BNA)
  source 1..18: mol_type = other RNA
aagttctgtccaagcccg

SEQ ID NO: 2753 - RNA, 17 nt, synthetic construct
  misc_feature 1..17: note = Description of Artificial Sequence: Synthetic Antisense oligonucleotide
  modified_base 1..2: mod_base = OTHER; note = bicyclic nucleic acid (BNA)
  source 1..17: mol_type = other RNA
aagttctgtccaagccc

SEQ ID NO: 2754 - RNA, 16 nt, synthetic construct
  misc_feature 1..16: note = Description of Artificial Sequence: Synthetic Antisense oligonucleotide
  modified_base 1..2: mod_base = OTHER; note = bicyclic nucleic acid (BNA)
  source 1..16: mol_type = other RNA
aagttctgtccaagcc

SEQ ID NO: 2755 - RNA, 15 nt, synthetic construct
  misc_feature 1..15: note = Description of Artificial Sequence: Synthetic Antisense oligonucleotide
  modified_base 1..2: mod_base = OTHER; note = bicyclic nucleic acid (BNA)
  source 1..15: mol_type = other RNA
aagttctgtccaagc

SEQ ID NO: 2756 - RNA, 14 nt, synthetic construct
  misc_feature 1..14: note = Description of Artificial Sequence: Synthetic Antisense oligonucleotide
  modified_base 1..2: mod_base = OTHER; note = bicyclic nucleic acid (BNA)
  source 1..14: mol_type = other RNA
aagttctgtccaag

SEQ ID NO: 2757 - RNA, 13 nt, synthetic construct
  misc_feature 1..13: note = Description of Artificial Sequence: Synthetic Antisense oligonucleotide
  modified_base 1..2: mod_base = OTHER; note = bicyclic nucleic acid (BNA)
  source 1..13: mol_type = other RNA
aagttctgtccaa

SEQ ID NO: 2758 - RNA, 12 nt, synthetic construct
  misc_feature 1..12: note = Description of Artificial Sequence: Synthetic Antisense oligonucleotide
  modified_base 1..2: mod_base = OTHER; note = bicyclic nucleic acid (BNA)
  source 1..12: mol_type = other RNA
aagttctgtcca

SEQ ID NO: 2759 - RNA, 11 nt, synthetic construct
  misc_feature 1..11: note = Description of Artificial Sequence: Synthetic Antisense oligonucleotide
  modified_base 1..2: mod_base = OTHER; note = bicyclic nucleic acid (BNA)
  source 1..11: mol_type = other RNA
aagttctgtcc

SEQ ID NO: 2760 - RNA, 10 nt, synthetic construct
  misc_feature 1..10: note = Description of Artificial Sequence: Synthetic Antisense oligonucleotide
  modified_base 1..2: mod_base = OTHER; note = bicyclic nucleic acid (BNA)
  source 1..10: mol_type = other RNA
aagttctgtc

SEQ ID NO: 2761-2762 - skipped (2 entries)

SEQ ID NO: 2763 - DNA, 20 bp, synthetic construct
  misc_feature 1..20: note = Description of Artificial Sequence: Synthetic Antisense oligonucleotide
  misc_feature 1..20: note = Original Sequence: taaguucuguccaagcccgg
  modified_base 1..2: mod_base = OTHER; note = bicyclic nucleic acid (BNA)
  source 1..20: mol_type = other DNA
  modified_base 5: mod_base = OTHER; note = Uracil
  modified_base 6: mod_base = OTHER; note = Uracil
  modified_base 8: mod_base = OTHER; note = Uracil
  modified_base 10: mod_base = OTHER; note = Uracil
taagttctgtccaagcccgg

SEQ ID NO: 2764 - DNA, 19 bp, synthetic construct
  misc_feature 1..19: note = Description of Artificial Sequence: Synthetic Antisense oligonucleotide
  misc_feature 1..19: note = Original Sequence: taaguucuguccaagcccg
  modified_base 1..2: mod_base = OTHER; note = bicyclic nucleic acid (BNA)
  source 1..19: mol_type = other DNA
  modified_base 5: mod_base = OTHER; note = Uracil
  modified_base 6: mod_base = OTHER; note = Uracil
  modified_base 8: mod_base = OTHER; note = Uracil
  modified_base 10: mod_base = OTHER; note = Uracil
taagttctgtccaagcccg

SEQ ID NO: 2765 - DNA, 18 bp, synthetic construct
  misc_feature 1..18: note = Description of Artificial Sequence: Synthetic Antisense oligonucleotide
  misc_feature 1..18: note = Original Sequence: taaguucuguccaagccc
  modified_base 1..2: mod_base = OTHER; note = bicyclic nucleic acid (BNA)
  source 1..18: mol_type = other DNA
  modified_base 5: mod_base = OTHER; note = Uracil
  modified_base 6: mod_base = OTHER; note = Uracil
  modified_base 8: mod_base = OTHER; note = Uracil
  modified_base 10: mod_base = OTHER; note = Uracil
taagttctgtccaagccc

SEQ ID NO: 2766 - DNA, 17 bp, synthetic construct
  misc_feature 1..17: note = Description of Artificial Sequence: Synthetic Antisense oligonucleotide
  misc_feature 1..17: note = Original Sequence: taaguucuguccaagcc
  modified_base 1..2: mod_base = OTHER; note = bicyclic nucleic acid (BNA)
  source 1..17: mol_type = other DNA
  modified_base 5: mod_base = OTHER; note = Uracil
  modified_base 6: mod_base = OTHER; note = Uracil
  modified_base 8: mod_base = OTHER; note = Uracil
  modified_base 10: mod_base = OTHER; note = Uracil
taagttctgtccaagcc

SEQ ID NO: 2767 - DNA, 16 bp, synthetic construct
  misc_feature 1..16: note = Description of Artificial Sequence: Synthetic Antisense oligonucleotide
  misc_feature 1..16: note = Original Sequence: taaguucuguccaagc
  modified_base 1..2: mod_base = OTHER; note = bicyclic nucleic acid (BNA)
  source 1..16: mol_type = other DNA
  modified_base 5: mod_base = OTHER; note = Uracil
  modified_base 6: mod_base = OTHER; note = Uracil
  modified_base 8: mod_base = OTHER; note = Uracil
  modified_base 10: mod_base = OTHER; note = Uracil
taagttctgtccaagc

SEQ ID NO: 2768 - DNA, 14 bp, synthetic construct
  misc_feature 1..14: note = Description of Artificial Sequence: Synthetic Antisense oligonucleotide
  misc_feature 1..14: note = Original Sequence: taaguucuguccaa
  modified_base 1..2: mod_base = OTHER; note = bicyclic nucleic acid (BNA)
  source 1..14: mol_type = other DNA
  modified_base 5: mod_base = OTHER; note = Uracil
  modified_base 6: mod_base = OTHER; note = Uracil
  modified_base 8: mod_base = OTHER; note = Uracil
  modified_base 10: mod_base = OTHER; note = Uracil
taagttctgtccaa

SEQ ID NO: 2769 - DNA, 13 bp, synthetic construct
  misc_feature 1..13: note = Description of Artificial Sequence: Synthetic Antisense oligonucleotide
  misc_feature 1..13: note = Original Sequence: taaguucugucca
  modified_base 1..2: mod_base = OTHER; note = bicyclic nucleic acid (BNA)
  source 1..13: mol_type = other DNA
  modified_base 5: mod_base = OTHER; note = Uracil
  modified_base 6: mod_base = OTHER; note = Uracil
  modified_base 8: mod_base = OTHER; note = Uracil
  modified_base 10: mod_base = OTHER; note = Uracil
taagttctgtcca

SEQ ID NO: 2770 - DNA, 12 bp, synthetic construct
  misc_feature 1..12: note = Description of Artificial Sequence: Synthetic Antisense oligonucleotide
  misc_feature 1..12: note = Original Sequence: taaguucugucc
  modified_base 1..2: mod_base = OTHER; note = bicyclic nucleic acid (BNA)
  source 1..12: mol_type = other DNA
  modified_base 5: mod_base = OTHER; note = Uracil
  modified_base 6: mod_base = OTHER; note = Uracil
  modified_base 8: mod_base = OTHER; note = Uracil
  modified_base 10: mod_base = OTHER; note = Uracil
taagttctgtcc

SEQ ID NO: 2771 - DNA, 11 bp, synthetic construct
  misc_feature 1..11: note = Description of Artificial Sequence: Synthetic Antisense oligonucleotide
  misc_feature 1..11: note = Original Sequence: taaguucuguc
  modified_base 1..2: mod_base = OTHER; note = bicyclic nucleic acid (BNA)
  source 1..11: mol_type = other DNA
  modified_base 5: mod_base = OTHER; note = Uracil
  modified_base 6: mod_base = OTHER; note = Uracil
  modified_base 8: mod_base = OTHER; note = Uracil
  modified_base 10: mod_base = OTHER; note = Uracil
taagttctgtc

SEQ ID NO: 2772 - DNA, 10 bp, synthetic construct
  misc_feature 1..10: note = Description of Artificial Sequence: Synthetic Antisense oligonucleotide
  misc_feature 1..10: note = Original Sequence: taaguucugu
  modified_base 1..2: mod_base = OTHER; note = bicyclic nucleic acid (BNA)
  source 1..10: mol_type = other DNA
  modified_base 5: mod_base = OTHER; note = Uracil
  modified_base 6: mod_base = OTHER; note = Uracil
  modified_base 8: mod_base = OTHER; note = Uracil
  modified_base 10: mod_base = OTHER; note = Uracil
taagttctgt

SEQ ID NO: 2773-2774 - skipped (2 entries)

SEQ ID NO: 2775 - DNA, 20 bp, synthetic construct
  misc_feature 1..20: note = Description of Artificial Sequence: Synthetic Antisense oligonucleotide
  misc_feature 1..20: note = Original Sequence: gtaaguucuguccaagcccg
  modified_base 1..2: mod_base = OTHER; note = bicyclic nucleic acid (BNA)
  source 1..20: mol_type = other DNA
  modified_base 6: mod_base = OTHER; note = Uracil
  modified_base 7: mod_base = OTHER; note = Uracil
  modified_base 9: mod_base = OTHER; note = Uracil
  modified_base 11: mod_base = OTHER; note = Uracil
gtaagttctgtccaagcccg

SEQ ID NO: 2776 - DNA, 19 bp, synthetic construct
  misc_feature 1..19: note = Description of Artificial Sequence: Synthetic Antisense oligonucleotide
  misc_feature 1..19: note = Original Sequence: gtaaguucuguccaagccc
  modified_base 1..2: mod_base = OTHER; note = bicyclic nucleic acid (BNA)
  source 1..19: mol_type = other DNA
  modified_base 6: mod_base = OTHER; note = Uracil
  modified_base 7: mod_base = OTHER; note = Uracil
  modified_base 9: mod_base = OTHER; note = Uracil
  modified_base 11: mod_base = OTHER; note = Uracil
gtaagttctgtccaagccc

SEQ ID NO: 2777 - DNA, 17 bp, synthetic construct
  misc_feature 1..17: note = Description of Artificial Sequence: Synthetic Antisense oligonucleotide
  misc_feature 1..17: note = Original Sequence: gtaaguucuguccaagc
  modified_base 1..2: mod_base = OTHER; note = bicyclic nucleic acid (BNA)
  source 1..17: mol_type = other DNA
  modified_base 6: mod_base = OTHER; note = Uracil
  modified_base 7: mod_base = OTHER; note = Uracil
  modified_base 9: mod_base = OTHER; note = Uracil
  modified_base 11: mod_base = OTHER; note = Uracil
gtaagttctgtccaagc

SEQ ID NO: 2778 - DNA, 16 bp, synthetic construct
  misc_feature 1..16: note = Description of Artificial Sequence: Synthetic Antisense oligonucleotide
  misc_feature 1..16: note = Original Sequence: gtaaguucuguccaag
  modified_base 1..2: mod_base = OTHER; note = bicyclic nucleic acid (BNA)
  source 1..16: mol_type = other DNA
  modified_base 6: mod_base = OTHER; note = Uracil
  modified_base 7: mod_base = OTHER; note = Uracil
  modified_base 9: mod_base = OTHER; note = Uracil
  modified_base 11: mod_base = OTHER; note = Uracil
gtaagttctgtccaag

SEQ ID NO: 2779 - DNA, 15 bp, synthetic construct
  misc_feature 1..15: note = Description of Artificial Sequence: Synthetic Antisense oligonucleotide
  misc_feature 1..15: note = Original Sequence: gtaaguucuguccaa
  modified_base 1..2: mod_base = OTHER; note = bicyclic nucleic acid (BNA)
  source 1..15: mol_type = other DNA
  modified_base 6: mod_base = OTHER; note = Uracil
  modified_base 7: mod_base = OTHER; note = Uracil
  modified_base 9: mod_base = OTHER; note = Uracil
  modified_base 11: mod_base = OTHER; note = Uracil
gtaagttctgtccaa

SEQ ID NO: 2780 - DNA, 14 bp, synthetic construct
  misc_feature 1..14: note = Description of Artificial Sequence: Synthetic Antisense oligonucleotide
  misc_feature 1..14: note = Original Sequence: gtaaguucugucca
  modified_base 1..2: mod_base = OTHER; note = bicyclic nucleic acid (BNA)
  source 1..14: mol_type = other DNA
  modified_base 6: mod_base = OTHER; note = Uracil
  modified_base 7: mod_base = OTHER; note = Uracil
  modified_base 9: mod_base = OTHER; note = Uracil
  modified_base 11: mod_base = OTHER; note = Uracil
gtaagttctgtcca

SEQ ID NO: 2781 - DNA, 13 bp, synthetic construct
  misc_feature 1..13: note = Description of Artificial Sequence: Synthetic Antisense oligonucleotide
  misc_feature 1..13: note = Original Sequence: gtaaguucugucc
  modified_base 1..2: mod_base = OTHER; note = bicyclic nucleic acid (BNA)
  source 1..13: mol_type = other DNA
  modified_base 6: mod_base = OTHER; note = Uracil
  modified_base 7: mod_base = OTHER; note = Uracil
  modified_base 9: mod_base = OTHER; note = Uracil
  modified_base 11: mod_base = OTHER; note = Uracil
gtaagttctgtcc

SEQ ID NO: 2782 - DNA, 12 bp, synthetic construct
  misc_feature 1..12: note = Description of Artificial Sequence: Synthetic Antisense oligonucleotide
  misc_feature 1..12: note = Original Sequence: gtaaguucuguc
  modified_base 1..2: mod_base = OTHER; note = bicyclic nucleic acid (BNA)
  source 1..12: mol_type = other DNA
  modified_base 6: mod_base = OTHER; note = Uracil
  modified_base 7: mod_base = OTHER; note = Uracil
  modified_base 9: mod_base = OTHER; note = Uracil
  modified_base 11: mod_base = OTHER; note = Uracil
gtaagttctgtc

SEQ ID NO: 2783 - DNA, 11 bp, synthetic construct
  misc_feature 1..11: note = Description of Artificial Sequence: Synthetic Antisense oligonucleotide
  misc_feature 1..11: note = Original Sequence: gtaaguucugu
  modified_base 1..2: mod_base = OTHER; note = bicyclic nucleic acid (BNA)
  source 1..11: mol_type = other DNA
  modified_base 6: mod_base = OTHER; note = Uracil
  modified_base 7: mod_base = OTHER; note = Uracil
  modified_base 9: mod_base = OTHER; note = Uracil
  modified_base 11: mod_base = OTHER; note = Uracil
gtaagttctgt

SEQ ID NO: 2784 - DNA, 10 bp, synthetic construct
  misc_feature 1..10: note = Description of Artificial Sequence: Synthetic Antisense oligonucleotide
  misc_feature 1..10: note = Original Sequence: gtaaguucug
  modified_base 1..2: mod_base = OTHER; note = bicyclic nucleic acid (BNA)
  source 1..10: mol_type = other DNA
  modified_base 6: mod_base = OTHER; note = Uracil
  modified_base 7: mod_base = OTHER; note = Uracil
  modified_base 9: mod_base = OTHER; note = Uracil
gtaagttctg

SEQ ID NO: 2785-2786 - skipped (2 entries)

SEQ ID NO: 2787 - RNA, 20 nt, synthetic construct
  misc_feature 1..20: note = Description of Artificial Sequence: Synthetic Antisense oligonucleotide
  modified_base 1..2: mod_base = OTHER; note = bicyclic nucleic acid (BNA)
  source 1..20: mol_type = other RNA
ggtaagttctgtccaagccc

SEQ ID NO: 2788 - RNA, 19 nt, synthetic construct
  misc_feature 1..19: note = Description of Artificial Sequence: Synthetic Antisense oligonucleotide
  modified_base 1..2: mod_base = OTHER; note = bicyclic nucleic acid (BNA)
  source 1..19: mol_type = other RNA
ggtaagttctgtccaagcc

SEQ ID NO: 2789 - RNA, 17 nt, synthetic construct
  misc_feature 1..17: note = Description of Artificial Sequence: Synthetic Antisense oligonucleotide
  modified_base 1..2: mod_base = OTHER; note = bicyclic nucleic acid (BNA)
  source 1..17: mol_type = other RNA
ggtaagttctgtccaag

SEQ ID NO: 2790 - RNA, 16 nt, synthetic construct
  misc_feature 1..16: note = Description of Artificial Sequence: Synthetic Antisense oligonucleotide
  modified_base 1..2: mod_base = OTHER; note = bicyclic nucleic acid (BNA)
  source 1..16: mol_type = other RNA
ggtaagttctgtccaa

SEQ ID NO: 2791 - RNA, 15 nt, synthetic construct
  misc_feature 1..15: note = Description of Artificial Sequence: Synthetic Antisense oligonucleotide
  modified_base 1..2: mod_base = OTHER; note = bicyclic nucleic acid (BNA)
  source 1..15: mol_type = other RNA
ggtaagttctgtcca

SEQ ID NO: 2792 - RNA, 14 nt, synthetic construct
  misc_feature 1..14: note = Description of Artificial Sequence: Synthetic Antisense oligonucleotide
  modified_base 1..2: mod_base = OTHER; note = bicyclic nucleic acid (BNA)
  source 1..14: mol_type = other RNA
ggtaagttctgtcc

SEQ ID NO: 2793 - RNA, 13 nt, synthetic construct
  misc_feature 1..13: note = Description of Artificial Sequence: Synthetic Antisense oligonucleotide
  modified_base 1..2: mod_base = OTHER; note = bicyclic nucleic acid (BNA)
  source 1..13: mol_type = other RNA
ggtaagttctgtc

SEQ ID NO: 2794 - RNA, 12 nt, synthetic construct
  misc_feature 1..12: note = Description of Artificial Sequence: Synthetic Antisense oligonucleotide
  modified_base 1..2: mod_base = OTHER; note = bicyclic nucleic acid (BNA)
  source 1..12: mol_type = other RNA
ggtaagttctgt

SEQ ID NO: 2795 - RNA, 11 nt, synthetic construct
  misc_feature 1..11: note = Description of Artificial Sequence: Synthetic Antisense oligonucleotide
  modified_base 1..2: mod_base = OTHER; note = bicyclic nucleic acid (BNA)
  source 1..11: mol_type = other RNA
ggtaagttctg

SEQ ID NO: 2796 - RNA, 10 nt, synthetic construct
  misc_feature 1..10: note = Description of Artificial Sequence: Synthetic Antisense oligonucleotide
  modified_base 1..2: mod_base = OTHER; note = bicyclic nucleic acid (BNA)
  source 1..10: mol_type = other RNA
ggtaagttct

SEQ ID NO: 2797-2798 - skipped (2 entries)

SEQ ID NO: 2799 - RNA, 20 nt, synthetic construct
  misc_feature 1..20: note = Description of Artificial Sequence: Synthetic Antisense oligonucleotide
  modified_base 1..2: mod_base = OTHER; note = bicyclic nucleic acid (BNA)
  source 1..20: mol_type = other RNA
cggtaagttctgtccaagcc

SEQ ID NO: 2800 - RNA, 19 nt, synthetic construct
  misc_feature 1..19: note = Description of Artificial Sequence: Synthetic Antisense oligonucleotide
  modified_base 1..2: mod_base = OTHER; note = bicyclic nucleic acid (BNA)
  source 1..19: mol_type = other RNA
cggtaagttctgtccaagc

SEQ ID NO: 2801 - RNA, 18 nt, synthetic construct
  misc_feature 1..18: note = Description of Artificial Sequence: Synthetic Antisense oligonucleotide
  modified_base 1..2: mod_base = OTHER; note = bicyclic nucleic acid (BNA)
  source 1..18: mol_type = other RNA
cggtaagttctgtccaag

SEQ ID NO: 2802 - RNA, 17 nt, synthetic construct
  misc_feature 1..17: note = Description of Artificial Sequence: Synthetic Antisense oligonucleotide
  modified_base 1..2: mod_base = OTHER; note = bicyclic nucleic acid (BNA)
  source 1..17: mol_type = other RNA
cggtaagttctgtccaa

SEQ ID NO: 2803 - RNA, 16 nt, synthetic construct
  misc_feature 1..16: note = Description of Artificial Sequence: Synthetic Antisense oligonucleotide
  modified_base 1..2: mod_base = OTHER; note = bicyclic nucleic acid (BNA)
  source 1..16: mol_type = other RNA
cggtaagttctgtcca

SEQ ID NO: 2804 - RNA, 15 nt, synthetic construct
  misc_feature 1..15: note = Description of Artificial Sequence: Synthetic Antisense oligonucleotide
  modified_base 1..2: mod_base = OTHER; note = bicyclic nucleic acid (BNA)
  source 1..15: mol_type = other RNA
cggtaagttctgtcc

SEQ ID NO: 2805 - RNA, 14 nt, synthetic construct
  misc_feature 1..14: note = Description of Artificial Sequence: Synthetic Antisense oligonucleotide
  modified_base 1..2: mod_base = OTHER; note = bicyclic nucleic acid (BNA)
  source 1..14: mol_type = other RNA
cggtaagttctgtc

SEQ ID NO: 2806 - RNA, 13 nt, synthetic construct
  misc_feature 1..13: note = Description of Artificial Sequence: Synthetic Antisense oligonucleotide
  modified_base 1..2: mod_base = OTHER; note = bicyclic nucleic acid (BNA)
  source 1..13: mol_type = other RNA
cggtaagttctgt

SEQ ID NO: 2807 - RNA, 12 nt, synthetic construct
  misc_feature 1..12: note = Description of Artificial Sequence: Synthetic Antisense oligonucleotide
  modified_base 1..2: mod_base = OTHER; note = bicyclic nucleic acid (BNA)
  source 1..12: mol_type = other RNA
cggtaagttctg

SEQ ID NO: 2808 - RNA, 11 nt, synthetic construct
  misc_feature 1..11: note = Description of Artificial Sequence: Synthetic Antisense oligonucleotide
  modified_base 1..2: mod_base = OTHER; note = bicyclic nucleic acid (BNA)
  source 1..11: mol_type = other RNA
cggtaagttct

SEQ ID NO: 2809 - RNA, 10 nt, synthetic construct
  misc_feature 1..10: note = Description of Artificial Sequence: Synthetic Antisense oligonucleotide
  modified_base 1..2: mod_base = OTHER; note = bicyclic nucleic acid (BNA)
  source 1..10: mol_type = other RNA
cggtaagttc

SEQ ID NO: 2810-2811 - skipped (2 entries)

SEQ ID NO: 2812 - DNA, 20 bp, synthetic construct
  misc_feature 1..20: note = Description of Artificial Sequence: Synthetic Antisense oligonucleotide
  misc_feature 1..20: note = Original Sequence: tcgguaaguucuguccaagc
  modified_base 1..2: mod_base = OTHER; note = bicyclic nucleic acid (BNA)
  source 1..20: mol_type = other DNA
  modified_base 5: mod_base = OTHER; note = Uracil
  modified_base 9: mod_base = OTHER; note = Uracil
  modified_base 10: mod_base = OTHER; note = Uracil
  modified_base 12: mod_base = OTHER; note = Uracil
  modified_base 14: mod_base = OTHER; note = Uracil
tcggtaagttctgtccaagc

SEQ ID NO: 2813 - DNA, 19 bp, synthetic construct
  misc_feature 1..19: note = Description of Artificial Sequence: Synthetic Antisense oligonucleotide
  misc_feature 1..19: note = Original Sequence: tcgguaaguucuguccaag
  modified_base 1..2: mod_base = OTHER; note = bicyclic nucleic acid (BNA)
  source 1..19: mol_type = other DNA
  modified_base 5: mod_base = OTHER; note = Uracil
  modified_base 9: mod_base = OTHER; note = Uracil
  modified_base 10: mod_base = OTHER; note = Uracil
  modified_base 12: mod_base = OTHER; note = Uracil
  modified_base 14: mod_base = OTHER; note = Uracil
tcggtaagttctgtccaag

SEQ ID NO: 2814 - DNA, 18 bp, synthetic construct
  misc_feature 1..18: note = Description of Artificial Sequence: Synthetic Antisense oligonucleotide
  misc_feature 1..18: note = Original Sequence: tcgguaaguucuguccaa
  modified_base 1..2: mod_base = OTHER; note = bicyclic nucleic acid (BNA)
  source 1..18: mol_type = other DNA
  modified_base 5: mod_base = OTHER; note = Uracil
  modified_base 9: mod_base = OTHER; note = Uracil
  modified_base 10: mod_base = OTHER; note = Uracil
  modified_base 12: mod_base = OTHER; note = Uracil
  modified_base 14: mod_base = OTHER; note = Uracil
tcggtaagttctgtccaa

SEQ ID NO: 2815 - DNA, 17 bp, synthetic construct
  misc_feature 1..17: note = Description of Artificial Sequence: Synthetic Antisense oligonucleotide
  misc_feature 1..17: note = Original Sequence: tcgguaaguucugucca
  modified_base 1..2: mod_base = OTHER; note = bicyclic nucleic acid (BNA)
  source 1..17: mol_type = other DNA
  modified_base 5: mod_base = OTHER; note = Uracil
  modified_base 9: mod_base = OTHER; note = Uracil
  modified_base 10: mod_base = OTHER; note = Uracil
  modified_base 12: mod_base = OTHER; note = Uracil
  modified_base 14: mod_base = OTHER; note = Uracil
tcggtaagttctgtcca

SEQ ID NO: 2816 - DNA, 16 bp, synthetic construct
  misc_feature 1..16: note = Description of Artificial Sequence: Synthetic Antisense oligonucleotide
  misc_feature 1..16: note = Original Sequence: tcgguaaguucugucc
  modified_base 1..2: mod_base = OTHER; note = bicyclic nucleic acid (BNA)
  source 1..16: mol_type = other DNA
  modified_base 5: mod_base = OTHER; note = Uracil
  modified_base 9: mod_base = OTHER; note = Uracil
  modified_base 10: mod_base = OTHER; note = Uracil
  modified_base 12: mod_base = OTHER; note = Uracil
  modified_base 14: mod_base = OTHER; note = Uracil
tcggtaagttctgtcc

SEQ ID NO: 2817 - DNA, 15 bp, synthetic construct
  misc_feature 1..15: note = Description of Artificial Sequence: Synthetic Antisense oligonucleotide
  misc_feature 1..15: note = Original Sequence: tcgguaaguucuguc
  modified_base 1..2: mod_base = OTHER; note = bicyclic nucleic acid (BNA)
  source 1..15: mol_type = other DNA
  modified_base 5: mod_base = OTHER; note = Uracil
  modified_base 9: mod_base = OTHER; note = Uracil
  modified_base 10: mod_base = OTHER; note = Uracil
  modified_base 12: mod_base = OTHER; note = Uracil
  modified_base 14: mod_base = OTHER; note = Uracil
tcggtaagttctgtc

SEQ ID NO: 2818 - DNA, 14 bp, synthetic construct
  misc_feature 1..14: note = Description of Artificial Sequence: Synthetic Antisense oligonucleotide
  misc_feature 1..14: note = Original Sequence: tcgguaaguucugu
  modified_base 1..2: mod_base = OTHER; note = bicyclic nucleic acid (BNA)
  source 1..14: mol_type = other DNA
  modified_base 5: mod_base = OTHER; note = Uracil
  modified_base 9: mod_base = OTHER; note = Uracil
  modified_base 10: mod_base = OTHER; note = Uracil
  modified_base 12: mod_base = OTHER; note = Uracil
  modified_base 14: mod_base = OTHER; note = Uracil
tcggtaagttctgt

SEQ ID NO: 2819 - DNA, 13 bp, synthetic construct
  misc_feature 1..13: note = Description of Artificial Sequence: Synthetic Antisense oligonucleotide
  misc_feature 1..13: note = Original Sequence: tcgguaaguucug
  modified_base 1..2: mod_base = OTHER; note = bicyclic nucleic acid (BNA)
  source 1..13: mol_type = other DNA
  modified_base 5: mod_base = OTHER; note = Uracil
  modified_base 9: mod_base = OTHER; note = Uracil
  modified_base 10: mod_base = OTHER; note = Uracil
  modified_base 12: mod_base = OTHER; note = Uracil
tcggtaagttctg

SEQ ID NO: 2820 - DNA, 12 bp, synthetic construct
  misc_feature 1..12: note = Description of Artificial Sequence: Synthetic Antisense oligonucleotide
  misc_feature 1..12: note = Original Sequence: tcgguaaguucu
  modified_base 1..2: mod_base = OTHER; note = bicyclic nucleic acid (BNA)
  source 1..12: mol_type = other DNA
  modified_base 5: mod_base = OTHER; note = Uracil
  modified_base 9: mod_base = OTHER; note = Uracil
  modified_base 10: mod_base = OTHER; note = Uracil
  modified_base 12: mod_base = OTHER; note = Uracil
tcggtaagttct

SEQ ID NO: 2821 - DNA, 11 bp, synthetic construct
  misc_feature 1..11: note = Description of Artificial Sequence: Synthetic Antisense oligonucleotide
  misc_feature 1..11: note = Original Sequence: tcgguaaguuc
  modified_base 1..2: mod_base = OTHER; note = bicyclic nucleic acid (BNA)
  source 1..11: mol_type = other DNA
  modified_base 5: mod_base = OTHER; note = Uracil
  modified_base 9: mod_base = OTHER; note = Uracil
  modified_base 10: mod_base = OTHER; note = Uracil
tcggtaagttc

SEQ ID NO: 2822 - DNA, 10 bp, synthetic construct
  misc_feature 1..10: note = Description of Artificial Sequence: Synthetic Antisense oligonucleotide
  misc_feature 1..10: note = Original Sequence: tcgguaaguu
  modified_base 1..2: mod_base = OTHER; note = bicyclic nucleic acid (BNA)
  source 1..10: mol_type = other DNA
  modified_base 5: mod_base = OTHER; note = Uracil
  modified_base 9: mod_base = OTHER; note = Uracil
  modified_base 10: mod_base = OTHER; note = Uracil
tcggtaagtt

SEQ ID NO: 2823 - skipped

SEQ ID NO: 2824 - DNA, 20 bp, synthetic construct
  misc_feature 1..20: note = Description of Artificial Sequence: Synthetic Antisense oligonucleotide
  misc_feature 1..20: note = Original Sequence: gtcgguaaguucuguccaag
  modified_base 1..2: mod_base = OTHER; note = bicyclic nucleic acid (BNA)
  source 1..20: mol_type = other DNA
  modified_base 6: mod_base = OTHER; note = Uracil
  modified_base 10: mod_base = OTHER; note = Uracil
  modified_base 11: mod_base = OTHER; note = Uracil
  modified_base 13: mod_base = OTHER; note = Uracil
  modified_base 15: mod_base = OTHER; note = Uracil
gtcggtaagttctgtccaag

SEQ ID NO: 2825 - DNA, 19 bp, synthetic construct
  misc_feature 1..19: note = Description of Artificial Sequence: Synthetic Antisense oligonucleotide
  misc_feature 1..19: note = Original Sequence: gtcgguaaguucuguccaa
  modified_base 1..2: mod_base = OTHER; note = bicyclic nucleic acid (BNA)
  source 1..19: mol_type = other DNA
  modified_base 6: mod_base = OTHER; note = Uracil
  modified_base 10: mod_base = OTHER; note = Uracil
  modified_base 11: mod_base = OTHER; note = Uracil
  modified_base 13: mod_base = OTHER; note = Uracil
  modified_base 15: mod_base = OTHER; note = Uracil
gtcggtaagttctgtccaa

SEQ ID NO: 2826 - DNA, 18 bp, synthetic construct
  misc_feature 1..18: note = Description of Artificial Sequence: Synthetic Antisense oligonucleotide
  misc_feature 1..18: note = Original Sequence: gtcgguaaguucugucca
  modified_base 1..2: mod_base = OTHER; note = bicyclic nucleic acid (BNA)
  source 1..18: mol_type = other DNA
  modified_base 6: mod_base = OTHER; note = Uracil
  modified_base 10: mod_base = OTHER; note = Uracil
  modified_base 11: mod_base = OTHER; note = Uracil
  modified_base 13: mod_base = OTHER; note = Uracil
  modified_base 15: mod_base = OTHER; note = Uracil
gtcggtaagttctgtcca

SEQ ID NO: 2827 - DNA, 17 bp, synthetic construct
  misc_feature 1..17: note = Description of Artificial Sequence: Synthetic Antisense oligonucleotide
  misc_feature 1..17: note = Original Sequence: gtcgguaaguucugucc
  modified_base 1..2: mod_base = OTHER; note = bicyclic nucleic acid (BNA)
  source 1..17: mol_type = other DNA
  modified_base 6: mod_base = OTHER; note = Uracil
  modified_base 10: mod_base = OTHER; note = Uracil
  modified_base 11: mod_base = OTHER; note = Uracil
  modified_base 13: mod_base = OTHER; note = Uracil
  modified_base 15: mod_base = OTHER; note = Uracil
gtcggtaagttctgtcc

SEQ ID NO: 2828 - DNA, 16 bp, synthetic construct
  misc_feature 1..16: note = Description of Artificial Sequence: Synthetic Antisense oligonucleotide
  misc_feature 1..16: note = Original Sequence: gtcgguaaguucuguc
  modified_base 1..2: mod_base = OTHER; note = bicyclic nucleic acid (BNA)
  source 1..16: mol_type = other DNA
  modified_base 6: mod_base = OTHER; note = Uracil
  modified_base 10: mod_base = OTHER; note = Uracil
  modified_base 11: mod_base = OTHER; note = Uracil
  modified_base 13: mod_base = OTHER; note = Uracil
  modified_base 15: mod_base = OTHER; note = Uracil
gtcggtaagttctgtc

SEQ ID NO: 2829 - DNA, 15 bp, synthetic construct
  misc_feature 1..15: note = Description of Artificial Sequence: Synthetic Antisense oligonucleotide
  misc_feature 1..15: note = Original Sequence: gtcgguaaguucugu
  modified_base 1..2: mod_base = OTHER; note = bicyclic nucleic acid (BNA)
  source 1..15: mol_type = other DNA
  modified_base 6: mod_base = OTHER; note = Uracil
  modified_base 10: mod_base = OTHER; note = Uracil
  modified_base 11: mod_base = OTHER; note = Uracil
  modified_base 13: mod_base = OTHER; note = Uracil
  modified_base 15: mod_base = OTHER; note = Uracil
gtcggtaagttctgt

SEQ ID NO: 2830 - DNA, 14 bp, synthetic construct
  misc_feature 1..14: note = Description of Artificial Sequence: Synthetic Antisense oligonucleotide
  misc_feature 1..14: note = Original Sequence: gtcgguaaguucug
  modified_base 1..2: mod_base = OTHER; note = bicyclic nucleic acid (BNA)
  source 1..14: mol_type = other DNA
  modified_base 6: mod_base = OTHER; note = Uracil
  modified_base 10: mod_base = OTHER; note = Uracil
  modified_base 11: mod_base = OTHER; note = Uracil
  modified_base 13: mod_base = OTHER; note = Uracil
gtcggtaagttctg

SEQ ID NO: 2831 - DNA, 13 bp, synthetic construct
  misc_feature 1..13: note = Description of Artificial Sequence: Synthetic Antisense oligonucleotide
  misc_feature 1..13: note = Original Sequence: gtcgguaaguucu
  modified_base 1..2: mod_base = OTHER; note = bicyclic nucleic acid (BNA)
  source 1..13: mol_type = other DNA
  modified_base 6: mod_base = OTHER; note = Uracil
  modified_base 10: mod_base = OTHER; note = Uracil
  modified_base 11: mod_base = OTHER; note = Uracil
  modified_base 13: mod_base = OTHER; note = Uracil
gtcggtaagttct

SEQ ID NO: 2832 - DNA, 12 bp, synthetic construct
  misc_feature 1..12: note = Description of Artificial Sequence: Synthetic Antisense oligonucleotide
  misc_feature 1..12: note = Original Sequence: gtcgguaaguuc
  modified_base 1..2: mod_base = OTHER; note = bicyclic nucleic acid (BNA)
  source 1..12: mol_type = other DNA
  modified_base 6: mod_base = OTHER; note = Uracil
  modified_base 10: mod_base = OTHER; note = Uracil
  modified_base 11: mod_base = OTHER; note = Uracil
gtcggtaagttc

SEQ ID NO: 2833 - DNA, 11 bp, synthetic construct
  misc_feature 1..11: note = Description of Artificial Sequence: Synthetic Antisense oligonucleotide
  misc_feature 1..11: note = Original Sequence: gtcgguaaguu
  modified_base 1..2: mod_base = OTHER; note = bicyclic nucleic acid (BNA)
  source 1..11: mol_type = other DNA
  modified_base 6: mod_base = OTHER; note = Uracil
  modified_base 10: mod_base = OTHER; note = Uracil
  modified_base 11: mod_base = OTHER; note = Uracil
gtcggtaagtt

SEQ ID NO: 2834 - DNA, 10 bp, synthetic construct
  misc_feature 1..10: note = Description of Artificial Sequence: Synthetic Antisense oligonucleotide
  misc_feature 1..10: note = Original Sequence: gtcgguaagu
  modified_base 1..2: mod_base = OTHER; note = bicyclic nucleic acid (BNA)
  source 1..10: mol_type = other DNA
  modified_base 6: mod_base = OTHER; note = Uracil
  modified_base 10: mod_base = OTHER; note = Uracil
gtcggtaagt

SEQ ID NO: 2835 - RNA, 20 nt, synthetic construct
  misc_feature 1..20: note = Description of Artificial Sequence: Synthetic Antisense oligonucleotide
  modified_base 1..2: mod_base = OTHER; note = bicyclic nucleic acid (BNA)
  source 1..20: mol_type = other RNA
agtcggtaagttctgtccaa

SEQ ID NO: 2836 - RNA, 19 nt, synthetic construct
  misc_feature 1..19: note = Description of Artificial Sequence: Synthetic Antisense oligonucleotide
  modified_base 1..2: mod_base = OTHER; note = bicyclic nucleic acid (BNA)
  source 1..19: mol_type = other RNA
agtcggtaagttctgtcca

SEQ ID NO: 2837 - RNA, 17 nt, synthetic construct
  misc_feature 1..17: note = Description of Artificial Sequence: Synthetic Antisense oligonucleotide
  modified_base 1..2: mod_base = OTHER; note = bicyclic nucleic acid (BNA)
  source 1..17: mol_type = other RNA
agtcggtaagttctgtc

SEQ ID NO: 2838 - RNA, 16 nt, synthetic construct
  misc_feature 1..16: note = Description of Artificial Sequence: Synthetic Antisense oligonucleotide
  modified_base 1..2: mod_base = OTHER; note = bicyclic nucleic acid (BNA)
  source 1..16: mol_type = other RNA
agtcggtaagttctgt

SEQ ID NO: 2839 - RNA, 15 nt, synthetic construct
  misc_feature 1..15: note = Description of Artificial Sequence: Synthetic Antisense oligonucleotide
  modified_base 1..2: mod_base = OTHER; note = bicyclic nucleic acid (BNA)
  source 1..15: mol_type = other RNA
agtcggtaagttctg

SEQ ID NO: 2840 - RNA, 14 nt, synthetic construct
  misc_feature 1..14: note = Description of Artificial Sequence: Synthetic Antisense oligonucleotide
  modified_base 1..2: mod_base = OTHER; note = bicyclic nucleic acid (BNA)
  source 1..14: mol_type = other RNA
agtcggtaagttct

SEQ ID NO: 2841 - RNA, 13 nt, synthetic construct
  misc_feature 1..13: note = Description of Artificial Sequence: Synthetic Antisense oligonucleotide
  modified_base 1..2: mod_base = OTHER; note = bicyclic nucleic acid (BNA)
  source 1..13: mol_type = other RNA
agtcggtaagttc

SEQ ID NO: 2842 - RNA, 12 nt, synthetic construct
  misc_feature 1..12: note = Description of Artificial Sequence: Synthetic Antisense oligonucleotide
  modified_base 1..2: mod_base = OTHER; note = bicyclic nucleic acid (BNA)
  source 1..12: mol_type = other RNA
agtcggtaagtt

SEQ ID NO: 2843 - RNA, 11 nt, synthetic construct
  misc_feature 1..11: note = Description of Artificial Sequence: Synthetic Antisense oligonucleotide
  modified_base 1..2: mod_base = OTHER; note = bicyclic nucleic acid (BNA)
  source 1..11: mol_type = other RNA
agtcggtaagt

SEQ ID NO: 2844 - RNA, 20 nt, synthetic construct
  misc_feature 1..20: note = Description of Artificial Sequence: Synthetic Antisense oligonucleotide
  modified_base 1..2: mod_base = OTHER; note = bicyclic nucleic acid (BNA)
  source 1..20: mol_type = other RNA
cagtcggtaagttctgtcca

SEQ ID NO: 2845 - RNA, 19 nt, synthetic construct
  misc_feature 1..19: note = Description of Artificial Sequence: Synthetic Antisense oligonucleotide
  modified_base 1..2: mod_base = OTHER; note = bicyclic nucleic acid (BNA)
  source 1..19: mol_type = other RNA
cagtcggtaagttctgtcc

SEQ ID NO: 2846 - RNA, 18 nt, synthetic construct
  misc_feature 1..18: note = Description of Artificial Sequence: Synthetic Antisense oligonucleotide
  modified_base 1..2: mod_base = OTHER; note = bicyclic nucleic acid (BNA)
  source 1..18: mol_type = other RNA
cagtcggtaagttctgtc

SEQ ID NO: 2847 - RNA, 17 nt, synthetic construct
  misc_feature 1..17: note = Description of Artificial Sequence: Synthetic Antisense oligonucleotide
  modified_base 1..2: mod_base = OTHER; note = bicyclic nucleic acid (BNA)
  source 1..17: mol_type = other RNA
cagtcggtaagttctgt

SEQ ID NO: 2848 - RNA, 16 nt, synthetic construct
  misc_feature 1..16: note = Description of Artificial Sequence: Synthetic Antisense oligonucleotide
  modified_base 1..2: mod_base = OTHER; note = bicyclic nucleic acid (BNA)
  source 1..16: mol_type = other RNA
cagtcggtaagttctg

SEQ ID NO: 2849 - RNA, 15 nt, synthetic construct
  misc_feature 1..15: note = Description of Artificial Sequence: Synthetic Antisense oligonucleotide
  modified_base 1..2: mod_base = OTHER; note = bicyclic nucleic acid (BNA)
  source 1..15: mol_type = other RNA
cagtcggtaagttct

SEQ ID NO: 2850 - RNA, 14 nt, synthetic construct
  misc_feature 1..14: note = Description of Artificial Sequence: Synthetic Antisense oligonucleotide
  modified_base 1..2: mod_base = OTHER; note = bicyclic nucleic acid (BNA)
  source 1..14: mol_type = other RNA
cagtcggtaagttc

SEQ ID NO: 2851 - RNA, 13 nt, synthetic construct
  misc_feature 1..13: note = Description of Artificial Sequence: Synthetic Antisense oligonucleotide
  modified_base 1..2: mod_base = OTHER; note = bicyclic nucleic acid (BNA)
  source 1..13: mol_type = other RNA
cagtcggtaagtt

SEQ ID NO: 2852 - RNA, 12 nt, synthetic construct
  misc_feature 1..12: note = Description of Artificial Sequence: Synthetic Antisense oligonucleotide
  modified_base 1..2: mod_base = OTHER; note = bicyclic nucleic acid (BNA)
  source 1..12: mol_type = other RNA
cagtcggtaagt

SEQ ID NO: 2853 - RNA, 20 nt, synthetic construct
  misc_feature 1..20: note = Description of Artificial Sequence: Synthetic Antisense oligonucleotide
  modified_base 1..2: mod_base = OTHER; note = bicyclic nucleic acid (BNA)
  source 1..20: mol_type = other RNA
ccagtcggtaagttctgtcc

SEQ ID NO: 2854 - RNA, 19 nt, synthetic construct
  misc_feature 1..19: note = Description of Artificial Sequence: Synthetic Antisense oligonucleotide
  modified_base 1..2: mod_base = OTHER; note = bicyclic nucleic acid (BNA)
  source 1..19: mol_type = other RNA
ccagtcggtaagttctgtc

SEQ ID NO: 2855 - RNA, 18 nt, synthetic construct
  misc_feature 1..18: note = Description of Artificial Sequence: Synthetic Antisense oligonucleotide
  modified_base 1..2: mod_base = OTHER; note = bicyclic nucleic acid (BNA)
  source 1..18: mol_type = other RNA
ccagtcggtaagttctgt

SEQ ID NO: 2856 - RNA, 17 nt, synthetic construct
  misc_feature 1..17: note = Description of Artificial Sequence: Synthetic Antisense oligonucleotide
  modified_base 1..2: mod_base = OTHER; note = bicyclic nucleic acid (BNA)
  source 1..17: mol_type = other RNA
ccagtcggtaagttctg

SEQ ID NO: 2857 - RNA, 16 nt, synthetic construct
  misc_feature 1..16: note = Description of Artificial Sequence: Synthetic Antisense oligonucleotide
  modified_base 1..2: mod_base = OTHER; note = bicyclic nucleic acid (BNA)
  source 1..16: mol_type = other RNA
ccagtcggtaagttct

SEQ ID NO: 2858 - RNA, 15 nt, synthetic construct
  misc_feature 1..15: note = Description of Artificial Sequence: Synthetic Antisense oligonucleotide
  modified_base 1..2: mod_base = OTHER; note = bicyclic nucleic acid (BNA)
  source 1..15: mol_type = other RNA
ccagtcggtaagttc

SEQ ID NO: 2859 - RNA, 14 nt, synthetic construct
  misc_feature 1..14: note = Description of Artificial Sequence: Synthetic Antisense oligonucleotide
  modified_base 1..2: mod_base = OTHER; note = bicyclic nucleic acid (BNA)
  source 1..14: mol_type = other RNA
ccagtcggtaagtt

SEQ ID NO: 2860 - RNA, 13 nt, synthetic construct
  misc_feature 1..13: note = Description of Artificial Sequence: Synthetic Antisense oligonucleotide
  modified_base 1..2: mod_base = OTHER; note = bicyclic nucleic acid (BNA)
  source 1..13: mol_type = other RNA
ccagtcggtaagt

SEQ ID NO: 2861 - RNA, 20 nt, synthetic construct
  misc_feature 1..20: note = Description of Artificial Sequence: Synthetic Antisense oligonucleotide
  modified_base 1..2: mod_base = OTHER; note = bicyclic nucleic acid (BNA)
  source 1..20: mol_type = other RNA
gccagtcggtaagttctgtc

SEQ ID NO: 2862 - RNA, 19 nt, synthetic construct
  misc_feature 1..19: note = Description of Artificial Sequence: Synthetic Antisense oligonucleotide
  modified_base 1..2: mod_base = OTHER; note = bicyclic nucleic acid (BNA)
  source 1..19: mol_type = other RNA
gccagtcggtaagttctgt

SEQ ID NO: 2863 - RNA, 18 nt, synthetic construct
  misc_feature 1..18: note = Description of Artificial Sequence: Synthetic Antisense oligonucleotide
  modified_base 1..2: mod_base = OTHER; note = bicyclic nucleic acid (BNA)
  source 1..18: mol_type = other RNA
gccagtcggtaagttctg

SEQ ID NO: 2864 - RNA, 17 nt, synthetic construct
  misc_feature 1..17: note = Description of Artificial Sequence: Synthetic Antisense oligonucleotide
  modified_base 1..2: mod_base = OTHER; note = bicyclic nucleic acid (BNA)
  source 1..17: mol_type = other RNA
gccagtcggtaagttct

SEQ ID NO: 2865 - RNA, 16 nt, synthetic construct
  misc_feature 1..16: note = Description of Artificial Sequence: Synthetic Antisense oligonucleotide
  modified_base 1..2: mod_base = OTHER; note = bicyclic nucleic acid (BNA)
  source 1..16: mol_type = other RNA
gccagtcggtaagttc

SEQ ID NO: 2866 - RNA, 15 nt, synthetic construct
  misc_feature 1..15: note = Description of Artificial Sequence: Synthetic Antisense oligonucleotide
  modified_base 1..2: mod_base = OTHER; note = bicyclic nucleic acid (BNA)
  source 1..15: mol_type = other RNA
gccagtcggtaagtt

SEQ ID NO: 2867 - RNA, 14 nt, synthetic construct
  misc_feature 1..14: note = Description of Artificial Sequence: Synthetic Antisense oligonucleotide
  modified_base 1..2: mod_base = OTHER; note = bicyclic nucleic acid (BNA)
  source 1..14: mol_type = other RNA
gccagtcggtaagt

SEQ ID NO: 2868 - DNA, 20 bp, synthetic construct
  misc_feature 1..20: note = Description of Artificial Sequence: Synthetic Antisense oligonucleotide
  misc_feature 1..20: note = Original Sequence: tcaaggaagauggcauuucu
  modified_base 1..2: mod_base = OTHER; note = bicyclic nucleic acid (BNA)
  source 1..20: mol_type = other DNA
  modified_base 11: mod_base = OTHER; note = Uracil
  modified_base 16: mod_base = OTHER; note = Uracil
  modified_base 17: mod_base = OTHER; note = Uracil
  modified_base 18: mod_base = OTHER; note = Uracil
  modified_base 20: mod_base = OTHER; note = Uracil
tcaaggaagatggcatttct

SEQ ID NO: 2869 - DNA, 22 bp, synthetic construct
  misc_feature 1..22: note = Description of Artificial Sequence: Synthetic Antisense oligonucleotide
  misc_feature 1..22: note = Original Sequence: tcaaggaagauggcauuucuag
  modified_base 1..2: mod_base = OTHER; note = bicyclic nucleic acid (BNA)
  source 1..22: mol_type = other DNA
  modified_base 11: mod_base = OTHER; note = Uracil
  modified_base 16: mod_base = OTHER; note = Uracil
  modified_base 17: mod_base = OTHER; note = Uracil
  modified_base 18: mod_base = OTHER; note = Uracil
  modified_base 20: mod_base = OTHER; note = Uracil
tcaaggaagatggcatttctag

SEQ ID NO: 2870 - DNA, 16 bp, synthetic construct
  misc_feature 1..16: note = Description of Artificial Sequence: Synthetic Antisense oligonucleotide
  misc_feature 1..16: note = Original Sequence: tcaaggaagauggcau
  modified_base 1..2: mod_base = OTHER; note = bicyclic nucleic acid (BNA)
  source 1..16: mol_type = other DNA
  modified_base 11: mod_base = OTHER; note = Uracil
  modified_base 16: mod_base = OTHER; note = Uracil
tcaaggaagatggcat

SEQ ID NO: 2871 - RNA, 15 nt, synthetic construct
  misc_feature 1..15: note = Description of Artificial Sequence: Synthetic Antisense oligonucleotide
  modified_base 1..2: mod_base = OTHER; note = bicyclic nucleic acid (BNA)
  source 1..15: mol_type = other RNA
gaagatggcatttct

SEQ ID NO: 2872 - DNA, 21 bp, synthetic construct
  misc_feature 1..21: note = Description of Artificial Sequence: Synthetic Antisense oligonucleotide
  misc_feature 1..21: note = Original Sequence: tcaaggaagauggcauuucua
  modified_base 1..2: mod_base = OTHER; note = bicyclic nucleic acid (BNA)
  source 1..21: mol_type = other DNA
  modified_base 11: mod_base = OTHER; note = Uracil
  modified_base 16: mod_base = OTHER; note = Uracil
  modified_base 17: mod_base = OTHER; note = Uracil
  modified_base 18: mod_base = OTHER; note = Uracil
  modified_base 20: mod_base = OTHER; note = Uracil
tcaaggaagatggcatttcta

SEQ ID NO: 2873 - DNA, 19 bp, synthetic construct
  misc_feature 1..19: note = Description of Artificial Sequence: Synthetic Antisense oligonucleotide
  misc_feature 1..19: note = Original Sequence: tcaaggaagauggcauuuc
  modified_base 1..2: mod_base = OTHER; note = bicyclic nucleic acid (BNA)
  source 1..19: mol_type = other DNA
  modified_base 11: mod_base = OTHER; note = Uracil
  modified_base 16: mod_base = OTHER; note = Uracil
  modified_base 17: mod_base = OTHER; note = Uracil
  modified_base 18: mod_base = OTHER; note = Uracil
tcaaggaagatggcatttc

SEQ ID NO: 2874 - DNA, 18 bp, synthetic construct
  misc_feature 1..18: note = Description of Artificial Sequence: Synthetic Antisense oligonucleotide
  misc_feature 1..18: note = Original Sequence: tcaaggaagauggcauuu
  modified_base 1..2: mod_base = OTHER; note = bicyclic nucleic acid (BNA)
  source 1..18: mol_type = other DNA
  modified_base 11: mod_base = OTHER; note = Uracil
  modified_base 16: mod_base = OTHER; note = Uracil
  modified_base 17: mod_base = OTHER; note = Uracil
  modified_base 18: mod_base = OTHER; note = Uracil
tcaaggaagatggcattt

SEQ ID NO: 2875 - DNA, 17 bp, synthetic construct
  misc_feature 1..17: note = Description of Artificial Sequence: Synthetic Antisense oligonucleotide
  misc_feature 1..17: note = Original Sequence: tcaaggaagauggcauu
  modified_base 1..2: mod_base = OTHER; note = bicyclic nucleic acid (BNA)
  source 1..17: mol_type = other DNA
  modified_base 11: mod_base = OTHER; note = Uracil
  modified_base 16: mod_base = OTHER; note = Uracil
  modified_base 17: mod_base = OTHER; note = Uracil
tcaaggaagatggcatt

SEQ ID NO: 2876 - DNA, 15 bp, synthetic construct
  misc_feature 1..15: note = Description of Artificial Sequence: Synthetic Antisense oligonucleotide
  misc_feature 1..15: note = Original Sequence: tcaaggaagauggca
  modified_base 1..2: mod_base = OTHER; note = bicyclic nucleic acid (BNA)
  source 1..15: mol_type = other DNA
  modified_base 11: mod_base = OTHER; note = Uracil
tcaaggaagatggca

SEQ ID NO: 2877 - DNA, 14 bp, synthetic construct
  misc_feature 1..14: note = Description of Artificial Sequence: Synthetic Antisense oligonucleotide
  misc_feature 1..14: note = Original Sequence: tcaaggaagauggc
  modified_base 1..2: mod_base = OTHER; note = bicyclic nucleic acid (BNA)
  source 1..14: mol_type = other DNA
  modified_base 11: mod_base = OTHER; note = Uracil
tcaaggaagatggc

SEQ ID NO: 2878 - DNA, 13 bp, synthetic construct
  misc_feature 1..13: note = Description of Artificial Sequence: Synthetic Antisense oligonucleotide
  misc_feature 1..13: note = Original Sequence: tcaaggaagaugg
  modified_base 1..2: mod_base = OTHER; note = bicyclic nucleic acid (BNA)
  source 1..13: mol_type = other DNA
  modified_base 11: mod_base = OTHER; note = Uracil
tcaaggaagatgg

SEQ ID NO: 2879 - DNA, 12 bp, synthetic construct
  misc_feature 1..12: note = Description of Artificial Sequence: Synthetic Antisense oligonucleotide
  misc_feature 1..12: note = Original Sequence: tcaaggaagaug
  modified_base 1..2: mod_base = OTHER; note = bicyclic nucleic acid (BNA)
  source 1..12: mol_type = other DNA
  modified_base 11: mod_base = OTHER; note = Uracil
tcaaggaagatg

SEQ ID NO: 2880 - DNA, 11 bp, synthetic construct
  misc_feature 1..11: note = Description of Artificial Sequence: Synthetic Antisense oligonucleotide
  misc_feature 1..11: note = Original Sequence: tcaaggaagau
  modified_base 1..2: mod_base = OTHER; note = bicyclic nucleic acid (BNA)
  source 1..11: mol_type = other DNA
  modified_base 11: mod_base = OTHER; note = Uracil
tcaaggaagat

SEQ ID NO: 2881 - DNA, 10 bp, synthetic construct
  misc_feature 1..10: note = Description of Artificial Sequence: Synthetic Antisense oligonucleotide
  modified_base 1..2: mod_base = OTHER; note = bicyclic nucleic acid (BNA)
  source 1..10: mol_type = other DNA
tcaaggaaga

SEQ ID NO: 2882 - skipped

SEQ ID NO: 2883 - RNA, 21 nt, synthetic construct
  misc_feature 1..21: note = Description of Artificial Sequence: Synthetic Antisense oligonucleotide
  modified_base 1..2: mod_base = OTHER; note = bicyclic nucleic acid (BNA)
  source 1..21: mol_type = other RNA
caaggaagatggcatttctag

SEQ ID NO: 2884 - RNA, 20 nt, synthetic construct
  misc_feature 1..20: note = Description of Artificial Sequence: Synthetic Antisense oligonucleotide
  modified_base 1..2: mod_base = OTHER; note = bicyclic nucleic acid (BNA)
  source 1..20: mol_type = other RNA
caaggaagatggcatttcta

SEQ ID NO: 2885 - RNA, 19 nt, synthetic construct
  misc_feature 1..19: note = Description of Artificial Sequence: Synthetic Antisense oligonucleotide
  modified_base 1..2: mod_base = OTHER; note = bicyclic nucleic acid (BNA)
  source 1..19: mol_type = other RNA
caaggaagatggcatttct

SEQ ID NO: 2886 - RNA, 18 nt, synthetic construct
  misc_feature 1..18: note = Description of Artificial Sequence: Synthetic Antisense oligonucleotide
  modified_base 1..2: mod_base = OTHER; note = bicyclic nucleic acid (BNA)
  source 1..18: mol_type = other RNA
caaggaagatggcatttc

SEQ ID NO: 2887 - RNA, 17 nt, synthetic construct
  misc_feature 1..17: note = Description of Artificial Sequence: Synthetic Antisense oligonucleotide
  modified_base 1..2: mod_base = OTHER; note = bicyclic nucleic acid (BNA)
  source 1..17: mol_type = other RNA
caaggaagatggcattt

SEQ ID NO: 2888 - RNA, 16 nt, synthetic construct
  misc_feature 1..16: note = Description of Artificial Sequence: Synthetic Antisense oligonucleotide
  modified_base 1..2: mod_base = OTHER; note = bicyclic nucleic acid (BNA)
  source 1..16: mol_type = other RNA
caaggaagatggcatt

SEQ ID NO: 2889 - RNA, 15 nt, synthetic construct
  misc_feature 1..15: note = Description of Artificial Sequence: Synthetic Antisense oligonucleotide
  modified_base 1..2: mod_base = OTHER; note = bicyclic nucleic acid (BNA)
  source 1..15: mol_type = other RNA
caaggaagatggcat

SEQ ID NO: 2890 - RNA, 14 nt, synthetic construct
  misc_feature 1..14: note = Description of Artificial Sequence: Synthetic Antisense oligonucleotide
  modified_base 1..2: mod_base = OTHER; note = bicyclic nucleic acid (BNA)
  source 1..14: mol_type = other RNA
caaggaagatggca

SEQ ID NO: 2891 - RNA, 13 nt, synthetic construct
  misc_feature 1..13: note = Description of Artificial Sequence: Synthetic Antisense oligonucleotide
  modified_base 1..2: mod_base = OTHER; note = bicyclic nucleic acid (BNA)
  source 1..13: mol_type = other RNA
caaggaagatggc

SEQ ID NO: 2892 - RNA, 12 nt, synthetic construct
  misc_feature 1..12: note = Description of Artificial Sequence: Synthetic Antisense oligonucleotide
  modified_base 1..2: mod_base = OTHER; note = bicyclic nucleic acid (BNA)
  source 1..12: mol_type = other RNA
caaggaagatgg

SEQ ID NO: 2893 - RNA, 11 nt, synthetic construct
  misc_feature 1..11: note = Description of Artificial Sequence: Synthetic Antisense oligonucleotide
  modified_base 1..2: mod_base = OTHER; note = bicyclic nucleic acid (BNA)
  source 1..11: mol_type = other RNA
caaggaagatg

SEQ ID NO: 2894 - RNA, 10 nt, synthetic construct
  misc_feature 1..10: note = Description of Artificial Sequence: Synthetic Antisense oligonucleotide
  modified_base 1..2: mod_base = OTHER; note = bicyclic nucleic acid (BNA)
  source 1..10: mol_type = other RNA
caaggaagat

SEQ ID NO: 2895-2896 - skipped (2 entries)

SEQ ID NO: 2897 - RNA, 20 nt, synthetic construct
  misc_feature 1..20: note = Description of Artificial Sequence: Synthetic Antisense oligonucleotide
  modified_base 1..2: mod_base = OTHER; note = bicyclic nucleic acid (BNA)
  source 1..20: mol_type = other RNA
aaggaagatggcatttctag

SEQ ID NO: 2898 - RNA, 19 nt, synthetic construct
  misc_feature 1..19: note = Description of Artificial Sequence: Synthetic Antisense oligonucleotide
  modified_base 1..2: mod_base = OTHER; note = bicyclic nucleic acid (BNA)
  source 1..19: mol_type = other RNA
aaggaagatggcatttcta

SEQ ID NO: 2899 - RNA, 18 nt, synthetic construct
  misc_feature 1..18: note = Description of Artificial Sequence: Synthetic Antisense oligonucleotide
  modified_base 1..2: mod_base = OTHER; note = bicyclic nucleic acid (BNA)
  source 1..18: mol_type = other RNA
aaggaagatggcatttct

SEQ ID NO: 2900 - RNA, 17 nt, synthetic construct
  misc_feature 1..17: note = Description of Artificial Sequence: Synthetic Antisense oligonucleotide
  modified_base 1..2: mod_base = OTHER; note = bicyclic nucleic acid (BNA)
  source 1..17: mol_type = other RNA
aaggaagatggcatttc

SEQ ID NO: 2901 - RNA, 16 nt, synthetic construct
  misc_feature 1..16: note = Description of Artificial Sequence: Synthetic Antisense oligonucleotide
  modified_base 1..2: mod_base = OTHER; note = bicyclic nucleic acid (BNA)
  source 1..16: mol_type = other RNA
aaggaagatggcattt

SEQ ID NO: 2902 - RNA, 15 nt, synthetic construct
  misc_feature 1..15: note = Description of Artificial Sequence: Synthetic Antisense oligonucleotide
  modified_base 1..2: mod_base = OTHER; note = bicyclic nucleic acid (BNA)
  source 1..15: mol_type = other RNA
aaggaagatggcatt

SEQ ID NO: 2903 - RNA, 14 nt, synthetic construct
  misc_feature 1..14: note = Description of Artificial Sequence: Synthetic Antisense oligonucleotide
  modified_base 1..2: mod_base = OTHER; note = bicyclic nucleic acid (BNA)
  source 1..14: mol_type = other RNA
aaggaagatggcat

SEQ ID NO: 2904 - RNA, 13 nt, synthetic construct
  misc_feature 1..13: note = Description of Artificial Sequence: Synthetic Antisense oligonucleotide
  modified_base 1..2: mod_base = OTHER; note = bicyclic nucleic acid (BNA)
  source 1..13: mol_type = other RNA
aaggaagatggca

SEQ ID NO: 2905 - RNA, 12 nt, synthetic construct
  misc_feature 1..12: note = Description of Artificial Sequence: Synthetic Antisense oligonucleotide
  modified_base 1..2: mod_base = OTHER; note = bicyclic nucleic acid (BNA)
  source 1..12: mol_type = other RNA
aaggaagatggc

SEQ ID NO: 2906 - RNA, 11 nt, synthetic construct
  misc_feature 1..11: note = Description of Artificial Sequence: Synthetic Antisense oligonucleotide
  modified_base 1..2: mod_base = OTHER; note = bicyclic nucleic acid (BNA)
  source 1..11: mol_type = other RNA
aaggaagatgg

SEQ ID NO: 2907 - RNA, 10 nt, synthetic construct
  misc_feature 1..10: note = Description of Artificial Sequence: Synthetic Antisense oligonucleotide
  modified_base 1..2: mod_base = OTHER; note = bicyclic nucleic acid (BNA)
  source 1..10: mol_type = other RNA
aaggaagatg

SEQ ID NO: 2908-2909 - skipped (2 entries)

SEQ ID NO: 2910 - RNA, 19 nt, synthetic construct
  misc_feature 1..19: note = Description of Artificial Sequence: Synthetic Antisense oligonucleotide
  modified_base 1..2: mod_base = OTHER; note = bicyclic nucleic acid (BNA)
  source 1..19: mol_type = other RNA
aggaagatggcatttctag

SEQ ID NO: 2911 - RNA, 18 nt, synthetic construct
  misc_feature 1..18: note = Description of Artificial Sequence: Synthetic Antisense oligonucleotide
  modified_base 1..2: mod_base = OTHER; note = bicyclic nucleic acid (BNA)
  source 1..18: mol_type = other RNA
aggaagatggcatttcta

SEQ ID NO: 2912 - RNA, 17 nt, synthetic construct
  misc_feature 1..17: note = Description of Artificial Sequence: Synthetic Antisense oligonucleotide
  modified_base 1..2: mod_base = OTHER; note = bicyclic nucleic acid (BNA)
  source 1..17: mol_type = other RNA
aggaagatggcatttct

SEQ ID NO: 2913 - RNA, 16 nt, synthetic construct
  misc_feature 1..16: note = Description of Artificial Sequence: Synthetic Antisense oligonucleotide
  modified_base 1..2: mod_base = OTHER; note = bicyclic nucleic acid (BNA)
  source 1..16: mol_type = other RNA
aggaagatggcatttc

SEQ ID NO: 2914 - RNA, 15 nt, synthetic construct
  misc_feature 1..15: note = Description of Artificial Sequence: Synthetic Antisense oligonucleotide
  modified_base 1..2: mod_base = OTHER; note = bicyclic nucleic acid (BNA)
  source 1..15: mol_type = other RNA
aggaagatggcattt

SEQ ID NO: 2915 - RNA, 14 nt, synthetic construct
  misc_feature 1..14: note = Description of Artificial Sequence: Synthetic Antisense oligonucleotide
  modified_base 1..2: mod_base = OTHER; note = bicyclic nucleic acid (BNA)
  source 1..14: mol_type = other RNA
aggaagatggcatt

SEQ ID NO: 2916 - RNA, 13 nt, synthetic construct
  misc_feature 1..13: note = Description of Artificial Sequence: Synthetic Antisense oligonucleotide
  modified_base 1..2: mod_base = OTHER; note = bicyclic nucleic acid (BNA)
  source 1..13: mol_type = other RNA
aggaagatggcat

SEQ ID NO: 2917 - RNA, 12 nt, synthetic construct
  misc_feature 1..12: note = Description of Artificial Sequence: Synthetic Antisense oligonucleotide
  modified_base 1..2: mod_base = OTHER; note = bicyclic nucleic acid (BNA)
  source 1..12: mol_type = other RNA
aggaagatggca

SEQ ID NO: 2918 - RNA, 10 nt, synthetic construct
  misc_feature 1..10: note = Description of Artificial Sequence: Synthetic Antisense oligonucleotide
  modified_base 1..2: mod_base = OTHER; note = bicyclic nucleic acid (BNA)
  source 1..10: mol_type = other RNA
aggaagatgg

SEQ ID NO: 2919-2920 - skipped (2 entries)

SEQ ID NO: 2921 - RNA, 18 nt, synthetic construct
  misc_feature 1..18: note = Description of Artificial Sequence: Synthetic Antisense oligonucleotide
  modified_base 1..2: mod_base = OTHER; note = bicyclic nucleic acid (BNA)
  source 1..18: mol_type = other RNA
ggaagatggcatttctag

SEQ ID NO: 2922 - RNA, 17 nt, synthetic construct
  misc_feature 1..17: note = Description of Artificial Sequence: Synthetic Antisense oligonucleotide
  modified_base 1..2: mod_base = OTHER; note = bicyclic nucleic acid (BNA)
  source 1..17: mol_type = other RNA
ggaagatggcatttcta

SEQ ID NO: 2923 - RNA, 16 nt, synthetic construct
  misc_feature 1..16: note = Description of Artificial Sequence: Synthetic Antisense oligonucleotide
  modified_base 1..2: mod_base = OTHER; note = bicyclic nucleic acid (BNA)
  source 1..16: mol_type = other RNA
ggaagatggcatttct

SEQ ID NO: 2924 - RNA, 15 nt, synthetic construct
  misc_feature 1..15: note = Description of Artificial Sequence: Synthetic Antisense oligonucleotide
  modified_base 1..2: mod_base = OTHER; note = bicyclic nucleic acid (BNA)
  source 1..15: mol_type = other RNA
ggaagatggcatttc

SEQ ID NO: 2925 - RNA, 14 nt, synthetic construct
  misc_feature 1..14: note = Description of Artificial Sequence: Synthetic Antisense oligonucleotide
  modified_base 1..2: mod_base = OTHER; note = bicyclic nucleic acid (BNA)
  source 1..14: mol_type = other RNA
ggaagatggcattt

SEQ ID NO: 2926 - RNA, 13 nt, synthetic construct
  misc_feature 1..13: note = Description of Artificial Sequence: Synthetic Antisense oligonucleotide
  modified_base 1..2: mod_base = OTHER; note = bicyclic nucleic acid (BNA)
  source 1..13: mol_type = other RNA
ggaagatggcatt

SEQ ID NO: 2927 - RNA, 12 nt, synthetic construct
  misc_feature 1..12: note = Description of Artificial Sequence: Synthetic Antisense oligonucleotide
  modified_base 1..2: mod_base = OTHER; note = bicyclic nucleic acid (BNA)
  source 1..12: mol_type = other RNA
ggaagatggcat

SEQ ID NO: 2928 - RNA, 11 nt, synthetic construct
  misc_feature 1..11: note = Description of Artificial Sequence: Synthetic Antisense oligonucleotide
  modified_base 1..2: mod_base = OTHER; note = bicyclic nucleic acid (BNA)
  source 1..11: mol_type = other RNA
ggaagatggca

SEQ ID NO: 2929 - RNA, 10 nt, synthetic construct
  misc_feature 1..10: note = Description of Artificial Sequence: Synthetic Antisense oligonucleotide
  modified_base 1..2: mod_base = OTHER; note = bicyclic nucleic acid (BNA)
  source 1..10: mol_type = other RNA
ggaagatggc

SEQ ID NO: 2930 - skipped

SEQ ID NO: 2931 - RNA, 17 nt, synthetic construct
  misc_feature 1..17: note = Description of Artificial Sequence: Synthetic Antisense oligonucleotide
  modified_base 1..2: mod_base = OTHER; note = bicyclic nucleic acid (BNA)
  source 1..17: mol_type = other RNA
gaagatggcatttctag

SEQ ID NO: 2932 - RNA, 16 nt, synthetic construct
  misc_feature 1..16: note = Description of Artificial Sequence: Synthetic Antisense oligonucleotide
  modified_base 1..2: mod_base = OTHER; note = bicyclic nucleic acid (BNA)
  source 1..16: mol_type = other RNA
gaagatggcatttcta

SEQ ID NO: 2933 - RNA, 14 nt, synthetic construct
  misc_feature 1..14: note = Description of Artificial Sequence: Synthetic Antisense oligonucleotide
  modified_base 1..2: mod_base = OTHER; note = bicyclic nucleic acid (BNA)
  source 1..14: mol_type = other RNA
gaagatggcatttc

SEQ ID NO: 2934 - RNA, 13 nt, synthetic construct
  misc_feature 1..13: note = Description of Artificial Sequence: Synthetic Antisense oligonucleotide
  modified_base 1..2: mod_base = OTHER; note = bicyclic nucleic acid (BNA)
  source 1..13: mol_type = other RNA
gaagatggcattt

SEQ ID NO: 2935 - RNA, 12 nt, synthetic construct
  misc_feature 1..12: note = Description of Artificial Sequence: Synthetic Antisense oligonucleotide
  modified_base 1..2: mod_base = OTHER; note = bicyclic nucleic acid (BNA)
  source 1..12: mol_type = other RNA
gaagatggcatt

SEQ ID NO: 2936 - RNA, 11 nt, synthetic construct
  misc_feature 1..11: note = Description of Artificial Sequence: Synthetic Antisense oligonucleotide
  modified_base 1..2: mod_base = OTHER; note = bicyclic nucleic acid (BNA)
  source 1..11: mol_type = other RNA
gaagatggcat

SEQ ID NO: 2937 - RNA, 10 nt, synthetic construct
  misc_feature 1..10: note = Description of Artificial Sequence: Synthetic Antisense oligonucleotide
  modified_base 1..2: mod_base = OTHER; note = bicyclic nucleic acid (BNA)
  source 1..10: mol_type = other RNA
gaagatggca

SEQ ID NO: 2938-2939 - skipped (2 entries)

SEQ ID NO: 2940 - RNA, 16 nt, synthetic construct
  misc_feature 1..16: note = Description of Artificial Sequence: Synthetic Antisense oligonucleotide
  modified_base 1..2: mod_base = OTHER; note = bicyclic nucleic acid (BNA)
  source 1..16: mol_type = other RNA
aagatggcatttctag

SEQ ID NO: 2941 - RNA, 15 nt, synthetic construct
  misc_feature 1..15: note = Description of Artificial Sequence: Synthetic Antisense oligonucleotide
  modified_base 1..2: mod_base = OTHER; note = bicyclic nucleic acid (BNA)
  source 1..15: mol_type = other RNA
aagatggcatttcta

SEQ ID NO: 2942 - RNA, 14 nt, synthetic construct
  misc_feature 1..14: note = Description of Artificial Sequence: Synthetic Antisense oligonucleotide
  modified_base 1..2: mod_base = OTHER; note = bicyclic nucleic acid (BNA)
  source 1..14: mol_type = other RNA
aagatggcatttct

SEQ ID NO: 2943 - RNA, 13 nt, synthetic construct
  misc_feature 1..13: note = Description of Artificial Sequence: Synthetic Antisense oligonucleotide
  modified_base 1..2: mod_base = OTHER; note = bicyclic nucleic acid (BNA)
  source 1..13: mol_type = other RNA
aagatggcatttc

SEQ ID NO: 2944 - RNA, 12 nt, synthetic construct
  misc_feature 1..12: note = Description of Artificial Sequence: Synthetic Antisense oligonucleotide
  modified_base 1..2: mod_base = OTHER; note = bicyclic nucleic acid (BNA)
  source 1..12: mol_type = other RNA
aagatggcattt

SEQ ID NO: 2945 - RNA, 11 nt, synthetic construct
  misc_feature 1..11: note = Description of Artificial Sequence: Synthetic Antisense oligonucleotide
  modified_base 1..2: mod_base = OTHER; note = bicyclic nucleic acid (BNA)
  source 1..11: mol_type = other RNA
aagatggcatt

SEQ ID NO: 2946 - RNA, 10 nt, synthetic construct
  misc_feature 1..10: note = Description of Artificial Sequence: Synthetic Antisense oligonucleotide
  modified_base 1..2: mod_base = OTHER; note = bicyclic nucleic acid (BNA)
  source 1..10: mol_type = other RNA
aagatggcat

SEQ ID NO: 2947-2948 - skipped (2 entries)

SEQ ID NO: 2949 - RNA, 15 nt, synthetic construct
  misc_feature 1..15: note = Description of Artificial Sequence: Synthetic Antisense oligonucleotide
  modified_base 1..2: mod_base = OTHER; note = bicyclic nucleic acid (BNA)
  source 1..15: mol_type = other RNA
agatggcatttctag

SEQ ID NO: 2950 - RNA, 14 nt, synthetic construct
  misc_feature 1..14: note = Description of Artificial Sequence: Synthetic Antisense oligonucleotide
  modified_base 1..2: mod_base = OTHER; note = bicyclic nucleic acid (BNA)
  source 1..14: mol_type = other RNA
agatggcatttcta

SEQ ID NO: 2951 - RNA, 13 nt, synthetic construct
  misc_feature 1..13: note = Description of Artificial Sequence: Synthetic Antisense oligonucleotide
  modified_base 1..2: mod_base = OTHER; note = bicyclic nucleic acid (BNA)
  source 1..13: mol_type = other RNA
agatggcatttct

SEQ ID NO: 2952 - RNA, 12 nt, synthetic construct
  misc_feature 1..12: note = Description of Artificial Sequence: Synthetic Antisense oligonucleotide
  modified_base 1..2: mod_base = OTHER; note = bicyclic nucleic acid (BNA)
  source 1..12: mol_type = other RNA
agatggcatttc

SEQ ID NO: 2953 - RNA, 11 nt, synthetic construct
  misc_feature 1..11: note = Description of Artificial Sequence: Synthetic Antisense oligonucleotide
  modified_base 1..2: mod_base = OTHER; note = bicyclic nucleic acid (BNA)
  source 1..11: mol_type = other RNA
agatggcattt

SEQ ID NO: 2954 - RNA, 10 nt, synthetic construct
  misc_feature 1..10: note = Description of Artificial Sequence: Synthetic Antisense oligonucleotide
  modified_base 1..2: mod_base = OTHER; note = bicyclic nucleic acid (BNA)
  source 1..10: mol_type = other RNA
agatggcatt

SEQ ID NO: 2955-2956 - skipped (2 entries)

SEQ ID NO: 2957 - DNA, 30 bp, synthetic construct; identical to SEQ ID NO: 8
  misc_feature 1..30: note = Description of Artificial Sequence: Synthetic Antisense oligonucleotide
  misc_feature 1..30: note = Original Sequence: ctccaacaucaaggaagauggcauuucuag
  modified_base 1..2: mod_base = OTHER; note = bicyclic nucleic acid (BNA)
  source 1..30: mol_type = other DNA
  modified_base 9: mod_base = OTHER; note = Uracil
  modified_base 19: mod_base = OTHER; note = Uracil
  modified_base 24: mod_base = OTHER; note = Uracil
  modified_base 25: mod_base = OTHER; note = Uracil
  modified_base 26: mod_base = OTHER; note = Uracil
  modified_base 28: mod_base = OTHER; note = Uracil

SEQ ID NO: 2958 - DNA, 29 bp, synthetic construct
  misc_feature 1..29: note = Description of Artificial Sequence: Synthetic Antisense oligonucleotide
  misc_feature 1..29: note = Original Sequence: ctccaacaucaaggaagauggcauuucua
  modified_base 1..2: mod_base = OTHER; note = bicyclic nucleic acid (BNA)
  source 1..29: mol_type = other DNA
  modified_base 9: mod_base = OTHER; note = Uracil
  modified_base 19: mod_base = OTHER; note = Uracil
  modified_base 24: mod_base = OTHER; note = Uracil
  modified_base 25: mod_base = OTHER; note = Uracil
  modified_base 26: mod_base = OTHER; note = Uracil
  modified_base 28: mod_base = OTHER; note = Uracil
ctccaacatcaaggaagatggcatttcta

SEQ ID NO: 2959 - DNA, 28 bp, synthetic construct
  misc_feature 1..28: note = Description of Artificial Sequence: Synthetic Antisense oligonucleotide
  misc_feature 1..28: note = Original Sequence: ctccaacaucaaggaagauggcauuucu
  modified_base 1..2: mod_base = OTHER; note = bicyclic nucleic acid (BNA)
  source 1..28: mol_type = other DNA
  modified_base 9: mod_base = OTHER; note = Uracil
  modified_base 19: mod_base = OTHER; note = Uracil
  modified_base 24: mod_base = OTHER; note = Uracil
  modified_base 25: mod_base = OTHER; note = Uracil
  modified_base 26: mod_base = OTHER; note = Uracil
  modified_base 28: mod_base = OTHER; note = Uracil
ctccaacatcaaggaagatggcatttct

SEQ ID NO: 2960 - DNA, 27 bp, synthetic construct
  misc_feature 1..27: note = Description of Artificial Sequence: Synthetic Antisense oligonucleotide
  misc_feature 1..27: note = Original Sequence: ctccaacaucaaggaagauggcauuuc
  modified_base 1..2: mod_base = OTHER; note = bicyclic nucleic acid (BNA)
  source 1..27: mol_type = other DNA
  modified_base 9: mod_base = OTHER; note = Uracil
  modified_base 19: mod_base = OTHER; note = Uracil
  modified_base 24: mod_base = OTHER; note = Uracil
  modified_base 25: mod_base = OTHER; note = Uracil
  modified_base 26: mod_base = OTHER; note = Uracil
ctccaacatcaaggaagatggcatttc

SEQ ID NO: 2961 - DNA, 26 bp, synthetic construct
  misc_feature 1..26: note = Description of Artificial Sequence: Synthetic Antisense oligonucleotide
  misc_feature 1..26: note = Original Sequence: ctccaacaucaaggaagauggcauuu
  modified_base 1..2: mod_base = OTHER; note = bicyclic nucleic acid (BNA)
  source 1..26: mol_type = other DNA
  modified_base 9: mod_base = OTHER; note = Uracil
  modified_base 19: mod_base = OTHER; note = Uracil
  modified_base 24: mod_base = OTHER; note = Uracil
  modified_base 25: mod_base = OTHER; note = Uracil
  modified_base 26: mod_base = OTHER; note = Uracil
ctccaacatcaaggaagatggcattt

SEQ ID NO: 2962 - DNA, 25 bp, synthetic construct
  misc_feature 1..25: note = Description of Artificial Sequence: Synthetic Antisense oligonucleotide
  misc_feature 1..25: note = Original Sequence: ctccaacaucaaggaagauggcauu
  modified_base 1..2: mod_base = OTHER; note = bicyclic nucleic acid (BNA)
  source 1..25: mol_type = other DNA
  modified_base 9: mod_base = OTHER; note = Uracil
  modified_base 19: mod_base = OTHER; note = Uracil
  modified_base 24: mod_base = OTHER; note = Uracil
  modified_base 25: mod_base = OTHER; note = Uracil
ctccaacatcaaggaagatggcatt

SEQ ID NO: 2963 - DNA, 24 bp, synthetic construct
  misc_feature 1..24: note = Description of Artificial Sequence: Synthetic Antisense oligonucleotide
  misc_feature 1..24: note = Original Sequence: ctccaacaucaaggaagauggcau
  modified_base 1..2: mod_base = OTHER; note = bicyclic nucleic acid (BNA)
  source 1..24: mol_type = other DNA
  modified_base 9: mod_base = OTHER; note = Uracil
  modified_base 19: mod_base = OTHER; note = Uracil
  modified_base 24: mod_base = OTHER; note = Uracil
ctccaacatcaaggaagatggcat

SEQ ID NO: 2964 - DNA, 23 bp, synthetic construct
  misc_feature 1..23: note = Description of Artificial Sequence: Synthetic Antisense oligonucleotide
  misc_feature 1..23: note = Original Sequence: ctccaacaucaaggaagauggca
  modified_base 1..2: mod_base = OTHER; note = bicyclic nucleic acid (BNA)
  source 1..23: mol_type = other DNA
  modified_base 9: mod_base = OTHER; note = Uracil
  modified_base 19: mod_base = OTHER; note = Uracil
ctccaacatcaaggaagatggca

SEQ ID NO: 2965 - DNA, 22 bp, synthetic construct
  misc_feature 1..22: note = Description of Artificial Sequence: Synthetic Antisense oligonucleotide
  misc_feature 1..22: note = Original Sequence: ctccaacaucaaggaagauggc
  modified_base 1..2: mod_base = OTHER; note = bicyclic nucleic acid (BNA)
  source 1..22: mol_type = other DNA
  modified_base 9: mod_base = OTHER; note = Uracil
  modified_base 19: mod_base = OTHER; note = Uracil
ctccaacatcaaggaagatggc

SEQ ID NO: 2966 - DNA, 21 bp, synthetic construct
  misc_feature 1..21: note = Description of Artificial Sequence: Synthetic Antisense oligonucleotide
  misc_feature 1..21: note = Original Sequence: ctccaacaucaaggaagaugg
  modified_base 1..2: mod_base = OTHER; note = bicyclic nucleic acid (BNA)
  source 1..21: mol_type = other DNA
  modified_base 9: mod_base = OTHER; note = Uracil
  modified_base 19: mod_base = OTHER; note = Uracil
ctccaacatcaaggaagatgg

SEQ ID NO: 2967 - DNA, 20 bp, synthetic construct
  misc_feature 1..20: note = Description of Artificial Sequence: Synthetic Antisense oligonucleotide
  misc_feature 1..20: note = Original Sequence: ctccaacaucaaggaagaug
  modified_base 1..2: mod_base = OTHER; note = bicyclic nucleic acid (BNA)
  source 1..20: mol_type = other DNA
  modified_base 9: mod_base = OTHER; note = Uracil
  modified_base 19: mod_base = OTHER; note = Uracil
ctccaacatcaaggaagatg

SEQ ID NO: 2968 - DNA, 19 bp, synthetic construct
  misc_feature 1..19: note = Description of Artificial Sequence: Synthetic Antisense oligonucleotide
  misc_feature 1..19: note = Original Sequence: ctccaacaucaaggaagau
  modified_base 1..2: mod_base = OTHER; note = bicyclic nucleic acid (BNA)
  source 1..19: mol_type = other DNA
  modified_base 9: mod_base = OTHER; note = Uracil
  modified_base 19: mod_base = OTHER; note = Uracil
ctccaacatcaaggaagat

SEQ ID NO: 2969 - DNA, 18 bp, synthetic construct
  misc_feature 1..18: note = Description of Artificial Sequence: Synthetic Antisense oligonucleotide
  misc_feature 1..18: note = Original Sequence: ctccaacaucaaggaaga
  modified_base 1..2: mod_base = OTHER; note = bicyclic nucleic acid (BNA)
  source 1..18: mol_type = other DNA
  modified_base 9: mod_base = OTHER; note = Uracil
ctccaacatcaaggaaga

SEQ ID NO: 2970 - DNA, 17 bp, synthetic construct
  misc_feature 1..17: note = Description of Artificial Sequence: Synthetic Antisense oligonucleotide
  misc_feature 1..17: note = Original Sequence: ctccaacaucaaggaag
  modified_base 1..2: mod_base = OTHER; note = bicyclic nucleic acid (BNA)
  source 1..17: mol_type = other DNA
  modified_base 9: mod_base = OTHER; note = Uracil
ctccaacatcaaggaag

SEQ ID NO: 2971 - DNA, 29 bp, synthetic construct
  misc_feature 1..29: note = Description of Artificial Sequence: Synthetic Antisense oligonucleotide
  misc_feature 1..29: note = Original Sequence: tccaacaucaaggaagauggcauuucuag
  modified_base 1..2: mod_base = OTHER; note = bicyclic nucleic acid (BNA)
  source 1..29: mol_type = other DNA
  modified_base 8: mod_base = OTHER; note = Uracil
  modified_base 18: mod_base = OTHER; note = Uracil
  modified_base 23: mod_base = OTHER; note = Uracil
  modified_base 24: mod_base = OTHER; note = Uracil
  modified_base 25: mod_base = OTHER; note = Uracil
  modified_base 27: mod_base = OTHER; note = Uracil
tccaacatcaaggaagatggcatttctag

SEQ ID NO: 2972 - DNA, 28 bp, synthetic construct
  misc_feature 1..28: note = Description of Artificial Sequence: Synthetic Antisense oligonucleotide
  misc_feature 1..28: note = Original Sequence: tccaacaucaaggaagauggcauuucua
  modified_base 1..2: mod_base = OTHER; note = bicyclic nucleic acid (BNA)
  source 1..28: mol_type = other DNA
  modified_base 8: mod_base = OTHER; note = Uracil
  modified_base 18: mod_base = OTHER; note = Uracil
  modified_base 23: mod_base = OTHER; note = Uracil
  modified_base 24: mod_base = OTHER; note = Uracil
  modified_base 25: mod_base = OTHER; note = Uracil
  modified_base 27: mod_base = OTHER; note = Uracil
tccaacatcaaggaagatggcatttcta

SEQ ID NO: 2973 - DNA, 27 bp, synthetic construct
  misc_feature 1..27: note = Description of Artificial Sequence: Synthetic Antisense oligonucleotide
  misc_feature 1..27: note = Original Sequence: tccaacaucaaggaagauggcauuucu
  modified_base 1..2: mod_base = OTHER; note = bicyclic nucleic acid (BNA)
  source 1..27: mol_type = other DNA
  modified_base 8: mod_base = OTHER; note = Uracil
  modified_base 18: mod_base = OTHER; note = Uracil
  modified_base 23: mod_base = OTHER; note = Uracil
  modified_base 24: mod_base = OTHER; note = Uracil
  modified_base 25: mod_base = OTHER; note = Uracil
  modified_base 27: mod_base = OTHER; note = Uracil
tccaacatcaaggaagatggcatttct

SEQ ID NO: 2974 - DNA, 26 bp, synthetic construct
  misc_feature 1..26: note = Description of Artificial Sequence: Synthetic Antisense oligonucleotide
  misc_feature 1..26: note = Original Sequence: tccaacaucaaggaagauggcauuuc
  modified_base 1..2: mod_base = OTHER; note = bicyclic nucleic acid (BNA)
  source 1..26: mol_type = other DNA
  modified_base 8: mod_base = OTHER; note = Uracil
  modified_base 18: mod_base = OTHER; note = Uracil
  modified_base 23: mod_base = OTHER; note = Uracil
  modified_base 24: mod_base = OTHER; note = Uracil
  modified_base 25: mod_base = OTHER; note = Uracil
tccaacatcaaggaagatggcatttc

SEQ ID NO: 2975 - DNA, 25 bp, synthetic construct
  misc_feature 1..25: note = Description of Artificial Sequence: Synthetic Antisense oligonucleotide
  misc_feature 1..25: note = Original Sequence: tccaacaucaaggaagauggcauuu
  modified_base 1..2: mod_base = OTHER; note = bicyclic nucleic acid (BNA)
  source 1..25: mol_type = other DNA
  modified_base 8: mod_base = OTHER; note = Uracil
  modified_base 18: mod_base = OTHER; note = Uracil
  modified_base 23: mod_base = OTHER; note = Uracil
  modified_base 24: mod_base = OTHER; note = Uracil
  modified_base 25: mod_base = OTHER; note = Uracil
tccaacatcaaggaagatggcattt

SEQ ID NO: 2976 - DNA, 24 bp, synthetic construct
  misc_feature 1..24: note = Description of Artificial Sequence: Synthetic Antisense oligonucleotide
  misc_feature 1..24: note = Original Sequence: tccaacaucaaggaagauggcauu
  modified_base 1..2: mod_base = OTHER; note = bicyclic nucleic acid (BNA)
  source 1..24: mol_type = other DNA
  modified_base 8: mod_base = OTHER; note = Uracil
  modified_base 18: mod_base = OTHER; note = Uracil
  modified_base 23: mod_base = OTHER; note = Uracil
  modified_base 24: mod_base = OTHER; note = Uracil
tccaacatcaaggaagatggcatt

SEQ ID NO: 2977 - DNA, 23 bp, synthetic construct
  misc_feature 1..23: note = Description of Artificial Sequence: Synthetic Antisense oligonucleotide
  misc_feature 1..23: note = Original Sequence: tccaacaucaaggaagauggcau
  modified_base 1..2: mod_base = OTHER; note = bicyclic nucleic acid (BNA)
  source 1..23: mol_type = other DNA
  modified_base 8: mod_base = OTHER; note = Uracil
  modified_base 18: mod_base = OTHER; note = Uracil
  modified_base 23: mod_base = OTHER; note = Uracil
tccaacatcaaggaagatggcat

SEQ ID NO: 2978 - DNA, 22 bp, synthetic construct
  misc_feature 1..22: note = Description of Artificial Sequence: Synthetic Antisense oligonucleotide
  misc_feature 1..22: note = Original Sequence: tccaacaucaaggaagauggca
  modified_base 1..2: mod_base = OTHER; note = bicyclic nucleic acid (BNA)
  source 1..22: mol_type = other DNA
  modified_base 8: mod_base = OTHER; note = Uracil
  modified_base 18: mod_base = OTHER; note = Uracil
tccaacatcaaggaagatggca

SEQ ID NO: 2979 - DNA, 21 bp, synthetic construct
  misc_feature 1..21: note = Description of Artificial Sequence: Synthetic Antisense oligonucleotide
  misc_feature 1..21: note = Original Sequence: tccaacaucaaggaagauggc
  modified_base 1..2: mod_base = OTHER; note = bicyclic nucleic acid (BNA)
  source 1..21: mol_type = other DNA
  modified_base 8: mod_base = OTHER; note = Uracil
  modified_base 18: mod_base = OTHER; note = Uracil
tccaacatcaaggaagatggc

SEQ ID NO: 2980 - DNA, 20 bp, synthetic construct
  misc_feature 1..20: note = Description of Artificial Sequence: Synthetic Antisense oligonucleotide
  misc_feature 1..20: note = Original Sequence: tccaacaucaaggaagaugg
  modified_base 1..2: mod_base = OTHER; note = bicyclic nucleic acid (BNA)
  source 1..20: mol_type = other DNA
  modified_base 8: mod_base = OTHER; note = Uracil
  modified_base 18: mod_base = OTHER; note = Uracil
tccaacatcaaggaagatgg

SEQ ID NO: 2981 - DNA, 19 bp, synthetic construct
  misc_feature 1..19: note = Description of Artificial Sequence: Synthetic Antisense oligonucleotide
  misc_feature 1..19: note = Original Sequence: tccaacaucaaggaagaug
  modified_base 1..2: mod_base = OTHER; note = bicyclic nucleic acid (BNA)
  source 1..19: mol_type = other DNA
  modified_base 8: mod_base = OTHER; note = Uracil
  modified_base 18: mod_base = OTHER; note = Uracil
tccaacatcaaggaagatg

SEQ ID NO: 2982 - DNA, 18 bp, synthetic construct
  misc_feature 1..18: note = Description of Artificial Sequence: Synthetic Antisense oligonucleotide
  misc_feature 1..18: note = Original Sequence: tccaacaucaaggaagau
  modified_base 1..2: mod_base = OTHER; note = bicyclic nucleic acid (BNA)
  source 1..18: mol_type = other DNA
  modified_base 8: mod_base = OTHER; note = Uracil
  modified_base 18: mod_base = OTHER; note = Uracil
tccaacatcaaggaagat

SEQ ID NO: 2983 - DNA, 17 bp, synthetic construct
  misc_feature 1..17: note = Description of Artificial Sequence: Synthetic Antisense oligonucleotide
  misc_feature 1..17: note = Original Sequence: tccaacaucaaggaaga
  modified_base 1..2: mod_base = OTHER; note = bicyclic nucleic acid (BNA)
  source 1..17: mol_type = other DNA
  modified_base 8: mod_base = OTHER; note = Uracil
tccaacatcaaggaaga

SEQ ID NO: 2984 - DNA, 16 bp, synthetic construct
  misc_feature 1..16: note = Description of Artificial Sequence: Synthetic Antisense oligonucleotide
  misc_feature 1..16: note = Original Sequence: tccaacaucaaggaag
  modified_base 1..2: mod_base = OTHER; note = bicyclic nucleic acid (BNA)
  source 1..16: mol_type = other DNA
  modified_base 8: mod_base = OTHER; note = Uracil
tccaacatcaaggaag

SEQ ID NO: 2985 - RNA, 28 nt, synthetic construct
  misc_feature 1..28: note = Description of Artificial Sequence: Synthetic Antisense oligonucleotide
  modified_base 1..2: mod_base = OTHER; note = bicyclic nucleic acid (BNA)
  source 1..28: mol_type = other RNA
ccaacatcaaggaagatggcatttctag

SEQ ID NO: 2986 - RNA, 27 nt, synthetic construct
  misc_feature 1..27: note = Description of Artificial Sequence: Synthetic Antisense oligonucleotide
  modified_base 1..2: mod_base = OTHER; note = bicyclic nucleic acid (BNA)
  source 1..27: mol_type = other RNA
ccaacatcaaggaagatggcatttcta

SEQ ID NO: 2987 - RNA, 26 nt, synthetic construct
  misc_feature 1..26: note = Description of Artificial Sequence: Synthetic Antisense oligonucleotide
  modified_base 1..2: mod_base = OTHER; note = bicyclic nucleic acid (BNA)
  source 1..26: mol_type = other RNA
ccaacatcaaggaagatggcatttct

SEQ ID NO: 2988 - RNA, 25 nt, synthetic construct
  misc_feature 1..25: note = Description of Artificial Sequence: Synthetic Antisense oligonucleotide
  modified_base 1..2: mod_base = OTHER; note = bicyclic nucleic acid (BNA)
  source 1..25: mol_type = other RNA
ccaacatcaaggaagatggcatttc

SEQ ID NO: 2989 - RNA, 24 nt, synthetic construct
  misc_feature 1..24: note = Description of Artificial Sequence: Synthetic Antisense oligonucleotide
  modified_base 1..2: mod_base = OTHER; note = bicyclic nucleic acid (BNA)
  source 1..24: mol_type = other RNA
ccaacatcaaggaagatggcattt

SEQ ID NO: 2990 - RNA, 23 nt, synthetic construct
  misc_feature 1..23: note = Description of Artificial Sequence: Synthetic Antisense oligonucleotide
  modified_base 1..2: mod_base = OTHER; note = bicyclic nucleic acid (BNA)
  source 1..23: mol_type = other RNA
ccaacatcaaggaagatggcatt

SEQ ID NO: 2991 - RNA, 22 nt, synthetic construct
  misc_feature 1..22: note = Description of Artificial Sequence: Synthetic Antisense oligonucleotide
  modified_base 1..2: mod_base = OTHER; note = bicyclic nucleic acid (BNA)
  source 1..22: mol_type = other RNA
ccaacatcaaggaagatggcat

SEQ ID NO: 2992 - RNA, 21 nt, synthetic construct
  misc_feature 1..21: note = Description of Artificial Sequence: Synthetic Antisense oligonucleotide
  modified_base 1..2: mod_base = OTHER; note = bicyclic nucleic acid (BNA)
  source 1..21: mol_type = other RNA
ccaacatcaaggaagatggca

SEQ ID NO: 2993 - RNA, 20 nt, synthetic construct
  misc_feature 1..20: note = Description of Artificial Sequence: Synthetic Antisense oligonucleotide
  modified_base 1..2: mod_base = OTHER; note = bicyclic nucleic acid (BNA)
  source 1..20: mol_type = other RNA
ccaacatcaaggaagatggc

SEQ ID NO: 2994 - RNA, 19 nt, synthetic construct
  misc_feature 1..19: note = Description of Artificial Sequence: Synthetic Antisense oligonucleotide
  modified_base 1..2: mod_base = OTHER; note = bicyclic nucleic acid (BNA)
  source 1..19: mol_type = other RNA
ccaacatcaaggaagatgg

SEQ ID NO: 2995 - RNA, 18 nt, synthetic construct
  misc_feature 1..18: note = Description of Artificial Sequence: Synthetic Antisense oligonucleotide
  modified_base 1..2: mod_base = OTHER; note = bicyclic nucleic acid (BNA)
  source 1..18: mol_type = other RNA
ccaacatcaaggaagatg

SEQ ID NO: 2996 - RNA, 17 nt, synthetic construct
  misc_feature 1..17: note = Description of Artificial Sequence: Synthetic Antisense oligonucleotide
  modified_base 1..2: mod_base = OTHER; note = bicyclic nucleic acid (BNA)
  source 1..17: mol_type = other RNA
ccaacatcaaggaagat

SEQ ID NO: 2997 - RNA, 16 nt, synthetic construct
  misc_feature 1..16: note = Description of Artificial Sequence: Synthetic Antisense oligonucleotide
  modified_base 1..2: mod_base = OTHER; note = bicyclic nucleic acid (BNA)
  source 1..16: mol_type = other RNA
ccaacatcaaggaaga

SEQ ID NO: 2998 - RNA, 15 nt, synthetic construct
  misc_feature 1..15: note = Description of Artificial Sequence: Synthetic Antisense oligonucleotide
  modified_base 1..2: mod_base = OTHER; note = bicyclic nucleic acid (BNA)
  source 1..15: mol_type = other RNA
ccaacatcaaggaag

SEQ ID NO: 2999 - RNA, 27 nt, synthetic construct
  misc_feature 1..27: note = Description of Artificial Sequence: Synthetic Antisense oligonucleotide
  modified_base 1..2: mod_base = OTHER; note = bicyclic nucleic acid (BNA)
  source 1..27: mol_type = other RNA
caacatcaaggaagatggcatttctag

SEQ ID NO: 3000 - RNA, 26 nt, synthetic construct
  misc_feature 1..26: note = Description of Artificial Sequence: Synthetic Antisense oligonucleotide
  modified_base 1..2: mod_base = OTHER; note = bicyclic nucleic acid (BNA)
  source 1..26: mol_type = other RNA
caacatcaaggaagatggcatttcta

SEQ ID NO: 3001 - RNA, 25 nt, synthetic construct
  misc_feature 1..25: note = Description of Artificial Sequence: Synthetic Antisense oligonucleotide
  modified_base 1..2: mod_base = OTHER; note = bicyclic nucleic acid (BNA)
  source 1..25: mol_type = other RNA
caacatcaaggaagatggcatttct

SEQ ID NO: 3002 - RNA, 24 nt, synthetic construct
  misc_feature 1..24: note = Description of Artificial Sequence: Synthetic Antisense oligonucleotide
  modified_base 1..2: mod_base = OTHER; note = bicyclic nucleic acid (BNA)
  source 1..24: mol_type = other RNA
caacatcaaggaagatggcatttc

SEQ ID NO: 3003 - RNA, 23 nt, synthetic construct
  misc_feature 1..23: note = Description of Artificial Sequence: Synthetic Antisense oligonucleotide
  modified_base 1..2: mod_base = OTHER; note = bicyclic nucleic acid (BNA)
  source 1..23: mol_type = other RNA
caacatcaaggaagatggcattt

SEQ ID NO: 3004 - RNA, 22 nt, synthetic construct
  misc_feature 1..22: note = Description of Artificial Sequence: Synthetic Antisense oligonucleotide
  modified_base 1..2: mod_base = OTHER; note = bicyclic nucleic acid (BNA)
  source 1..22: mol_type = other RNA
caacatcaaggaagatggcatt

SEQ ID NO: 3005 - RNA, 21 nt, synthetic construct
  misc_feature 1..21: note = Description of Artificial Sequence: Synthetic Antisense oligonucleotide
  modified_base 1..2: mod_base = OTHER; note = bicyclic nucleic acid (BNA)
  source 1..21: mol_type = other RNA
caacatcaaggaagatggcat

SEQ ID NO: 3006 - RNA, 20 nt, synthetic construct
  misc_feature 1..20: note = Description of Artificial Sequence: Synthetic Antisense oligonucleotide
  modified_base 1..2: mod_base = OTHER; note = bicyclic nucleic acid (BNA)
  source 1..20: mol_type = other RNA
caacatcaaggaagatggca

SEQ ID NO: 3007 - RNA, 19 nt, synthetic construct
  misc_feature 1..19: note = Description of Artificial Sequence: Synthetic Antisense oligonucleotide
  modified_base 1..2: mod_base = OTHER; note = bicyclic nucleic acid (BNA)
  source 1..19: mol_type = other RNA
caacatcaaggaagatggc

SEQ ID NO: 3008 - RNA, 18 nt, synthetic construct
  misc_feature 1..18: note = Description of Artificial Sequence: Synthetic Antisense oligonucleotide
  modified_base 1..2: mod_base = OTHER; note = bicyclic nucleic acid (BNA)
  source 1..18: mol_type = other RNA
caacatcaaggaagatgg

SEQ ID NO: 3009 - RNA, 17 nt, synthetic construct
  misc_feature 1..17: note = Description of Artificial Sequence: Synthetic Antisense oligonucleotide
  modified_base 1..2: mod_base = OTHER; note = bicyclic nucleic acid (BNA)
  source 1..17: mol_type = other RNA
caacatcaaggaagatg

SEQ ID NO: 3010 - RNA, 16 nt, synthetic construct
  misc_feature 1..16: note = Description of Artificial Sequence: Synthetic Antisense oligonucleotide
  modified_base 1..2: mod_base = OTHER; note = bicyclic nucleic acid (BNA)
  source 1..16: mol_type = other RNA
caacatcaaggaagat

SEQ ID NO: 3011 - RNA, 15 nt, synthetic construct
  misc_feature 1..15: note = Description of Artificial Sequence: Synthetic Antisense oligonucleotide
  modified_base 1..2: mod_base = OTHER; note = bicyclic nucleic acid (BNA)
  source 1..15: mol_type = other RNA
caacatcaaggaaga

SEQ ID NO: 3012 - RNA, 14 nt, synthetic construct
  misc_feature 1..14: note = Description of Artificial Sequence: Synthetic Antisense oligonucleotide
  modified_base 1..2: mod_base = OTHER; note = bicyclic nucleic acid (BNA)
  source 1..14: mol_type = other RNA
caacatcaaggaag

SEQ ID NO: 3013 - RNA, 26 nt, synthetic construct
  misc_feature 1..26: note = Description of Artificial Sequence: Synthetic Antisense oligonucleotide
  modified_base 1..2: mod_base = OTHER; note = bicyclic nucleic acid (BNA)
  source 1..26: mol_type = other RNA
aacatcaaggaagatggcatttctag

SEQ ID NO: 3014 - RNA, 25 nt, synthetic construct
  misc_feature 1..25: note = Description of Artificial Sequence: Synthetic Antisense oligonucleotide
  modified_base 1..2: mod_base = OTHER; note = bicyclic nucleic acid (BNA)
  source 1..25: mol_type = other RNA
aacatcaaggaagatggcatttcta

SEQ ID NO: 3015 - RNA, 24 nt, synthetic construct
  misc_feature 1..24: note = Description of Artificial Sequence: Synthetic Antisense oligonucleotide
  modified_base 1..2: mod_base = OTHER; note = bicyclic nucleic acid (BNA)
  source 1..24: mol_type = other RNA
aacatcaaggaagatggcatttct

SEQ ID NO: 3016 - RNA, 23 nt, synthetic construct
  misc_feature 1..23: note = Description of Artificial Sequence: Synthetic Antisense oligonucleotide
  modified_base 1..2: mod_base = OTHER; note = bicyclic nucleic acid (BNA)
  source 1..23: mol_type = other RNA
aacatcaaggaagatggcatttc

SEQ ID NO: 3017 - RNA, 22 nt, synthetic construct
  misc_feature 1..22: note = Description of Artificial Sequence: Synthetic Antisense oligonucleotide
  modified_base 1..2: mod_base = OTHER; note = bicyclic nucleic acid (BNA)
  source 1..22: mol_type = other RNA
aacatcaaggaagatggcattt

SEQ ID NO: 3018 - RNA, 21 nt, synthetic construct
  misc_feature 1..21: note = Description of Artificial Sequence: Synthetic Antisense oligonucleotide
  modified_base 1..2: mod_base = OTHER; note = bicyclic nucleic acid (BNA)
  source 1..21: mol_type = other RNA
aacatcaaggaagatggcatt

SEQ ID NO: 3019 - RNA, 20 nt, synthetic construct
  misc_feature 1..20: note = Description of Artificial Sequence: Synthetic Antisense oligonucleotide
  modified_base 1..2: mod_base = OTHER; note = bicyclic nucleic acid (BNA)
  source 1..20: mol_type = other RNA
aacatcaaggaagatggcat

SEQ ID NO: 3020 - RNA, 19 nt, synthetic construct
  misc_feature 1..19: note = Description of Artificial Sequence: Synthetic Antisense oligonucleotide
  modified_base 1..2: mod_base = OTHER; note = bicyclic nucleic acid (BNA)
  source 1..19: mol_type = other RNA
aacatcaaggaagatggca

SEQ ID NO: 3021 - RNA, 18 nt, synthetic construct
  misc_feature 1..18: note = Description of Artificial Sequence: Synthetic Antisense oligonucleotide
  modified_base 1..2: mod_base = OTHER; note = bicyclic nucleic acid (BNA)
  source 1..18: mol_type = other RNA
aacatcaaggaagatggc

SEQ ID NO: 3022 - RNA, 17 nt, synthetic construct
  misc_feature 1..17: note = Description of Artificial Sequence: Synthetic Antisense oligonucleotide
  modified_base 1..2: mod_base = OTHER; note = bicyclic nucleic acid (BNA)
  source 1..17: mol_type = other RNA
aacatcaaggaagatgg

SEQ ID NO: 3023 - RNA, 16 nt, synthetic construct
  misc_feature 1..16: note = Description of Artificial Sequence: Synthetic Antisense oligonucleotide
  modified_base 1..2: mod_base = OTHER; note = bicyclic nucleic acid (BNA)
  source 1..16: mol_type = other RNA
aacatcaaggaagatg

SEQ ID NO: 3024 - RNA, 15 nt, synthetic construct
  misc_feature 1..15: note = Description of Artificial Sequence: Synthetic Antisense oligonucleotide
  modified_base 1..2: mod_base = OTHER; note = bicyclic nucleic acid (BNA)
  source 1..15: mol_type = other RNA
aacatcaaggaagat

SEQ ID NO: 3025 - RNA, 14 nt, synthetic construct
  misc_feature 1..14: note = Description of Artificial Sequence: Synthetic Antisense oligonucleotide
  modified_base 1..2: mod_base = OTHER; note = bicyclic nucleic acid (BNA)
  source 1..14: mol_type = other RNA
aacatcaaggaaga

SEQ ID NO: 3026 - RNA, 13 nt, synthetic construct
  misc_feature 1..13: note = Description of Artificial Sequence: Synthetic Antisense oligonucleotide
  modified_base 1..2: mod_base = OTHER; note = bicyclic nucleic acid (BNA)
  source 1..13: mol_type = other RNA
aacatcaaggaag

SEQ ID NO: 3027 - RNA, 25 nt, synthetic construct
  misc_feature 1..25: note = Description of Artificial Sequence: Synthetic Antisense oligonucleotide
  modified_base 1..2: mod_base = OTHER; note = bicyclic nucleic acid (BNA)
  source 1..25: mol_type = other RNA
acatcaaggaagatggcatttctag

SEQ ID NO: 3028 - RNA, 24 nt, synthetic construct
  misc_feature 1..24: note = Description of Artificial Sequence: Synthetic Antisense oligonucleotide
  modified_base 1..2: mod_base = OTHER; note = bicyclic nucleic acid (BNA)
  source 1..24: mol_type = other RNA
acatcaaggaagatggcatttcta

SEQ ID NO: 3029 - RNA, 23 nt, synthetic construct
  misc_feature 1..23: note = Description of Artificial Sequence: Synthetic Antisense oligonucleotide
  modified_base 1..2: mod_base = OTHER; note = bicyclic nucleic acid (BNA)
  source 1..23: mol_type = other RNA
acatcaaggaagatggcatttct

SEQ ID NO: 3030 - RNA, 22 nt, synthetic construct
  misc_feature 1..22: note = Description of Artificial Sequence: Synthetic Antisense oligonucleotide
  modified_base 1..2: mod_base = OTHER; note = bicyclic nucleic acid (BNA)
  source 1..22: mol_type = other RNA
acatcaaggaagatggcatttc

SEQ ID NO: 3031 - RNA, 21 nt, synthetic construct
  misc_feature 1..21: note = Description of Artificial Sequence: Synthetic Antisense oligonucleotide
  modified_base 1..2: mod_base = OTHER; note = bicyclic nucleic acid (BNA)
  source 1..21: mol_type = other RNA
acatcaaggaagatggcattt

SEQ ID NO: 3032 - RNA, 20 nt, synthetic construct
  misc_feature 1..20: note = Description of Artificial Sequence: Synthetic Antisense oligonucleotide
  modified_base 1..2: mod_base = OTHER; note = bicyclic nucleic acid (BNA)
  source 1..20: mol_type = other RNA
acatcaaggaagatggcatt

SEQ ID NO: 3033 - RNA, 19 nt, synthetic construct
  misc_feature 1..19: note = Description of Artificial Sequence: Synthetic Antisense oligonucleotide
  modified_base 1..2: mod_base = OTHER; note = bicyclic nucleic acid (BNA)
  source 1..19: mol_type = other RNA
acatcaaggaagatggcat

SEQ ID NO: 3034 - RNA, 18 nt, synthetic construct
  misc_feature 1..18: note = Description of Artificial Sequence: Synthetic Antisense oligonucleotide
  modified_base 1..2: mod_base = OTHER; note = bicyclic nucleic acid (BNA)
  source 1..18: mol_type = other RNA
acatcaaggaagatggca

SEQ ID NO: 3035 - RNA, 17 nt, synthetic construct
  misc_feature 1..17: note = Description of Artificial Sequence: Synthetic Antisense oligonucleotide
  modified_base 1..2: mod_base = OTHER; note = bicyclic nucleic acid (BNA)
  source 1..17: mol_type = other RNA
acatcaaggaagatggc

SEQ ID NO: 3036 - RNA, 16 nt, synthetic construct
  misc_feature 1..16: note = Description of Artificial Sequence: Synthetic Antisense oligonucleotide
  modified_base 1..2: mod_base = OTHER; note = bicyclic nucleic acid (BNA)
  source 1..16: mol_type = other RNA
acatcaaggaagatgg

SEQ ID NO: 3037 - RNA, 15 nt, synthetic construct
  misc_feature 1..15: note = Description of Artificial Sequence: Synthetic Antisense oligonucleotide
  modified_base 1..2: mod_base = OTHER; note = bicyclic nucleic acid (BNA)
  source 1..15: mol_type = other RNA
acatcaaggaagatg

SEQ ID NO: 3038 - RNA, 14 nt, synthetic construct
  misc_feature 1..14: note = Description of Artificial Sequence: Synthetic Antisense oligonucleotide
  modified_base 1..2: mod_base = OTHER; note = bicyclic nucleic acid (BNA)
  source 1..14: mol_type = other RNA
acatcaaggaagat

SEQ ID NO: 3039 - RNA, 13 nt, synthetic construct
  misc_feature 1..13: note = Description of Artificial Sequence: Synthetic Antisense oligonucleotide
  modified_base 1..2: mod_base = OTHER; note = bicyclic nucleic acid (BNA)
  source 1..13: mol_type = other RNA
acatcaaggaaga

SEQ ID NO: 3040 - RNA, 12 nt, synthetic construct
  misc_feature 1..12: note = Description of Artificial Sequence: Synthetic Antisense oligonucleotide
  modified_base 1..2: mod_base = OTHER; note = bicyclic nucleic acid (BNA)
  source 1..12: mol_type = other RNA
acatcaaggaag

SEQ ID NO: 3041 - RNA, 24 nt, synthetic construct
  misc_feature 1..24: note = Description of Artificial Sequence: Synthetic Antisense oligonucleotide
  modified_base 1..2: mod_base = OTHER; note = bicyclic nucleic acid (BNA)
  source 1..24: mol_type = other RNA
catcaaggaagatggcatttctag

SEQ ID NO: 3042 - RNA, 23 nt, synthetic construct
  misc_feature 1..23: note = Description of Artificial Sequence: Synthetic Antisense oligonucleotide
  modified_base 1..2: mod_base = OTHER; note = bicyclic nucleic acid (BNA)
  source 1..23: mol_type = other RNA
catcaaggaagatggcatttcta

SEQ ID NO: 3043 - RNA, 22 nt, synthetic construct
  misc_feature 1..22: note = Description of Artificial Sequence: Synthetic Antisense oligonucleotide
  modified_base 1..2: mod_base = OTHER; note = bicyclic nucleic acid (BNA)
  source 1..22: mol_type = other RNA
catcaaggaagatggcatttct

SEQ ID NO: 3044 - RNA, 21 nt, synthetic construct
  misc_feature 1..21: note = Description of Artificial Sequence: Synthetic Antisense oligonucleotide
  modified_base 1..2: mod_base = OTHER; note = bicyclic nucleic acid (BNA)
  source 1..21: mol_type = other RNA
catcaaggaagatggcatttc

SEQ ID NO: 3045 - RNA, 20 nt, synthetic construct
  misc_feature 1..20: note = Description of Artificial Sequence: Synthetic Antisense oligonucleotide
  modified_base 1..2: mod_base = OTHER; note = bicyclic nucleic acid (BNA)
  source 1..20: mol_type = other RNA
catcaaggaagatggcattt

SEQ ID NO: 3046 - RNA, 19 nt, synthetic construct
  misc_feature 1..19: note = Description of Artificial Sequence: Synthetic Antisense oligonucleotide
  modified_base 1..2: mod_base = OTHER; note = bicyclic nucleic acid (BNA)
  source 1..19: mol_type = other RNA
catcaaggaagatggcatt

SEQ ID NO: 3047 - RNA, 18 nt, synthetic construct
  misc_feature 1..18: note = Description of Artificial Sequence: Synthetic Antisense oligonucleotide
  modified_base 1..2: mod_base = OTHER; note = bicyclic nucleic acid (BNA)
  source 1..18: mol_type = other RNA
catcaaggaagatggcat

SEQ ID NO: 3048 - RNA, 17 nt, synthetic construct
  misc_feature 1..17: note = Description of Artificial Sequence: Synthetic Antisense oligonucleotide
  modified_base 1..2: mod_base = OTHER; note = bicyclic nucleic acid (BNA)
  source 1..17: mol_type = other RNA
catcaaggaagatggca

SEQ ID NO: 3049 - RNA, 16 nt, synthetic construct
  misc_feature 1..16: note = Description of Artificial Sequence: Synthetic Antisense oligonucleotide
  modified_base 1..2: mod_base = OTHER; note = bicyclic nucleic acid (BNA)
  source 1..16: mol_type = other RNA
catcaaggaagatggc

SEQ ID NO: 3050 - RNA, 15 nt, synthetic construct
  misc_feature 1..15: note = Description of Artificial Sequence: Synthetic Antisense oligonucleotide
  modified_base 1..2: mod_base = OTHER; note = bicyclic nucleic acid (BNA)
  source 1..15: mol_type = other RNA
catcaaggaagatgg

SEQ ID NO: 3051 - RNA, 14 nt, synthetic construct
  misc_feature 1..14: note = Description of Artificial Sequence: Synthetic Antisense oligonucleotide
  modified_base 1..2: mod_base = OTHER; note = bicyclic nucleic acid (BNA)
  source 1..14: mol_type = other RNA
catcaaggaagatg

SEQ ID NO: 3052 - RNA, 13 nt, synthetic construct
  misc_feature 1..13: note = Description of Artificial Sequence: Synthetic Antisense oligonucleotide
  modified_base 1..2: mod_base = OTHER; note = bicyclic nucleic acid (BNA)
  source 1..13: mol_type = other RNA
catcaaggaagat

SEQ ID NO: 3053 - RNA, 12 nt, synthetic construct
  misc_feature 1..12: note = Description of Artificial Sequence: Synthetic Antisense oligonucleotide
  modified_base 1..2: mod_base = OTHER; note = bicyclic nucleic acid (BNA)
  source 1..12: mol_type = other RNA
catcaaggaaga

SEQ ID NO: 3054 - RNA, 11 nt, synthetic construct
  misc_feature 1..11: note = Description of Artificial Sequence: Synthetic Antisense oligonucleotide
  modified_base 1..2: mod_base = OTHER; note = bicyclic nucleic acid (BNA)
  source 1..11: mol_type = other RNA
catcaaggaag

SEQ ID NO: 3055 - DNA, 23 bp, synthetic construct
  misc_feature 1..23: note = Description of Artificial Sequence: Synthetic Antisense oligonucleotide
  misc_feature 1..23: note = Original Sequence: atcaaggaagauggcauuucuag
  modified_base 1..2: mod_base = OTHER; note = bicyclic nucleic acid (BNA)
  source 1..23: mol_type = other DNA
  modified_base 12: mod_base = OTHER; note = Uracil
  modified_base 17: mod_base = OTHER; note = Uracil
  modified_base 18: mod_base = OTHER; note = Uracil
  modified_base 19: mod_base = OTHER; note = Uracil
  modified_base 21: mod_base = OTHER; note = Uracil
atcaaggaagatggcatttctag

SEQ ID NO: 3056 - DNA, 22 bp, synthetic construct
  misc_feature 1..22: note = Description of Artificial Sequence: Synthetic Antisense oligonucleotide
  misc_feature 1..22: note = Original Sequence: atcaaggaagauggcauuucua
  modified_base 1..2: mod_base = OTHER; note = bicyclic nucleic acid (BNA)
  source 1..22: mol_type = other DNA
  modified_base 12: mod_base = OTHER; note = Uracil
  modified_base 17: mod_base = OTHER; note = Uracil
  modified_base 18: mod_base = OTHER; note = Uracil
  modified_base 19: mod_base = OTHER; note = Uracil
  modified_base 21: mod_base = OTHER; note = Uracil
atcaaggaagatggcatttcta

SEQ ID NO: 3057 - DNA, 21 bp, synthetic construct
  misc_feature 1..21: note = Description of Artificial Sequence: Synthetic Antisense oligonucleotide
  misc_feature 1..21: note = Original Sequence: atcaaggaagauggcauuucu
  modified_base 1..2: mod_base = OTHER; note = bicyclic nucleic acid (BNA)
  source 1..21: mol_type = other DNA
  modified_base 12: mod_base = OTHER; note = Uracil
  modified_base 17: mod_base = OTHER; note = Uracil
  modified_base 18: mod_base = OTHER; note = Uracil
  modified_base 19: mod_base = OTHER; note = Uracil
  modified_base 21: mod_base = OTHER; note = Uracil
atcaaggaagatggcatttct

SEQ ID NO: 3058 - DNA, 20 bp, synthetic construct
  misc_feature 1..20: note = Description of Artificial Sequence: Synthetic Antisense oligonucleotide
  misc_feature 1..20: note = Original Sequence: atcaaggaagauggcauuuc
  modified_base 1..2: mod_base = OTHER; note = bicyclic nucleic acid (BNA)
  source 1..20: mol_type = other DNA
  modified_base 12: mod_base = OTHER; note = Uracil
  modified_base 17: mod_base = OTHER; note = Uracil
  modified_base 18: mod_base = OTHER; note = Uracil
  modified_base 19: mod_base = OTHER; note = Uracil
atcaaggaagatggcatttc

SEQ ID NO: 3059 - DNA, 19 bp, synthetic construct
  misc_feature 1..19: note = Description of Artificial Sequence: Synthetic Antisense oligonucleotide
  misc_feature 1..19: note = Original Sequence: atcaaggaagauggcauuu
  modified_base 1..2: mod_base = OTHER; note = bicyclic nucleic acid (BNA)
  source 1..19: mol_type = other DNA
  modified_base 12: mod_base = OTHER; note = Uracil
  modified_base 17: mod_base = OTHER; note = Uracil
  modified_base 18: mod_base = OTHER; note = Uracil
  modified_base 19: mod_base = OTHER; note = Uracil
atcaaggaagatggcattt

SEQ ID NO: 3060 - DNA, 18 bp, synthetic construct
  misc_feature 1..18: note = Description of Artificial Sequence: Synthetic Antisense oligonucleotide
  misc_feature 1..18: note = Original Sequence: atcaaggaagauggcauu
  modified_base 1..2: mod_base = OTHER; note = bicyclic nucleic acid (BNA)
  source 1..18: mol_type = other DNA
  modified_base 12: mod_base = OTHER; note = Uracil
  modified_base 17: mod_base = OTHER; note = Uracil
  modified_base 18: mod_base = OTHER; note = Uracil
atcaaggaagatggcatt

SEQ ID NO: 3061 - DNA, 17 bp, synthetic construct
  misc_feature 1..17: note = Description of Artificial Sequence: Synthetic Antisense oligonucleotide
  misc_feature 1..17: note = Original Sequence: atcaaggaagauggcau
  modified_base 1..2: mod_base = OTHER; note = bicyclic nucleic acid (BNA)
  source 1..17: mol_type = other DNA
  modified_base 12: mod_base = OTHER; note = Uracil
  modified_base 17: mod_base = OTHER; note = Uracil
atcaaggaagatggcat

SEQ ID NO: 3062 - DNA, 16 bp, synthetic construct
  misc_feature 1..16: note = Description of Artificial Sequence: Synthetic Antisense oligonucleotide
  misc_feature 1..16: note = Original Sequence: atcaaggaagauggca
  modified_base 1..2: mod_base = OTHER; note = bicyclic nucleic acid (BNA)
  source 1..16: mol_type = other DNA
  modified_base 12: mod_base = OTHER; note = Uracil
atcaaggaagatggca

SEQ ID NO: 3063 - DNA, 15 bp, synthetic construct
  misc_feature 1..15: note = Description of Artificial Sequence: Synthetic Antisense oligonucleotide
  misc_feature 1..15: note = Original Sequence: atcaaggaagauggc
  modified_base 1..2: mod_base = OTHER; note = bicyclic nucleic acid (BNA)
  source 1..15: mol_type = other DNA
  modified_base 12: mod_base = OTHER; note = Uracil
atcaaggaagatggc

SEQ ID NO: 3064 - DNA, 14 bp, synthetic construct
  misc_feature 1..14: note = Description of Artificial Sequence: Synthetic Antisense oligonucleotide
  misc_feature 1..14: note = Original Sequence: atcaaggaagaugg
  modified_base 1..2: mod_base = OTHER; note = bicyclic nucleic acid (BNA)
  source 1..14: mol_type = other DNA
  modified_base 12: mod_base = OTHER; note = Uracil
atcaaggaagatgg

SEQ ID NO: 3065 - DNA, 13 bp, synthetic construct
  misc_feature 1..13: note = Description of Artificial Sequence: Synthetic Antisense oligonucleotide
  misc_feature 1..13: note = Original Sequence: atcaaggaagaug
  modified_base 1..2: mod_base = OTHER; note = bicyclic nucleic acid (BNA)
  source 1..13: mol_type = other DNA
  modified_base 12: mod_base = OTHER; note = Uracil
atcaaggaagatg

SEQ ID NO: 3066 - DNA, 12 bp, synthetic construct
  misc_feature 1..12: note = Description of Artificial Sequence: Synthetic Antisense oligonucleotide
  misc_feature 1..12: note = Original Sequence: atcaaggaagau
  modified_base 1..2: mod_base = OTHER; note = bicyclic nucleic acid (BNA)
  source 1..12: mol_type = other DNA
  modified_base 12: mod_base = OTHER; note = Uracil
atcaaggaagat

SEQ ID NO: 3067 - DNA, 11 bp, synthetic construct
  misc_feature 1..11: note = Description of Artificial Sequence: Synthetic Antisense oligonucleotide
  modified_base 1..2: mod_base = OTHER; note = bicyclic nucleic acid (BNA)
  source 1..11: mol_type = other DNA
atcaaggaaga

SEQ ID NO: 3068 - DNA, 10 bp, synthetic construct
  misc_feature 1..10: note = Description of Artificial Sequence: Synthetic Antisense oligonucleotide
  modified_base 1..2: mod_base = OTHER; note = bicyclic nucleic acid (BNA)
  source 1..10: mol_type = other DNA
atcaaggaag

SEQ ID NO: 3069 - RNA, 18 nt, synthetic construct
  misc_feature 1..18: note = Description of Artificial Sequence: Synthetic Antisense oligonucleotide
  modified_base 17..18: mod_base = OTHER; note = bicyclic nucleic acid (BNA)
  source 1..18: mol_type = other RNA
ggtaagttctgtccaagc

SEQ ID NO: 3070 - RNA, 18 nt, synthetic construct
  misc_feature 1..18: note = Description of Artificial Sequence: Synthetic Antisense oligonucleotide
  modified_base 17..18: mod_base = OTHER; note = bicyclic nucleic acid (BNA)
  source 1..18: mol_type = other RNA
gtaagttctgtccaagcc

SEQ ID NO: 3071 - RNA, 18 nt, synthetic construct
  misc_feature 1..18: note = Description of Artificial Sequence: Synthetic Antisense oligonucleotide
  modified_base 17..18: mod_base = OTHER; note = bicyclic nucleic acid (BNA)
  source 1..18: mol_type = other RNA
agtcggtaagttctgtcc

SEQ ID NO: 3072 - RNA, 18 nt, synthetic construct
  misc_feature 1..18: note = Description of Artificial Sequence: Synthetic Antisense oligonucleotide
  modified_base 17..18: mod_base = OTHER; note = bicyclic nucleic acid (BNA)
  source 1..18: mol_type = other RNA
ctgtccaagcccggttga

SEQ ID NO: 3073 - RNA, 15 nt, synthetic construct
  misc_feature 1..15: note = Description of Artificial Sequence: Synthetic Antisense oligonucleotide
  modified_base 14..15: mod_base = OTHER; note = bicyclic nucleic acid (BNA)
  source 1..15: mol_type = other RNA
taagttctgtccaag

SEQ ID NO: 3074 - RNA, 20 nt, synthetic construct
  misc_feature 1..20: note = Description of Artificial Sequence: Synthetic Antisense oligonucleotide
  modified_base 19..20: mod_base = OTHER; note = bicyclic nucleic acid (BNA)
  source 1..20: mol_type = other RNA
ttctgtccaagcccggttga

SEQ ID NO: 3075 - DNA, 19 bp, synthetic construct
  misc_feature 1..19: note = Description of Artificial Sequence: Synthetic Antisense oligonucleotide
  misc_feature 1..19: note = Original Sequence: uucuguccaagcccggutg
  modified_base 18..19: mod_base = OTHER; note = bicyclic nucleic acid (BNA)
  source 1..19: mol_type = other DNA
  modified_base 1: mod_base = OTHER; note = Uracil
  modified_base 2: mod_base = OTHER; note = Uracil
  modified_base 4: mod_base = OTHER; note = Uracil
  modified_base 6: mod_base = OTHER; note = Uracil
  modified_base 17: mod_base = OTHER; note = Uracil
ttctgtccaagcccggttg

SEQ ID NO: 3076 - DNA, 18 bp, synthetic construct
  misc_feature 1..18: note = Description of Artificial Sequence: Synthetic Antisense oligonucleotide
  misc_feature 1..18: note = Original Sequence: uucuguccaagcccggtt
  modified_base 17..18: mod_base = OTHER; note = bicyclic nucleic acid (BNA)
  source 1..18: mol_type = other DNA
  modified_base 1: mod_base = OTHER; note = Uracil
  modified_base 2: mod_base = OTHER; note = Uracil
  modified_base 4: mod_base = OTHER; note = Uracil
  modified_base 6: mod_base = OTHER; note = Uracil
ttctgtccaagcccggtt

SEQ ID NO: 3077 - DNA, 17 bp, synthetic construct
  misc_feature 1..17: note = Description of Artificial Sequence: Synthetic Antisense oligonucleotide
  misc_feature 1..17: note = Original Sequence: uucuguccaagcccggt
  modified_base 16..17: mod_base = OTHER; note = bicyclic nucleic acid (BNA)
  source 1..17: mol_type = other DNA
  modified_base 1: mod_base = OTHER; note = Uracil
  modified_base 2: mod_base = OTHER; note = Uracil
  modified_base 4: mod_base = OTHER; note = Uracil
  modified_base 6: mod_base = OTHER; note = Uracil
ttctgtccaagcccggt

SEQ ID NO: 3078 - RNA, 16 nt, synthetic construct
  misc_feature 1..16: note = Description of Artificial Sequence: Synthetic Antisense oligonucleotide
  modified_base 15..16: mod_base = OTHER; note = bicyclic nucleic acid (BNA)
  source 1..16: mol_type = other RNA
ttctgtccaagcccgg

SEQ ID NO: 3079 - RNA, 15 nt, synthetic construct
  misc_feature 1..15: note = Description of Artificial Sequence: Synthetic Antisense oligonucleotide
  modified_base 14..15: mod_base = OTHER; note = bicyclic nucleic acid (BNA)
  source 1..15: mol_type = other RNA
ttctgtccaagcccg

SEQ ID NO: 3080 - RNA, 14 nt, synthetic construct
  misc_feature 1..14: note = Description of Artificial Sequence: Synthetic Antisense oligonucleotide
  modified_base 13..14: mod_base = OTHER; note = bicyclic nucleic acid (BNA)
  source 1..14: mol_type = other RNA
ttctgtccaagccc

SEQ ID NO: 3081 - RNA, 13 nt, synthetic construct
  misc_feature 1..13: note = Description of Artificial Sequence: Synthetic Antisense oligonucleotide
  modified_base 12..13: mod_base = OTHER; note = bicyclic nucleic acid (BNA)
  source 1..13: mol_type = other RNA
ttctgtccaagcc

SEQ ID NO: 3082 - RNA, 12 nt, synthetic construct
  misc_feature 1..12: note = Description of Artificial Sequence: Synthetic Antisense oligonucleotide
  modified_base 11..12: mod_base = OTHER; note = bicyclic nucleic acid (BNA)
  source 1..12: mol_type = other RNA
ttctgtccaagc

SEQ ID NO: 3083 - RNA, 11 nt, synthetic construct
  misc_feature 1..11: note = Description of Artificial Sequence: Synthetic Antisense oligonucleotide
  modified_base 10..11: mod_base = OTHER; note = bicyclic nucleic acid (BNA)
  source 1..11: mol_type = other RNA
ttctgtccaag

SEQ ID NO: 3084 - RNA, 10 nt, synthetic construct
  misc_feature 1..10: note = Description of Artificial Sequence: Synthetic Antisense oligonucleotide
  modified_base 9..10: mod_base = OTHER; note = bicyclic nucleic acid (BNA)
  source 1..10: mol_type = other RNA
ttctgtccaa

SEQ ID NO: 3085-3086 - skipped (2 entries)

SEQ ID NO: 3087 - RNA, 19 nt, synthetic construct
  misc_feature 1..19: note = Description of Artificial Sequence: Synthetic Antisense oligonucleotide
  modified_base 18..19: mod_base = OTHER; note = bicyclic nucleic acid (BNA)
  source 1..19: mol_type = other RNA
tctgtccaagcccggttga

SEQ ID NO: 3088 - DNA, 18 bp, synthetic construct
  misc_feature 1..18: note = Description of Artificial Sequence: Synthetic Antisense oligonucleotide
  misc_feature 1..18: note = Original Sequence: ucuguccaagcccggutg
  modified_base 17..18: mod_base = OTHER; note = bicyclic nucleic acid (BNA)
  source 1..18: mol_type = other DNA
  modified_base 1: mod_base = OTHER; note = Uracil
  modified_base 3: mod_base = OTHER; note = Uracil
  modified_base 5: mod_base = OTHER; note = Uracil
  modified_base 16: mod_base = OTHER; note = Uracil
tctgtccaagcccggttg

SEQ ID NO: 3089 - DNA, 17 bp, synthetic construct
  misc_feature 1..17: note = Description of Artificial Sequence: Synthetic Antisense oligonucleotide
  misc_feature 1..17: note = Original Sequence: ucuguccaagcccggtt
  modified_base 16..17: mod_base = OTHER; note = bicyclic nucleic acid (BNA)
  source 1..17: mol_type = other DNA
  modified_base 1: mod_base = OTHER; note = Uracil
  modified_base 3: mod_base = OTHER; note = Uracil
  modified_base 5: mod_base = OTHER; note = Uracil
tctgtccaagcccggtt

SEQ ID NO: 3090 - DNA, 16 bp, synthetic construct
  misc_feature 1..16: note = Description of Artificial Sequence: Synthetic Antisense oligonucleotide
  misc_feature 1..16: note = Original Sequence: ucuguccaagcccggt
  modified_base 15..16: mod_base = OTHER; note = bicyclic nucleic acid (BNA)
  source 1..16: mol_type = other DNA
  modified_base 1: mod_base = OTHER; note = Uracil
  modified_base 3: mod_base = OTHER; note = Uracil
  modified_base 5: mod_base = OTHER; note = Uracil
tctgtccaagcccggt

SEQ ID NO: 3091 - RNA, 15 nt, synthetic construct
  misc_feature 1..15: note = Description of Artificial Sequence: Synthetic Antisense oligonucleotide
  modified_base 14..15: mod_base = OTHER; note = bicyclic nucleic acid (BNA)
  source 1..15: mol_type = other RNA
tctgtccaagcccgg

SEQ ID NO: 3092 - RNA, 14 nt, synthetic construct
  misc_feature 1..14: note = Description of Artificial Sequence: Synthetic Antisense oligonucleotide
  modified_base 13..14: mod_base = OTHER; note = bicyclic nucleic acid (BNA)
  source 1..14: mol_type = other RNA
tctgtccaagcccg

SEQ ID NO: 3093 - RNA, 13 nt, synthetic construct
  misc_feature 1..13: note = Description of Artificial Sequence: Synthetic Antisense oligonucleotide
  modified_base 12..13: mod_base = OTHER; note = bicyclic nucleic acid (BNA)
  source 1..13: mol_type = other RNA
tctgtccaagccc

SEQ ID NO: 3094 - RNA, 12 nt, synthetic construct
  misc_feature 1..12: note = Description of Artificial Sequence: Synthetic Antisense oligonucleotide
  modified_base 11..12: mod_base = OTHER; note = bicyclic nucleic acid (BNA)
  source 1..12: mol_type = other RNA
tctgtccaagcc

SEQ ID NO: 3095 - RNA, 11 nt, synthetic construct
  misc_feature 1..11: note = Description of Artificial Sequence: Synthetic Antisense oligonucleotide
  modified_base 10..11: mod_base = OTHER; note = bicyclic nucleic acid (BNA)
  source 1..11: mol_type = other RNA
tctgtccaagc

SEQ ID NO: 3096 - RNA, 10 nt, synthetic construct
  misc_feature 1..10: note = Description of Artificial Sequence: Synthetic Antisense oligonucleotide
  modified_base 9..10: mod_base = OTHER; note = bicyclic nucleic acid (BNA)
  source 1..10: mol_type = other RNA
tctgtccaag

SEQ ID NO: 3097-3098 - skipped (2 entries)

SEQ ID NO: 3099 - DNA, 17 bp, synthetic construct
  misc_feature 1..17: note = Description of Artificial Sequence: Synthetic Antisense oligonucleotide
  misc_feature 1..17: note = Original Sequence: cuguccaagcccggutg
  modified_base 16..17: mod_base = OTHER; note = bicyclic nucleic acid (BNA)
  source 1..17: mol_type = other DNA
  modified_base 2: mod_base = OTHER; note = Uracil
  modified_base 4: mod_base = OTHER; note = Uracil
  modified_base 15: mod_base = OTHER; note = Uracil
ctgtccaagcccggttg

SEQ ID NO: 3100 - DNA, 16 bp, synthetic construct
  misc_feature 1..16: note = Description of Artificial Sequence: Synthetic Antisense oligonucleotide
  misc_feature 1..16: note = Original Sequence: cuguccaagcccggtt
  modified_base 15..16: mod_base = OTHER; note = bicyclic nucleic acid (BNA)
  source 1..16: mol_type = other DNA
  modified_base 2: mod_base = OTHER; note = Uracil
  modified_base 4: mod_base = OTHER; note = Uracil
ctgtccaagcccggtt

SEQ ID NO: 3101 - DNA, 15 bp, synthetic construct
  misc_feature 1..15: note = Description of Artificial Sequence: Synthetic Antisense oligonucleotide
  misc_feature 1..15: note = Original Sequence: cuguccaagcccggt
  modified_base 14..15: mod_base = OTHER; note = bicyclic nucleic acid (BNA)
  source 1..15: mol_type = other DNA
  modified_base 2: mod_base = OTHER; note = Uracil
  modified_base 4: mod_base = OTHER; note = Uracil
ctgtccaagcccggt

SEQ ID NO: 3102 - RNA, 14 nt, synthetic construct
  misc_feature 1..14: note = Description of Artificial Sequence: Synthetic Antisense oligonucleotide
  modified_base 13..14: mod_base = OTHER; note = bicyclic nucleic acid (BNA)
  source 1..14: mol_type = other RNA
ctgtccaagcccgg

SEQ ID NO: 3103 - RNA, 13 nt, synthetic construct
  misc_feature 1..13: note = Description of Artificial Sequence: Synthetic Antisense oligonucleotide
  modified_base 12..13: mod_base = OTHER; note = bicyclic nucleic acid (BNA)
  source 1..13: mol_type = other RNA
ctgtccaagcccg

SEQ ID NO: 3104 - RNA, 12 nt, synthetic construct
  misc_feature 1..12: note = Description of Artificial Sequence: Synthetic Antisense oligonucleotide
  modified_base 11..12: mod_base = OTHER; note = bicyclic nucleic acid (BNA)
  source 1..12: mol_type = other RNA
ctgtccaagccc

SEQ ID NO: 3105 - RNA, 11 nt, synthetic construct
  misc_feature 1..11: note = Description of Artificial Sequence: Synthetic Antisense oligonucleotide
  modified_base 10..11: mod_base = OTHER; note = bicyclic nucleic acid (BNA)
  source 1..11: mol_type = other RNA
ctgtccaagcc

SEQ ID NO: 3106 - RNA, 10 nt, synthetic construct
  misc_feature 1..10: note = Description of Artificial Sequence: Synthetic Antisense oligonucleotide
  modified_base 9..10: mod_base = OTHER; note = bicyclic nucleic acid (BNA)
  source 1..10: mol_type = other RNA
ctgtccaagc

SEQ ID NO: 3107-3108 - skipped (2 entries)

SEQ ID NO: 3109 - DNA, 20 bp, synthetic construct
  misc_feature 1..20: note = Description of Artificial Sequence: Synthetic Antisense oligonucleotide
  misc_feature 1..20: note = Original Sequence: guucuguccaagcccggutg
  modified_base 19..20: mod_base = OTHER; note = bicyclic nucleic acid (BNA)
  source 1..20: mol_type = other DNA
  modified_base 2: mod_base = OTHER; note = Uracil
  modified_base 3: mod_base = OTHER; note = Uracil
  modified_base 5: mod_base = OTHER; note = Uracil
  modified_base 7: mod_base = OTHER; note = Uracil
  modified_base 18: mod_base = OTHER; note = Uracil
gttctgtccaagcccggttg

SEQ ID NO: 3110 - DNA, 19 bp, synthetic construct
  misc_feature 1..19: note = Description of Artificial Sequence: Synthetic Antisense oligonucleotide
  misc_feature 1..19: note = Original Sequence: guucuguccaagcccggtt
  modified_base 18..19: mod_base = OTHER; note = bicyclic nucleic acid (BNA)
  source 1..19: mol_type = other DNA
  modified_base 2: mod_base = OTHER; note = Uracil
  modified_base 3: mod_base = OTHER; note = Uracil
  modified_base 5: mod_base = OTHER; note = Uracil
  modified_base 7: mod_base = OTHER; note = Uracil
gttctgtccaagcccggtt

SEQ ID NO: 3111 - DNA, 18 bp, synthetic construct
  misc_feature 1..18: note = Description of Artificial Sequence: Synthetic Antisense oligonucleotide
  misc_feature 1..18: note = Original Sequence: guucuguccaagcccggt
  modified_base 17..18: mod_base = OTHER; note = bicyclic nucleic acid (BNA)
  source 1..18: mol_type = other DNA
  modified_base 2: mod_base = OTHER; note = Uracil
  modified_base 3: mod_base = OTHER; note = Uracil
  modified_base 5: mod_base = OTHER; note = Uracil
  modified_base 7: mod_base = OTHER; note = Uracil
gttctgtccaagcccggt

SEQ ID NO: 3112 - RNA, 17 nt, synthetic construct
  misc_feature 1..17: note = Description of Artificial Sequence: Synthetic Antisense oligonucleotide
  modified_base 16..17: mod_base = OTHER; note = bicyclic nucleic acid (BNA)
  source 1..17: mol_type = other RNA
gttctgtccaagcccgg

SEQ ID NO: 3113 - RNA, 16 nt, synthetic construct
  misc_feature 1..16: note = Description of Artificial Sequence: Synthetic Antisense oligonucleotide
  modified_base 15..16: mod_base = OTHER; note = bicyclic nucleic acid (BNA)
  source 1..16: mol_type = other RNA
gttctgtccaagcccg

SEQ ID NO: 3114 - RNA, 15 nt, synthetic construct
  misc_feature 1..15: note = Description of Artificial Sequence: Synthetic Antisense oligonucleotide
  modified_base 14..15: mod_base = OTHER; note = bicyclic nucleic acid (BNA)
  source 1..15: mol_type = other RNA
gttctgtccaagccc

SEQ ID NO: 3115 - RNA, 14 nt, synthetic construct
  misc_feature 1..14: note = Description of Artificial Sequence: Synthetic Antisense oligonucleotide
  modified_base 13..14: mod_base = OTHER; note = bicyclic nucleic acid (BNA)
  source 1..14: mol_type = other RNA
gttctgtccaagcc

SEQ ID NO: 3116 - RNA, 13 nt, synthetic construct
  misc_feature 1..13: note = Description of Artificial Sequence: Synthetic Antisense oligonucleotide
  modified_base 12..13: mod_base = OTHER; note = bicyclic nucleic acid (BNA)
  source 1..13: mol_type = other RNA
gttctgtccaagc

SEQ ID NO: 3117 - RNA, 12 nt, synthetic construct
  misc_feature 1..12: note = Description of Artificial Sequence: Synthetic Antisense oligonucleotide
  modified_base 11..12: mod_base = OTHER; note = bicyclic nucleic acid (BNA)
  source 1..12: mol_type = other RNA
gttctgtccaag

SEQ ID NO: 3118 - RNA, 11 nt, synthetic construct
  misc_feature 1..11: note = Description of Artificial Sequence: Synthetic Antisense oligonucleotide
  modified_base 10..11: mod_base = OTHER; note = bicyclic nucleic acid (BNA)
  source 1..11: mol_type = other RNA
gttctgtccaa

SEQ ID NO: 3119 - RNA, 10 nt, synthetic construct
  misc_feature 1..10: note = Description of Artificial Sequence: Synthetic Antisense oligonucleotide
  modified_base 9..10: mod_base = OTHER; note = bicyclic nucleic acid (BNA)
  source 1..10: mol_type = other RNA
gttctgtcca

SEQ ID NO: 3120-3121 - skipped (2 entries)

SEQ ID NO: 3122 - DNA, 20 bp, synthetic construct
  misc_feature 1..20: note = Description of Artificial Sequence: Synthetic Antisense oligonucleotide
  misc_feature 1..20: note = Original Sequence: aguucuguccaagcccggtt
  modified_base 19..20: mod_base = OTHER; note = bicyclic nucleic acid (BNA)
  source 1..20: mol_type = other DNA
  modified_base 3: mod_base = OTHER; note = Uracil
  modified_base 4: mod_base = OTHER; note = Uracil
  modified_base 6: mod_base = OTHER; note = Uracil
  modified_base 8: mod_base = OTHER; note = Uracil
agttctgtccaagcccggtt

SEQ ID NO: 3123 - DNA, 19 bp, synthetic construct
  misc_feature 1..19: note = Description of Artificial Sequence: Synthetic Antisense oligonucleotide
  misc_feature 1..19: note = Original Sequence: aguucuguccaagcccggt
  modified_base 18..19: mod_base = OTHER; note = bicyclic nucleic acid (BNA)
  source 1..19: mol_type = other DNA
  modified_base 3: mod_base = OTHER; note = Uracil
  modified_base 4: mod_base = OTHER; note = Uracil
  modified_base 6: mod_base = OTHER; note = Uracil
  modified_base 8: mod_base = OTHER; note = Uracil
agttctgtccaagcccggt

SEQ ID NO: 3124 - RNA, 18 nt, synthetic construct
  misc_feature 1..18: note = Description of Artificial Sequence: Synthetic Antisense oligonucleotide
  modified_base 17..18: mod_base = OTHER; note = bicyclic nucleic acid (BNA)
  source 1..18: mol_type = other RNA
agttctgtccaagcccgg

SEQ ID NO: 3125 - RNA, 17 nt, synthetic construct
  misc_feature 1..17: note = Description of Artificial Sequence: Synthetic Antisense oligonucleotide
  modified_base 16..17: mod_base = OTHER; note = bicyclic nucleic acid (BNA)
  source 1..17: mol_type = other RNA
agttctgtccaagcccg

SEQ ID NO: 3126 - RNA, 16 nt, synthetic construct
  misc_feature 1..16: note = Description of Artificial Sequence: Synthetic Antisense oligonucleotide
  modified_base 15..16: mod_base = OTHER; note = bicyclic nucleic acid (BNA)
  source 1..16: mol_type = other RNA
agttctgtccaagccc

SEQ ID NO: 3127 - RNA, 15 nt, synthetic construct
  misc_feature 1..15: note = Description of Artificial Sequence: Synthetic Antisense oligonucleotide
  modified_base 14..15: mod_base = OTHER; note = bicyclic nucleic acid (BNA)
  source 1..15: mol_type = other RNA
agttctgtccaagcc

SEQ ID NO: 3128 - RNA, 14 nt, synthetic construct
  misc_feature 1..14: note = Description of Artificial Sequence: Synthetic Antisense oligonucleotide
  modified_base 13..14: mod_base = OTHER; note = bicyclic nucleic acid (BNA)
  source 1..14: mol_type = other RNA
agttctgtccaagc

SEQ ID NO: 3129 - RNA, 13 nt, synthetic construct
  misc_feature 1..13: note = Description of Artificial Sequence: Synthetic Antisense oligonucleotide
  modified_base 12..13: mod_base = OTHER; note = bicyclic nucleic acid (BNA)
  source 1..13: mol_type = other RNA
agttctgtccaag

SEQ ID NO: 3130 - RNA, 12 nt, synthetic construct
  misc_feature 1..12: note = Description of Artificial Sequence: Synthetic Antisense oligonucleotide
  modified_base 11..12: mod_base = OTHER; note = bicyclic nucleic acid (BNA)
  source 1..12: mol_type = other RNA
agttctgtccaa

SEQ ID NO: 3131 - RNA, 11 nt, synthetic construct
  misc_feature 1..11: note = Description of Artificial Sequence: Synthetic Antisense oligonucleotide
  modified_base 10..11: mod_base = OTHER; note = bicyclic nucleic acid (BNA)
  source 1..11: mol_type = other RNA
agttctgtcca

SEQ ID NO: 3132 - RNA, 10 nt, synthetic construct
  misc_feature 1..10: note = Description of Artificial Sequence: Synthetic Antisense oligonucleotide
  modified_base 9..10: mod_base = OTHER; note = bicyclic nucleic acid (BNA)
  source 1..10: mol_type = other RNA
agttctgtcc

SEQ ID NO: 3133-3134 - skipped (2 entries)

SEQ ID NO: 3135 - DNA, 20 bp, synthetic construct
  misc_feature 1..20: note = Description of Artificial Sequence: Synthetic Antisense oligonucleotide
  misc_feature 1..20: note = Original Sequence: aaguucuguccaagcccggt
  modified_base 19..20: mod_base = OTHER; note = bicyclic nucleic acid (BNA)
  source 1..20: mol_type = other DNA
  modified_base 4: mod_base = OTHER; note = Uracil
  modified_base 5: mod_base = OTHER; note = Uracil
  modified_base 7: mod_base = OTHER; note = Uracil
  modified_base 9: mod_base = OTHER; note = Uracil
aagttctgtccaagcccggt

SEQ ID NO: 3136 - RNA, 19 nt, synthetic construct
  misc_feature 1..19: note = Description of Artificial Sequence: Synthetic Antisense oligonucleotide
  modified_base 18..19: mod_base = OTHER; note = bicyclic nucleic acid (BNA)
  source 1..19: mol_type = other RNA
aagttctgtccaagcccgg

SEQ ID NO: 3137 - RNA, 18 nt, synthetic construct
  misc_feature 1..18: note = Description of Artificial Sequence: Synthetic Antisense oligonucleotide
  modified_base 17..18: mod_base = OTHER; note = bicyclic nucleic acid (BNA)
  source 1..18: mol_type = other RNA
aagttctgtccaagcccg

SEQ ID NO: 3138 - RNA, 17 nt, synthetic construct
  misc_feature 1..17: note = Description of Artificial Sequence: Synthetic Antisense oligonucleotide
  modified_base 16..17: mod_base = OTHER; note = bicyclic nucleic acid (BNA)
  source 1..17: mol_type = other RNA
aagttctgtccaagccc

SEQ ID NO: 3139 - RNA, 16 nt, synthetic construct
  misc_feature 1..16: note = Description of Artificial Sequence: Synthetic Antisense oligonucleotide
  modified_base 15..16: mod_base = OTHER; note = bicyclic nucleic acid (BNA)
  source 1..16: mol_type = other RNA
aagttctgtccaagcc

SEQ ID NO: 3140 - RNA, 15 nt, synthetic construct
  misc_feature 1..15: note = Description of Artificial Sequence: Synthetic Antisense oligonucleotide
  modified_base 14..15: mod_base = OTHER; note = bicyclic nucleic acid (BNA)
  source 1..15: mol_type = other RNA
aagttctgtccaagc

SEQ ID NO: 3141 - RNA, 14 nt, synthetic construct
  misc_feature 1..14: note = Description of Artificial Sequence: Synthetic Antisense oligonucleotide
  modified_base 13..14: mod_base = OTHER; note = bicyclic nucleic acid (BNA)
  source 1..14: mol_type = other RNA
aagttctgtccaag

SEQ ID NO: 3142 - RNA, 13 nt, synthetic construct
  misc_feature 1..13: note = Description of Artificial Sequence: Synthetic Antisense oligonucleotide
  modified_base 12..13: mod_base = OTHER; note = bicyclic nucleic acid (BNA)
  source 1..13: mol_type = other RNA
aagttctgtccaa

SEQ ID NO: 3143 - RNA, 12 nt, synthetic construct
  misc_feature 1..12: note = Description of Artificial Sequence: Synthetic Antisense oligonucleotide
  modified_base 11..12: mod_base = OTHER; note = bicyclic nucleic acid (BNA)
  source 1..12: mol_type = other RNA
aagttctgtcca

SEQ ID NO: 3144 - RNA, 11 nt, synthetic construct
  misc_feature 1..11: note = Description of Artificial Sequence: Synthetic Antisense oligonucleotide
  modified_base 10..11: mod_base = OTHER; note = bicyclic nucleic acid (BNA)
  source 1..11: mol_type = other RNA
aagttctgtcc

SEQ ID NO: 3145 - DNA, 10 bp, synthetic construct
  misc_feature 1..10: note = Description of Artificial Sequence: Synthetic Antisense oligonucleotide
  misc_feature 1..10: note = Original Sequence: aaguucugtc
  modified_base 9..10: mod_base = OTHER; note = bicyclic nucleic acid (BNA)
  source 1..10: mol_type = other DNA
  modified_base 4: mod_base = OTHER; note = Uracil
  modified_base 5: mod_base = OTHER; note = Uracil
  modified_base 7: mod_base = OTHER; note = Uracil
aagttctgtc

SEQ ID NO: 3146-3147 - skipped (2 entries)

SEQ ID NO: 3148 - RNA, 20 nt, synthetic construct
  misc_feature 1..20: note = Description of Artificial Sequence: Synthetic Antisense oligonucleotide
  modified_base 19..20: mod_base = OTHER; note = bicyclic nucleic acid (BNA)
  source 1..20: mol_type = other RNA
taagttctgtccaagcccgg

SEQ ID NO: 3149 - RNA, 19 nt, synthetic construct
  misc_feature 1..19: note = Description of Artificial Sequence: Synthetic Antisense oligonucleotide
  modified_base 18..19: mod_base = OTHER; note = bicyclic nucleic acid (BNA)
  source 1..19: mol_type = other RNA
taagttctgtccaagcccg

SEQ ID NO: 3150 - RNA, 18 nt, synthetic construct
  misc_feature 1..18: note = Description of Artificial Sequence: Synthetic Antisense oligonucleotide
  modified_base 17..18: mod_base = OTHER; note = bicyclic nucleic acid (BNA)
  source 1..18: mol_type = other RNA
taagttctgtccaagccc

SEQ ID NO: 3151 - RNA, 17 nt, synthetic construct
  misc_feature 1..17: note = Description of Artificial Sequence: Synthetic Antisense oligonucleotide
  modified_base 16..17: mod_base = OTHER; note = bicyclic nucleic acid (BNA)
  source 1..17: mol_type = other RNA
taagttctgtccaagcc

SEQ ID NO: 3152 - RNA, 16 nt, synthetic construct
  misc_feature 1..16: note = Description of Artificial Sequence: Synthetic Antisense oligonucleotide
  modified_base 15..16: mod_base = OTHER; note = bicyclic nucleic acid (BNA)
  source 1..16: mol_type = other RNA
taagttctgtccaagc

SEQ ID NO: 3153 - RNA, 14 nt, synthetic construct
  misc_feature 1..14: note = Description of Artificial Sequence: Synthetic Antisense oligonucleotide
  modified_base 13..14: mod_base = OTHER; note = bicyclic nucleic acid (BNA)
  source 1..14: mol_type = other RNA
taagttctgtccaa

SEQ ID NO: 3154 - RNA, 13 nt, synthetic construct
  misc_feature 1..13: note = Description of Artificial Sequence: Synthetic Antisense oligonucleotide
  modified_base 12..13: mod_base = OTHER; note = bicyclic nucleic acid (BNA)
  source 1..13: mol_type = other RNA
taagttctgtcca

SEQ ID NO: 3155 - RNA, 12 nt, synthetic construct
  misc_feature 1..12: note = Description of Artificial Sequence: Synthetic Antisense oligonucleotide
  modified_base 11..12: mod_base = OTHER; note = bicyclic nucleic acid (BNA)
  source 1..12: mol_type = other RNA
taagttctgtcc

SEQ ID NO: 3156 - DNA, 11 bp, synthetic construct
  misc_feature 1..11: note = Description of Artificial Sequence: Synthetic Antisense oligonucleotide
  misc_feature 1..11: note = Original Sequence: uaaguucugtc
  modified_base 10..11: mod_base = OTHER; note = bicyclic nucleic acid (BNA)
  source 1..11: mol_type = other DNA
  modified_base 1: mod_base = OTHER; note = Uracil
  modified_base 5: mod_base = OTHER; note = Uracil
  modified_base 6: mod_base = OTHER; note = Uracil
  modified_base 8: mod_base = OTHER; note = Uracil
taagttctgtc

SEQ ID NO: 3157 - DNA, 10 bp, synthetic construct
  misc_feature 1..10: note = Description of Artificial Sequence: Synthetic Antisense oligonucleotide
  misc_feature 1..10: note = Original Sequence: uaaguucugt
  modified_base 9..10: mod_base = OTHER; note = bicyclic nucleic acid (BNA)
  source 1..10: mol_type = other DNA
  modified_base 1: mod_base = OTHER; note = Uracil
  modified_base 5: mod_base = OTHER; note = Uracil
  modified_base 6: mod_base = OTHER; note = Uracil
  modified_base 8: mod_base = OTHER; note = Uracil
taagttctgt

SEQ ID NO: 3158-3159 - skipped (2 entries)

SEQ ID NO: 3160 - RNA, 20 nt, synthetic construct
  misc_feature 1..20: note = Description of Artificial Sequence: Synthetic Antisense oligonucleotide
  modified_base 19..20: mod_base = OTHER; note = bicyclic nucleic acid (BNA)
  source 1..20: mol_type = other RNA
gtaagttctgtccaagcccg

SEQ ID NO: 3161 - RNA, 19 nt, synthetic construct
  misc_feature 1..19: note = Description of Artificial Sequence: Synthetic Antisense oligonucleotide
  modified_base 18..19: mod_base = OTHER; note = bicyclic nucleic acid (BNA)
  source 1..19: mol_type = other RNA
gtaagttctgtccaagccc

SEQ ID NO: 3162 - RNA, 17 nt, synthetic construct
  misc_feature 1..17: note = Description of Artificial Sequence: Synthetic Antisense oligonucleotide
  modified_base 16..17: mod_base = OTHER; note = bicyclic nucleic acid (BNA)
  source 1..17: mol_type = other RNA
gtaagttctgtccaagc

SEQ ID NO: 3163 - RNA, 16 nt, synthetic construct
  misc_feature 1..16: note = Description of Artificial Sequence: Synthetic Antisense oligonucleotide
  modified_base 15..16: mod_base = OTHER; note = bicyclic nucleic acid (BNA)
  source 1..16: mol_type = other RNA
gtaagttctgtccaag

SEQ ID NO: 3164 - RNA, 15 nt, synthetic construct
  misc_feature 1..15: note = Description of Artificial Sequence: Synthetic Antisense oligonucleotide
  modified_base 14..15: mod_base = OTHER; note = bicyclic nucleic acid (BNA)
  source 1..15: mol_type = other RNA
gtaagttctgtccaa

SEQ ID NO: 3165 - RNA, 14 nt, synthetic construct
  misc_feature 1..14: note = Description of Artificial Sequence: Synthetic Antisense oligonucleotide
  modified_base 13..14: mod_base = OTHER; note = bicyclic nucleic acid (BNA)
  source 1..14: mol_type = other RNA
gtaagttctgtcca

SEQ ID NO: 3166 - RNA, 13 nt, synthetic construct
  misc_feature 1..13: note = Description of Artificial Sequence: Synthetic Antisense oligonucleotide
  modified_base 12..13: mod_base = OTHER; note = bicyclic nucleic acid (BNA)
  source 1..13: mol_type = other RNA
gtaagttctgtcc

SEQ ID NO: 3167 - DNA, 12 bp, synthetic construct
  misc_feature 1..12: note = Description of Artificial Sequence: Synthetic Antisense oligonucleotide
  misc_feature 1..12: note = Original Sequence: guaaguucugtc
  modified_base 11..12: mod_base = OTHER; note = bicyclic nucleic acid (BNA)
  source 1..12: mol_type = other DNA
  modified_base 2: mod_base = OTHER; note = Uracil
  modified_base 6: mod_base = OTHER; note = Uracil
  modified_base 7: mod_base = OTHER; note = Uracil
  modified_base 9: mod_base = OTHER; note = Uracil
gtaagttctgtc

SEQ ID NO: 3168 - DNA, 11 bp, synthetic construct
  misc_feature 1..11: note = Description of Artificial Sequence: Synthetic Antisense oligonucleotide
  misc_feature 1..11: note = Original Sequence: guaaguucugt
  modified_base 10..11: mod_base = OTHER; note = bicyclic nucleic acid (BNA)
  source 1..11: mol_type = other DNA
  modified_base 2: mod_base = OTHER; note = Uracil
  modified_base 6: mod_base = OTHER; note = Uracil
  modified_base 7: mod_base = OTHER; note = Uracil
  modified_base 9: mod_base = OTHER; note = Uracil
gtaagttctgt

SEQ ID NO: 3169 - DNA, 10 bp, synthetic construct
  misc_feature 1..10: note = Description of Artificial Sequence: Synthetic Antisense oligonucleotide
  misc_feature 1..10: note = Original Sequence: guaaguuctg
  modified_base 9..10: mod_base = OTHER; note = bicyclic nucleic acid (BNA)
  source 1..10: mol_type = other DNA
  modified_base 2: mod_base = OTHER; note = Uracil
  modified_base 6: mod_base = OTHER; note = Uracil
  modified_base 7: mod_base = OTHER; note = Uracil
gtaagttctg

SEQ ID NO: 3170-3171 - skipped (2 entries)

SEQ ID NO: 3172 - RNA, 20 nt, synthetic construct
  misc_feature 1..20: note = Description of Artificial Sequence: Synthetic Antisense oligonucleotide
  modified_base 19..20: mod_base = OTHER; note = bicyclic nucleic acid (BNA)
  source 1..20: mol_type = other RNA
ggtaagttctgtccaagccc

SEQ ID NO: 3173 - RNA, 19 nt, synthetic construct
  misc_feature 1..19: note = Description of Artificial Sequence: Synthetic Antisense oligonucleotide
  modified_base 18..19: mod_base = OTHER; note = bicyclic nucleic acid (BNA)
  source 1..19: mol_type = other RNA
ggtaagttctgtccaagcc

SEQ ID NO: 3174 - RNA, 17 nt, synthetic construct
  misc_feature 1..17: note = Description of Artificial Sequence: Synthetic Antisense oligonucleotide
  modified_base 16..17: mod_base = OTHER; note = bicyclic nucleic acid (BNA)
  source 1..17: mol_type = other RNA
ggtaagttctgtccaag

SEQ ID NO: 3175 - RNA, 16 nt, synthetic construct
  misc_feature 1..16: note = Description of Artificial Sequence: Synthetic Antisense oligonucleotide
  modified_base 15..16: mod_base = OTHER; note = bicyclic nucleic acid (BNA)
  source 1..16: mol_type = other RNA
ggtaagttctgtccaa

SEQ ID NO: 3176 - RNA, 15 nt, synthetic construct
  misc_feature 1..15: note = Description of Artificial Sequence: Synthetic Antisense oligonucleotide
  modified_base 14..15: mod_base = OTHER; note = bicyclic nucleic acid (BNA)
  source 1..15: mol_type = other RNA
ggtaagttctgtcca

SEQ ID NO: 3177 - RNA, 14 nt, synthetic construct
  misc_feature 1..14: note = Description of Artificial Sequence: Synthetic Antisense oligonucleotide
  modified_base 13..14: mod_base = OTHER; note = bicyclic nucleic acid (BNA)
  source 1..14: mol_type = other RNA
ggtaagttctgtcc

SEQ ID NO: 3178 - DNA, 13 bp, synthetic construct
  misc_feature 1..13: note = Description of Artificial Sequence: Synthetic Antisense oligonucleotide
  misc_feature 1..13: note = Original Sequence: gguaaguucugtc
  modified_base 12..13: mod_base = OTHER; note = bicyclic nucleic acid (BNA)
  source 1..13: mol_type = other DNA
  modified_base 3: mod_base = OTHER; note = Uracil
  modified_base 7: mod_base = OTHER; note = Uracil
  modified_base 8: mod_base = OTHER; note = Uracil
  modified_base 10: mod_base = OTHER; note = Uracil
ggtaagttctgtc

SEQ ID NO: 3179 - DNA, 12 bp, synthetic construct
  misc_feature 1..12: note = Description of Artificial Sequence: Synthetic Antisense oligonucleotide
  misc_feature 1..12: note = Original Sequence: gguaaguucugt
  modified_base 11..12: mod_base = OTHER; note = bicyclic nucleic acid (BNA)
  source 1..12: mol_type = other DNA
  modified_base 3: mod_base = OTHER; note = Uracil
  modified_base 7: mod_base = OTHER; note = Uracil
  modified_base 8: mod_base = OTHER; note = Uracil
  modified_base 10: mod_base = OTHER; note = Uracil
ggtaagttctgt

SEQ ID NO: 3180 - DNA, 11 bp, synthetic construct
  misc_feature 1..11: note = Description of Artificial Sequence: Synthetic Antisense oligonucleotide
  misc_feature 1..11: note = Original Sequence: gguaaguuctg
  modified_base 10..11: mod_base = OTHER; note = bicyclic nucleic acid (BNA)
  source 1..11: mol_type = other DNA
  modified_base 3: mod_base = OTHER; note = Uracil
  modified_base 7: mod_base = OTHER; note = Uracil
  modified_base 8: mod_base = OTHER; note = Uracil
ggtaagttctg

SEQ ID NO: 3181 - DNA, 10 bp, synthetic construct
  misc_feature 1..10: note = Description of Artificial Sequence: Synthetic Antisense oligonucleotide
  misc_feature 1..10: note = Original Sequence: gguaaguuct
  modified_base 9..10: mod_base = OTHER; note = bicyclic nucleic acid (BNA)
  source 1..10: mol_type = other DNA
  modified_base 3: mod_base = OTHER; note = Uracil
  modified_base 7: mod_base = OTHER; note = Uracil
  modified_base 8: mod_base = OTHER; note = Uracil
ggtaagttct

SEQ ID NO: 3182-3183 - skipped (2 entries)

SEQ ID NO: 3184 - RNA, 20 nt, synthetic construct
  misc_feature 1..20: note = Description of Artificial Sequence: Synthetic Antisense oligonucleotide
  modified_base 19..20: mod_base = OTHER; note = bicyclic nucleic acid (BNA)
  source 1..20: mol_type = other RNA
cggtaagttctgtccaagcc

SEQ ID NO: 3185 - RNA, 19 nt, synthetic construct
  misc_feature 1..19: note = Description of Artificial Sequence: Synthetic Antisense oligonucleotide
  modified_base 18..19: mod_base = OTHER; note = bicyclic nucleic acid (BNA)
  source 1..19: mol_type = other RNA
cggtaagttctgtccaagc

SEQ ID NO: 3186 - RNA, 18 nt, synthetic construct
  misc_feature 1..18: note = Description of Artificial Sequence: Synthetic Antisense oligonucleotide
  modified_base 17..18: mod_base = OTHER; note = bicyclic nucleic acid (BNA)
  source 1..18: mol_type = other RNA
cggtaagttctgtccaag

SEQ ID NO: 3187 - RNA, 17 nt, synthetic construct
  misc_feature 1..17: note = Description of Artificial Sequence: Synthetic Antisense oligonucleotide
  modified_base 16..17: mod_base = OTHER; note = bicyclic nucleic acid (BNA)
  source 1..17: mol_type = other RNA
cggtaagttctgtccaa

SEQ ID NO: 3188 - RNA, 16 nt, synthetic construct
  misc_feature 1..16: note = Description of Artificial Sequence: Synthetic Antisense oligonucleotide
  modified_base 15..16: mod_base = OTHER; note = bicyclic nucleic acid (BNA)
  source 1..16: mol_type = other RNA
cggtaagttctgtcca

SEQ ID NO: 3189 - RNA, 15 nt, synthetic construct
  misc_feature 1..15: note = Description of Artificial Sequence: Synthetic Antisense oligonucleotide
  modified_base 14..15: mod_base = OTHER; note = bicyclic nucleic acid (BNA)
  source 1..15: mol_type = other RNA
cggtaagttctgtcc

SEQ ID NO: 3190 - DNA, 14 bp, synthetic construct
  misc_feature 1..14: note = Description of Artificial Sequence: Synthetic Antisense oligonucleotide
  misc_feature 1..14: note = Original Sequence: cgguaaguucugtc
  modified_base 13..14: mod_base = OTHER; note = bicyclic nucleic acid (BNA)
  source 1..14: mol_type = other DNA
  modified_base 4: mod_base = OTHER; note = Uracil
  modified_base 8: mod_base = OTHER; note = Uracil
  modified_base 9: mod_base = OTHER; note = Uracil
  modified_base 11: mod_base = OTHER; note = Uracil
cggtaagttctgtc

SEQ ID NO: 3191 - DNA, 13 bp, synthetic construct
  misc_feature 1..13: note = Description of Artificial Sequence: Synthetic Antisense oligonucleotide
  misc_feature 1..13: note = Original Sequence: cgguaaguucugt
  modified_base 12..13: mod_base = OTHER; note = bicyclic nucleic acid (BNA)
  source 1..13: mol_type = other DNA
  modified_base 4: mod_base = OTHER; note = Uracil
  modified_base 8: mod_base = OTHER; note = Uracil
  modified_base 9: mod_base = OTHER; note = Uracil
  modified_base 11: mod_base = OTHER; note = Uracil
cggtaagttctgt

SEQ ID NO: 3192 - DNA, 12 bp, synthetic construct
  misc_feature 1..12: note = Description of Artificial Sequence: Synthetic Antisense oligonucleotide
  misc_feature 1..12: note = Original Sequence: cgguaaguuctg
  modified_base 11..12: mod_base = OTHER; note = bicyclic nucleic acid (BNA)
  source 1..12: mol_type = other DNA
  modified_base 4: mod_base = OTHER; note = Uracil
  modified_base 8: mod_base = OTHER; note = Uracil
  modified_base 9: mod_base = OTHER; note = Uracil
cggtaagttctg

SEQ ID NO: 3193 - DNA, 11 bp, synthetic construct
  misc_feature 1..11: note = Description of Artificial Sequence: Synthetic Antisense oligonucleotide
  misc_feature 1..11: note = Original Sequence: cgguaaguuct
  modified_base 10..11: mod_base = OTHER; note = bicyclic nucleic acid (BNA)
  source 1..11: mol_type = other DNA
  modified_base 4: mod_base = OTHER; note = Uracil
  modified_base 8: mod_base = OTHER; note = Uracil
  modified_base 9: mod_base = OTHER; note = Uracil
cggtaagttct

SEQ ID NO: 3194 - DNA, 10 bp, synthetic construct
  misc_feature 1..10: note = Description of Artificial Sequence: Synthetic Antisense oligonucleotide
  misc_feature 1..10: note = Original Sequence: cgguaagutc
  modified_base 9..10: mod_base = OTHER; note = bicyclic nucleic acid (BNA)
  source 1..10: mol_type = other DNA
  modified_base 4: mod_base = OTHER; note = Uracil
  modified_base 8: mod_base = OTHER; note = Uracil
cggtaagttc

SEQ ID NO: 3195-3196 - skipped (2 entries)

SEQ ID NO: 3197 - RNA, 20 nt, synthetic construct
  misc_feature 1..20: note = Description of Artificial Sequence: Synthetic Antisense oligonucleotide
  modified_base 19..20: mod_base = OTHER; note = bicyclic nucleic acid (BNA)
  source 1..20: mol_type = other RNA
tcggtaagttctgtccaagc

SEQ ID NO: 3198 - RNA, 19 nt, synthetic construct
  misc_feature 1..19: note = Description of Artificial Sequence: Synthetic Antisense oligonucleotide
  modified_base 18..19: mod_base = OTHER; note = bicyclic nucleic acid (BNA)
  source 1..19: mol_type = other RNA
tcggtaagttctgtccaag

SEQ ID NO: 3199 - RNA, 18 nt, synthetic construct
  misc_feature 1..18: note = Description of Artificial Sequence: Synthetic Antisense oligonucleotide
  modified_base 17..18: mod_base = OTHER; note = bicyclic nucleic acid (BNA)
  source 1..18: mol_type = other RNA
tcggtaagttctgtccaa

SEQ ID NO: 3200 - RNA, 17 nt, synthetic construct
  misc_feature 1..17: note = Description of Artificial Sequence: Synthetic Antisense oligonucleotide
  modified_base 16..17: mod_base = OTHER; note = bicyclic nucleic acid (BNA)
  source 1..17: mol_type = other RNA
tcggtaagttctgtcca

SEQ ID NO: 3201 - RNA, 16 nt, synthetic construct
  misc_feature 1..16: note = Description of Artificial Sequence: Synthetic Antisense oligonucleotide
  modified_base 15..16: mod_base = OTHER; note = bicyclic nucleic acid (BNA)
  source 1..16: mol_type = other RNA
tcggtaagttctgtcc

SEQ ID NO: 3202 - DNA, 15 bp, synthetic construct
  misc_feature 1..15: note = Description of Artificial Sequence: Synthetic Antisense oligonucleotide
  misc_feature 1..15: note = Original Sequence: ucgguaaguucugtc
  modified_base 14..15: mod_base = OTHER; note = bicyclic nucleic acid (BNA)
  source 1..15: mol_type = other DNA
  modified_base 1: mod_base = OTHER; note = Uracil
  modified_base 5: mod_base = OTHER; note = Uracil
  modified_base 9: mod_base = OTHER; note = Uracil
  modified_base 10: mod_base = OTHER; note = Uracil
  modified_base 12: mod_base = OTHER; note = Uracil
tcggtaagttctgtc

SEQ ID NO: 3203 - DNA, 14 bp, synthetic construct
  misc_feature 1..14: note = Description of Artificial Sequence: Synthetic Antisense oligonucleotide
  misc_feature 1..14: note = Original Sequence: ucgguaaguucugt
  modified_base 13..14: mod_base = OTHER; note = bicyclic nucleic acid (BNA)
  source 1..14: mol_type = other DNA
  modified_base 1: mod_base = OTHER; note = Uracil
  modified_base 5: mod_base = OTHER; note = Uracil
  modified_base 9: mod_base = OTHER; note = Uracil
  modified_base 10: mod_base = OTHER; note = Uracil
  modified_base 12: mod_base = OTHER; note = Uracil
tcggtaagttctgt

SEQ ID NO: 3204 - DNA, 13 bp, synthetic construct
  misc_feature 1..13: note = Description of Artificial Sequence: Synthetic Antisense oligonucleotide
  misc_feature 1..13: note = Original Sequence: ucgguaaguuctg
  modified_base 12..13: mod_base = OTHER; note = bicyclic nucleic acid (BNA)
  source 1..13: mol_type = other DNA
  modified_base 1: mod_base = OTHER; note = Uracil
  modified_base 5: mod_base = OTHER; note = Uracil
  modified_base 9: mod_base = OTHER; note = Uracil
  modified_base 10: mod_base = OTHER; note = Uracil
tcggtaagttctg

SEQ ID NO: 3205 - DNA, 12 bp, synthetic construct
  misc_feature 1..12: note = Description of Artificial Sequence: Synthetic Antisense oligonucleotide
  misc_feature 1..12: note = Original Sequence: ucgguaaguuct
  modified_base 11..12: mod_base = OTHER; note = bicyclic nucleic acid (BNA)
  source 1..12: mol_type = other DNA
  modified_base 1: mod_base = OTHER; note = Uracil
  modified_base 5: mod_base = OTHER; note = Uracil
  modified_base 9: mod_base = OTHER; note = Uracil
  modified_base 10: mod_base = OTHER; note = Uracil
tcggtaagttct

SEQ ID NO: 3206 - DNA, 11 bp, synthetic construct
  misc_feature 1..11: note = Description of Artificial Sequence: Synthetic Antisense oligonucleotide
  misc_feature 1..11: note = Original Sequence: ucgguaagutc
  modified_base 10..11: mod_base = OTHER; note = bicyclic nucleic acid (BNA)
  source 1..11: mol_type = other DNA
  modified_base 1: mod_base = OTHER; note = Uracil
  modified_base 5: mod_base = OTHER; note = Uracil
  modified_base 9: mod_base = OTHER; note = Uracil
tcggtaagttc

SEQ ID NO: 3207 - DNA, 10 bp, synthetic construct
  misc_feature 1..10: note = Description of Artificial Sequence: Synthetic Antisense oligonucleotide
  misc_feature 1..10: note = Original Sequence: ucgguaagtt
  modified_base 9..10: mod_base = OTHER; note = bicyclic nucleic acid (BNA)
  source 1..10: mol_type = other DNA
  modified_base 1: mod_base = OTHER; note = Uracil
  modified_base 5: mod_base = OTHER; note = Uracil
tcggtaagtt

SEQ ID NO: 3208 - skipped

SEQ ID NO: 3209 - RNA, 20 nt, synthetic construct
  misc_feature 1..20: note = Description of Artificial Sequence: Synthetic Antisense oligonucleotide
  modified_base 19..20: mod_base = OTHER; note = bicyclic nucleic acid (BNA)
  source 1..20: mol_type = other RNA
gtcggtaagttctgtccaag

SEQ ID NO: 3210 - RNA, 19 nt, synthetic construct
  misc_feature 1..19: note = Description of Artificial Sequence: Synthetic Antisense oligonucleotide
  modified_base 18..19: mod_base = OTHER; note = bicyclic nucleic acid (BNA)
  source 1..19: mol_type = other RNA
gtcggtaagttctgtccaa

SEQ ID NO: 3211 - RNA, 18 nt, synthetic construct
  misc_feature 1..18: note = Description of Artificial Sequence: Synthetic Antisense oligonucleotide
  modified_base 17..18: mod_base = OTHER; note = bicyclic nucleic acid (BNA)
  source 1..18: mol_type = other RNA
gtcggtaagttctgtcca

SEQ ID NO: 3212 - RNA, 17 nt, synthetic construct
  misc_feature 1..17: note = Description of Artificial Sequence: Synthetic Antisense oligonucleotide
  modified_base 16..17: mod_base = OTHER; note = bicyclic nucleic acid (BNA)
  source 1..17: mol_type = other RNA
gtcggtaagttctgtcc

SEQ ID NO: 3213 - DNA, 16 bp, synthetic construct
  misc_feature 1..16: note = Description of Artificial Sequence: Synthetic Antisense oligonucleotide
  misc_feature 1..16: note = Original Sequence: gucgguaaguucugtc
  modified_base 15..16: mod_base = OTHER; note = bicyclic nucleic acid (BNA)
  source 1..16: mol_type = other DNA
  modified_base 2: mod_base = OTHER; note = Uracil
  modified_base 6: mod_base = OTHER; note = Uracil
  modified_base 10: mod_base = OTHER; note = Uracil
  modified_base 11: mod_base = OTHER; note = Uracil
  modified_base 13: mod_base = OTHER; note = Uracil
gtcggtaagttctgtc

SEQ ID NO: 3214 - DNA, 15 bp, synthetic construct
  misc_feature 1..15: note = Description of Artificial Sequence: Synthetic Antisense oligonucleotide
  misc_feature 1..15: note = Original Sequence: gucgguaaguucugt
  modified_base 14..15: mod_base = OTHER; note = bicyclic nucleic acid (BNA)
  source 1..15: mol_type = other DNA
  modified_base 2: mod_base = OTHER; note = Uracil
  modified_base 6: mod_base = OTHER; note = Uracil
  modified_base 10: mod_base = OTHER; note = Uracil
  modified_base 11: mod_base = OTHER; note = Uracil
  modified_base 13: mod_base = OTHER; note = Uracil
gtcggtaagttctgt

SEQ ID NO: 3215 - DNA, 14 bp, synthetic construct
  misc_feature 1..14: note = Description of Artificial Sequence: Synthetic Antisense oligonucleotide
  misc_feature 1..14: note = Original Sequence: gucgguaaguuctg
  modified_base 13..14: mod_base = OTHER; note = bicyclic nucleic acid (BNA)
  source 1..14: mol_type = other DNA
  modified_base 2: mod_base = OTHER; note = Uracil
  modified_base 6: mod_base = OTHER; note = Uracil
  modified_base 10: mod_base = OTHER; note = Uracil
  modified_base 11: mod_base = OTHER; note = Uracil
gtcggtaagttctg

SEQ ID NO: 3216 - DNA, 13 bp, synthetic construct
  misc_feature 1..13: note = Description of Artificial Sequence: Synthetic Antisense oligonucleotide
  misc_feature 1..13: note = Original Sequence: gucgguaaguuct
  modified_base 12..13: mod_base = OTHER; note = bicyclic nucleic acid (BNA)
  source 1..13: mol_type = other DNA
  modified_base 2: mod_base = OTHER; note = Uracil
  modified_base 6: mod_base = OTHER; note = Uracil
  modified_base 10: mod_base = OTHER; note = Uracil
  modified_base 11: mod_base = OTHER; note = Uracil
gtcggtaagttct

SEQ ID NO: 3217 - DNA, 12 bp, synthetic construct
  misc_feature 1..12: note = Description of Artificial Sequence: Synthetic Antisense oligonucleotide
  misc_feature 1..12: note = Original Sequence: gucgguaagutc
  modified_base 11..12: mod_base = OTHER; note = bicyclic nucleic acid (BNA)
  source 1..12: mol_type = other DNA
  modified_base 2: mod_base = OTHER; note = Uracil
  modified_base 6: mod_base = OTHER; note = Uracil
  modified_base 10: mod_base = OTHER; note = Uracil
gtcggtaagttc

SEQ ID NO: 3218 - DNA, 11 bp, synthetic construct
  misc_feature 1..11: note = Description of Artificial Sequence: Synthetic Antisense oligonucleotide
  misc_feature 1..11: note = Original Sequence: gucgguaagtt
  modified_base 10..11: mod_base = OTHER; note = bicyclic nucleic acid (BNA)
  source 1..11: mol_type = other DNA
  modified_base 2: mod_base = OTHER; note = Uracil
  modified_base 6: mod_base = OTHER; note = Uracil
gtcggtaagtt

SEQ ID NO: 3219 - DNA, 10 bp, synthetic construct
  misc_feature 1..10: note = Description of Artificial Sequence: Synthetic Antisense oligonucleotide
  misc_feature 1..10: note = Original Sequence: gucgguaagt
  modified_base 9..10: mod_base = OTHER; note = bicyclic nucleic acid (BNA)
  source 1..10: mol_type = other DNA
  modified_base 2: mod_base = OTHER; note = Uracil
  modified_base 6: mod_base = OTHER; note = Uracil
gtcggtaagt

SEQ ID NO: 3220 - RNA, 20 nt, synthetic construct
  misc_feature 1..20: note = Description of Artificial Sequence: Synthetic Antisense oligonucleotide
  modified_base 19..20: mod_base = OTHER; note = bicyclic nucleic acid (BNA)
  source 1..20: mol_type = other RNA
agtcggtaagttctgtccaa

SEQ ID NO: 3221 - RNA, 19 nt, synthetic construct
  misc_feature 1..19: note = Description of Artificial Sequence: Synthetic Antisense oligonucleotide
  modified_base 18..19: mod_base = OTHER; note = bicyclic nucleic acid (BNA)
  source 1..19: mol_type = other RNA
agtcggtaagttctgtcca

SEQ ID NO: 3222 - DNA, 17 bp, synthetic construct
  misc_feature 1..17: note = Description of Artificial Sequence: Synthetic Antisense oligonucleotide
  misc_feature 1..17: note = Original Sequence: agucgguaaguucugtc
  modified_base 16..17: mod_base = OTHER; note = bicyclic nucleic acid (BNA)
  source 1..17: mol_type = other DNA
  modified_base 3: mod_base = OTHER; note = Uracil
  modified_base 7: mod_base = OTHER; note = Uracil
  modified_base 11: mod_base = OTHER; note = Uracil
  modified_base 12: mod_base = OTHER; note = Uracil
  modified_base 14: mod_base = OTHER; note = Uracil
agtcggtaagttctgtc

SEQ ID NO: 3223 - DNA, 16 bp, synthetic construct
  misc_feature 1..16: note = Description of Artificial Sequence: Synthetic Antisense oligonucleotide
  misc_feature 1..16: note = Original Sequence: agucgguaaguucugt
  modified_base 15..16: mod_base = OTHER; note = bicyclic nucleic acid (BNA)
  source 1..16: mol_type = other DNA
  modified_base 3: mod_base = OTHER; note = Uracil
  modified_base 7: mod_base = OTHER; note = Uracil
  modified_base 11: mod_base = OTHER; note = Uracil
  modified_base 12: mod_base = OTHER; note = Uracil
  modified_base 14: mod_base = OTHER; note = Uracil
agtcggtaagttctgt

SEQ ID NO: 3224 - DNA, 15 bp, synthetic construct
  misc_feature 1..15: note = Description of Artificial Sequence: Synthetic Antisense oligonucleotide
  misc_feature 1..15: note = Original Sequence: agucgguaaguuctg
  modified_base 14..15: mod_base = OTHER; note = bicyclic nucleic acid (BNA)
  source 1..15: mol_type = other DNA
  modified_base 3: mod_base = OTHER; note = Uracil
  modified_base 7: mod_base = OTHER; note = Uracil
  modified_base 11: mod_base = OTHER; note = Uracil
  modified_base 12: mod_base = OTHER; note = Uracil
agtcggtaagttctg

SEQ ID NO: 3225 - DNA, 14 bp, synthetic construct
  misc_feature 1..14: note = Description of Artificial Sequence: Synthetic Antisense oligonucleotide
  misc_feature 1..14: note = Original Sequence: agucgguaaguuct
  modified_base 13..14: mod_base = OTHER; note = bicyclic nucleic acid (BNA)
  source 1..14: mol_type = other DNA
  modified_base 3: mod_base = OTHER; note = Uracil
  modified_base 7: mod_base = OTHER; note = Uracil
  modified_base 11: mod_base = OTHER; note = Uracil
  modified_base 12: mod_base = OTHER; note = Uracil
agtcggtaagttct

SEQ ID NO: 3226 - DNA, 13 bp, synthetic construct
  misc_feature 1..13: note = Description of Artificial Sequence: Synthetic Antisense oligonucleotide
  misc_feature 1..13: note = Original Sequence: agucgguaagutc
  modified_base 12..13: mod_base = OTHER; note = bicyclic nucleic acid (BNA)
  source 1..13: mol_type = other DNA
  modified_base 3: mod_base = OTHER; note = Uracil
  modified_base 7: mod_base = OTHER; note = Uracil
  modified_base 11: mod_base = OTHER; note = Uracil
agtcggtaagttc

SEQ ID NO: 3227 - DNA, 12 bp, synthetic construct
  misc_feature 1..12: note = Description of Artificial Sequence: Synthetic Antisense oligonucleotide
  misc_feature 1..12: note = Original Sequence: agucgguaagtt
  modified_base 11..12: mod_base = OTHER; note = bicyclic nucleic acid (BNA)
  source 1..12: mol_type = other DNA
  modified_base 3: mod_base = OTHER; note = Uracil
  modified_base 7: mod_base = OTHER; note = Uracil
agtcggtaagtt

SEQ ID NO: 3228 - DNA, 11 bp, synthetic construct
  misc_feature 1..11: note = Description of Artificial Sequence: Synthetic Antisense oligonucleotide
  misc_feature 1..11: note = Original Sequence: agucgguaagt
  modified_base 10..11: mod_base = OTHER; note = bicyclic nucleic acid (BNA)
  source 1..11: mol_type = other DNA
  modified_base 3: mod_base = OTHER; note = Uracil
  modified_base 7: mod_base = OTHER; note = Uracil
agtcggtaagt

SEQ ID NO: 3229 - RNA, 20 nt, synthetic construct
  misc_feature 1..20: note = Description of Artificial Sequence: Synthetic Antisense oligonucleotide
  modified_base 19..20: mod_base = OTHER; note = bicyclic nucleic acid (BNA)
  source 1..20: mol_type = other RNA
cagtcggtaagttctgtcca

SEQ ID NO: 3230 - RNA, 19 nt, synthetic construct
  misc_feature 1..19: note = Description of Artificial Sequence: Synthetic Antisense oligonucleotide
  modified_base 18..19: mod_base = OTHER; note = bicyclic nucleic acid (BNA)
  source 1..19: mol_type = other RNA
cagtcggtaagttctgtcc

SEQ ID NO: 3231 - DNA, 18 bp, synthetic construct
  misc_feature 1..18: note = Description of Artificial Sequence: Synthetic Antisense oligonucleotide
  misc_feature 1..18: note = Original Sequence: cagucgguaaguucugtc
  modified_base 17..18: mod_base = OTHER; note = bicyclic nucleic acid (BNA)
  source 1..18: mol_type = other DNA
  modified_base 4: mod_base = OTHER; note = Uracil
  modified_base 8: mod_base = OTHER; note = Uracil
  modified_base 12: mod_base = OTHER; note = Uracil
  modified_base 13: mod_base = OTHER; note = Uracil
  modified_base 15: mod_base = OTHER; note = Uracil
cagtcggtaagttctgtc

SEQ ID NO: 3232 - DNA, 17 bp, synthetic construct
  misc_feature 1..17: note = Description of Artificial Sequence: Synthetic Antisense oligonucleotide
  misc_feature 1..17: note = Original Sequence: cagucgguaaguucugt
  modified_base 16..17: mod_base = OTHER; note = bicyclic nucleic acid (BNA)
  source 1..17: mol_type = other DNA
  modified_base 4: mod_base = OTHER; note = Uracil
  modified_base 8: mod_base = OTHER; note = Uracil
  modified_base 12: mod_base = OTHER; note = Uracil
  modified_base 13: mod_base = OTHER; note = Uracil
  modified_base 15: mod_base = OTHER; note = Uracil
cagtcggtaagttctgt

SEQ ID NO: 3233 - DNA, 16 bp, synthetic construct
  misc_feature 1..16: note = Description of Artificial Sequence: Synthetic Antisense oligonucleotide
  misc_feature 1..16: note = Original Sequence: cagucgguaaguuctg
  modified_base 15..16: mod_base = OTHER; note = bicyclic nucleic acid (BNA)
  source 1..16: mol_type = other DNA
  modified_base 4: mod_base = OTHER; note = Uracil
  modified_base 8: mod_base = OTHER; note = Uracil
  modified_base 12: mod_base = OTHER; note = Uracil
  modified_base 13: mod_base = OTHER; note = Uracil
cagtcggtaagttctg

SEQ ID NO: 3234 - DNA, 15 bp, synthetic construct
  misc_feature 1..15: note = Description of Artificial Sequence: Synthetic Antisense oligonucleotide
  misc_feature 1..15: note = Original Sequence: cagucgguaaguuct
  modified_base 14..15: mod_base = OTHER; note = bicyclic nucleic acid (BNA)
  source 1..15: mol_type = other DNA
  modified_base 4: mod_base = OTHER; note = Uracil
  modified_base 8: mod_base = OTHER; note = Uracil
  modified_base 12: mod_base = OTHER; note = Uracil
  modified_base 13: mod_base = OTHER; note = Uracil
cagtcggtaagttct

SEQ ID NO: 3235 - DNA, 14 bp, synthetic construct
  misc_feature 1..14: note = Description of Artificial Sequence: Synthetic Antisense oligonucleotide
  misc_feature 1..14: note = Original Sequence: cagucgguaagutc
  modified_base 13..14: mod_base = OTHER; note = bicyclic nucleic acid (BNA)
  source 1..14: mol_type = other DNA
  modified_base 4: mod_base = OTHER; note = Uracil
  modified_base 8: mod_base = OTHER; note = Uracil
  modified_base 12: mod_base = OTHER; note = Uracil
cagtcggtaagttc

SEQ ID NO: 3236 - DNA, 13 bp, synthetic construct
  misc_feature 1..13: note = Description of Artificial Sequence: Synthetic Antisense oligonucleotide
  misc_feature 1..13: note = Original Sequence: cagucgguaagtt
  modified_base 12..13: mod_base = OTHER; note = bicyclic nucleic acid (BNA)
  source 1..13: mol_type = other DNA
  modified_base 4: mod_base = OTHER; note = Uracil
  modified_base 8: mod_base = OTHER; note = Uracil
cagtcggtaagtt

SEQ ID NO: 3237 - DNA, 12 bp, synthetic construct
  misc_feature 1..12: note = Description of Artificial Sequence: Synthetic Antisense oligonucleotide
  misc_feature 1..12: note = Original Sequence: cagucgguaagt
  modified_base 11..12: mod_base = OTHER; note = bicyclic nucleic acid (BNA)
  source 1..12: mol_type = other DNA
  modified_base 4: mod_base = OTHER; note = Uracil
  modified_base 8: mod_base = OTHER; note = Uracil
cagtcggtaagt

SEQ ID NO: 3238 - RNA, 20 nt, synthetic construct
  misc_feature 1..20: note = Description of Artificial Sequence: Synthetic Antisense oligonucleotide
  modified_base 19..20: mod_base = OTHER; note = bicyclic nucleic acid (BNA)
  source 1..20: mol_type = other RNA
ccagtcggtaagttctgtcc

SEQ ID NO: 3239 - DNA, 19 bp, synthetic construct
  misc_feature 1..19: note = Description of Artificial Sequence: Synthetic Antisense oligonucleotide
  misc_feature 1..19: note = Original Sequence: ccagucgguaaguucugtc
  modified_base 18..19: mod_base = OTHER; note = bicyclic nucleic acid (BNA)
  source 1..19: mol_type = other DNA
  modified_base 5: mod_base = OTHER; note = Uracil
  modified_base 9: mod_base = OTHER; note = Uracil
  modified_base 13: mod_base = OTHER; note = Uracil
  modified_base 14: mod_base = OTHER; note = Uracil
  modified_base 16: mod_base = OTHER; note = Uracil
ccagtcggtaagttctgtc

SEQ ID NO: 3240 - DNA, 18 bp, synthetic construct
  misc_feature 1..18: note = Description of Artificial Sequence: Synthetic Antisense oligonucleotide
  misc_feature 1..18: note = Original Sequence: ccagucgguaaguucugt
  modified_base 17..18: mod_base = OTHER; note = bicyclic nucleic acid (BNA)
  source 1..18: mol_type = other DNA
  modified_base 5: mod_base = OTHER; note = Uracil
  modified_base 9: mod_base = OTHER; note = Uracil
  modified_base 13: mod_base = OTHER; note = Uracil
  modified_base 14: mod_base = OTHER; note = Uracil
  modified_base 16: mod_base = OTHER; note = Uracil
ccagtcggtaagttctgt

SEQ ID NO: 3241 - DNA, 17 bp, synthetic construct
  misc_feature 1..17: note = Description of Artificial Sequence: Synthetic Antisense oligonucleotide
  misc_feature 1..17: note = Original Sequence: ccagucgguaaguuctg
  modified_base 16..17: mod_base = OTHER; note = bicyclic nucleic acid (BNA)
  source 1..17: mol_type = other DNA
  modified_base 5: mod_base = OTHER; note = Uracil
  modified_base 9: mod_base = OTHER; note = Uracil
  modified_base 13: mod_base = OTHER; note = Uracil
  modified_base 14: mod_base = OTHER; note = Uracil
ccagtcggtaagttctg

SEQ ID NO: 3242 - DNA, 16 bp, synthetic construct
  misc_feature 1..16: note = Description of Artificial Sequence: Synthetic Antisense oligonucleotide
  misc_feature 1..16: note = Original Sequence: ccagucgguaaguuct
  modified_base 15..16: mod_base = OTHER; note = bicyclic nucleic acid (BNA)
  source 1..16: mol_type = other DNA
  modified_base 5: mod_base = OTHER; note = Uracil
  modified_base 9: mod_base = OTHER; note = Uracil
  modified_base 13: mod_base = OTHER; note = Uracil
  modified_base 14: mod_base = OTHER; note = Uracil
ccagtcggtaagttct

SEQ ID NO: 3243 - DNA, 15 bp, synthetic construct
  misc_feature 1..15: note = Description of Artificial Sequence: Synthetic Antisense oligonucleotide
  misc_feature 1..15: note = Original Sequence: ccagucgguaagutc
  modified_base 14..15: mod_base = OTHER; note = bicyclic nucleic acid (BNA)
  source 1..15: mol_type = other DNA
  modified_base 5: mod_base = OTHER; note = Uracil
  modified_base 9: mod_base = OTHER; note = Uracil
  modified_base 13: mod_base = OTHER; note = Uracil
ccagtcggtaagttc

SEQ ID NO: 3244 - DNA, 14 bp, synthetic construct
  misc_feature 1..14: note = Description of Artificial Sequence: Synthetic Antisense oligonucleotide
  misc_feature 1..14: note = Original Sequence: ccagucgguaagtt
  modified_base 13..14: mod_base = OTHER; note = bicyclic nucleic acid (BNA)
  source 1..14: mol_type = other DNA
  modified_base 5: mod_base = OTHER; note = Uracil
  modified_base 9: mod_base = OTHER; note = Uracil
ccagtcggtaagtt

SEQ ID NO: 3245 - DNA, 13 bp, synthetic construct
  misc_feature 1..13: note = Description of Artificial Sequence: Synthetic Antisense oligonucleotide
  misc_feature 1..13: note = Original Sequence: ccagucgguaagt
  modified_base 12..13: mod_base = OTHER; note = bicyclic nucleic acid (BNA)
  source 1..13: mol_type = other DNA
  modified_base 5: mod_base = OTHER; note = Uracil
  modified_base 9: mod_base = OTHER; note = Uracil
ccagtcggtaagt

SEQ ID NO: 3246 - DNA, 20 bp, synthetic construct
  misc_feature 1..20: note = Description of Artificial Sequence: Synthetic Antisense oligonucleotide
  misc_feature 1..20: note = Original Sequence: gccagucgguaaguucugtc
  modified_base 19..20: mod_base = OTHER; note = bicyclic nucleic acid (BNA)
  source 1..20: mol_type = other DNA
  modified_base 6: mod_base = OTHER; note = Uracil
  modified_base 10: mod_base = OTHER; note = Uracil
  modified_base 14: mod_base = OTHER; note = Uracil
  modified_base 15: mod_base = OTHER; note = Uracil
  modified_base 17: mod_base = OTHER; note = Uracil
gccagtcggtaagttctgtc

SEQ ID NO: 3247 - DNA, 19 bp, synthetic construct
  misc_feature 1..19: note = Description of Artificial Sequence: Synthetic Antisense oligonucleotide
  misc_feature 1..19: note = Original Sequence: gccagucgguaaguucugt
  modified_base 18..19: mod_base = OTHER; note = bicyclic nucleic acid (BNA)
  source 1..19: mol_type = other DNA
  modified_base 6: mod_base = OTHER; note = Uracil
  modified_base 10: mod_base = OTHER; note = Uracil
  modified_base 14: mod_base = OTHER; note = Uracil
  modified_base 15: mod_base = OTHER; note = Uracil
  modified_base 17: mod_base = OTHER; note = Uracil
gccagtcggtaagttctgt

SEQ ID NO: 3248 - DNA, 18 bp, synthetic construct
  misc_feature 1..18: note = Description of Artificial Sequence: Synthetic Antisense oligonucleotide
  misc_feature 1..18: note = Original Sequence: gccagucgguaaguuctg
  modified_base 17..18: mod_base = OTHER; note = bicyclic nucleic acid (BNA)
  source 1..18: mol_type = other DNA
  modified_base 6: mod_base = OTHER; note = Uracil
  modified_base 10: mod_base = OTHER; note = Uracil
  modified_base 14: mod_base = OTHER; note = Uracil
  modified_base 15: mod_base = OTHER; note = Uracil
gccagtcggtaagttctg

SEQ ID NO: 3249 - DNA, 17 bp, synthetic construct
  misc_feature 1..17: note = Description of Artificial Sequence: Synthetic Antisense oligonucleotide
  misc_feature 1..17: note = Original Sequence: gccagucgguaaguuct
  modified_base 16..17: mod_base = OTHER; note = bicyclic nucleic acid (BNA)
  source 1..17: mol_type = other DNA
  modified_base 6: mod_base = OTHER; note = Uracil
  modified_base 10: mod_base = OTHER; note = Uracil
  modified_base 14: mod_base = OTHER; note = Uracil
  modified_base 15: mod_base = OTHER; note = Uracil
gccagtcggtaagttct

SEQ ID NO: 3250 - DNA, 16 bp, synthetic construct
  misc_feature 1..16: note = Description of Artificial Sequence: Synthetic Antisense oligonucleotide
  misc_feature 1..16: note = Original Sequence: gccagucgguaagutc
  modified_base 15..16: mod_base = OTHER; note = bicyclic nucleic acid (BNA)
  source 1..16: mol_type = other DNA
  modified_base 6: mod_base = OTHER; note = Uracil
  modified_base 10: mod_base = OTHER; note = Uracil
  modified_base 14: mod_base = OTHER; note = Uracil
gccagtcggtaagttc

SEQ ID NO: 3251 - DNA, 15 bp, synthetic construct
  misc_feature 1..15: note = Description of Artificial Sequence: Synthetic Antisense oligonucleotide
  misc_feature 1..15: note = Original Sequence: gccagucgguaagtt
  modified_base 14..15: mod_base = OTHER; note = bicyclic nucleic acid (BNA)
  source 1..15: mol_type = other DNA
  modified_base 6: mod_base = OTHER; note = Uracil
  modified_base 10: mod_base = OTHER; note = Uracil
gccagtcggtaagtt

SEQ ID NO: 3252 - DNA, 14 bp, synthetic construct
  misc_feature 1..14: note = Description of Artificial Sequence: Synthetic Antisense oligonucleotide
  misc_feature 1..14: note = Original Sequence: gccagucgguaagt
  modified_base 13..14: mod_base = OTHER; note = bicyclic nucleic acid (BNA)
  source 1..14: mol_type = other DNA
  modified_base 6: mod_base = OTHER; note = Uracil
  modified_base 10: mod_base = OTHER; note = Uracil
gccagtcggtaagt

SEQ ID NO: 3253 - DNA, 20 bp, synthetic construct
  misc_feature 1..20: note = Description of Artificial Sequence: Synthetic Antisense oligonucleotide
  misc_feature 1..20: note = Original Sequence: ucaaggaagauggcauuuct
  modified_base 19..20: mod_base = OTHER; note = bicyclic nucleic acid (BNA)
  source 1..20: mol_type = other DNA
  modified_base 1: mod_base = OTHER; note = Uracil
  modified_base 11: mod_base = OTHER; note = Uracil
  modified_base 16: mod_base = OTHER; note = Uracil
  modified_base 17: mod_base = OTHER; note = Uracil
  modified_base 18: mod_base = OTHER; note = Uracil
tcaaggaagatggcatttct

SEQ ID NO: 3254 - RNA, 22 nt, synthetic construct
  misc_feature 1..22: note = Description of Artificial Sequence: Synthetic Antisense oligonucleotide
  modified_base 21..22: mod_base = OTHER; note = bicyclic nucleic acid (BNA)
  source 1..22: mol_type = other RNA
tcaaggaagatggcatttctag

SEQ ID NO: 3255 - DNA, 16 bp, synthetic construct
  misc_feature 1..16: note = Description of Artificial Sequence: Synthetic Antisense oligonucleotide
  misc_feature 1..16: note = Original Sequence: ucaaggaagauggcat
  modified_base 15..16: mod_base = OTHER; note = bicyclic nucleic acid (BNA)
  source 1..16: mol_type = other DNA
  modified_base 1: mod_base = OTHER; note = Uracil
  modified_base 11: mod_base = OTHER; note = Uracil
tcaaggaagatggcat

SEQ ID NO: 3256 - DNA, 15 bp, synthetic construct
  misc_feature 1..15: note = Description of Artificial Sequence: Synthetic Antisense oligonucleotide
  misc_feature 1..15: note = Original Sequence: gaagauggcauuuct
  modified_base 14..15: mod_base = OTHER; note = bicyclic nucleic acid (BNA)
  source 1..15: mol_type = other DNA
  modified_base 6: mod_base = OTHER; note = Uracil
  modified_base 11: mod_base = OTHER; note = Uracil
  modified_base 12: mod_base = OTHER; note = Uracil
  modified_base 13: mod_base = OTHER; note = Uracil
gaagatggcatttct

SEQ ID NO: 3257 - DNA, 21 bp, synthetic construct
  misc_feature 1..21: note = Description of Artificial Sequence: Synthetic Antisense oligonucleotide
  misc_feature 1..21: note = Original Sequence: ucaaggaagauggcauuucta
  modified_base 20..21: mod_base = OTHER; note = bicyclic nucleic acid (BNA)
  source 1..21: mol_type = other DNA
  modified_base 1: mod_base = OTHER; note = Uracil
  modified_base 11: mod_base = OTHER; note = Uracil
  modified_base 16: mod_base = OTHER; note = Uracil
  modified_base 17: mod_base = OTHER; note = Uracil
  modified_base 18: mod_base = OTHER; note = Uracil
tcaaggaagatggcatttcta

SEQ ID NO: 3258 - DNA, 19 bp, synthetic construct
  misc_feature 1..19: note = Description of Artificial Sequence: Synthetic Antisense oligonucleotide
  misc_feature 1..19: note = Original Sequence: ucaaggaagauggcauutc
  modified_base 18..19: mod_base = OTHER; note = bicyclic nucleic acid (BNA)
  source 1..19: mol_type = other DNA
  modified_base 1: mod_base = OTHER; note = Uracil
  modified_base 11: mod_base = OTHER; note = Uracil
  modified_base 16: mod_base = OTHER; note = Uracil
  modified_base 17: mod_base = OTHER; note = Uracil
tcaaggaagatggcatttc

SEQ ID NO: 3259 - DNA, 18 bp, synthetic construct
  misc_feature 1..18: note = Description of Artificial Sequence: Synthetic Antisense oligonucleotide
  misc_feature 1..18: note = Original Sequence: ucaaggaagauggcautt
  modified_base 17..18: mod_base = OTHER; note = bicyclic nucleic acid (BNA)
  source 1..18: mol_type = other DNA
  modified_base 1: mod_base = OTHER; note = Uracil
  modified_base 11: mod_base = OTHER; note = Uracil
  modified_base 16: mod_base = OTHER; note = Uracil
tcaaggaagatggcattt

SEQ ID NO: 3260 - DNA, 17 bp, synthetic construct
  misc_feature 1..17: note = Description of Artificial Sequence: Synthetic Antisense oligonucleotide
  misc_feature 1..17: note = Original Sequence: ucaaggaagauggcatt
  modified_base 16..17: mod_base = OTHER; note = bicyclic nucleic acid (BNA)
  source 1..17: mol_type = other DNA
  modified_base 1: mod_base = OTHER; note = Uracil
  modified_base 11: mod_base = OTHER; note = Uracil
tcaaggaagatggcatt

SEQ ID NO: 3261 - RNA, 15 nt, synthetic construct
  misc_feature 1..15: note = Description of Artificial Sequence: Synthetic Antisense oligonucleotide
  modified_base 14..15: mod_base = OTHER; note = bicyclic nucleic acid (BNA)
  source 1..15: mol_type = other RNA
tcaaggaagatggca

SEQ ID NO: 3262 - RNA, 14 nt, synthetic construct
  misc_feature 1..14: note = Description of Artificial Sequence: Synthetic Antisense oligonucleotide
  modified_base 13..14: mod_base = OTHER; note = bicyclic nucleic acid (BNA)
  source 1..14: mol_type = other RNA
tcaaggaagatggc

SEQ ID NO: 3263 - RNA, 13 nt, synthetic construct
  misc_feature 1..13: note = Description of Artificial Sequence: Synthetic Antisense oligonucleotide
  modified_base 12..13: mod_base = OTHER; note = bicyclic nucleic acid (BNA)
  source 1..13: mol_type = other RNA
tcaaggaagatgg

SEQ ID NO: 3264 - DNA, 12 bp, synthetic construct
  misc_feature 1..12: note = Description of Artificial Sequence: Synthetic Antisense oligonucleotide
  misc_feature 1..12: note = Original Sequence: ucaaggaagatg
  modified_base 11..12: mod_base = OTHER; note = bicyclic nucleic acid (BNA)
  source 1..12: mol_type = other DNA
  modified_base 1: mod_base = OTHER; note = Uracil
tcaaggaagatg

SEQ ID NO: 3265 - DNA, 11 bp, synthetic construct
  misc_feature 1..11: note = Description of Artificial Sequence: Synthetic Antisense oligonucleotide
  misc_feature 1..11: note = Original Sequence: ucaaggaagat
  modified_base 10..11: mod_base = OTHER; note = bicyclic nucleic acid (BNA)
  source 1..11: mol_type = other DNA
  modified_base 1: mod_base = OTHER; note = Uracil
tcaaggaagat

SEQ ID NO: 3266 - RNA, 10 nt, synthetic construct
  misc_feature 1..10: note = Description of Artificial Sequence: Synthetic Antisense oligonucleotide
  modified_base 9..10: mod_base = OTHER; note = bicyclic nucleic acid (BNA)
  source 1..10: mol_type = other RNA
tcaaggaaga

SEQ ID NO: 3267 - skipped

SEQ ID NO: 3268 - RNA, 21 nt, synthetic construct
  misc_feature 1..21: note = Description of Artificial Sequence: Synthetic Antisense oligonucleotide
  modified_base 20..21: mod_base = OTHER; note = bicyclic nucleic acid (BNA)
  source 1..21: mol_type = other RNA
caaggaagatggcatttctag

SEQ ID NO: 3269 - DNA, 20 bp, synthetic construct
  misc_feature 1..20: note = Description of Artificial Sequence: Synthetic Antisense oligonucleotide
  misc_feature 1..20: note = Original Sequence: caaggaagauggcauuucta
  modified_base 19..20: mod_base = OTHER; note = bicyclic nucleic acid (BNA)
  source 1..20: mol_type = other DNA
  modified_base 10: mod_base = OTHER; note = Uracil
  modified_base 15: mod_base = OTHER; note = Uracil
  modified_base 16: mod_base = OTHER; note = Uracil
  modified_base 17: mod_base = OTHER; note = Uracil
caaggaagatggcatttcta

SEQ ID NO: 3270 - DNA, 19 bp, synthetic construct
  misc_feature 1..19: note = Description of Artificial Sequence: Synthetic Antisense oligonucleotide
  misc_feature 1..19: note = Original Sequence: caaggaagauggcauuuct
  modified_base 18..19: mod_base = OTHER; note = bicyclic nucleic acid (BNA)
  source 1..19: mol_type = other DNA
  modified_base 10: mod_base = OTHER; note = Uracil
  modified_base 15: mod_base = OTHER; note = Uracil
  modified_base 16: mod_base = OTHER; note = Uracil
  modified_base 17: mod_base = OTHER; note = Uracil
caaggaagatggcatttct

SEQ ID NO: 3271 - DNA, 18 bp, synthetic construct
  misc_feature 1..18: note = Description of Artificial Sequence: Synthetic Antisense oligonucleotide
  misc_feature 1..18: note = Original Sequence: caaggaagauggcauutc
  modified_base 17..18: mod_base = OTHER; note = bicyclic nucleic acid (BNA)
  source 1..18: mol_type = other DNA
  modified_base 10: mod_base = OTHER; note = Uracil
  modified_base 15: mod_base = OTHER; note = Uracil
  modified_base 16: mod_base = OTHER; note = Uracil
caaggaagatggcatttc

SEQ ID NO: 3272 - DNA, 17 bp, synthetic construct
  misc_feature 1..17: note = Description of Artificial Sequence: Synthetic Antisense oligonucleotide
  misc_feature 1..17: note = Original Sequence: caaggaagauggcautt
  modified_base 16..17: mod_base = OTHER; note = bicyclic nucleic acid (BNA)
  source 1..17: mol_type = other DNA
  modified_base 10: mod_base = OTHER; note = Uracil
  modified_base 15: mod_base = OTHER; note = Uracil
caaggaagatggcattt

SEQ ID NO: 3273 - DNA, 16 bp, synthetic construct
  misc_feature 1..16: note = Description of Artificial Sequence: Synthetic Antisense oligonucleotide
  misc_feature 1..16: note = Original Sequence: caaggaagauggcatt
  modified_base 15..16: mod_base = OTHER; note = bicyclic nucleic acid (BNA)
  source 1..16: mol_type = other DNA
  modified_base 10: mod_base = OTHER; note = Uracil
caaggaagatggcatt

SEQ ID NO: 3274 - DNA, 15 bp, synthetic construct
  misc_feature 1..15: note = Description of Artificial Sequence: Synthetic Antisense oligonucleotide
  misc_feature 1..15: note = Original Sequence: caaggaagauggcat
  modified_base 14..15: mod_base = OTHER; note = bicyclic nucleic acid (BNA)
  source 1..15: mol_type = other DNA
  modified_base 10: mod_base = OTHER; note = Uracil
caaggaagatggcat

SEQ ID NO: 3275 - RNA, 14 nt, synthetic construct
  misc_feature 1..14: note = Description of Artificial Sequence: Synthetic Antisense oligonucleotide
  modified_base 13..14: mod_base = OTHER; note = bicyclic nucleic acid (BNA)
  source 1..14: mol_type = other RNA
caaggaagatggca

SEQ ID NO: 3276 - RNA, 13 nt, synthetic construct
  misc_feature 1..13: note = Description of Artificial Sequence: Synthetic Antisense oligonucleotide
  modified_base 12..13: mod_base = OTHER; note = bicyclic nucleic acid (BNA)
  source 1..13: mol_type = other RNA
caaggaagatggc

SEQ ID NO: 3277 - RNA, 12 nt, synthetic construct
  misc_feature 1..12: note = Description of Artificial Sequence: Synthetic Antisense oligonucleotide
  modified_base 11..12: mod_base = OTHER; note = bicyclic nucleic acid (BNA)
  source 1..12: mol_type = other RNA
caaggaagatgg

SEQ ID NO: 3278 - DNA, 11 bp, synthetic construct
  misc_feature 1..11: note = Description of Artificial Sequence: Synthetic Antisense oligonucleotide
  modified_base 10..11: mod_base = OTHER; note = bicyclic nucleic acid (BNA)
  source 1..11: mol_type = other DNA
caaggaagatg

SEQ ID NO: 3279 - DNA, 10 bp, synthetic construct
  misc_feature 1..10: note = Description of Artificial Sequence: Synthetic Antisense oligonucleotide
  modified_base 9..10: mod_base = OTHER; note = bicyclic nucleic acid (BNA)
  source 1..10: mol_type = other DNA
caaggaagat

SEQ ID NO: 3280-3281 - skipped (2 entries)

SEQ ID NO: 3282 - RNA, 20 nt, synthetic construct
  misc_feature 1..20: note = Description of Artificial Sequence: Synthetic Antisense oligonucleotide
  modified_base 19..20: mod_base = OTHER; note = bicyclic nucleic acid (BNA)
  source 1..20: mol_type = other RNA
aaggaagatggcatttctag

SEQ ID NO: 3283 - DNA, 19 bp, synthetic construct
  misc_feature 1..19: note = Description of Artificial Sequence: Synthetic Antisense oligonucleotide
  misc_feature 1..19: note = Original Sequence: aaggaagauggcauuucta
  modified_base 18..19: mod_base = OTHER; note = bicyclic nucleic acid (BNA)
  source 1..19: mol_type = other DNA
  modified_base 9: mod_base = OTHER; note = Uracil
  modified_base 14: mod_base = OTHER; note = Uracil
  modified_base 15: mod_base = OTHER; note = Uracil
  modified_base 16: mod_base = OTHER; note = Uracil
aaggaagatggcatttcta

SEQ ID NO: 3284 - DNA, 18 bp, synthetic construct
  misc_feature 1..18: note = Description of Artificial Sequence: Synthetic Antisense oligonucleotide
  misc_feature 1..18: note = Original Sequence: aaggaagauggcauuuct
  modified_base 17..18: mod_base = OTHER; note = bicyclic nucleic acid (BNA)
  source 1..18: mol_type = other DNA
  modified_base 9: mod_base = OTHER; note = Uracil
  modified_base 14: mod_base = OTHER; note = Uracil
  modified_base 15: mod_base = OTHER; note = Uracil
  modified_base 16: mod_base = OTHER; note = Uracil
aaggaagatggcatttct

SEQ ID NO: 3285 - DNA, 17 bp, synthetic construct
  misc_feature 1..17: note = Description of Artificial Sequence: Synthetic Antisense oligonucleotide
  misc_feature 1..17: note = Original Sequence: aaggaagauggcauutc
  modified_base 16..17: mod_base = OTHER; note = bicyclic nucleic acid (BNA)
  source 1..17: mol_type = other DNA
  modified_base 9: mod_base = OTHER; note = Uracil
  modified_base 14: mod_base = OTHER; note = Uracil
  modified_base 15: mod_base = OTHER; note = Uracil
aaggaagatggcatttc

SEQ ID NO: 3286 - DNA, 16 bp, synthetic construct
  misc_feature 1..16: note = Description of Artificial Sequence: Synthetic Antisense oligonucleotide
  misc_feature 1..16: note = Original Sequence: aaggaagauggcautt
  modified_base 15..16: mod_base = OTHER; note = bicyclic nucleic acid (BNA)
  source 1..16: mol_type = other DNA
  modified_base 9: mod_base = OTHER; note = Uracil
  modified_base 14: mod_base = OTHER; note = Uracil
aaggaagatggcattt

SEQ ID NO: 3287 - DNA, 15 bp, synthetic construct
  misc_feature 1..15: note = Description of Artificial Sequence: Synthetic Antisense oligonucleotide
  misc_feature 1..15: note = Original Sequence: aaggaagauggcatt
  modified_base 14..15: mod_base = OTHER; note = bicyclic nucleic acid (BNA)
  source 1..15: mol_type = other DNA
  modified_base 9: mod_base = OTHER; note = Uracil
aaggaagatggcatt

SEQ ID NO: 3288 - DNA, 14 bp, synthetic construct
  misc_feature 1..14: note = Description of Artificial Sequence: Synthetic Antisense oligonucleotide
  misc_feature 1..14: note = Original Sequence: aaggaagauggcat
  modified_base 13..14: mod_base = OTHER; note = bicyclic nucleic acid (BNA)
  source 1..14: mol_type = other DNA
  modified_base 9: mod_base = OTHER; note = Uracil
aaggaagatggcat

SEQ ID NO: 3289 - RNA, 13 nt, synthetic construct
  misc_feature 1..13: note = Description of Artificial Sequence: Synthetic Antisense oligonucleotide
  modified_base 12..13: mod_base = OTHER; note = bicyclic nucleic acid (BNA)
  source 1..13: mol_type = other RNA
aaggaagatggca

SEQ ID NO: 3290 - RNA, 12 nt, synthetic construct
  misc_feature 1..12: note = Description of Artificial Sequence: Synthetic Antisense oligonucleotide
  modified_base 11..12: mod_base = OTHER; note = bicyclic nucleic acid (BNA)
  source 1..12: mol_type = other RNA
aaggaagatggc

SEQ ID NO: 3291 - RNA, 11 nt, synthetic construct
  misc_feature 1..11: note = Description of Artificial Sequence: Synthetic Antisense oligonucleotide
  modified_base 10..11: mod_base = OTHER; note = bicyclic nucleic acid (BNA)
  source 1..11: mol_type = other RNA
aaggaagatgg

SEQ ID NO: 3292 - DNA, 10 bp, synthetic construct
  misc_feature 1..10: note = Description of Artificial Sequence: Synthetic Antisense oligonucleotide
  modified_base 9..10: mod_base = OTHER; note = bicyclic nucleic acid (BNA)
  source 1..10: mol_type = other DNA
aaggaagatg

SEQ ID NO: 3293-3294 - skipped (2 entries)

SEQ ID NO: 3295 - RNA, 19 nt, synthetic construct
  misc_feature 1..19: note = Description of Artificial Sequence: Synthetic Antisense oligonucleotide
  modified_base 18..19: mod_base = OTHER; note = bicyclic nucleic acid (BNA)
  source 1..19: mol_type = other RNA
aggaagatggcatttctag

SEQ ID NO: 3296 - DNA, 18 bp, synthetic construct
  misc_feature 1..18: note = Description of Artificial Sequence: Synthetic Antisense oligonucleotide
  misc_feature 1..18: note = Original Sequence: aggaagauggcauuucta
  modified_base 17..18: mod_base = OTHER; note = bicyclic nucleic acid (BNA)
  source 1..18: mol_type = other DNA
  modified_base 8: mod_base = OTHER; note = Uracil
  modified_base 13: mod_base = OTHER; note = Uracil
  modified_base 14: mod_base = OTHER; note = Uracil
  modified_base 15: mod_base = OTHER; note = Uracil
aggaagatggcatttcta

SEQ ID NO: 3297 - DNA, 17 bp, synthetic construct
  misc_feature 1..17: note = Description of Artificial Sequence: Synthetic Antisense oligonucleotide
  misc_feature 1..17: note = Original Sequence: aggaagauggcauuuct
  modified_base 16..17: mod_base = OTHER; note = bicyclic nucleic acid (BNA)
  source 1..17: mol_type = other DNA
  modified_base 8: mod_base = OTHER; note = Uracil
  modified_base 13: mod_base = OTHER; note = Uracil
  modified_base 14: mod_base = OTHER; note = Uracil
  modified_base 15: mod_base = OTHER; note = Uracil
aggaagatggcatttct

SEQ ID NO: 3298 - DNA, 16 bp, synthetic construct
  misc_feature 1..16: note = Description of Artificial Sequence: Synthetic Antisense oligonucleotide
  misc_feature 1..16: note = Original Sequence: aggaagauggcauutc
  modified_base 15..16: mod_base = OTHER; note = bicyclic nucleic acid (BNA)
  source 1..16: mol_type = other DNA
  modified_base 8: mod_base = OTHER; note = Uracil
  modified_base 13: mod_base = OTHER; note = Uracil
  modified_base 14: mod_base = OTHER; note = Uracil
aggaagatggcatttc

SEQ ID NO: 3299 - DNA, 15 bp, synthetic construct
  misc_feature 1..15: note = Description of Artificial Sequence: Synthetic Antisense oligonucleotide
  misc_feature 1..15: note = Original Sequence: aggaagauggcautt
  modified_base 14..15: mod_base = OTHER; note = bicyclic nucleic acid (BNA)
  source 1..15: mol_type = other DNA
  modified_base 8: mod_base = OTHER; note = Uracil
  modified_base 13: mod_base = OTHER; note = Uracil
aggaagatggcattt

SEQ ID NO: 3300 - DNA, 14 bp, synthetic construct
  misc_feature 1..14: note = Description of Artificial Sequence: Synthetic Antisense oligonucleotide
  misc_feature 1..14: note = Original Sequence: aggaagauggcatt
  modified_base 13..14: mod_base = OTHER; note = bicyclic nucleic acid (BNA)
  source 1..14: mol_type = other DNA
  modified_base 8: mod_base = OTHER; note = Uracil
aggaagatggcatt

SEQ ID NO: 3301 - DNA, 13 bp, synthetic construct
  misc_feature 1..13: note = Description of Artificial Sequence: Synthetic Antisense oligonucleotide
  misc_feature 1..13: note = Original Sequence: aggaagauggcat
  modified_base 12..13: mod_base = OTHER; note = bicyclic nucleic acid (BNA)
  source 1..13: mol_type = other DNA
  modified_base 8: mod_base = OTHER; note = Uracil
aggaagatggcat

SEQ ID NO: 3302 - RNA, 12 nt, synthetic construct
  misc_feature 1..12: note = Description of Artificial Sequence: Synthetic Antisense oligonucleotide
  modified_base 11..12: mod_base = OTHER; note = bicyclic nucleic acid (BNA)
  source 1..12: mol_type = other RNA
aggaagatggca

SEQ ID NO: 3303 - RNA, 10 nt, synthetic construct
  misc_feature 1..10: note = Description of Artificial Sequence: Synthetic Antisense oligonucleotide
  modified_base 9..10: mod_base = OTHER; note = bicyclic nucleic acid (BNA)
  source 1..10: mol_type = other RNA
aggaagatgg

SEQ ID NO: 3304-3305 - skipped (2 entries)

SEQ ID NO: 3306 - RNA, 18 nt, synthetic construct
  misc_feature 1..18: note = Description of Artificial Sequence: Synthetic Antisense oligonucleotide
  modified_base 17..18: mod_base = OTHER; note = bicyclic nucleic acid (BNA)
  source 1..18: mol_type = other RNA
ggaagatggcatttctag

SEQ ID NO: 3307 - DNA, 17 bp, synthetic construct
  misc_feature 1..17: note = Description of Artificial Sequence: Synthetic Antisense oligonucleotide
  misc_feature 1..17: note = Original Sequence: ggaagauggcauuucta
  modified_base 16..17: mod_base = OTHER; note = bicyclic nucleic acid (BNA)
  source 1..17: mol_type = other DNA
  modified_base 7: mod_base = OTHER; note = Uracil
  modified_base 12: mod_base = OTHER; note = Uracil
  modified_base 13: mod_base = OTHER; note = Uracil
  modified_base 14: mod_base = OTHER; note = Uracil
ggaagatggcatttcta

SEQ ID NO: 3308 - DNA, 16 bp, synthetic construct
  misc_feature 1..16: note = Description of Artificial Sequence: Synthetic Antisense oligonucleotide
  misc_feature 1..16: note = Original Sequence: ggaagauggcauuuct
  modified_base 15..16: mod_base = OTHER; note = bicyclic nucleic acid (BNA)
  source 1..16: mol_type = other DNA
  modified_base 7: mod_base = OTHER; note = Uracil
  modified_base 12: mod_base = OTHER; note = Uracil
  modified_base 13: mod_base = OTHER; note = Uracil
  modified_base 14: mod_base = OTHER; note = Uracil
ggaagatggcatttct

SEQ ID NO: 3309 - DNA, 15 bp, synthetic construct
  misc_feature 1..15: note = Description of Artificial Sequence: Synthetic Antisense oligonucleotide
  misc_feature 1..15: note = Original Sequence: ggaagauggcauutc
  modified_base 14..15: mod_base = OTHER; note = bicyclic nucleic acid (BNA)
  source 1..15: mol_type = other DNA
  modified_base 7: mod_base = OTHER; note = Uracil
  modified_base 12: mod_base = OTHER; note = Uracil
  modified_base 13: mod_base = OTHER; note = Uracil
ggaagatggcatttc

SEQ ID NO: 3310 - DNA, 14 bp, synthetic construct
  misc_feature 1..14: note = Description of Artificial Sequence: Synthetic Antisense oligonucleotide
  misc_feature 1..14: note = Original Sequence: ggaagauggcautt
  modified_base 13..14: mod_base = OTHER; note = bicyclic nucleic acid (BNA)
  source 1..14: mol_type = other DNA
  modified_base 7: mod_base = OTHER; note = Uracil
  modified_base 12: mod_base = OTHER; note = Uracil
ggaagatggcattt

SEQ ID NO: 3311 - DNA, 13 bp, synthetic construct
  misc_feature 1..13: note = Description of Artificial Sequence: Synthetic Antisense oligonucleotide
  misc_feature 1..13: note = Original Sequence: ggaagauggcatt
  modified_base 12..13: mod_base = OTHER; note = bicyclic nucleic acid (BNA)
  source 1..13: mol_type = other DNA
  modified_base 7: mod_base = OTHER; note = Uracil
ggaagatggcatt

SEQ ID NO: 3312 - DNA, 12 bp, synthetic construct
  misc_feature 1..12: note = Description of Artificial Sequence: Synthetic Antisense oligonucleotide
  misc_feature 1..12: note = Original Sequence: ggaagauggcat
  modified_base 11..12: mod_base = OTHER; note = bicyclic nucleic acid (BNA)
  source 1..12: mol_type = other DNA
  modified_base 7: mod_base = OTHER; note = Uracil
ggaagatggcat

SEQ ID NO: 3313 - RNA, 11 nt, synthetic construct
  misc_feature 1..11: note = Description of Artificial Sequence: Synthetic Antisense oligonucleotide
  modified_base 10..11: mod_base = OTHER; note = bicyclic nucleic acid (BNA)
  source 1..11: mol_type = other RNA
ggaagatggca

SEQ ID NO: 3314 - RNA, 10 nt, synthetic construct
  misc_feature 1..10: note = Description of Artificial Sequence: Synthetic Antisense oligonucleotide
  modified_base 9..10: mod_base = OTHER; note = bicyclic nucleic acid (BNA)
  source 1..10: mol_type = other RNA
ggaagatggc

SEQ ID NO: 3315 - skipped

SEQ ID NO: 3316 - RNA, 17 nt, synthetic construct
  misc_feature 1..17: note = Description of Artificial Sequence: Synthetic Antisense oligonucleotide
  modified_base 16..17: mod_base = OTHER; note = bicyclic nucleic acid (BNA)
  source 1..17: mol_type = other RNA
gaagatggcatttctag

SEQ ID NO: 3317 - DNA, 16 bp, synthetic construct
  misc_feature 1..16: note = Description of Artificial Sequence: Synthetic Antisense oligonucleotide
  misc_feature 1..16: note = Original Sequence: gaagauggcauuucta
  modified_base 15..16: mod_base = OTHER; note = bicyclic nucleic acid (BNA)
  source 1..16: mol_type = other DNA
  modified_base 6: mod_base = OTHER; note = Uracil
  modified_base 11: mod_base = OTHER; note = Uracil
  modified_base 12: mod_base = OTHER; note = Uracil
  modified_base 13: mod_base = OTHER; note = Uracil
gaagatggcatttcta

SEQ ID NO: 3318 - DNA, 14 bp, synthetic construct
  misc_feature 1..14: note = Description of Artificial Sequence: Synthetic Antisense oligonucleotide
  misc_feature 1..14: note = Original Sequence: gaagauggcauutc
  modified_base 13..14: mod_base = OTHER; note = bicyclic nucleic acid (BNA)
  source 1..14: mol_type = other DNA
  modified_base 6: mod_base = OTHER; note = Uracil
  modified_base 11: mod_base = OTHER; note = Uracil
  modified_base 12: mod_base = OTHER; note = Uracil
gaagatggcatttc

SEQ ID NO: 3319 - DNA, 13 bp, synthetic construct
  misc_feature 1..13: note = Description of Artificial Sequence: Synthetic Antisense oligonucleotide
  misc_feature 1..13: note = Original Sequence: gaagauggcautt
  modified_base 12..13: mod_base = OTHER; note = bicyclic nucleic acid (BNA)
  source 1..13: mol_type = other DNA
  modified_base 6: mod_base = OTHER; note = Uracil
  modified_base 11: mod_base = OTHER; note = Uracil
gaagatggcattt

SEQ ID NO: 3320 - DNA, 12 bp, synthetic construct
  misc_feature 1..12: note = Description of Artificial Sequence: Synthetic Antisense oligonucleotide
  misc_feature 1..12: note = Original Sequence: gaagauggcatt
  modified_base 11..12: mod_base = OTHER; note = bicyclic nucleic acid (BNA)
  source 1..12: mol_type = other DNA
  modified_base 6: mod_base = OTHER; note = Uracil
gaagatggcatt

SEQ ID NO: 3321 - DNA, 11 bp, synthetic construct
  misc_feature 1..11: note = Description of Artificial Sequence: Synthetic Antisense oligonucleotide
  misc_feature 1..11: note = Original Sequence: gaagauggcat
  modified_base 10..11: mod_base = OTHER; note = bicyclic nucleic acid (BNA)
  source 1..11: mol_type = other DNA
  modified_base 6: mod_base = OTHER; note = Uracil
gaagatggcat

SEQ ID NO: 3322 - RNA, 10 nt, synthetic construct
  misc_feature 1..10: note = Description of Artificial Sequence: Synthetic Antisense oligonucleotide
  modified_base 9..10: mod_base = OTHER; note = bicyclic nucleic acid (BNA)
  source 1..10: mol_type = other RNA
gaagatggca

SEQ ID NO: 3323-3324 - skipped (2 entries)

SEQ ID NO: 3325 - RNA, 16 nt, synthetic construct
  misc_feature 1..16: note = Description of Artificial Sequence: Synthetic Antisense oligonucleotide
  modified_base 15..16: mod_base = OTHER; note = bicyclic nucleic acid (BNA)
  source 1..16: mol_type = other RNA
aagatggcatttctag

SEQ ID NO: 3326 - DNA, 15 bp, synthetic construct
  misc_feature 1..15: note = Description of Artificial Sequence: Synthetic Antisense oligonucleotide
  misc_feature 1..15: note = Original Sequence: aagauggcauuucta
  modified_base 14..15: mod_base = OTHER; note = bicyclic nucleic acid (BNA)
  source 1..15: mol_type = other DNA
  modified_base 5: mod_base = OTHER; note = Uracil
  modified_base 10: mod_base = OTHER; note = Uracil
  modified_base 11: mod_base = OTHER; note = Uracil
  modified_base 12: mod_base = OTHER; note = Uracil
aagatggcatttcta

SEQ ID NO: 3327 - DNA, 14 bp, synthetic construct
  misc_feature 1..14: note = Description of Artificial Sequence: Synthetic Antisense oligonucleotide
  misc_feature 1..14: note = Original Sequence: aagauggcauuuct
  modified_base 13..14: mod_base = OTHER; note = bicyclic nucleic acid (BNA)
  source 1..14: mol_type = other DNA
  modified_base 5: mod_base = OTHER; note = Uracil
  modified_base 10: mod_base = OTHER; note = Uracil
  modified_base 11: mod_base = OTHER; note = Uracil
  modified_base 12: mod_base = OTHER; note = Uracil
aagatggcatttct

SEQ ID NO: 3328 - DNA, 13 bp, synthetic construct
  misc_feature 1..13: note = Description of Artificial Sequence: Synthetic Antisense oligonucleotide
  misc_feature 1..13: note = Original Sequence: aagauggcauutc
  modified_base 12..13: mod_base = OTHER; note = bicyclic nucleic acid (BNA)
  source 1..13: mol_type = other DNA
  modified_base 5: mod_base = OTHER; note = Uracil
  modified_base 10: mod_base = OTHER; note = Uracil
  modified_base 11: mod_base = OTHER; note = Uracil
aagatggcatttc

SEQ ID NO: 3329 - DNA, 12 bp, synthetic construct
  misc_feature 1..12: note = Description of Artificial Sequence: Synthetic Antisense oligonucleotide
  misc_feature 1..12: note = Original Sequence: aagauggcautt
  modified_base 11..12: mod_base = OTHER; note = bicyclic nucleic acid (BNA)
  source 1..12: mol_type = other DNA
  modified_base 5: mod_base = OTHER; note = Uracil
  modified_base 10: mod_base = OTHER; note = Uracil
aagatggcattt

SEQ ID NO: 3330 - DNA, 11 bp, synthetic construct
  misc_feature 1..11: note = Description of Artificial Sequence: Synthetic Antisense oligonucleotide
  misc_feature 1..11: note = Original Sequence: aagauggcatt
  modified_base 10..11: mod_base = OTHER; note = bicyclic nucleic acid (BNA)
  source 1..11: mol_type = other DNA
  modified_base 5: mod_base = OTHER; note = Uracil
aagatggcatt

SEQ ID NO: 3331 - DNA, 10 bp, synthetic construct
  misc_feature 1..10: note = Description of Artificial Sequence: Synthetic Antisense oligonucleotide
  misc_feature 1..10: note = Original Sequence: aagauggcat
  modified_base 9..10: mod_base = OTHER; note = bicyclic nucleic acid (BNA)
  source 1..10: mol_type = other DNA
  modified_base 5: mod_base = OTHER; note = Uracil
aagatggcat

SEQ ID NO: 3332-3333 - skipped (2 entries)

SEQ ID NO: 3334 - RNA, 15 nt, synthetic construct
  misc_feature 1..15: note = Description of Artificial Sequence: Synthetic Antisense oligonucleotide
  modified_base 14..15: mod_base = OTHER; note = bicyclic nucleic acid (BNA)
  source 1..15: mol_type = other RNA
agatggcatttctag

SEQ ID NO: 3335 - DNA, 14 bp, synthetic construct
  misc_feature 1..14: note = Description of Artificial Sequence: Synthetic Antisense oligonucleotide
  misc_feature 1..14: note = Original Sequence: agauggcauuucta
  modified_base 13..14: mod_base = OTHER; note = bicyclic nucleic acid (BNA)
  source 1..14: mol_type = other DNA
  modified_base 4: mod_base = OTHER; note = Uracil
  modified_base 9: mod_base = OTHER; note = Uracil
  modified_base 10: mod_base = OTHER; note = Uracil
  modified_base 11: mod_base = OTHER; note = Uracil
agatggcatttcta

SEQ ID NO: 3336 - DNA, 13 bp, synthetic construct
  misc_feature 1..13: note = Description of Artificial Sequence: Synthetic Antisense oligonucleotide
  misc_feature 1..13: note = Original Sequence: agauggcauuuct
  modified_base 12..13: mod_base = OTHER; note = bicyclic nucleic acid (BNA)
  source 1..13: mol_type = other DNA
  modified_base 4: mod_base = OTHER; note = Uracil
  modified_base 9: mod_base = OTHER; note = Uracil
  modified_base 10: mod_base = OTHER; note = Uracil
  modified_base 11: mod_base = OTHER; note = Uracil
agatggcatttct

SEQ ID NO: 3337 - DNA, 12 bp, synthetic construct
  misc_feature 1..12: note = Description of Artificial Sequence: Synthetic Antisense oligonucleotide
  misc_feature 1..12: note = Original Sequence: agauggcauutc
  modified_base 11..12: mod_base = OTHER; note = bicyclic nucleic acid (BNA)
  source 1..12: mol_type = other DNA
  modified_base 4: mod_base = OTHER; note = Uracil
  modified_base 9: mod_base = OTHER; note = Uracil
  modified_base 10: mod_base = OTHER; note = Uracil
agatggcatttc

SEQ ID NO: 3338 - DNA, 11 bp, synthetic construct
  misc_feature 1..11: note = Description of Artificial Sequence: Synthetic Antisense oligonucleotide
  misc_feature 1..11: note = Original Sequence: agauggcautt
  modified_base 10..11: mod_base = OTHER; note = bicyclic nucleic acid (BNA)
  source 1..11: mol_type = other DNA
  modified_base 4: mod_base = OTHER; note = Uracil
  modified_base 9: mod_base = OTHER; note = Uracil
agatggcattt

SEQ ID NO: 3339 - DNA, 10 bp, synthetic construct
  misc_feature 1..10: note = Description of Artificial Sequence: Synthetic Antisense oligonucleotide
  misc_feature 1..10: note = Original Sequence: agauggcatt
  modified_base 9..10: mod_base = OTHER; note = bicyclic nucleic acid (BNA)
  source 1..10: mol_type = other DNA
  modified_base 4: mod_base = OTHER; note = Uracil
agatggcatt

SEQ ID NO: 3340-3341 - skipped (2 entries)

SEQ ID NO: 3342 - RNA, 30 nt, synthetic construct; identical to SEQ ID NO: 287
  misc_feature 1..30: note = Description of Artificial Sequence: Synthetic Antisense oligonucleotide
  modified_base 29..30: mod_base = OTHER; note = bicyclic nucleic acid (BNA)
  source 1..30: mol_type = other RNA

SEQ ID NO: 3343 - DNA, 29 bp, synthetic construct
  misc_feature 1..29: note = Description of Artificial Sequence: Synthetic Antisense oligonucleotide
  misc_feature 1..29: note = Original Sequence: cuccaacaucaaggaagauggcauuucta
  modified_base 28..29: mod_base = OTHER; note = bicyclic nucleic acid (BNA)
  source 1..29: mol_type = other DNA
  modified_base 2: mod_base = OTHER; note = Uracil
  modified_base 9: mod_base = OTHER; note = Uracil
  modified_base 19: mod_base = OTHER; note = Uracil
  modified_base 24: mod_base = OTHER; note = Uracil
  modified_base 25: mod_base = OTHER; note = Uracil
  modified_base 26: mod_base = OTHER; note = Uracil
ctccaacatcaaggaagatggcatttcta

SEQ ID NO: 3344 - DNA, 28 bp, synthetic construct
  misc_feature 1..28: note = Description of Artificial Sequence: Synthetic Antisense oligonucleotide
  misc_feature 1..28: note = Original Sequence: cuccaacaucaaggaagauggcauuuct
  modified_base 27..28: mod_base = OTHER; note = bicyclic nucleic acid (BNA)
  source 1..28: mol_type = other DNA
  modified_base 2: mod_base = OTHER; note = Uracil
  modified_base 9: mod_base = OTHER; note = Uracil
  modified_base 19: mod_base = OTHER; note = Uracil
  modified_base 24: mod_base = OTHER; note = Uracil
  modified_base 25: mod_base = OTHER; note = Uracil
  modified_base 26: mod_base = OTHER; note = Uracil
ctccaacatcaaggaagatggcatttct

SEQ ID NO: 3345 - DNA, 27 bp, synthetic construct
  misc_feature 1..27: note = Description of Artificial Sequence: Synthetic Antisense oligonucleotide
  misc_feature 1..27: note = Original Sequence: cuccaacaucaaggaagauggcauutc
  modified_base 26..27: mod_base = OTHER; note = bicyclic nucleic acid (BNA)
  source 1..27: mol_type = other DNA
  modified_base 2: mod_base = OTHER; note = Uracil
  modified_base 9: mod_base = OTHER; note = Uracil
  modified_base 19: mod_base = OTHER; note = Uracil
  modified_base 24: mod_base = OTHER; note = Uracil
  modified_base 25: mod_base = OTHER; note = Uracil
ctccaacatcaaggaagatggcatttc

SEQ ID NO: 3346 - DNA, 26 bp, synthetic construct
  misc_feature 1..26: note = Description of Artificial Sequence: Synthetic Antisense oligonucleotide
  misc_feature 1..26: note = Original Sequence: cuccaacaucaaggaagauggcautt
  modified_base 25..26: mod_base = OTHER; note = bicyclic nucleic acid (BNA)
  source 1..26: mol_type = other DNA
  modified_base 2: mod_base = OTHER; note = Uracil
  modified_base 9: mod_base = OTHER; note = Uracil
  modified_base 19: mod_base = OTHER; note = Uracil
  modified_base 24: mod_base = OTHER; note = Uracil
ctccaacatcaaggaagatggcattt

SEQ ID NO: 3347 - DNA, 25 bp, synthetic construct
  misc_feature 1..25: note = Description of Artificial Sequence: Synthetic Antisense oligonucleotide
  misc_feature 1..25: note = Original Sequence: cuccaacaucaaggaagauggcatt
  modified_base 24..25: mod_base = OTHER; note = bicyclic nucleic acid (BNA)
  source 1..25: mol_type = other DNA
  modified_base 2: mod_base = OTHER; note = Uracil
  modified_base 9: mod_base = OTHER; note = Uracil
  modified_base 19: mod_base = OTHER; note = Uracil
ctccaacatcaaggaagatggcatt

SEQ ID NO: 3348 - DNA, 24 bp, synthetic construct
  misc_feature 1..24: note = Description of Artificial Sequence: Synthetic Antisense oligonucleotide
  misc_feature 1..24: note = Original Sequence: cuccaacaucaaggaagauggcat
  modified_base 23..24: mod_base = OTHER; note = bicyclic nucleic acid (BNA)
  source 1..24: mol_type = other DNA
  modified_base 2: mod_base = OTHER; note = Uracil
  modified_base 9: mod_base = OTHER; note = Uracil
  modified_base 19: mod_base = OTHER; note = Uracil
ctccaacatcaaggaagatggcat

SEQ ID NO: 3349 - RNA, 23 nt, synthetic construct
  misc_feature 1..23: note = Description of Artificial Sequence: Synthetic Antisense oligonucleotide
  modified_base 22..23: mod_base = OTHER; note = bicyclic nucleic acid (BNA)
  source 1..23: mol_type = other RNA
ctccaacatcaaggaagatggca

SEQ ID NO: 3350 - RNA, 22 nt, synthetic construct
  misc_feature 1..22: note = Description of Artificial Sequence: Synthetic Antisense oligonucleotide
  modified_base 21..22: mod_base = OTHER; note = bicyclic nucleic acid (BNA)
  source 1..22: mol_type = other RNA
ctccaacatcaaggaagatggc

SEQ ID NO: 3351 - RNA, 21 nt, synthetic construct
  misc_feature 1..21: note = Description of Artificial Sequence: Synthetic Antisense oligonucleotide
  modified_base 20..21: mod_base = OTHER; note = bicyclic nucleic acid (BNA)
  source 1..21: mol_type = other RNA
ctccaacatcaaggaagatgg

SEQ ID NO: 3352 - DNA, 20 bp, synthetic construct
  misc_feature 1..20: note = Description of Artificial Sequence: Synthetic Antisense oligonucleotide
  misc_feature 1..20: note = Original Sequence: cuccaacaucaaggaagatg
  modified_base 19..20: mod_base = OTHER; note = bicyclic nucleic acid (BNA)
  source 1..20: mol_type = other DNA
  modified_base 2: mod_base = OTHER; note = Uracil
  modified_base 9: mod_base = OTHER; note = Uracil
ctccaacatcaaggaagatg

SEQ ID NO: 3353 - DNA, 19 bp, synthetic construct
  misc_feature 1..19: note = Description of Artificial Sequence: Synthetic Antisense oligonucleotide
  misc_feature 1..19: note = Original Sequence: cuccaacaucaaggaagat
  modified_base 18..19: mod_base = OTHER; note = bicyclic nucleic acid (BNA)
  source 1..19: mol_type = other DNA
  modified_base 2: mod_base = OTHER; note = Uracil
  modified_base 9: mod_base = OTHER; note = Uracil
ctccaacatcaaggaagat

SEQ ID NO: 3354 - RNA, 18 nt, synthetic construct
  misc_feature 1..18: note = Description of Artificial Sequence: Synthetic Antisense oligonucleotide
  modified_base 17..18: mod_base = OTHER; note = bicyclic nucleic acid (BNA)
  source 1..18: mol_type = other RNA
ctccaacatcaaggaaga

SEQ ID NO: 3355 - RNA, 17 nt, synthetic construct
  misc_feature 1..17: note = Description of Artificial Sequence: Synthetic Antisense oligonucleotide
  modified_base 16..17: mod_base = OTHER; note = bicyclic nucleic acid (BNA)
  source 1..17: mol_type = other RNA
ctccaacatcaaggaag

SEQ ID NO: 3356 - RNA, 29 nt, synthetic construct
  misc_feature 1..29: note = Description of Artificial Sequence: Synthetic Antisense oligonucleotide
  modified_base 28..29: mod_base = OTHER; note = bicyclic nucleic acid (BNA)
  source 1..29: mol_type = other RNA
tccaacatcaaggaagatggcatttctag

SEQ ID NO: 3357 - DNA, 28 bp, synthetic construct
  misc_feature 1..28: note = Description of Artificial Sequence: Synthetic Antisense oligonucleotide
  misc_feature 1..28: note = Original Sequence: uccaacaucaaggaagauggcauuucta
  modified_base 27..28: mod_base = OTHER; note = bicyclic nucleic acid (BNA)
  source 1..28: mol_type = other DNA
  modified_base 1: mod_base = OTHER; note = Uracil
  modified_base 8: mod_base = OTHER; note = Uracil
  modified_base 18: mod_base = OTHER; note = Uracil
  modified_base 23: mod_base = OTHER; note = Uracil
  modified_base 24: mod_base = OTHER; note = Uracil
  modified_base 25: mod_base = OTHER; note = Uracil
tccaacatcaaggaagatggcatttcta

SEQ ID NO: 3358 - DNA, 27 bp, synthetic construct
  misc_feature 1..27: note = Description of Artificial Sequence: Synthetic Antisense oligonucleotide
  misc_feature 1..27: note = Original Sequence: uccaacaucaaggaagauggcauuuct
  modified_base 26..27: mod_base = OTHER; note = bicyclic nucleic acid (BNA)
  source 1..27: mol_type = other DNA
  modified_base 1: mod_base = OTHER; note = Uracil
  modified_base 8: mod_base = OTHER; note = Uracil
  modified_base 18: mod_base = OTHER; note = Uracil
  modified_base 23: mod_base = OTHER; note = Uracil
  modified_base 24: mod_base = OTHER; note = Uracil
  modified_base 25: mod_base = OTHER; note = Uracil
tccaacatcaaggaagatggcatttct

SEQ ID NO: 3359 - DNA, 26 bp, synthetic construct
  misc_feature 1..26: note = Description of Artificial Sequence: Synthetic Antisense oligonucleotide
  misc_feature 1..26: note = Original Sequence: uccaacaucaaggaagauggcauutc
  modified_base 25..26: mod_base = OTHER; note = bicyclic nucleic acid (BNA)
  source 1..26: mol_type = other DNA
  modified_base 1: mod_base = OTHER; note = Uracil
  modified_base 8: mod_base = OTHER; note = Uracil
  modified_base 18: mod_base = OTHER; note = Uracil
  modified_base 23: mod_base = OTHER; note = Uracil
  modified_base 24: mod_base = OTHER; note = Uracil
tccaacatcaaggaagatggcatttc

SEQ ID NO: 3360 - DNA, 25 bp, synthetic construct
  misc_feature 1..25: note = Description of Artificial Sequence: Synthetic Antisense oligonucleotide
  misc_feature 1..25: note = Original Sequence: uccaacaucaaggaagauggcautt
  modified_base 24..25: mod_base = OTHER; note = bicyclic nucleic acid (BNA)
  source 1..25: mol_type = other DNA
  modified_base 1: mod_base = OTHER; note = Uracil
  modified_base 8: mod_base = OTHER; note = Uracil
  modified_base 18: mod_base = OTHER; note = Uracil
  modified_base 23: mod_base = OTHER; note = Uracil
tccaacatcaaggaagatggcattt

SEQ ID NO: 3361 - DNA, 24 bp, synthetic construct
  misc_feature 1..24: note = Description of Artificial Sequence: Synthetic Antisense oligonucleotide
  misc_feature 1..24: note = Original Sequence: uccaacaucaaggaagauggcatt
  modified_base 23..24: mod_base = OTHER; note = bicyclic nucleic acid (BNA)
  source 1..24: mol_type = other DNA
  modified_base 1: mod_base = OTHER; note = Uracil
  modified_base 8: mod_base = OTHER; note = Uracil
  modified_base 18: mod_base = OTHER; note = Uracil
tccaacatcaaggaagatggcatt

SEQ ID NO: 3362 - DNA, 23 bp, synthetic construct
  misc_feature 1..23: note = Description of Artificial Sequence: Synthetic Antisense oligonucleotide
  misc_feature 1..23: note = Original Sequence: uccaacaucaaggaagauggcat
  modified_base 22..23: mod_base = OTHER; note = bicyclic nucleic acid (BNA)
  source 1..23: mol_type = other DNA
  modified_base 1: mod_base = OTHER; note = Uracil
  modified_base 8: mod_base = OTHER; note = Uracil
  modified_base 18: mod_base = OTHER; note = Uracil
tccaacatcaaggaagatggcat

SEQ ID NO: 3363 - RNA, 22 nt, synthetic construct
  misc_feature 1..22: note = Description of Artificial Sequence: Synthetic Antisense oligonucleotide
  modified_base 21..22: mod_base = OTHER; note = bicyclic nucleic acid (BNA)
  source 1..22: mol_type = other RNA
tccaacatcaaggaagatggca

SEQ ID NO: 3364 - RNA, 21 nt, synthetic construct
  misc_feature 1..21: note = Description of Artificial Sequence: Synthetic Antisense oligonucleotide
  modified_base 20..21: mod_base = OTHER; note = bicyclic nucleic acid (BNA)
  source 1..21: mol_type = other RNA
tccaacatcaaggaagatggc

SEQ ID NO: 3365 - RNA, 20 nt, synthetic construct
  misc_feature 1..20: note = Description of Artificial Sequence: Synthetic Antisense oligonucleotide
  modified_base 19..20: mod_base = OTHER; note = bicyclic nucleic acid (BNA)
  source 1..20: mol_type = other RNA
tccaacatcaaggaagatgg

SEQ ID NO: 3366 - DNA, 19 bp, synthetic construct
  misc_feature 1..19: note = Description of Artificial Sequence: Synthetic Antisense oligonucleotide
  misc_feature 1..19: note = Original Sequence: uccaacaucaaggaagatg
  modified_base 18..19: mod_base = OTHER; note = bicyclic nucleic acid (BNA)
  source 1..19: mol_type = other DNA
  modified_base 1: mod_base = OTHER; note = Uracil
  modified_base 8: mod_base = OTHER; note = Uracil
tccaacatcaaggaagatg

SEQ ID NO: 3367 - DNA, 18 bp, synthetic construct
  misc_feature 1..18: note = Description of Artificial Sequence: Synthetic Antisense oligonucleotide
  misc_feature 1..18: note = Original Sequence: uccaacaucaaggaagat
  modified_base 17..18: mod_base = OTHER; note = bicyclic nucleic acid (BNA)
  source 1..18: mol_type = other DNA
  modified_base 1: mod_base = OTHER; note = Uracil
  modified_base 8: mod_base = OTHER; note = Uracil
tccaacatcaaggaagat

SEQ ID NO: 3368 - RNA, 17 nt, synthetic construct
  misc_feature 1..17: note = Description of Artificial Sequence: Synthetic Antisense oligonucleotide
  modified_base 16..17: mod_base = OTHER; note = bicyclic nucleic acid (BNA)
  source 1..17: mol_type = other RNA
tccaacatcaaggaaga

SEQ ID NO: 3369 - RNA, 16 nt, synthetic construct
  misc_feature 1..16: note = Description of Artificial Sequence: Synthetic Antisense oligonucleotide
  modified_base 15..16: mod_base = OTHER; note = bicyclic nucleic acid (BNA)
  source 1..16: mol_type = other RNA
tccaacatcaaggaag

SEQ ID NO: 3370 - RNA, 28 nt, synthetic construct
  misc_feature 1..28: note = Description of Artificial Sequence: Synthetic Antisense oligonucleotide
  modified_base 27..28: mod_base = OTHER; note = bicyclic nucleic acid (BNA)
  source 1..28: mol_type = other RNA
ccaacatcaaggaagatggcatttctag

SEQ ID NO: 3371 - DNA, 27 bp, synthetic construct
  misc_feature 1..27: note = Description of Artificial Sequence: Synthetic Antisense oligonucleotide
  misc_feature 1..27: note = Original Sequence: ccaacaucaaggaagauggcauuucta
  modified_base 26..27: mod_base = OTHER; note = bicyclic nucleic acid (BNA)
  source 1..27: mol_type = other DNA
  modified_base 7: mod_base = OTHER; note = Uracil
  modified_base 17: mod_base = OTHER; note = Uracil
  modified_base 22: mod_base = OTHER; note = Uracil
  modified_base 23: mod_base = OTHER; note = Uracil
  modified_base 24: mod_base = OTHER; note = Uracil
ccaacatcaaggaagatggcatttcta

SEQ ID NO: 3372 - DNA, 26 bp, synthetic construct
  misc_feature 1..26: note = Description of Artificial Sequence: Synthetic Antisense oligonucleotide
  misc_feature 1..26: note = Original Sequence: ccaacaucaaggaagauggcauuuct
  modified_base 25..26: mod_base = OTHER; note = bicyclic nucleic acid (BNA)
  source 1..26: mol_type = other DNA
  modified_base 7: mod_base = OTHER; note = Uracil
  modified_base 17: mod_base = OTHER; note = Uracil
  modified_base 22: mod_base = OTHER; note = Uracil
  modified_base 23: mod_base = OTHER; note = Uracil
  modified_base 24: mod_base = OTHER; note = Uracil
ccaacatcaaggaagatggcatttct

SEQ ID NO: 3373 - DNA, 25 bp, synthetic construct
  misc_feature 1..25: note = Description of Artificial Sequence: Synthetic Antisense oligonucleotide
  misc_feature 1..25: note = Original Sequence: ccaacaucaaggaagauggcauutc
  modified_base 24..25: mod_base = OTHER; note = bicyclic nucleic acid (BNA)
  source 1..25: mol_type = other DNA
  modified_base 7: mod_base = OTHER; note = Uracil
  modified_base 17: mod_base = OTHER; note = Uracil
  modified_base 22: mod_base = OTHER; note = Uracil
  modified_base 23: mod_base = OTHER; note = Uracil
ccaacatcaaggaagatggcatttc

SEQ ID NO: 3374 - DNA, 24 bp, synthetic construct
  misc_feature 1..24: note = Description of Artificial Sequence: Synthetic Antisense oligonucleotide
  misc_feature 1..24: note = Original Sequence: ccaacaucaaggaagauggcautt
  modified_base 23..24: mod_base = OTHER; note = bicyclic nucleic acid (BNA)
  source 1..24: mol_type = other DNA
  modified_base 7: mod_base = OTHER; note = Uracil
  modified_base 17: mod_base = OTHER; note = Uracil
  modified_base 22: mod_base = OTHER; note = Uracil
ccaacatcaaggaagatggcattt

SEQ ID NO: 3375 - DNA, 23 bp, synthetic construct
  misc_feature 1..23: note = Description of Artificial Sequence: Synthetic Antisense oligonucleotide
  misc_feature 1..23: note = Original Sequence: ccaacaucaaggaagauggcatt
  modified_base 22..23: mod_base = OTHER; note = bicyclic nucleic acid (BNA)
  source 1..23: mol_type = other DNA
  modified_base 7: mod_base = OTHER; note = Uracil
  modified_base 17: mod_base = OTHER; note = Uracil
ccaacatcaaggaagatggcatt

SEQ ID NO: 3376 - DNA, 22 bp, synthetic construct
  misc_feature 1..22: note = Description of Artificial Sequence: Synthetic Antisense oligonucleotide
  misc_feature 1..22: note = Original Sequence: ccaacaucaaggaagauggcat
  modified_base 21..22: mod_base = OTHER; note = bicyclic nucleic acid (BNA)
  source 1..22: mol_type = other DNA
  modified_base 7: mod_base = OTHER; note = Uracil
  modified_base 17: mod_base = OTHER; note = Uracil
ccaacatcaaggaagatggcat

SEQ ID NO: 3377 - RNA, 21 nt, synthetic construct
  misc_feature 1..21: note = Description of Artificial Sequence: Synthetic Antisense oligonucleotide
  modified_base 20..21: mod_base = OTHER; note = bicyclic nucleic acid (BNA)
  source 1..21: mol_type = other RNA
ccaacatcaaggaagatggca

SEQ ID NO: 3378 - RNA, 20 nt, synthetic construct
  misc_feature 1..20: note = Description of Artificial Sequence: Synthetic Antisense oligonucleotide
  modified_base 19..20: mod_base = OTHER; note = bicyclic nucleic acid (BNA)
  source 1..20: mol_type = other RNA
ccaacatcaaggaagatggc

SEQ ID NO: 3379 - RNA, 19 nt, synthetic construct
  misc_feature 1..19: note = Description of Artificial Sequence: Synthetic Antisense oligonucleotide
  modified_base 18..19: mod_base = OTHER; note = bicyclic nucleic acid (BNA)
  source 1..19: mol_type = other RNA
ccaacatcaaggaagatgg

SEQ ID NO: 3380 - DNA, 18 bp, synthetic construct
  misc_feature 1..18: note = Description of Artificial Sequence: Synthetic Antisense oligonucleotide
  misc_feature 1..18: note = Original Sequence: ccaacaucaaggaagatg
  modified_base 17..18: mod_base = OTHER; note = bicyclic nucleic acid (BNA)
  source 1..18: mol_type = other DNA
  modified_base 7: mod_base = OTHER; note = Uracil
ccaacatcaaggaagatg

SEQ ID NO: 3381 - DNA, 17 bp, synthetic construct
  misc_feature 1..17: note = Description of Artificial Sequence: Synthetic Antisense oligonucleotide
  misc_feature 1..17: note = Original Sequence: ccaacaucaaggaagat
  modified_base 16..17: mod_base = OTHER; note = bicyclic nucleic acid (BNA)
  source 1..17: mol_type = other DNA
  modified_base 7: mod_base = OTHER; note = Uracil
ccaacatcaaggaagat

SEQ ID NO: 3382 - RNA, 16 nt, synthetic construct
  misc_feature 1..16: note = Description of Artificial Sequence: Synthetic Antisense oligonucleotide
  modified_base 15..16: mod_base = OTHER; note = bicyclic nucleic acid (BNA)
  source 1..16: mol_type = other RNA
ccaacatcaaggaaga

SEQ ID NO: 3383 - RNA, 15 nt, synthetic construct
  misc_feature 1..15: note = Description of Artificial Sequence: Synthetic Antisense oligonucleotide
  modified_base 14..15: mod_base = OTHER; note = bicyclic nucleic acid (BNA)
  source 1..15: mol_type = other RNA
ccaacatcaaggaag

SEQ ID NO: 3384 - RNA, 27 nt, synthetic construct
  misc_feature 1..27: note = Description of Artificial Sequence: Synthetic Antisense oligonucleotide
  modified_base 26..27: mod_base = OTHER; note = bicyclic nucleic acid (BNA)
  source 1..27: mol_type = other RNA
caacatcaaggaagatggcatttctag

SEQ ID NO: 3385 - DNA, 26 bp, synthetic construct
  misc_feature 1..26: note = Description of Artificial Sequence: Synthetic Antisense oligonucleotide
  misc_feature 1..26: note = Original Sequence: caacaucaaggaagauggcauuucta
  modified_base 25..26: mod_base = OTHER; note = bicyclic nucleic acid (BNA)
  source 1..26: mol_type = other DNA
  modified_base 6: mod_base = OTHER; note = Uracil
  modified_base 16: mod_base = OTHER; note = Uracil
  modified_base 21: mod_base = OTHER; note = Uracil
  modified_base 22: mod_base = OTHER; note = Uracil
  modified_base 23: mod_base = OTHER; note = Uracil
caacatcaaggaagatggcatttcta

SEQ ID NO: 3386 - DNA, 25 bp, synthetic construct
  misc_feature 1..25: note = Description of Artificial Sequence: Synthetic Antisense oligonucleotide
  misc_feature 1..25: note = Original Sequence: caacaucaaggaagauggcauuuct
  modified_base 24..25: mod_base = OTHER; note = bicyclic nucleic acid (BNA)
  source 1..25: mol_type = other DNA
  modified_base 6: mod_base = OTHER; note = Uracil
  modified_base 16: mod_base = OTHER; note = Uracil
  modified_base 21: mod_base = OTHER; note = Uracil
  modified_base 22: mod_base = OTHER; note = Uracil
  modified_base 23: mod_base = OTHER; note = Uracil
caacatcaaggaagatggcatttct

SEQ ID NO: 3387 - DNA, 24 bp, synthetic construct
  misc_feature 1..24: note = Description of Artificial Sequence: Synthetic Antisense oligonucleotide
  misc_feature 1..24: note = Original Sequence: caacaucaaggaagauggcauutc
  modified_base 23..24: mod_base = OTHER; note = bicyclic nucleic acid (BNA)
  source 1..24: mol_type = other DNA
  modified_base 6: mod_base = OTHER; note = Uracil
  modified_base 16: mod_base = OTHER; note = Uracil
  modified_base 21: mod_base = OTHER; note = Uracil
  modified_base 22: mod_base = OTHER; note = Uracil
caacatcaaggaagatggcatttc

SEQ ID NO: 3388 - DNA, 23 bp, synthetic construct
  misc_feature 1..23: note = Description of Artificial Sequence: Synthetic Antisense oligonucleotide
  misc_feature 1..23: note = Original Sequence: caacaucaaggaagauggcautt
  modified_base 22..23: mod_base = OTHER; note = bicyclic nucleic acid (BNA)
  source 1..23: mol_type = other DNA
  modified_base 6: mod_base = OTHER; note = Uracil
  modified_base 16: mod_base = OTHER; note = Uracil
  modified_base 21: mod_base = OTHER; note = Uracil
caacatcaaggaagatggcattt

SEQ ID NO: 3389 - DNA, 22 bp, synthetic construct
  misc_feature 1..22: note = Description of Artificial Sequence: Synthetic Antisense oligonucleotide
  misc_feature 1..22: note = Original Sequence: caacaucaaggaagauggcatt
  modified_base 21..22: mod_base = OTHER; note = bicyclic nucleic acid (BNA)
  source 1..22: mol_type = other DNA
  modified_base 6: mod_base = OTHER; note = Uracil
  modified_base 16: mod_base = OTHER; note = Uracil
caacatcaaggaagatggcatt

SEQ ID NO: 3390 - DNA, 21 bp, synthetic construct
  misc_feature 1..21: note = Description of Artificial Sequence: Synthetic Antisense oligonucleotide
  misc_feature 1..21: note = Original Sequence: caacaucaaggaagauggcat
  modified_base 20..21: mod_base = OTHER; note = bicyclic nucleic acid (BNA)
  source 1..21: mol_type = other DNA
  modified_base 6: mod_base = OTHER; note = Uracil
  modified_base 16: mod_base = OTHER; note = Uracil
caacatcaaggaagatggcat

SEQ ID NO: 3391 - RNA, 20 nt, synthetic construct
  misc_feature 1..20: note = Description of Artificial Sequence: Synthetic Antisense oligonucleotide
  modified_base 19..20: mod_base = OTHER; note = bicyclic nucleic acid (BNA)
  source 1..20: mol_type = other RNA
caacatcaaggaagatggca

SEQ ID NO: 3392 - RNA, 19 nt, synthetic construct
  misc_feature 1..19: note = Description of Artificial Sequence: Synthetic Antisense oligonucleotide
  modified_base 18..19: mod_base = OTHER; note = bicyclic nucleic acid (BNA)
  source 1..19: mol_type = other RNA
caacatcaaggaagatggc

SEQ ID NO: 3393 - RNA, 18 nt, synthetic construct
  misc_feature 1..18: note = Description of Artificial Sequence: Synthetic Antisense oligonucleotide
  modified_base 17..18: mod_base = OTHER; note = bicyclic nucleic acid (BNA)
  source 1..18: mol_type = other RNA
caacatcaaggaagatgg

SEQ ID NO: 3394 - DNA, 17 bp, synthetic construct
  misc_feature 1..17: note = Description of Artificial Sequence: Synthetic Antisense oligonucleotide
  misc_feature 1..17: note = Original Sequence: caacaucaaggaagatg
  modified_base 16..17: mod_base = OTHER; note = bicyclic nucleic acid (BNA)
  source 1..17: mol_type = other DNA
  modified_base 6: mod_base = OTHER; note = Uracil
caacatcaaggaagatg

SEQ ID NO: 3395 - DNA, 16 bp, synthetic construct
  misc_feature 1..16: note = Description of Artificial Sequence: Synthetic Antisense oligonucleotide
  misc_feature 1..16: note = Original Sequence: caacaucaaggaagat
  modified_base 15..16: mod_base = OTHER; note = bicyclic nucleic acid (BNA)
  source 1..16: mol_type = other DNA
  modified_base 6: mod_base = OTHER; note = Uracil
caacatcaaggaagat

SEQ ID NO: 3396 - RNA, 15 nt, synthetic construct
  misc_feature 1..15: note = Description of Artificial Sequence: Synthetic Antisense oligonucleotide
  modified_base 14..15: mod_base = OTHER; note = bicyclic nucleic acid (BNA)
  source 1..15: mol_type = other RNA
caacatcaaggaaga

SEQ ID NO: 3397 - RNA, 14 nt, synthetic construct
  misc_feature 1..14: note = Description of Artificial Sequence: Synthetic Antisense oligonucleotide
  modified_base 13..14: mod_base = OTHER; note = bicyclic nucleic acid (BNA)
  source 1..14: mol_type = other RNA
caacatcaaggaag

SEQ ID NO: 3398 - RNA, 26 nt, synthetic construct
  misc_feature 1..26: note = Description of Artificial Sequence: Synthetic Antisense oligonucleotide
  modified_base 25..26: mod_base = OTHER; note = bicyclic nucleic acid (BNA)
  source 1..26: mol_type = other RNA
aacatcaaggaagatggcatttctag

SEQ ID NO: 3399 - DNA, 25 bp, synthetic construct
  misc_feature 1..25: note = Description of Artificial Sequence: Synthetic Antisense oligonucleotide
  misc_feature 1..25: note = Original Sequence: aacaucaaggaagauggcauuucta
  modified_base 24..25: mod_base = OTHER; note = bicyclic nucleic acid (BNA)
  source 1..25: mol_type = other DNA
  modified_base 5: mod_base = OTHER; note = Uracil
  modified_base 15: mod_base = OTHER; note = Uracil
  modified_base 20: mod_base = OTHER; note = Uracil
  modified_base 21: mod_base = OTHER; note = Uracil
  modified_base 22: mod_base = OTHER; note = Uracil
aacatcaaggaagatggcatttcta

SEQ ID NO: 3400 - DNA, 24 bp, synthetic construct
  misc_feature 1..24: note = Description of Artificial Sequence: Synthetic Antisense oligonucleotide
  misc_feature 1..24: note = Original Sequence: aacaucaaggaagauggcauuuct
  modified_base 23..24: mod_base = OTHER; note = bicyclic nucleic acid (BNA)
  source 1..24: mol_type = other DNA
  modified_base 5: mod_base = OTHER; note = Uracil
  modified_base 15: mod_base = OTHER; note = Uracil
  modified_base 20: mod_base = OTHER; note = Uracil
  modified_base 21: mod_base = OTHER; note = Uracil
  modified_base 22: mod_base = OTHER; note = Uracil
aacatcaaggaagatggcatttct

SEQ ID NO: 3401 - DNA, 23 bp, synthetic construct
  misc_feature 1..23: note = Description of Artificial Sequence: Synthetic Antisense oligonucleotide
  misc_feature 1..23: note = Original Sequence: aacaucaaggaagauggcauutc
  modified_base 22..23: mod_base = OTHER; note = bicyclic nucleic acid (BNA)
  source 1..23: mol_type = other DNA
  modified_base 5: mod_base = OTHER; note = Uracil
  modified_base 15: mod_base = OTHER; note = Uracil
  modified_base 20: mod_base = OTHER; note = Uracil
  modified_base 21: mod_base = OTHER; note = Uracil
aacatcaaggaagatggcatttc

SEQ ID NO: 3402 - DNA, 22 bp, synthetic construct
  misc_feature 1..22: note = Description of Artificial Sequence: Synthetic Antisense oligonucleotide
  misc_feature 1..22: note = Original Sequence: aacaucaaggaagauggcautt
  modified_base 21..22: mod_base = OTHER; note = bicyclic nucleic acid (BNA)
  source 1..22: mol_type = other DNA
  modified_base 5: mod_base = OTHER; note = Uracil
  modified_base 15: mod_base = OTHER; note = Uracil
  modified_base 20: mod_base = OTHER; note = Uracil
aacatcaaggaagatggcattt

SEQ ID NO: 3403 - DNA, 21 bp, synthetic construct
  misc_feature 1..21: note = Description of Artificial Sequence: Synthetic Antisense oligonucleotide
  misc_feature 1..21: note = Original Sequence: aacaucaaggaagauggcatt
  modified_base 20..21: mod_base = OTHER; note = bicyclic nucleic acid (BNA)
  source 1..21: mol_type = other DNA
  modified_base 5: mod_base = OTHER; note = Uracil
  modified_base 15: mod_base = OTHER; note = Uracil
aacatcaaggaagatggcatt

SEQ ID NO: 3404 - DNA, 20 bp, synthetic construct
  misc_feature 1..20: note = Description of Artificial Sequence: Synthetic Antisense oligonucleotide
  misc_feature 1..20: note = Original Sequence: aacaucaaggaagauggcat
  modified_base 19..20: mod_base = OTHER; note = bicyclic nucleic acid (BNA)
  source 1..20: mol_type = other DNA
  modified_base 5: mod_base = OTHER; note = Uracil
  modified_base 15: mod_base = OTHER; note = Uracil
aacatcaaggaagatggcat

SEQ ID NO: 3405 - RNA, 19 nt, synthetic construct
  misc_feature 1..19: note = Description of Artificial Sequence: Synthetic Antisense oligonucleotide
  modified_base 18..19: mod_base = OTHER; note = bicyclic nucleic acid (BNA)
  source 1..19: mol_type = other RNA
aacatcaaggaagatggca

SEQ ID NO: 3406 - RNA, 18 nt, synthetic construct
  misc_feature 1..18: note = Description of Artificial Sequence: Synthetic Antisense oligonucleotide
  modified_base 17..18: mod_base = OTHER; note = bicyclic nucleic acid (BNA)
  source 1..18: mol_type = other RNA
aacatcaaggaagatggc

SEQ ID NO: 3407 - RNA, 17 nt, synthetic construct
  misc_feature 1..17: note = Description of Artificial Sequence: Synthetic Antisense oligonucleotide
  modified_base 16..17: mod_base = OTHER; note = bicyclic nucleic acid (BNA)
  source 1..17: mol_type = other RNA
aacatcaaggaagatgg

SEQ ID NO: 3408 - DNA, 16 bp, synthetic construct
  misc_feature 1..16: note = Description of Artificial Sequence: Synthetic Antisense oligonucleotide
  misc_feature 1..16: note = Original Sequence: aacaucaaggaagatg
  modified_base 15..16: mod_base = OTHER; note = bicyclic nucleic acid (BNA)
  source 1..16: mol_type = other DNA
  modified_base 5: mod_base = OTHER; note = Uracil
aacatcaaggaagatg

SEQ ID NO: 3409 - DNA, 15 bp, synthetic construct
  misc_feature 1..15: note = Description of Artificial Sequence: Synthetic Antisense oligonucleotide
  misc_feature 1..15: note = Original Sequence: aacaucaaggaagat
  modified_base 14..15: mod_base = OTHER; note = bicyclic nucleic acid (BNA)
  source 1..15: mol_type = other DNA
  modified_base 5: mod_base = OTHER; note = Uracil
aacatcaaggaagat

SEQ ID NO: 3410 - RNA, 14 nt, synthetic construct
  misc_feature 1..14: note = Description of Artificial Sequence: Synthetic Antisense oligonucleotide
  modified_base 13..14: mod_base = OTHER; note = bicyclic nucleic acid (BNA)
  source 1..14: mol_type = other RNA
aacatcaaggaaga

SEQ ID NO: 3411 - RNA, 13 nt, synthetic construct
  misc_feature 1..13: note = Description of Artificial Sequence: Synthetic Antisense oligonucleotide
  modified_base 12..13: mod_base = OTHER; note = bicyclic nucleic acid (BNA)
  source 1..13: mol_type = other RNA
aacatcaaggaag

SEQ ID NO: 3412 - RNA, 25 nt, synthetic construct
  misc_feature 1..25: note = Description of Artificial Sequence: Synthetic Antisense oligonucleotide
  modified_base 24..25: mod_base = OTHER; note = bicyclic nucleic acid (BNA)
  source 1..25: mol_type = other RNA
acatcaaggaagatggcatttctag

SEQ ID NO: 3413 - DNA, 24 bp, synthetic construct
  misc_feature 1..24: note = Description of Artificial Sequence: Synthetic Antisense oligonucleotide
  misc_feature 1..24: note = Original Sequence: acaucaaggaagauggcauuucta
  modified_base 23..24: mod_base = OTHER; note = bicyclic nucleic acid (BNA)
  source 1..24: mol_type = other DNA
  modified_base 4: mod_base = OTHER; note = Uracil
  modified_base 14: mod_base = OTHER; note = Uracil
  modified_base 19: mod_base = OTHER; note = Uracil
  modified_base 20: mod_base = OTHER; note = Uracil
  modified_base 21: mod_base = OTHER; note = Uracil
acatcaaggaagatggcatttcta

SEQ ID NO: 3414 - DNA, 23 bp, synthetic construct
  misc_feature 1..23: note = Description of Artificial Sequence: Synthetic Antisense oligonucleotide
  misc_feature 1..23: note = Original Sequence: acaucaaggaagauggcauuuct
  modified_base 22..23: mod_base = OTHER; note = bicyclic nucleic acid (BNA)
  source 1..23: mol_type = other DNA
  modified_base 4: mod_base = OTHER; note = Uracil
  modified_base 14: mod_base = OTHER; note = Uracil
  modified_base 19: mod_base = OTHER; note = Uracil
  modified_base 20: mod_base = OTHER; note = Uracil
  modified_base 21: mod_base = OTHER; note = Uracil
acatcaaggaagatggcatttct

SEQ ID NO: 3415 - DNA, 22 bp, synthetic construct
  misc_feature 1..22: note = Description of Artificial Sequence: Synthetic Antisense oligonucleotide
  misc_feature 1..22: note = Original Sequence: acaucaaggaagauggcauutc
  modified_base 21..22: mod_base = OTHER; note = bicyclic nucleic acid (BNA)
  source 1..22: mol_type = other DNA
  modified_base 4: mod_base = OTHER; note = Uracil
  modified_base 14: mod_base = OTHER; note = Uracil
  modified_base 19: mod_base = OTHER; note = Uracil
  modified_base 20: mod_base = OTHER; note = Uracil
acatcaaggaagatggcatttc

SEQ ID NO: 3416 - DNA, 21 bp, synthetic construct
  misc_feature 1..21: note = Description of Artificial Sequence: Synthetic Antisense oligonucleotide
  misc_feature 1..21: note = Original Sequence: acaucaaggaagauggcautt
  modified_base 20..21: mod_base = OTHER; note = bicyclic nucleic acid (BNA)
  source 1..21: mol_type = other DNA
  modified_base 4: mod_base = OTHER; note = Uracil
  modified_base 14: mod_base = OTHER; note = Uracil
  modified_base 19: mod_base = OTHER; note = Uracil
acatcaaggaagatggcattt

SEQ ID NO: 3417 - DNA, 20 bp, synthetic construct
  misc_feature 1..20: note = Description of Artificial Sequence: Synthetic Antisense oligonucleotide
  misc_feature 1..20: note = Original Sequence: acaucaaggaagauggcatt
  modified_base 19..20: mod_base = OTHER; note = bicyclic nucleic acid (BNA)
  source 1..20: mol_type = other DNA
  modified_base 4: mod_base = OTHER; note = Uracil
  modified_base 14: mod_base = OTHER; note = Uracil
acatcaaggaagatggcatt

SEQ ID NO: 3418 - DNA, 19 bp, synthetic construct
  misc_feature 1..19: note = Description of Artificial Sequence: Synthetic Antisense oligonucleotide
  misc_feature 1..19: note = Original Sequence: acaucaaggaagauggcat
  modified_base 18..19: mod_base = OTHER; note = bicyclic nucleic acid (BNA)
  source 1..19: mol_type = other DNA
  modified_base 4: mod_base = OTHER; note = Uracil
  modified_base 14: mod_base = OTHER; note = Uracil
acatcaaggaagatggcat

SEQ ID NO: 3419 - RNA, 18 nt, synthetic construct
  misc_feature 1..18: note = Description of Artificial Sequence: Synthetic Antisense oligonucleotide
  modified_base 17..18: mod_base = OTHER; note = bicyclic nucleic acid (BNA)
  source 1..18: mol_type = other RNA
acatcaaggaagatggca

SEQ ID NO: 3420 - RNA, 17 nt, synthetic construct
  misc_feature 1..17: note = Description of Artificial Sequence: Synthetic Antisense oligonucleotide
  modified_base 16..17: mod_base = OTHER; note = bicyclic nucleic acid (BNA)
  source 1..17: mol_type = other RNA
acatcaaggaagatggc

SEQ ID NO: 3421 - RNA, 16 nt, synthetic construct
  misc_feature 1..16: note = Description of Artificial Sequence: Synthetic Antisense oligonucleotide
  modified_base 15..16: mod_base = OTHER; note = bicyclic nucleic acid (BNA)
  source 1..16: mol_type = other RNA
acatcaaggaagatgg

SEQ ID NO: 3422 - DNA, 15 bp, synthetic construct
  misc_feature 1..15: note = Description of Artificial Sequence: Synthetic Antisense oligonucleotide
  misc_feature 1..15: note = Original Sequence: acaucaaggaagatg
  modified_base 14..15: mod_base = OTHER; note = bicyclic nucleic acid (BNA)
  source 1..15: mol_type = other DNA
  modified_base 4: mod_base = OTHER; note = Uracil
acatcaaggaagatg

SEQ ID NO: 3423 - DNA, 14 bp, synthetic construct
  misc_feature 1..14: note = Description of Artificial Sequence: Synthetic Antisense oligonucleotide
  misc_feature 1..14: note = Original Sequence: acaucaaggaagat
  modified_base 13..14: mod_base = OTHER; note = bicyclic nucleic acid (BNA)
  source 1..14: mol_type = other DNA
  modified_base 4: mod_base = OTHER; note = Uracil
acatcaaggaagat

SEQ ID NO: 3424 - RNA, 13 nt, synthetic construct
  misc_feature 1..13: note = Description of Artificial Sequence: Synthetic Antisense oligonucleotide
  modified_base 12..13: mod_base = OTHER; note = bicyclic nucleic acid (BNA)
  source 1..13: mol_type = other RNA
acatcaaggaaga

SEQ ID NO: 3425 - RNA, 12 nt, synthetic construct
  misc_feature 1..12: note = Description of Artificial Sequence: Synthetic Antisense oligonucleotide
  modified_base 11..12: mod_base = OTHER; note = bicyclic nucleic acid (BNA)
  source 1..12: mol_type = other RNA
acatcaaggaag

SEQ ID NO: 3426 - RNA, 24 nt, synthetic construct
  misc_feature 1..24: note = Description of Artificial Sequence: Synthetic Antisense oligonucleotide
  modified_base 23..24: mod_base = OTHER; note = bicyclic nucleic acid (BNA)
  source 1..24: mol_type = other RNA
catcaaggaagatggcatttctag

SEQ ID NO: 3427 - DNA, 23 bp, synthetic construct
  misc_feature 1..23: note = Description of Artificial Sequence: Synthetic Antisense oligonucleotide
  misc_feature 1..23: note = Original Sequence: caucaaggaagauggcauuucta
  modified_base 22..23: mod_base = OTHER; note = bicyclic nucleic acid (BNA)
  source 1..23: mol_type = other DNA
  modified_base 3: mod_base = OTHER; note = Uracil
  modified_base 13: mod_base = OTHER; note = Uracil
  modified_base 18: mod_base = OTHER; note = Uracil
  modified_base 19: mod_base = OTHER; note = Uracil
  modified_base 20: mod_base = OTHER; note = Uracil
catcaaggaagatggcatttcta

SEQ ID NO: 3428 - DNA, 22 bp, synthetic construct
  misc_feature 1..22: note = Description of Artificial Sequence: Synthetic Antisense oligonucleotide
  misc_feature 1..22: note = Original Sequence: caucaaggaagauggcauuuct
  modified_base 21..22: mod_base = OTHER; note = bicyclic nucleic acid (BNA)
  source 1..22: mol_type = other DNA
  modified_base 3: mod_base = OTHER; note = Uracil
  modified_base 13: mod_base = OTHER; note = Uracil
  modified_base 18: mod_base = OTHER; note = Uracil
  modified_base 19: mod_base = OTHER; note = Uracil
  modified_base 20: mod_base = OTHER; note = Uracil
catcaaggaagatggcatttct

SEQ ID NO: 3429 - DNA, 21 bp, synthetic construct
  misc_feature 1..21: note = Description of Artificial Sequence: Synthetic Antisense oligonucleotide
  misc_feature 1..21: note = Original Sequence: caucaaggaagauggcauutc
  modified_base 20..21: mod_base = OTHER; note = bicyclic nucleic acid (BNA)
  source 1..21: mol_type = other DNA
  modified_base 3: mod_base = OTHER; note = Uracil
  modified_base 13: mod_base = OTHER; note = Uracil
  modified_base 18: mod_base = OTHER; note = Uracil
  modified_base 19: mod_base = OTHER; note = Uracil
catcaaggaagatggcatttc

SEQ ID NO: 3430 - DNA, 20 bp, synthetic construct
  misc_feature 1..20: note = Description of Artificial Sequence: Synthetic Antisense oligonucleotide
  misc_feature 1..20: note = Original Sequence: caucaaggaagauggcautt
  modified_base 19..20: mod_base = OTHER; note = bicyclic nucleic acid (BNA)
  source 1..20: mol_type = other DNA
  modified_base 3: mod_base = OTHER; note = Uracil
  modified_base 13: mod_base = OTHER; note = Uracil
  modified_base 18: mod_base = OTHER; note = Uracil
catcaaggaagatggcattt

SEQ ID NO: 3431 - DNA, 19 bp, synthetic construct
  misc_feature 1..19: note = Description of Artificial Sequence: Synthetic Antisense oligonucleotide
  misc_feature 1..19: note = Original Sequence: caucaaggaagauggcatt
  modified_base 18..19: mod_base = OTHER; note = bicyclic nucleic acid (BNA)
  source 1..19: mol_type = other DNA
  modified_base 3: mod_base = OTHER; note = Uracil
  modified_base 13: mod_base = OTHER; note = Uracil
catcaaggaagatggcatt

SEQ ID NO: 3432 - DNA, 18 bp, synthetic construct
  misc_feature 1..18: note = Description of Artificial Sequence: Synthetic Antisense oligonucleotide
  misc_feature 1..18: note = Original Sequence: caucaaggaagauggcat
  modified_base 17..18: mod_base = OTHER; note = bicyclic nucleic acid (BNA)
  source 1..18: mol_type = other DNA
  modified_base 3: mod_base = OTHER; note = Uracil
  modified_base 13: mod_base = OTHER; note = Uracil
catcaaggaagatggcat

SEQ ID NO: 3433 - RNA, 17 nt, synthetic construct
  misc_feature 1..17: note = Description of Artificial Sequence: Synthetic Antisense oligonucleotide
  modified_base 16..17: mod_base = OTHER; note = bicyclic nucleic acid (BNA)
  source 1..17: mol_type = other RNA
catcaaggaagatggca

SEQ ID NO: 3434 - RNA, 16 nt, synthetic construct
  misc_feature 1..16: note = Description of Artificial Sequence: Synthetic Antisense oligonucleotide
  modified_base 15..16: mod_base = OTHER; note = bicyclic nucleic acid (BNA)
  source 1..16: mol_type = other RNA
catcaaggaagatggc

SEQ ID NO: 3435 - RNA, 15 nt, synthetic construct
  misc_feature 1..15: note = Description of Artificial Sequence: Synthetic Antisense oligonucleotide
  modified_base 14..15: mod_base = OTHER; note = bicyclic nucleic acid (BNA)
  source 1..15: mol_type = other RNA
catcaaggaagatgg

SEQ ID NO: 3436 - DNA, 14 bp, synthetic construct
  misc_feature 1..14: note = Description of Artificial Sequence: Synthetic Antisense oligonucleotide
  misc_feature 1..14: note = Original Sequence: caucaaggaagatg
  modified_base 13..14: mod_base = OTHER; note = bicyclic nucleic acid (BNA)
  source 1..14: mol_type = other DNA
  modified_base 3: mod_base = OTHER; note = Uracil
catcaaggaagatg

SEQ ID NO: 3437 - DNA, 13 bp, synthetic construct
  misc_feature 1..13: note = Description of Artificial Sequence: Synthetic Antisense oligonucleotide
  misc_feature 1..13: note = Original Sequence: caucaaggaagat
  modified_base 12..13: mod_base = OTHER; note = bicyclic nucleic acid (BNA)
  source 1..13: mol_type = other DNA
  modified_base 3: mod_base = OTHER; note = Uracil
catcaaggaagat

SEQ ID NO: 3438 - RNA, 12 nt, synthetic construct
  misc_feature 1..12: note = Description of Artificial Sequence: Synthetic Antisense oligonucleotide
  modified_base 11..12: mod_base = OTHER; note = bicyclic nucleic acid (BNA)
  source 1..12: mol_type = other RNA
catcaaggaaga

SEQ ID NO: 3439 - RNA, 11 nt, synthetic construct
  misc_feature 1..11: note = Description of Artificial Sequence: Synthetic Antisense oligonucleotide
  modified_base 10..11: mod_base = OTHER; note = bicyclic nucleic acid (BNA)
  source 1..11: mol_type = other RNA
catcaaggaag

SEQ ID NO: 3440 - RNA, 23 nt, synthetic construct
  misc_feature 1..23: note = Description of Artificial Sequence: Synthetic Antisense oligonucleotide
  modified_base 22..23: mod_base = OTHER; note = bicyclic nucleic acid (BNA)
  source 1..23: mol_type = other RNA
atcaaggaagatggcatttctag

SEQ ID NO: 3441 - DNA, 22 bp, synthetic construct
  misc_feature 1..22: note = Description of Artificial Sequence: Synthetic Antisense oligonucleotide
  misc_feature 1..22: note = Original Sequence: aucaaggaagauggcauuucta
  modified_base 21..22: mod_base = OTHER; note = bicyclic nucleic acid (BNA)
  source 1..22: mol_type = other DNA
  modified_base 2: mod_base = OTHER; note = Uracil
  modified_base 12: mod_base = OTHER; note = Uracil
  modified_base 17: mod_base = OTHER; note = Uracil
  modified_base 18: mod_base = OTHER; note = Uracil
  modified_base 19: mod_base = OTHER; note = Uracil
atcaaggaagatggcatttcta

SEQ ID NO: 3442 - DNA, 21 bp, synthetic construct
  misc_feature 1..21: note = Description of Artificial Sequence: Synthetic Antisense oligonucleotide
  misc_feature 1..21: note = Original Sequence: aucaaggaagauggcauuuct
  modified_base 20..21: mod_base = OTHER; note = bicyclic nucleic acid (BNA)
  source 1..21: mol_type = other DNA
  modified_base 2: mod_base = OTHER; note = Uracil
  modified_base 12: mod_base = OTHER; note = Uracil
  modified_base 17: mod_base = OTHER; note = Uracil
  modified_base 18: mod_base = OTHER; note = Uracil
  modified_base 19: mod_base = OTHER; note = Uracil
atcaaggaagatggcatttct

SEQ ID NO: 3443 - DNA, 20 bp, synthetic construct
  misc_feature 1..20: note = Description of Artificial Sequence: Synthetic Antisense oligonucleotide
  misc_feature 1..20: note = Original Sequence: aucaaggaagauggcauutc
  modified_base 19..20: mod_base = OTHER; note = bicyclic nucleic acid (BNA)
  source 1..20: mol_type = other DNA
  modified_base 2: mod_base = OTHER; note = Uracil
  modified_base 12: mod_base = OTHER; note = Uracil
  modified_base 17: mod_base = OTHER; note = Uracil
  modified_base 18: mod_base = OTHER; note = Uracil
atcaaggaagatggcatttc

SEQ ID NO: 3444 - DNA, 19 bp, synthetic construct
  misc_feature 1..19: note = Description of Artificial Sequence: Synthetic Antisense oligonucleotide
  misc_feature 1..19: note = Original Sequence: aucaaggaagauggcautt
  modified_base 18..19: mod_base = OTHER; note = bicyclic nucleic acid (BNA)
  source 1..19: mol_type = other DNA
  modified_base 2: mod_base = OTHER; note = Uracil
  modified_base 12: mod_base = OTHER; note = Uracil
  modified_base 17: mod_base = OTHER; note = Uracil
atcaaggaagatggcattt

SEQ ID NO: 3445 - DNA, 18 bp, synthetic construct
  misc_feature 1..18: note = Description of Artificial Sequence: Synthetic Antisense oligonucleotide
  misc_feature 1..18: note = Original Sequence: aucaaggaagauggcatt
  modified_base 17..18: mod_base = OTHER; note = bicyclic nucleic acid (BNA)
  source 1..18: mol_type = other DNA
  modified_base 2: mod_base = OTHER; note = Uracil
  modified_base 12: mod_base = OTHER; note = Uracil
atcaaggaagatggcatt

SEQ ID NO: 3446 - DNA, 17 bp, synthetic construct
  misc_feature 1..17: note = Description of Artificial Sequence: Synthetic Antisense oligonucleotide
  misc_feature 1..17: note = Original Sequence: aucaaggaagauggcat
  modified_base 16..17: mod_base = OTHER; note = bicyclic nucleic acid (BNA)
  source 1..17: mol_type = other DNA
  modified_base 2: mod_base = OTHER; note = Uracil
  modified_base 12: mod_base = OTHER; note = Uracil
atcaaggaagatggcat

SEQ ID NO: 3447 - RNA, 16 nt, synthetic construct
  misc_feature 1..16: note = Description of Artificial Sequence: Synthetic Antisense oligonucleotide
  modified_base 15..16: mod_base = OTHER; note = bicyclic nucleic acid (BNA)
  source 1..16: mol_type = other RNA
atcaaggaagatggca

SEQ ID NO: 3448 - RNA, 15 nt, synthetic construct
  misc_feature 1..15: note = Description of Artificial Sequence: Synthetic Antisense oligonucleotide
  modified_base 14..15: mod_base = OTHER; note = bicyclic nucleic acid (BNA)
  source 1..15: mol_type = other RNA
atcaaggaagatggc

SEQ ID NO: 3449 - RNA, 14 nt, synthetic construct
  misc_feature 1..14: note = Description of Artificial Sequence: Synthetic Antisense oligonucleotide
  modified_base 13..14: mod_base = OTHER; note = bicyclic nucleic acid (BNA)
  source 1..14: mol_type = other RNA
atcaaggaagatgg

SEQ ID NO: 3450 - DNA, 13 bp, synthetic construct
  misc_feature 1..13: note = Description of Artificial Sequence: Synthetic Antisense oligonucleotide
  misc_feature 1..13: note = Original Sequence: aucaaggaagatg
  modified_base 12..13: mod_base = OTHER; note = bicyclic nucleic acid (BNA)
  source 1..13: mol_type = other DNA
  modified_base 2: mod_base = OTHER; note = Uracil
atcaaggaagatg

SEQ ID NO: 3451 - DNA, 12 bp, synthetic construct
  misc_feature 1..12: note = Description of Artificial Sequence: Synthetic Antisense oligonucleotide
  misc_feature 1..12: note = Original Sequence: aucaaggaagat
  modified_base 11..12: mod_base = OTHER; note = bicyclic nucleic acid (BNA)
  source 1..12: mol_type = other DNA
  modified_base 2: mod_base = OTHER; note = Uracil
atcaaggaagat

SEQ ID NO: 3452 - RNA, 11 nt, synthetic construct
  misc_feature 1..11: note = Description of Artificial Sequence: Synthetic Antisense oligonucleotide
  modified_base 10..11: mod_base = OTHER; note = bicyclic nucleic acid (BNA)
  source 1..11: mol_type = other RNA
atcaaggaaga

SEQ ID NO: 3453 - RNA, 10 nt, synthetic construct
  misc_feature 1..10: note = Description of Artificial Sequence: Synthetic Antisense oligonucleotide
  modified_base 9..10: mod_base = OTHER; note = bicyclic nucleic acid (BNA)
  source 1..10: mol_type = other RNA
atcaaggaag

SEQ ID NO: 3454 - RNA, 18 nt, synthetic construct
  misc_feature 1..18: note = Description of Artificial Sequence: Synthetic Antisense oligonucleotide
  modified_base 1..2: mod_base = OTHER; note = bicyclic nucleic acid (BNA)
  modified_base 17..18: mod_base = OTHER; note = bicyclic nucleic acid (BNA)
  source 1..18: mol_type = other RNA
ggtaagttctgtccaagc

SEQ ID NO: 3455 - DNA, 18 bp, synthetic construct
  misc_feature 1..18: note = Description of Artificial Sequence: Synthetic Antisense oligonucleotide
  misc_feature 1..18: note = Original Sequence: gtaaguucuguccaagcc
  modified_base 1..2: mod_base = OTHER; note = bicyclic nucleic acid (BNA)
  modified_base 17..18: mod_base = OTHER; note = bicyclic nucleic acid (BNA)
  source 1..18: mol_type = other DNA
  modified_base 6: mod_base = OTHER; note = Uracil
  modified_base 7: mod_base = OTHER; note = Uracil
  modified_base 9: mod_base = OTHER; note = Uracil
  modified_base 11: mod_base = OTHER; note = Uracil
gtaagttctgtccaagcc

SEQ ID NO: 3456 - RNA, 18 nt, synthetic construct
  misc_feature 1..18: note = Description of Artificial Sequence: Synthetic Antisense oligonucleotide
  modified_base 1..2: mod_base = OTHER; note = bicyclic nucleic acid (BNA)
  modified_base 17..18: mod_base = OTHER; note = bicyclic nucleic acid (BNA)
  source 1..18: mol_type = other RNA
agtcggtaagttctgtcc

SEQ ID NO: 3457 - DNA, 18 bp, synthetic construct
  misc_feature 1..18: note = Description of Artificial Sequence: Synthetic Antisense oligonucleotide
  misc_feature 1..18: note = Original Sequence: ctguccaagcccgguuga
  modified_base 1..2: mod_base = OTHER; note = bicyclic nucleic acid (BNA)
  modified_base 17..18: mod_base = OTHER; note = bicyclic nucleic acid (BNA)
  source 1..18: mol_type = other DNA
  modified_base 4: mod_base = OTHER; note = Uracil
  modified_base 15: mod_base = OTHER; note = Uracil
  modified_base 16: mod_base = OTHER; note = Uracil
ctgtccaagcccggttga

SEQ ID NO: 3458 - DNA, 15 bp, synthetic construct
  misc_feature 1..15: note = Description of Artificial Sequence: Synthetic Antisense oligonucleotide
  misc_feature 1..15: note = Original Sequence: taaguucuguccaag
  modified_base 1..2: mod_base = OTHER; note = bicyclic nucleic acid (BNA)
  modified_base 14..15: mod_base = OTHER; note = bicyclic nucleic acid (BNA)
  source 1..15: mol_type = other DNA
  modified_base 5: mod_base = OTHER; note = Uracil
  modified_base 6: mod_base = OTHER; note = Uracil
  modified_base 8: mod_base = OTHER; note = Uracil
  modified_base 10: mod_base = OTHER; note = Uracil
taagttctgtccaag

SEQ ID NO: 3459 - DNA, 20 bp, synthetic construct
  misc_feature 1..20: note = Description of Artificial Sequence: Synthetic Antisense oligonucleotide
  misc_feature 1..20: note = Original Sequence: ttcuguccaagcccgguuga
  modified_base 1..2: mod_base = OTHER; note = bicyclic nucleic acid (BNA)
  modified_base 19..20: mod_base = OTHER; note = bicyclic nucleic acid (BNA)
  source 1..20: mol_type = other DNA
  modified_base 4: mod_base = OTHER; note = Uracil
  modified_base 6: mod_base = OTHER; note = Uracil
  modified_base 17: mod_base = OTHER; note = Uracil
  modified_base 18: mod_base = OTHER; note = Uracil
ttctgtccaagcccggttga

SEQ ID NO: 3460 - DNA, 19 bp, synthetic construct
  misc_feature 1..19: note = Description of Artificial Sequence: Synthetic Antisense oligonucleotide
  misc_feature 1..19: note = Original Sequence: ttcuguccaagcccggutg
  modified_base 1..2: mod_base = OTHER; note = bicyclic nucleic acid (BNA)
  modified_base 18..19: mod_base = OTHER; note = bicyclic nucleic acid (BNA)
  source 1..19: mol_type = other DNA
  modified_base 4: mod_base = OTHER; note = Uracil
  modified_base 6: mod_base = OTHER; note = Uracil
  modified_base 17: mod_base = OTHER; note = Uracil
ttctgtccaagcccggttg

SEQ ID NO: 3461 - DNA, 18 bp, synthetic construct
  misc_feature 1..18: note = Description of Artificial Sequence: Synthetic Antisense oligonucleotide
  misc_feature 1..18: note = Original Sequence: ttcuguccaagcccggtt
  modified_base 1..2: mod_base = OTHER; note = bicyclic nucleic acid (BNA)
  modified_base 17..18: mod_base = OTHER; note = bicyclic nucleic acid (BNA)
  source 1..18: mol_type = other DNA
  modified_base 4: mod_base = OTHER; note = Uracil
  modified_base 6: mod_base = OTHER; note = Uracil
ttctgtccaagcccggtt

SEQ ID NO: 3462 - DNA, 17 bp, synthetic construct
  misc_feature 1..17: note = Description of Artificial Sequence: Synthetic Antisense oligonucleotide
  misc_feature 1..17: note = Original Sequence: ttcuguccaagcccggt
  modified_base 1..2: mod_base = OTHER; note = bicyclic nucleic acid (BNA)
  modified_base 16..17: mod_base = OTHER; note = bicyclic nucleic acid (BNA)
  source 1..17: mol_type = other DNA
  modified_base 4: mod_base = OTHER; note = Uracil
  modified_base 6: mod_base = OTHER; note = Uracil
ttctgtccaagcccggt

SEQ ID NO: 3463 - DNA, 16 bp, synthetic construct
  misc_feature 1..16: note = Description of Artificial Sequence: Synthetic Antisense oligonucleotide
  misc_feature 1..16: note = Original Sequence: ttcuguccaagcccgg
  modified_base 1..2: mod_base = OTHER; note = bicyclic nucleic acid (BNA)
  modified_base 15..16: mod_base = OTHER; note = bicyclic nucleic acid (BNA)
  source 1..16: mol_type = other DNA
  modified_base 4: mod_base = OTHER; note = Uracil
  modified_base 6: mod_base = OTHER; note = Uracil
ttctgtccaagcccgg

SEQ ID NO: 3464 - DNA, 15 bp, synthetic construct
  misc_feature 1..15: note = Description of Artificial Sequence: Synthetic Antisense oligonucleotide
  misc_feature 1..15: note = Original Sequence: ttcuguccaagcccg
  modified_base 1..2: mod_base = OTHER; note = bicyclic nucleic acid (BNA)
  modified_base 14..15: mod_base = OTHER; note = bicyclic nucleic acid (BNA)
  source 1..15: mol_type = other DNA
  modified_base 4: mod_base = OTHER; note = Uracil
  modified_base 6: mod_base = OTHER; note = Uracil
ttctgtccaagcccg

SEQ ID NO: 3465 - DNA, 14 bp, synthetic construct
  misc_feature 1..14: note = Description of Artificial Sequence: Synthetic Antisense oligonucleotide
  misc_feature 1..14: note = Original Sequence: ttcuguccaagccc
  modified_base 1..2: mod_base = OTHER; note = bicyclic nucleic acid (BNA)
  modified_base 13..14: mod_base = OTHER; note = bicyclic nucleic acid (BNA)
  source 1..14: mol_type = other DNA
  modified_base 4: mod_base = OTHER; note = Uracil
  modified_base 6: mod_base = OTHER; note = Uracil
ttctgtccaagccc

SEQ ID NO: 3466 - DNA, 13 bp, synthetic construct
  misc_feature 1..13: note = Description of Artificial Sequence: Synthetic Antisense oligonucleotide
  misc_feature 1..13: note = Original Sequence: ttcuguccaagcc
  modified_base 1..2: mod_base = OTHER; note = bicyclic nucleic acid (BNA)
  modified_base 12..13: mod_base = OTHER; note = bicyclic nucleic acid (BNA)
  source 1..13: mol_type = other DNA
  modified_base 4: mod_base = OTHER; note = Uracil
  modified_base 6: mod_base = OTHER; note = Uracil
ttctgtccaagcc

SEQ ID NO: 3467 - DNA, 12 bp, synthetic construct
  misc_feature 1..12: note = Description of Artificial Sequence: Synthetic Antisense oligonucleotide
  misc_feature 1..12: note = Original Sequence: ttcuguccaagc
  modified_base 1..2: mod_base = OTHER; note = bicyclic nucleic acid (BNA)
  modified_base 11..12: mod_base = OTHER; note = bicyclic nucleic acid (BNA)
  source 1..12: mol_type = other DNA
  modified_base 4: mod_base = OTHER; note = Uracil
  modified_base 6: mod_base = OTHER; note = Uracil
ttctgtccaagc

SEQ ID NO: 3468 - DNA, 11 bp, synthetic construct
  misc_feature 1..11: note = Description of Artificial Sequence: Synthetic Antisense oligonucleotide
  misc_feature 1..11: note = Original Sequence: ttcuguccaag
  modified_base 1..2: mod_base = OTHER; note = bicyclic nucleic acid (BNA)
  modified_base 10..11: mod_base = OTHER; note = bicyclic nucleic acid (BNA)
  source 1..11: mol_type = other DNA
  modified_base 4: mod_base = OTHER; note = Uracil
  modified_base 6: mod_base = OTHER; note = Uracil
ttctgtccaag

SEQ ID NO: 3469 - DNA, 10 bp, synthetic construct
  misc_feature 1..10: note = Description of Artificial Sequence: Synthetic Antisense oligonucleotide
  misc_feature 1..10: note = Original Sequence: ttcuguccaa
  modified_base 1..2: mod_base = OTHER; note = bicyclic nucleic acid (BNA)
  modified_base 9..10: mod_base = OTHER; note = bicyclic nucleic acid (BNA)
  source 1..10: mol_type = other DNA
  modified_base 4: mod_base = OTHER; note = Uracil
  modified_base 6: mod_base = OTHER; note = Uracil
ttctgtccaa

SEQ ID NO: 3470-3471 - skipped (2 entries)

SEQ ID NO: 3472 - DNA, 19 bp, synthetic construct
  misc_feature 1..19: note = Description of Artificial Sequence: Synthetic Antisense oligonucleotide
  misc_feature 1..19: note = Original Sequence: tcuguccaagcccgguuga
  modified_base 1..2: mod_base = OTHER; note = bicyclic nucleic acid (BNA)
  modified_base 18..19: mod_base = OTHER; note = bicyclic nucleic acid (BNA)
  source 1..19: mol_type = other DNA
  modified_base 3: mod_base = OTHER; note = Uracil
  modified_base 5: mod_base = OTHER; note = Uracil
  modified_base 16: mod_base = OTHER; note = Uracil
  modified_base 17: mod_base = OTHER; note = Uracil
tctgtccaagcccggttga

SEQ ID NO: 3473 - DNA, 18 bp, synthetic construct
  misc_feature 1..18: note = Description of Artificial Sequence: Synthetic Antisense oligonucleotide
  misc_feature 1..18: note = Original Sequence: tcuguccaagcccggutg
  modified_base 1..2: mod_base = OTHER; note = bicyclic nucleic acid (BNA)
  modified_base 17..18: mod_base = OTHER; note = bicyclic nucleic acid (BNA)
  source 1..18: mol_type = other DNA
  modified_base 3: mod_base = OTHER; note = Uracil
  modified_base 5: mod_base = OTHER; note = Uracil
  modified_base 16: mod_base = OTHER; note = Uracil
tctgtccaagcccggttg

SEQ ID NO: 3474 - DNA, 17 bp, synthetic construct
  misc_feature 1..17: note = Description of Artificial Sequence: Synthetic Antisense oligonucleotide
  misc_feature 1..17: note = Original Sequence: tcuguccaagcccggtt
  modified_base 1..2: mod_base = OTHER; note = bicyclic nucleic acid (BNA)
  modified_base 16..17: mod_base = OTHER; note = bicyclic nucleic acid (BNA)
  source 1..17: mol_type = other DNA
  modified_base 3: mod_base = OTHER; note = Uracil
  modified_base 5: mod_base = OTHER; note = Uracil
tctgtccaagcccggtt

SEQ ID NO: 3475 - DNA, 16 bp, synthetic construct
  misc_feature 1..16: note = Description of Artificial Sequence: Synthetic Antisense oligonucleotide
  misc_feature 1..16: note = Original Sequence: tcuguccaagcccggt
  modified_base 1..2: mod_base = OTHER; note = bicyclic nucleic acid (BNA)
  modified_base 15..16: mod_base = OTHER; note = bicyclic nucleic acid (BNA)
  source 1..16: mol_type = other DNA
  modified_base 3: mod_base = OTHER; note = Uracil
  modified_base 5: mod_base = OTHER; note = Uracil
tctgtccaagcccggt

SEQ ID NO: 3476 - DNA, 15 bp, synthetic construct
  misc_feature 1..15: note = Description of Artificial Sequence: Synthetic Antisense oligonucleotide
  misc_feature 1..15: note = Original Sequence: tcuguccaagcccgg
  modified_base 1..2: mod_base = OTHER; note = bicyclic nucleic acid (BNA)
  modified_base 14..15: mod_base = OTHER; note = bicyclic nucleic acid (BNA)
  source 1..15: mol_type = other DNA
  modified_base 3: mod_base = OTHER; note = Uracil
  modified_base 5: mod_base = OTHER; note = Uracil
tctgtccaagcccgg

SEQ ID NO: 3477 - DNA, 14 bp, synthetic construct
  misc_feature 1..14: note = Description of Artificial Sequence: Synthetic Antisense oligonucleotide
  misc_feature 1..14: note = Original Sequence: tcuguccaagcccg
  modified_base 1..2: mod_base = OTHER; note = bicyclic nucleic acid (BNA)
  modified_base 13..14: mod_base = OTHER; note = bicyclic nucleic acid (BNA)
  source 1..14: mol_type = other DNA
  modified_base 3: mod_base = OTHER; note = Uracil
  modified_base 5: mod_base = OTHER; note = Uracil
tctgtccaagcccg

SEQ ID NO: 3478 - DNA, 13 bp, synthetic construct
  misc_feature 1..13: note = Description of Artificial Sequence: Synthetic Antisense oligonucleotide
  misc_feature 1..13: note = Original Sequence: tcuguccaagccc
  modified_base 1..2: mod_base = OTHER; note = bicyclic nucleic acid (BNA)
  modified_base 12..13: mod_base = OTHER; note = bicyclic nucleic acid (BNA)
  source 1..13: mol_type = other DNA
  modified_base 3: mod_base = OTHER; note = Uracil
  modified_base 5: mod_base = OTHER; note = Uracil
tctgtccaagccc

SEQ ID NO: 3479 - DNA, 12 bp, synthetic construct
  misc_feature 1..12: note = Description of Artificial Sequence: Synthetic Antisense oligonucleotide
  misc_feature 1..12: note = Original Sequence: tcuguccaagcc
  modified_base 1..2: mod_base = OTHER; note = bicyclic nucleic acid (BNA)
  modified_base 11..12: mod_base = OTHER; note = bicyclic nucleic acid (BNA)
  source 1..12: mol_type = other DNA
  modified_base 3: mod_base = OTHER; note = Uracil
  modified_base 5: mod_base = OTHER; note = Uracil
tctgtccaagcc

SEQ ID NO: 3480 - DNA, 11 bp, synthetic construct
  misc_feature 1..11: note = Description of Artificial Sequence: Synthetic Antisense oligonucleotide
  misc_feature 1..11: note = Original Sequence: tcuguccaagc
  modified_base 1..2: mod_base = OTHER; note = bicyclic nucleic acid (BNA)
  modified_base 10..11: mod_base = OTHER; note = bicyclic nucleic acid (BNA)
  source 1..11: mol_type = other DNA
  modified_base 3: mod_base = OTHER; note = Uracil
  modified_base 5: mod_base = OTHER; note = Uracil
tctgtccaagc

SEQ ID NO: 3481 - DNA, 10 bp, synthetic construct
  misc_feature 1..10: note = Description of Artificial Sequence: Synthetic Antisense oligonucleotide
  misc_feature 1..10: note = Original Sequence: tcuguccaag
  modified_base 1..2: mod_base = OTHER; note = bicyclic nucleic acid (BNA)
  modified_base 9..10: mod_base = OTHER; note = bicyclic nucleic acid (BNA)
  source 1..10: mol_type = other DNA
  modified_base 3: mod_base = OTHER; note = Uracil
  modified_base 5: mod_base = OTHER; note = Uracil
tctgtccaag

SEQ ID NO: 3482-3483 - skipped (2 entries)

SEQ ID NO: 3484 - DNA, 17 bp, synthetic construct
  misc_feature 1..17: note = Description of Artificial Sequence: Synthetic Antisense oligonucleotide
  misc_feature 1..17: note = Original Sequence: ctguccaagcccggutg
  modified_base 1..2: mod_base = OTHER; note = bicyclic nucleic acid (BNA)
  modified_base 16..17: mod_base = OTHER; note = bicyclic nucleic acid (BNA)
  source 1..17: mol_type = other DNA
  modified_base 4: mod_base = OTHER; note = Uracil
  modified_base 15: mod_base = OTHER; note = Uracil
ctgtccaagcccggttg

SEQ ID NO: 3485 - DNA, 16 bp, synthetic construct
  misc_feature 1..16: note = Description of Artificial Sequence: Synthetic Antisense oligonucleotide
  misc_feature 1..16: note = Original Sequence: ctguccaagcccggtt
  modified_base 1..2: mod_base = OTHER; note = bicyclic nucleic acid (BNA)
  modified_base 15..16: mod_base = OTHER; note = bicyclic nucleic acid (BNA)
  source 1..16: mol_type = other DNA
  modified_base 4: mod_base = OTHER; note = Uracil
ctgtccaagcccggtt

SEQ ID NO: 3486 - DNA, 15 bp, synthetic construct
  misc_feature 1..15: note = Description of Artificial Sequence: Synthetic Antisense oligonucleotide
  misc_feature 1..15: note = Original Sequence: ctguccaagcccggt
  modified_base 1..2: mod_base = OTHER; note = bicyclic nucleic acid (BNA)
  modified_base 14..15: mod_base = OTHER; note = bicyclic nucleic acid (BNA)
  source 1..15: mol_type = other DNA
  modified_base 4: mod_base = OTHER; note = Uracil
ctgtccaagcccggt

SEQ ID NO: 3487 - DNA, 14 bp, synthetic construct
  misc_feature 1..14: note = Description of Artificial Sequence: Synthetic Antisense oligonucleotide
  misc_feature 1..14: note = Original Sequence: ctguccaagcccgg
  modified_base 1..2: mod_base = OTHER; note = bicyclic nucleic acid (BNA)
  modified_base 13..14: mod_base = OTHER; note = bicyclic nucleic acid (BNA)
  source 1..14: mol_type = other DNA
  modified_base 4: mod_base = OTHER; note = Uracil
ctgtccaagcccgg

SEQ ID NO: 3488 - DNA, 13 bp, synthetic construct
  misc_feature 1..13: note = Description of Artificial Sequence: Synthetic Antisense oligonucleotide
  misc_feature 1..13: note = Original Sequence: ctguccaagcccg
  modified_base 1..2: mod_base = OTHER; note = bicyclic nucleic acid (BNA)
  modified_base 12..13: mod_base = OTHER; note = bicyclic nucleic acid (BNA)
  source 1..13: mol_type = other DNA
  modified_base 4: mod_base = OTHER; note = Uracil
ctgtccaagcccg

SEQ ID NO: 3489 - DNA, 12 bp, synthetic construct
  misc_feature 1..12: note = Description of Artificial Sequence: Synthetic Antisense oligonucleotide
  misc_feature 1..12: note = Original Sequence: ctguccaagccc
  modified_base 1..2: mod_base = OTHER; note = bicyclic nucleic acid (BNA)
  modified_base 11..12: mod_base = OTHER; note = bicyclic nucleic acid (BNA)
  source 1..12: mol_type = other DNA
  modified_base 4: mod_base = OTHER; note = Uracil
ctgtccaagccc

SEQ ID NO: 3490 - DNA, 11 bp, synthetic construct
  misc_feature 1..11: note = Description of Artificial Sequence: Synthetic Antisense oligonucleotide
  misc_feature 1..11: note = Original Sequence: ctguccaagcc
  modified_base 1..2: mod_base = OTHER; note = bicyclic nucleic acid (BNA)
  modified_base 10..11: mod_base = OTHER; note = bicyclic nucleic acid (BNA)
  source 1..11: mol_type = other DNA
  modified_base 4: mod_base = OTHER; note = Uracil
ctgtccaagcc

SEQ ID NO: 3491 - DNA, 10 bp, synthetic construct
  misc_feature 1..10: note = Description of Artificial Sequence: Synthetic Antisense oligonucleotide
  misc_feature 1..10: note = Original Sequence: ctguccaagc
  modified_base 1..2: mod_base = OTHER; note = bicyclic nucleic acid (BNA)
  modified_base 9..10: mod_base = OTHER; note = bicyclic nucleic acid (BNA)
  source 1..10: mol_type = other DNA
  modified_base 4: mod_base = OTHER; note = Uracil
ctgtccaagc

SEQ ID NO: 3492-3493 - skipped (2 entries)

SEQ ID NO: 3494 - DNA, 20 bp, synthetic construct
  misc_feature 1..20: note = Description of Artificial Sequence: Synthetic Antisense oligonucleotide
  misc_feature 1..20: note = Original Sequence: gtucuguccaagcccggutg
  modified_base 1..2: mod_base = OTHER; note = bicyclic nucleic acid (BNA)
  modified_base 19..20: mod_base = OTHER; note = bicyclic nucleic acid (BNA)
  source 1..20: mol_type = other DNA
  modified_base 3: mod_base = OTHER; note = Uracil
  modified_base 5: mod_base = OTHER; note = Uracil
  modified_base 7: mod_base = OTHER; note = Uracil
  modified_base 18: mod_base = OTHER; note = Uracil
gttctgtccaagcccggttg

SEQ ID NO: 3495 - DNA, 19 bp, synthetic construct
  misc_feature 1..19: note = Description of Artificial Sequence: Synthetic Antisense oligonucleotide
  misc_feature 1..19: note = Original Sequence: gtucuguccaagcccggtt
  modified_base 1..2: mod_base = OTHER; note = bicyclic nucleic acid (BNA)
  modified_base 18..19: mod_base = OTHER; note = bicyclic nucleic acid (BNA)
  source 1..19: mol_type = other DNA
  modified_base 3: mod_base = OTHER; note = Uracil
  modified_base 5: mod_base = OTHER; note = Uracil
  modified_base 7: mod_base = OTHER; note = Uracil
gttctgtccaagcccggtt

SEQ ID NO: 3496 - DNA, 18 bp, synthetic construct
  misc_feature 1..18: note = Description of Artificial Sequence: Synthetic Antisense oligonucleotide
  misc_feature 1..18: note = Original Sequence: gtucuguccaagcccggt
  modified_base 1..2: mod_base = OTHER; note = bicyclic nucleic acid (BNA)
  modified_base 17..18: mod_base = OTHER; note = bicyclic nucleic acid (BNA)
  source 1..18: mol_type = other DNA
  modified_base 3: mod_base = OTHER; note = Uracil
  modified_base 5: mod_base = OTHER; note = Uracil
  modified_base 7: mod_base = OTHER; note = Uracil
gttctgtccaagcccggt

SEQ ID NO: 3497 - DNA, 17 bp, synthetic construct
  misc_feature 1..17: note = Description of Artificial Sequence: Synthetic Antisense oligonucleotide
  misc_feature 1..17: note = Original Sequence: gtucuguccaagcccgg
  modified_base 1..2: mod_base = OTHER; note = bicyclic nucleic acid (BNA)
  modified_base 16..17: mod_base = OTHER; note = bicyclic nucleic acid (BNA)
  source 1..17: mol_type = other DNA
  modified_base 3: mod_base = OTHER; note = Uracil
  modified_base 5: mod_base = OTHER; note = Uracil
  modified_base 7: mod_base = OTHER; note = Uracil
gttctgtccaagcccgg

SEQ ID NO: 3498 - DNA, 16 bp, synthetic construct
  misc_feature 1..16: note = Description of Artificial Sequence: Synthetic Antisense oligonucleotide
  misc_feature 1..16: note = Original Sequence: gtucuguccaagcccg
  modified_base 1..2: mod_base = OTHER; note = bicyclic nucleic acid (BNA)
  modified_base 15..16: mod_base = OTHER; note = bicyclic nucleic acid (BNA)
  source 1..16: mol_type = other DNA
  modified_base 3: mod_base = OTHER; note = Uracil
  modified_base 5: mod_base = OTHER; note = Uracil
  modified_base 7: mod_base = OTHER; note = Uracil
gttctgtccaagcccg

SEQ ID NO: 3499 - DNA, 15 bp, synthetic construct
  misc_feature 1..15: note = Description of Artificial Sequence: Synthetic Antisense oligonucleotide
  misc_feature 1..15: note = Original Sequence: gtucuguccaagccc
  modified_base 1..2: mod_base = OTHER; note = bicyclic nucleic acid (BNA)
  modified_base 14..15: mod_base = OTHER; note = bicyclic nucleic acid (BNA)
  source 1..15: mol_type = other DNA
  modified_base 3: mod_base = OTHER; note = Uracil
  modified_base 5: mod_base = OTHER; note = Uracil
  modified_base 7: mod_base = OTHER; note = Uracil
gttctgtccaagccc

SEQ ID NO: 3500 - DNA, 14 bp, synthetic construct
  misc_feature 1..14: note = Description of Artificial Sequence: Synthetic Antisense oligonucleotide
  misc_feature 1..14: note = Original Sequence: gtucuguccaagcc
  modified_base 1..2: mod_base = OTHER; note = bicyclic nucleic acid (BNA)
  modified_base 13..14: mod_base = OTHER; note = bicyclic nucleic acid (BNA)
  source 1..14: mol_type = other DNA
  modified_base 3: mod_base = OTHER; note = Uracil
  modified_base 5: mod_base = OTHER; note = Uracil
  modified_base 7: mod_base = OTHER; note = Uracil
gttctgtccaagcc

SEQ ID NO: 3501 - DNA, 13 bp, synthetic construct
  misc_feature 1..13: note = Description of Artificial Sequence: Synthetic Antisense oligonucleotide
  misc_feature 1..13: note = Original Sequence: gtucuguccaagc
  modified_base 1..2: mod_base = OTHER; note = bicyclic nucleic acid (BNA)
  modified_base 12..13: mod_base = OTHER; note = bicyclic nucleic acid (BNA)
  source 1..13: mol_type = other DNA
  modified_base 3: mod_base = OTHER; note = Uracil
  modified_base 5: mod_base = OTHER; note = Uracil
  modified_base 7: mod_base = OTHER; note = Uracil
gttctgtccaagc

SEQ ID NO: 3502 - DNA, 12 bp, synthetic construct
  misc_feature 1..12: note = Description of Artificial Sequence: Synthetic Antisense oligonucleotide
  misc_feature 1..12: note = Original Sequence: gtucuguccaag
  modified_base 1..2: mod_base = OTHER; note = bicyclic nucleic acid (BNA)
  modified_base 11..12: mod_base = OTHER; note = bicyclic nucleic acid (BNA)
  source 1..12: mol_type = other DNA
  modified_base 3: mod_base = OTHER; note = Uracil
  modified_base 5: mod_base = OTHER; note = Uracil
  modified_base 7: mod_base = OTHER; note = Uracil
gttctgtccaag

SEQ ID NO: 3503 - DNA, 11 bp, synthetic construct
  misc_feature 1..11: note = Description of Artificial Sequence: Synthetic Antisense oligonucleotide
  misc_feature 1..11: note = Original Sequence: gtucuguccaa
  modified_base 1..2: mod_base = OTHER; note = bicyclic nucleic acid (BNA)
  modified_base 10..11: mod_base = OTHER; note = bicyclic nucleic acid (BNA)
  source 1..11: mol_type = other DNA
  modified_base 3: mod_base = OTHER; note = Uracil
  modified_base 5: mod_base = OTHER; note = Uracil
  modified_base 7: mod_base = OTHER; note = Uracil
gttctgtccaa

SEQ ID NO: 3504 - DNA, 10 bp, synthetic construct
  misc_feature 1..10: note = Description of Artificial Sequence: Synthetic Antisense oligonucleotide
  misc_feature 1..10: note = Original Sequence: gtucugucca
  modified_base 1..2: mod_base = OTHER; note = bicyclic nucleic acid (BNA)
  modified_base 9..10: mod_base = OTHER; note = bicyclic nucleic acid (BNA)
  source 1..10: mol_type = other DNA
  modified_base 3: mod_base = OTHER; note = Uracil
  modified_base 5: mod_base = OTHER; note = Uracil
  modified_base 7: mod_base = OTHER; note = Uracil
gttctgtcca

SEQ ID NO: 3505-3506 - skipped (2 entries)

SEQ ID NO: 3507 - DNA, 20 bp, synthetic construct
  misc_feature 1..20: note = Description of Artificial Sequence: Synthetic Antisense oligonucleotide
  misc_feature 1..20: note = Original Sequence: aguucuguccaagcccggtt
  modified_base 1..2: mod_base = OTHER; note = bicyclic nucleic acid (BNA)
  modified_base 19..20: mod_base = OTHER; note = bicyclic nucleic acid (BNA)
  source 1..20: mol_type = other DNA
  modified_base 3: mod_base = OTHER; note = Uracil
  modified_base 4: mod_base = OTHER; note = Uracil
  modified_base 6: mod_base = OTHER; note = Uracil
  modified_base 8: mod_base = OTHER; note = Uracil
agttctgtccaagcccggtt

SEQ ID NO: 3508 - DNA, 19 bp, synthetic construct
  misc_feature 1..19: note = Description of Artificial Sequence: Synthetic Antisense oligonucleotide
  misc_feature 1..19: note = Original Sequence: aguucuguccaagcccggt
  modified_base 1..2: mod_base = OTHER; note = bicyclic nucleic acid (BNA)
  modified_base 18..19: mod_base = OTHER; note = bicyclic nucleic acid (BNA)
  source 1..19: mol_type = other DNA
  modified_base 3: mod_base = OTHER; note = Uracil
  modified_base 4: mod_base = OTHER; note = Uracil
  modified_base 6: mod_base = OTHER; note = Uracil
  modified_base 8: mod_base = OTHER; note = Uracil
agttctgtccaagcccggt

SEQ ID NO: 3509 - RNA, 18 nt, synthetic construct
  misc_feature 1..18: note = Description of Artificial Sequence: Synthetic Antisense oligonucleotide
  modified_base 1..2: mod_base = OTHER; note = bicyclic nucleic acid (BNA)
  modified_base 17..18: mod_base = OTHER; note = bicyclic nucleic acid (BNA)
  source 1..18: mol_type = other RNA
agttctgtccaagcccgg

SEQ ID NO: 3510 - RNA, 17 nt, synthetic construct
  misc_feature 1..17: note = Description of Artificial Sequence: Synthetic Antisense oligonucleotide
  modified_base 1..2: mod_base = OTHER; note = bicyclic nucleic acid (BNA)
  modified_base 16..17: mod_base = OTHER; note = bicyclic nucleic acid (BNA)
  source 1..17: mol_type = other RNA
agttctgtccaagcccg

SEQ ID NO: 3511 - RNA, 16 nt, synthetic construct
  misc_feature 1..16: note = Description of Artificial Sequence: Synthetic Antisense oligonucleotide
  modified_base 1..2: mod_base = OTHER; note = bicyclic nucleic acid (BNA)
  modified_base 15..16: mod_base = OTHER; note = bicyclic nucleic acid (BNA)
  source 1..16: mol_type = other RNA
agttctgtccaagccc

SEQ ID NO: 3512 - RNA, 15 nt, synthetic construct
  misc_feature 1..15: note = Description of Artificial Sequence: Synthetic Antisense oligonucleotide
  modified_base 1..2: mod_base = OTHER; note = bicyclic nucleic acid (BNA)
  modified_base 14..15: mod_base = OTHER; note = bicyclic nucleic acid (BNA)
  source 1..15: mol_type = other RNA
agttctgtccaagcc

SEQ ID NO: 3513 - RNA, 14 nt, synthetic construct
  misc_feature 1..14: note = Description of Artificial Sequence: Synthetic Antisense oligonucleotide
  modified_base 1..2: mod_base = OTHER; note = bicyclic nucleic acid (BNA)
  modified_base 13..14: mod_base = OTHER; note = bicyclic nucleic acid (BNA)
  source 1..14: mol_type = other RNA
agttctgtccaagc

SEQ ID NO: 3514 - RNA, 13 nt, synthetic construct
  misc_feature 1..13: note = Description of Artificial Sequence: Synthetic Antisense oligonucleotide
  modified_base 1..2: mod_base = OTHER; note = bicyclic nucleic acid (BNA)
  modified_base 12..13: mod_base = OTHER; note = bicyclic nucleic acid (BNA)
  source 1..13: mol_type = other RNA
agttctgtccaag

SEQ ID NO: 3515 - RNA, 12 nt, synthetic construct
  misc_feature 1..12: note = Description of Artificial Sequence: Synthetic Antisense oligonucleotide
  modified_base 1..2: mod_base = OTHER; note = bicyclic nucleic acid (BNA)
  modified_base 11..12: mod_base = OTHER; note = bicyclic nucleic acid (BNA)
  source 1..12: mol_type = other RNA
agttctgtccaa

SEQ ID NO: 3516 - RNA, 11 nt, synthetic construct
  misc_feature 1..11: note = Description of Artificial Sequence: Synthetic Antisense oligonucleotide
  modified_base 1..2: mod_base = OTHER; note = bicyclic nucleic acid (BNA)
  modified_base 10..11: mod_base = OTHER; note = bicyclic nucleic acid (BNA)
  source 1..11: mol_type = other RNA
agttctgtcca

SEQ ID NO: 3517 - RNA, 10 nt, synthetic construct
  misc_feature 1..10: note = Description of Artificial Sequence: Synthetic Antisense oligonucleotide
  modified_base 1..2: mod_base = OTHER; note = bicyclic nucleic acid (BNA)
  modified_base 9..10: mod_base = OTHER; note = bicyclic nucleic acid (BNA)
  source 1..10: mol_type = other RNA
agttctgtcc

SEQ ID NO: 3518-3519 - skipped (2 entries)

SEQ ID NO: 3520 - DNA, 20 bp, synthetic construct
  misc_feature 1..20: note = Description of Artificial Sequence: Synthetic Antisense oligonucleotide
  misc_feature 1..20: note = Original Sequence: aaguucuguccaagcccggt
  modified_base 1..2: mod_base = OTHER; note = bicyclic nucleic acid (BNA)
  modified_base 19..20: mod_base = OTHER; note = bicyclic nucleic acid (BNA)
  source 1..20: mol_type = other DNA
  modified_base 4: mod_base = OTHER; note = Uracil
  modified_base 5: mod_base = OTHER; note = Uracil
  modified_base 7: mod_base = OTHER; note = Uracil
  modified_base 9: mod_base = OTHER; note = Uracil
aagttctgtccaagcccggt

SEQ ID NO: 3521 - RNA, 19 nt, synthetic construct
  misc_feature 1..19: note = Description of Artificial Sequence: Synthetic Antisense oligonucleotide
  modified_base 1..2: mod_base = OTHER; note = bicyclic nucleic acid (BNA)
  modified_base 18..19: mod_base = OTHER; note = bicyclic nucleic acid (BNA)
  source 1..19: mol_type = other RNA
aagttctgtccaagcccgg

SEQ ID NO: 3522 - RNA, 18 nt, synthetic construct
  misc_feature 1..18: note = Description of Artificial Sequence: Synthetic Antisense oligonucleotide
  modified_base 1..2: mod_base = OTHER; note = bicyclic nucleic acid (BNA)
  modified_base 17..18: mod_base = OTHER; note = bicyclic nucleic acid (BNA)
  source 1..18: mol_type = other RNA
aagttctgtccaagcccg

SEQ ID NO: 3523 - RNA, 17 nt, synthetic construct
  misc_feature 1..17: note = Description of Artificial Sequence: Synthetic Antisense oligonucleotide
  modified_base 1..2: mod_base = OTHER; note = bicyclic nucleic acid (BNA)
  modified_base 16..17: mod_base = OTHER; note = bicyclic nucleic acid (BNA)
  source 1..17: mol_type = other RNA
aagttctgtccaagccc

SEQ ID NO: 3524 - RNA, 16 nt, synthetic construct
  misc_feature 1..16: note = Description of Artificial Sequence: Synthetic Antisense oligonucleotide
  modified_base 1..2: mod_base = OTHER; note = bicyclic nucleic acid (BNA)
  modified_base 15..16: mod_base = OTHER; note = bicyclic nucleic acid (BNA)
  source 1..16: mol_type = other RNA
aagttctgtccaagcc

SEQ ID NO: 3525 - RNA, 15 nt, synthetic construct
  misc_feature 1..15: note = Description of Artificial Sequence: Synthetic Antisense oligonucleotide
  modified_base 1..2: mod_base = OTHER; note = bicyclic nucleic acid (BNA)
  modified_base 14..15: mod_base = OTHER; note = bicyclic nucleic acid (BNA)
  source 1..15: mol_type = other RNA
aagttctgtccaagc

SEQ ID NO: 3526 - RNA, 14 nt, synthetic construct
  misc_feature 1..14: note = Description of Artificial Sequence: Synthetic Antisense oligonucleotide
  modified_base 1..2: mod_base = OTHER; note = bicyclic nucleic acid (BNA)
  modified_base 13..14: mod_base = OTHER; note = bicyclic nucleic acid (BNA)
  source 1..14: mol_type = other RNA
aagttctgtccaag

SEQ ID NO: 3527 - RNA, 13 nt, synthetic construct
  misc_feature 1..13: note = Description of Artificial Sequence: Synthetic Antisense oligonucleotide
  modified_base 1..2: mod_base = OTHER; note = bicyclic nucleic acid (BNA)
  modified_base 12..13: mod_base = OTHER; note = bicyclic nucleic acid (BNA)
  source 1..13: mol_type = other RNA
aagttctgtccaa

SEQ ID NO: 3528 - RNA, 12 nt, synthetic construct
  misc_feature 1..12: note = Description of Artificial Sequence: Synthetic Antisense oligonucleotide
  modified_base 1..2: mod_base = OTHER; note = bicyclic nucleic acid (BNA)
  modified_base 11..12: mod_base = OTHER; note = bicyclic nucleic acid (BNA)
  source 1..12: mol_type = other RNA
aagttctgtcca

SEQ ID NO: 3529 - RNA, 11 nt, synthetic construct
  misc_feature 1..11: note = Description of Artificial Sequence: Synthetic Antisense oligonucleotide
  modified_base 1..2: mod_base = OTHER; note = bicyclic nucleic acid (BNA)
  modified_base 10..11: mod_base = OTHER; note = bicyclic nucleic acid (BNA)
  source 1..11: mol_type = other RNA
aagttctgtcc

SEQ ID NO: 3530 - DNA, 10 bp, synthetic construct
  misc_feature 1..10: note = Description of Artificial Sequence: Synthetic Antisense oligonucleotide
  misc_feature 1..10: note = Original Sequence: aaguucugtc
  modified_base 1..2: mod_base = OTHER; note = bicyclic nucleic acid (BNA)
  modified_base 9..10: mod_base = OTHER; note = bicyclic nucleic acid (BNA)
  source 1..10: mol_type = other DNA
  modified_base 4: mod_base = OTHER; note = Uracil
  modified_base 5: mod_base = OTHER; note = Uracil
  modified_base 7: mod_base = OTHER; note = Uracil
aagttctgtc

SEQ ID NO: 3531-3532 - skipped (2 entries)

SEQ ID NO: 3533 - DNA, 20 bp, synthetic construct
  misc_feature 1..20: note = Description of Artificial Sequence: Synthetic Antisense oligonucleotide
  misc_feature 1..20: note = Original Sequence: taaguucuguccaagcccgg
  modified_base 1..2: mod_base = OTHER; note = bicyclic nucleic acid (BNA)
  modified_base 19..20: mod_base = OTHER; note = bicyclic nucleic acid (BNA)
  source 1..20: mol_type = other DNA
  modified_base 5: mod_base = OTHER; note = Uracil
  modified_base 6: mod_base = OTHER; note = Uracil
  modified_base 8: mod_base = OTHER; note = Uracil
  modified_base 10: mod_base = OTHER; note = Uracil
taagttctgtccaagcccgg

SEQ ID NO: 3534 - DNA, 19 bp, synthetic construct
  misc_feature 1..19: note = Description of Artificial Sequence: Synthetic Antisense oligonucleotide
  misc_feature 1..19: note = Original Sequence: taaguucuguccaagcccg
  modified_base 1..2: mod_base = OTHER; note = bicyclic nucleic acid (BNA)
  modified_base 18..19: mod_base = OTHER; note = bicyclic nucleic acid (BNA)
  source 1..19: mol_type = other DNA
  modified_base 5: mod_base = OTHER; note = Uracil
  modified_base 6: mod_base = OTHER; note = Uracil
  modified_base 8: mod_base = OTHER; note = Uracil
  modified_base 10: mod_base = OTHER; note = Uracil
taagttctgtccaagcccg

SEQ ID NO: 3535 - DNA, 18 bp, synthetic construct
  misc_feature 1..18: note = Description of Artificial Sequence: Synthetic Antisense oligonucleotide
  misc_feature 1..18: note = Original Sequence: taaguucuguccaagccc
  modified_base 1..2: mod_base = OTHER; note = bicyclic nucleic acid (BNA)
  modified_base 17..18: mod_base = OTHER; note = bicyclic nucleic acid (BNA)
  source 1..18: mol_type = other DNA
  modified_base 5: mod_base = OTHER; note = Uracil
  modified_base 6: mod_base = OTHER; note = Uracil
  modified_base 8: mod_base = OTHER; note = Uracil
  modified_base 10: mod_base = OTHER; note = Uracil
taagttctgtccaagccc

SEQ ID NO: 3536 - DNA, 17 bp, synthetic construct
  misc_feature 1..17: note = Description of Artificial Sequence: Synthetic Antisense oligonucleotide
  misc_feature 1..17: note = Original Sequence: taaguucuguccaagcc
  modified_base 1..2: mod_base = OTHER; note = bicyclic nucleic acid (BNA)
  modified_base 16..17: mod_base = OTHER; note = bicyclic nucleic acid (BNA)
  source 1..17: mol_type = other DNA
  modified_base 5: mod_base = OTHER; note = Uracil
  modified_base 6: mod_base = OTHER; note = Uracil
  modified_base 8: mod_base = OTHER; note = Uracil
  modified_base 10: mod_base = OTHER; note = Uracil
taagttctgtccaagcc

SEQ ID NO: 3537 - DNA, 16 bp, synthetic construct
  misc_feature 1..16: note = Description of Artificial Sequence: Synthetic Antisense oligonucleotide
  misc_feature 1..16: note = Original Sequence: taaguucuguccaagc
  modified_base 1..2: mod_base = OTHER; note = bicyclic nucleic acid (BNA)
  modified_base 15..16: mod_base = OTHER; note = bicyclic nucleic acid (BNA)
  source 1..16: mol_type = other DNA
  modified_base 5: mod_base = OTHER; note = Uracil
  modified_base 6: mod_base = OTHER; note = Uracil
  modified_base 8: mod_base = OTHER; note = Uracil
  modified_base 10: mod_base = OTHER; note = Uracil
taagttctgtccaagc

SEQ ID NO: 3538 - DNA, 14 bp, synthetic construct
  misc_feature 1..14: note = Description of Artificial Sequence: Synthetic Antisense oligonucleotide
  misc_feature 1..14: note = Original Sequence: taaguucuguccaa
  modified_base 1..2: mod_base = OTHER; note = bicyclic nucleic acid (BNA)
  modified_base 13..14: mod_base = OTHER; note = bicyclic nucleic acid (BNA)
  source 1..14: mol_type = other DNA
  modified_base 5: mod_base = OTHER; note = Uracil
  modified_base 6: mod_base = OTHER; note = Uracil
  modified_base 8: mod_base = OTHER; note = Uracil
  modified_base 10: mod_base = OTHER; note = Uracil
taagttctgtccaa

SEQ ID NO: 3539 - DNA, 13 bp, synthetic construct
  misc_feature 1..13: note = Description of Artificial Sequence: Synthetic Antisense oligonucleotide
  misc_feature 1..13: note = Original Sequence: taaguucugucca
  modified_base 1..2: mod_base = OTHER; note = bicyclic nucleic acid (BNA)
  modified_base 12..13: mod_base = OTHER; note = bicyclic nucleic acid (BNA)
  source 1..13: mol_type = other DNA
  modified_base 5: mod_base = OTHER; note = Uracil
  modified_base 6: mod_base = OTHER; note = Uracil
  modified_base 8: mod_base = OTHER; note = Uracil
  modified_base 10: mod_base = OTHER; note = Uracil
taagttctgtcca

SEQ ID NO: 3540 - DNA, 12 bp, synthetic construct
  misc_feature 1..12: note = Description of Artificial Sequence: Synthetic Antisense oligonucleotide
  misc_feature 1..12: note = Original Sequence: taaguucugucc
  modified_base 1..2: mod_base = OTHER; note = bicyclic nucleic acid (BNA)
  modified_base 11..12: mod_base = OTHER; note = bicyclic nucleic acid (BNA)
  source 1..12: mol_type = other DNA
  modified_base 5: mod_base = OTHER; note = Uracil
  modified_base 6: mod_base = OTHER; note = Uracil
  modified_base 8: mod_base = OTHER; note = Uracil
  modified_base 10: mod_base = OTHER; note = Uracil
taagttctgtcc

SEQ ID NO: 3541 - DNA, 11 bp, synthetic construct
  misc_feature 1..11: note = Description of Artificial Sequence: Synthetic Antisense oligonucleotide
  misc_feature 1..11: note = Original Sequence: taaguucugtc
  modified_base 1..2: mod_base = OTHER; note = bicyclic nucleic acid (BNA)
  modified_base 10..11: mod_base = OTHER; note = bicyclic nucleic acid (BNA)
  source 1..11: mol_type = other DNA
  modified_base 5: mod_base = OTHER; note = Uracil
  modified_base 6: mod_base = OTHER; note = Uracil
  modified_base 8: mod_base = OTHER; note = Uracil
taagttctgtc

SEQ ID NO: 3542 - DNA, 10 bp, synthetic construct
  misc_feature 1..10: note = Description of Artificial Sequence: Synthetic Antisense oligonucleotide
  misc_feature 1..10: note = Original Sequence: taaguucugt
  modified_base 1..2: mod_base = OTHER; note = bicyclic nucleic acid (BNA)
  modified_base 9..10: mod_base = OTHER; note = bicyclic nucleic acid (BNA)
  source 1..10: mol_type = other DNA
  modified_base 5: mod_base = OTHER; note = Uracil
  modified_base 6: mod_base = OTHER; note = Uracil
  modified_base 8: mod_base = OTHER; note = Uracil
taagttctgt

SEQ ID NO: 3543-3544 - skipped (2 entries)

SEQ ID NO: 3545 - DNA, 20 bp, synthetic construct
  misc_feature 1..20: note = Description of Artificial Sequence: Synthetic Antisense oligonucleotide
  misc_feature 1..20: note = Original Sequence: gtaaguucuguccaagcccg
  modified_base 1..2: mod_base = OTHER; note = bicyclic nucleic acid (BNA)
  modified_base 19..20: mod_base = OTHER; note = bicyclic nucleic acid (BNA)
  source 1..20: mol_type = other DNA
  modified_base 6: mod_base = OTHER; note = Uracil
  modified_base 7: mod_base = OTHER; note = Uracil
  modified_base 9: mod_base = OTHER; note = Uracil
  modified_base 11: mod_base = OTHER; note = Uracil
gtaagttctgtccaagcccg

SEQ ID NO: 3546 - DNA, 19 bp, synthetic construct
  misc_feature 1..19: note = Description of Artificial Sequence: Synthetic Antisense oligonucleotide
  misc_feature 1..19: note = Original Sequence: gtaaguucuguccaagccc
  modified_base 1..2: mod_base = OTHER; note = bicyclic nucleic acid (BNA)
  modified_base 18..19: mod_base = OTHER; note = bicyclic nucleic acid (BNA)
  source 1..19: mol_type = other DNA
  modified_base 6: mod_base = OTHER; note = Uracil
  modified_base 7: mod_base = OTHER; note = Uracil
  modified_base 9: mod_base = OTHER; note = Uracil
  modified_base 11: mod_base = OTHER; note = Uracil
gtaagttctgtccaagccc

SEQ ID NO: 3547 - DNA, 17 bp, synthetic construct
  misc_feature 1..17: note = Description of Artificial Sequence: Synthetic Antisense oligonucleotide
  misc_feature 1..17: note = Original Sequence: gtaaguucuguccaagc
  modified_base 1..2: mod_base = OTHER; note = bicyclic nucleic acid (BNA)
  modified_base 16..17: mod_base = OTHER; note = bicyclic nucleic acid (BNA)
  source 1..17: mol_type = other DNA
  modified_base 6: mod_base = OTHER; note = Uracil
  modified_base 7: mod_base = OTHER; note = Uracil
  modified_base 9: mod_base = OTHER; note = Uracil
  modified_base 11: mod_base = OTHER; note = Uracil
gtaagttctgtccaagc

SEQ ID NO: 3548 - DNA, 16 bp, synthetic construct
  misc_feature 1..16: note = Description of Artificial Sequence: Synthetic Antisense oligonucleotide
  misc_feature 1..16: note = Original Sequence: gtaaguucuguccaag
  modified_base 1..2: mod_base = OTHER; note = bicyclic nucleic acid (BNA)
  modified_base 15..16: mod_base = OTHER; note = bicyclic nucleic acid (BNA)
  source 1..16: mol_type = other DNA
  modified_base 6: mod_base = OTHER; note = Uracil
  modified_base 7: mod_base = OTHER; note = Uracil
  modified_base 9: mod_base = OTHER; note = Uracil
  modified_base 11: mod_base = OTHER; note = Uracil
gtaagttctgtccaag

SEQ ID NO: 3549 - DNA, 15 bp, synthetic construct
  misc_feature 1..15: note = Description of Artificial Sequence: Synthetic Antisense oligonucleotide
  misc_feature 1..15: note = Original Sequence: gtaaguucuguccaa
  modified_base 1..2: mod_base = OTHER; note = bicyclic nucleic acid (BNA)
  modified_base 14..15: mod_base = OTHER; note = bicyclic nucleic acid (BNA)
  source 1..15: mol_type = other DNA
  modified_base 6: mod_base = OTHER; note = Uracil
  modified_base 7: mod_base = OTHER; note = Uracil
  modified_base 9: mod_base = OTHER; note = Uracil
  modified_base 11: mod_base = OTHER; note = Uracil
gtaagttctgtccaa

SEQ ID NO: 3550 - DNA, 14 bp, synthetic construct
  misc_feature 1..14: note = Description of Artificial Sequence: Synthetic Antisense oligonucleotide
  misc_feature 1..14: note = Original Sequence: gtaaguucugucca
  modified_base 1..2: mod_base = OTHER; note = bicyclic nucleic acid (BNA)
  modified_base 13..14: mod_base = OTHER; note = bicyclic nucleic acid (BNA)
  source 1..14: mol_type = other DNA
  modified_base 6: mod_base = OTHER; note = Uracil
  modified_base 7: mod_base = OTHER; note = Uracil
  modified_base 9: mod_base = OTHER; note = Uracil
  modified_base 11: mod_base = OTHER; note = Uracil
gtaagttctgtcca

SEQ ID NO: 3551 - DNA, 13 bp, synthetic construct
  misc_feature 1..13: note = Description of Artificial Sequence: Synthetic Antisense oligonucleotide
  misc_feature 1..13: note = Original Sequence: gtaaguucugucc
  modified_base 1..2: mod_base = OTHER; note = bicyclic nucleic acid (BNA)
  modified_base 12..13: mod_base = OTHER; note = bicyclic nucleic acid (BNA)
  source 1..13: mol_type = other DNA
  modified_base 6: mod_base = OTHER; note = Uracil
  modified_base 7: mod_base = OTHER; note = Uracil
  modified_base 9: mod_base = OTHER; note = Uracil
  modified_base 11: mod_base = OTHER; note = Uracil
gtaagttctgtcc

SEQ ID NO: 3552 - DNA, 12 bp, synthetic construct
  misc_feature 1..12: note = Description of Artificial Sequence: Synthetic Antisense oligonucleotide
  misc_feature 1..12: note = Original Sequence: gtaaguucugtc
  modified_base 1..2: mod_base = OTHER; note = bicyclic nucleic acid (BNA)
  modified_base 11..12: mod_base = OTHER; note = bicyclic nucleic acid (BNA)
  source 1..12: mol_type = other DNA
  modified_base 6: mod_base = OTHER; note = Uracil
  modified_base 7: mod_base = OTHER; note = Uracil
  modified_base 9: mod_base = OTHER; note = Uracil
gtaagttctgtc

SEQ ID NO: 3553 - DNA, 11 bp, synthetic construct
  misc_feature 1..11: note = Description of Artificial Sequence: Synthetic Antisense oligonucleotide
  misc_feature 1..11: note = Original Sequence: gtaaguucugt
  modified_base 1..2: mod_base = OTHER; note = bicyclic nucleic acid (BNA)
  modified_base 10..11: mod_base = OTHER; note = bicyclic nucleic acid (BNA)
  source 1..11: mol_type = other DNA
  modified_base 6: mod_base = OTHER; note = Uracil
  modified_base 7: mod_base = OTHER; note = Uracil
  modified_base 9: mod_base = OTHER; note = Uracil
gtaagttctgt

SEQ ID NO: 3554 - DNA, 10 bp, synthetic construct
  misc_feature 1..10: note = Description of Artificial Sequence: Synthetic Antisense oligonucleotide
  misc_feature 1..10: note = Original Sequence: gtaaguuctg
  modified_base 1..2: mod_base = OTHER; note = bicyclic nucleic acid (BNA)
  modified_base 9..10: mod_base = OTHER; note = bicyclic nucleic acid (BNA)
  source 1..10: mol_type = other DNA
  modified_base 6: mod_base = OTHER; note = Uracil
  modified_base 7: mod_base = OTHER; note = Uracil
gtaagttctg

SEQ ID NO: 3555-3556 - skipped (2 entries)

SEQ ID NO: 3557 - RNA, 20 nt, synthetic construct
  misc_feature 1..20: note = Description of Artificial Sequence: Synthetic Antisense oligonucleotide
  modified_base 1..2: mod_base = OTHER; note = bicyclic nucleic acid (BNA)
  modified_base 19..20: mod_base = OTHER; note = bicyclic nucleic acid (BNA)
  source 1..20: mol_type = other RNA
ggtaagttctgtccaagccc

SEQ ID NO: 3558 - RNA, 19 nt, synthetic construct
  misc_feature 1..19: note = Description of Artificial Sequence: Synthetic Antisense oligonucleotide
  modified_base 1..2: mod_base = OTHER; note = bicyclic nucleic acid (BNA)
  modified_base 18..19: mod_base = OTHER; note = bicyclic nucleic acid (BNA)
  source 1..19: mol_type = other RNA
ggtaagttctgtccaagcc

SEQ ID NO: 3559 - RNA, 17 nt, synthetic construct
  misc_feature 1..17: note = Description of Artificial Sequence: Synthetic Antisense oligonucleotide
  modified_base 1..2: mod_base = OTHER; note = bicyclic nucleic acid (BNA)
  modified_base 16..17: mod_base = OTHER; note = bicyclic nucleic acid (BNA)
  source 1..17: mol_type = other RNA
ggtaagttctgtccaag

SEQ ID NO: 3560 - RNA, 16 nt, synthetic construct
  misc_feature 1..16: note = Description of Artificial Sequence: Synthetic Antisense oligonucleotide
  modified_base 1..2: mod_base = OTHER; note = bicyclic nucleic acid (BNA)
  modified_base 15..16: mod_base = OTHER; note = bicyclic nucleic acid (BNA)
  source 1..16: mol_type = other RNA
ggtaagttctgtccaa

SEQ ID NO: 3561 - RNA, 15 nt, synthetic construct
  misc_feature 1..15: note = Description of Artificial Sequence: Synthetic Antisense oligonucleotide
  modified_base 1..2: mod_base = OTHER; note = bicyclic nucleic acid (BNA)
  modified_base 14..15: mod_base = OTHER; note = bicyclic nucleic acid (BNA)
  source 1..15: mol_type = other RNA
ggtaagttctgtcca

SEQ ID NO: 3562 - RNA, 14 nt, synthetic construct
  misc_feature 1..14: note = Description of Artificial Sequence: Synthetic Antisense oligonucleotide
  modified_base 1..2: mod_base = OTHER; note = bicyclic nucleic acid (BNA)
  modified_base 13..14: mod_base = OTHER; note = bicyclic nucleic acid (BNA)
  source 1..14: mol_type = other RNA
ggtaagttctgtcc

SEQ ID NO: 3563 - DNA, 13 bp, synthetic construct
  misc_feature 1..13: note = Description of Artificial Sequence: Synthetic Antisense oligonucleotide
  misc_feature 1..13: note = Original Sequence: gguaaguucugtc
  modified_base 1..2: mod_base = OTHER; note = bicyclic nucleic acid (BNA)
  modified_base 12..13: mod_base = OTHER; note = bicyclic nucleic acid (BNA)
  source 1..13: mol_type = other DNA
  modified_base 3: mod_base = OTHER; note = Uracil
  modified_base 7: mod_base = OTHER; note = Uracil
  modified_base 8: mod_base = OTHER; note = Uracil
  modified_base 10: mod_base = OTHER; note = Uracil
ggtaagttctgtc

SEQ ID NO: 3564 - DNA, 12 bp, synthetic construct
  misc_feature 1..12: note = Description of Artificial Sequence: Synthetic Antisense oligonucleotide
  misc_feature 1..12: note = Original Sequence: gguaaguucugt
  modified_base 1..2: mod_base = OTHER; note = bicyclic nucleic acid (BNA)
  modified_base 11..12: mod_base = OTHER; note = bicyclic nucleic acid (BNA)
  source 1..12: mol_type = other DNA
  modified_base 3: mod_base = OTHER; note = Uracil
  modified_base 7: mod_base = OTHER; note = Uracil
  modified_base 8: mod_base = OTHER; note = Uracil
  modified_base 10: mod_base = OTHER; note = Uracil
ggtaagttctgt

SEQ ID NO: 3565 - DNA, 11 bp, synthetic construct
  misc_feature 1..11: note = Description of Artificial Sequence: Synthetic Antisense oligonucleotide
  misc_feature 1..11: note = Original Sequence: gguaaguuctg
  modified_base 1..2: mod_base = OTHER; note = bicyclic nucleic acid (BNA)
  modified_base 10..11: mod_base = OTHER; note = bicyclic nucleic acid (BNA)
  source 1..11: mol_type = other DNA
  modified_base 3: mod_base = OTHER; note = Uracil
  modified_base 7: mod_base = OTHER; note = Uracil
  modified_base 8: mod_base = OTHER; note = Uracil
ggtaagttctg

SEQ ID NO: 3566 - DNA, 10 bp, synthetic construct
  misc_feature 1..10: note = Description of Artificial Sequence: Synthetic Antisense oligonucleotide
  misc_feature 1..10: note = Original Sequence: gguaaguuct
  modified_base 1..2: mod_base = OTHER; note = bicyclic nucleic acid (BNA)
  modified_base 9..10: mod_base = OTHER; note = bicyclic nucleic acid (BNA)
  source 1..10: mol_type = other DNA
  modified_base 3: mod_base = OTHER; note = Uracil
  modified_base 7: mod_base = OTHER; note = Uracil
  modified_base 8: mod_base = OTHER; note = Uracil
ggtaagttct

SEQ ID NO: 3567-3568 - skipped (2 entries)

SEQ ID NO: 3569 - RNA, 20 nt, synthetic construct
  misc_feature 1..20: note = Description of Artificial Sequence: Synthetic Antisense oligonucleotide
  modified_base 1..2: mod_base = OTHER; note = bicyclic nucleic acid (BNA)
  modified_base 19..20: mod_base = OTHER; note = bicyclic nucleic acid (BNA)
  source 1..20: mol_type = other RNA
cggtaagttctgtccaagcc

SEQ ID NO: 3570 - RNA, 19 nt, synthetic construct
  misc_feature 1..19: note = Description of Artificial Sequence: Synthetic Antisense oligonucleotide
  modified_base 1..2: mod_base = OTHER; note = bicyclic nucleic acid (BNA)
  modified_base 18..19: mod_base = OTHER; note = bicyclic nucleic acid (BNA)
  source 1..19: mol_type = other RNA
cggtaagttctgtccaagc

SEQ ID NO: 3571 - RNA, 18 nt, synthetic construct
  misc_feature 1..18: note = Description of Artificial Sequence: Synthetic Antisense oligonucleotide
  modified_base 1..2: mod_base = OTHER; note = bicyclic nucleic acid (BNA)
  modified_base 17..18: mod_base = OTHER; note = bicyclic nucleic acid (BNA)
  source 1..18: mol_type = other RNA
cggtaagttctgtccaag

SEQ ID NO: 3572 - RNA, 17 nt, synthetic construct
  misc_feature 1..17: note = Description of Artificial Sequence: Synthetic Antisense oligonucleotide
  modified_base 1..2: mod_base = OTHER; note = bicyclic nucleic acid (BNA)
  modified_base 16..17: mod_base = OTHER; note = bicyclic nucleic acid (BNA)
  source 1..17: mol_type = other RNA
cggtaagttctgtccaa

SEQ ID NO: 3573 - RNA, 16 nt, synthetic construct
  misc_feature 1..16: note = Description of Artificial Sequence: Synthetic Antisense oligonucleotide
  modified_base 1..2: mod_base = OTHER; note = bicyclic nucleic acid (BNA)
  modified_base 15..16: mod_base = OTHER; note = bicyclic nucleic acid (BNA)
  source 1..16: mol_type = other RNA
cggtaagttctgtcca

SEQ ID NO: 3574 - RNA, 15 nt, synthetic construct
  misc_feature 1..15: note = Description of Artificial Sequence: Synthetic Antisense oligonucleotide
  modified_base 1..2: mod_base = OTHER; note = bicyclic nucleic acid (BNA)
  modified_base 14..15: mod_base = OTHER; note = bicyclic nucleic acid (BNA)
  source 1..15: mol_type = other RNA
cggtaagttctgtcc

SEQ ID NO: 3575 - DNA, 14 bp, synthetic construct
  misc_feature 1..14: note = Description of Artificial Sequence: Synthetic Antisense oligonucleotide
  misc_feature 1..14: note = Original Sequence: cgguaaguucugtc
  modified_base 1..2: mod_base = OTHER; note = bicyclic nucleic acid (BNA)
  modified_base 13..14: mod_base = OTHER; note = bicyclic nucleic acid (BNA)
  source 1..14: mol_type = other DNA
  modified_base 4: mod_base = OTHER; note = Uracil
  modified_base 8: mod_base = OTHER; note = Uracil
  modified_base 9: mod_base = OTHER; note = Uracil
  modified_base 11: mod_base = OTHER; note = Uracil
cggtaagttctgtc

SEQ ID NO: 3576 - DNA, 13 bp, synthetic construct
  misc_feature 1..13: note = Description of Artificial Sequence: Synthetic Antisense oligonucleotide
  misc_feature 1..13: note = Original Sequence: cgguaaguucugt
  modified_base 1..2: mod_base = OTHER; note = bicyclic nucleic acid (BNA)
  modified_base 12..13: mod_base = OTHER; note = bicyclic nucleic acid (BNA)
  source 1..13: mol_type = other DNA
  modified_base 4: mod_base = OTHER; note = Uracil
  modified_base 8: mod_base = OTHER; note = Uracil
  modified_base 9: mod_base = OTHER; note = Uracil
  modified_base 11: mod_base = OTHER; note = Uracil
cggtaagttctgt

SEQ ID NO: 3577 - DNA, 12 bp, synthetic construct
  misc_feature 1..12: note = Description of Artificial Sequence: Synthetic Antisense oligonucleotide
  misc_feature 1..12: note = Original Sequence: cgguaaguuctg
  modified_base 1..2: mod_base = OTHER; note = bicyclic nucleic acid (BNA)
  modified_base 11..12: mod_base = OTHER; note = bicyclic nucleic acid (BNA)
  source 1..12: mol_type = other DNA
  modified_base 4: mod_base = OTHER; note = Uracil
  modified_base 8: mod_base = OTHER; note = Uracil
  modified_base 9: mod_base = OTHER; note = Uracil
cggtaagttctg

SEQ ID NO: 3578 - DNA, 11 bp, synthetic construct
  misc_feature 1..11: note = Description of Artificial Sequence: Synthetic Antisense oligonucleotide
  misc_feature 1..11: note = Original Sequence: cgguaaguuct
  modified_base 1..2: mod_base = OTHER; note = bicyclic nucleic acid (BNA)
  modified_base 10..11: mod_base = OTHER; note = bicyclic nucleic acid (BNA)
  source 1..11: mol_type = other DNA
  modified_base 4: mod_base = OTHER; note = Uracil
  modified_base 8: mod_base = OTHER; note = Uracil
  modified_base 9: mod_base = OTHER; note = Uracil
cggtaagttct

SEQ ID NO: 3579 - DNA, 10 bp, synthetic construct
  misc_feature 1..10: note = Description of Artificial Sequence: Synthetic Antisense oligonucleotide
  misc_feature 1..10: note = Original Sequence: cgguaagutc
  modified_base 1..2: mod_base = OTHER; note = bicyclic nucleic acid (BNA)
  modified_base 9..10: mod_base = OTHER; note = bicyclic nucleic acid (BNA)
  source 1..10: mol_type = other DNA
  modified_base 4: mod_base = OTHER; note = Uracil
  modified_base 8: mod_base = OTHER; note = Uracil
cggtaagttc

SEQ ID NO: 3580-3581 - skipped (2 entries)

SEQ ID NO: 3582 - DNA, 20 bp, synthetic construct
  misc_feature 1..20: note = Description of Artificial Sequence: Synthetic Antisense oligonucleotide
  misc_feature 1..20: note = Original Sequence: tcgguaaguucuguccaagc
  modified_base 1..2: mod_base = OTHER; note = bicyclic nucleic acid (BNA)
  modified_base 19..20: mod_base = OTHER; note = bicyclic nucleic acid (BNA)
  source 1..20: mol_type = other DNA
  modified_base 5: mod_base = OTHER; note = Uracil
  modified_base 9: mod_base = OTHER; note = Uracil
  modified_base 10: mod_base = OTHER; note = Uracil
  modified_base 12: mod_base = OTHER; note = Uracil
  modified_base 14: mod_base = OTHER; note = Uracil
tcggtaagttctgtccaagc

SEQ ID NO: 3583 - DNA, 19 bp, synthetic construct
  misc_feature 1..19: note = Description of Artificial Sequence: Synthetic Antisense oligonucleotide
  misc_feature 1..19: note = Original Sequence: tcgguaaguucuguccaag
  modified_base 1..2: mod_base = OTHER; note = bicyclic nucleic acid (BNA)
  modified_base 18..19: mod_base = OTHER; note = bicyclic nucleic acid (BNA)
  source 1..19: mol_type = other DNA
  modified_base 5: mod_base = OTHER; note = Uracil
  modified_base 9: mod_base = OTHER; note = Uracil
  modified_base 10: mod_base = OTHER; note = Uracil
  modified_base 12: mod_base = OTHER; note = Uracil
  modified_base 14: mod_base = OTHER; note = Uracil
tcggtaagttctgtccaag

SEQ ID NO: 3584 - DNA, 18 bp, synthetic construct
  misc_feature 1..18: note = Description of Artificial Sequence: Synthetic Antisense oligonucleotide
  misc_feature 1..18: note = Original Sequence: tcgguaaguucuguccaa
  modified_base 1..2: mod_base = OTHER; note = bicyclic nucleic acid (BNA)
  modified_base 17..18: mod_base = OTHER; note = bicyclic nucleic acid (BNA)
  source 1..18: mol_type = other DNA
  modified_base 5: mod_base = OTHER; note = Uracil
  modified_base 9: mod_base = OTHER; note = Uracil
  modified_base 10: mod_base = OTHER; note = Uracil
  modified_base 12: mod_base = OTHER; note = Uracil
  modified_base 14: mod_base = OTHER; note = Uracil
tcggtaagttctgtccaa

SEQ ID NO: 3585 - DNA, 17 bp, synthetic construct
  misc_feature 1..17: note = Description of Artificial Sequence: Synthetic Antisense oligonucleotide
  misc_feature 1..17: note = Original Sequence: tcgguaaguucugucca
  modified_base 1..2: mod_base = OTHER; note = bicyclic nucleic acid (BNA)
  modified_base 16..17: mod_base = OTHER; note = bicyclic nucleic acid (BNA)
  source 1..17: mol_type = other DNA
  modified_base 5: mod_base = OTHER; note = Uracil
  modified_base 9: mod_base = OTHER; note = Uracil
  modified_base 10: mod_base = OTHER; note = Uracil
  modified_base 12: mod_base = OTHER; note = Uracil
  modified_base 14: mod_base = OTHER; note = Uracil
tcggtaagttctgtcca

SEQ ID NO: 3586 - DNA, 16 bp, synthetic construct
  misc_feature 1..16: note = Description of Artificial Sequence: Synthetic Antisense oligonucleotide
  misc_feature 1..16: note = Original Sequence: tcgguaaguucugucc
  modified_base 1..2: mod_base = OTHER; note = bicyclic nucleic acid (BNA)
  modified_base 15..16: mod_base = OTHER; note = bicyclic nucleic acid (BNA)
  source 1..16: mol_type = other DNA
  modified_base 5: mod_base = OTHER; note = Uracil
  modified_base 9: mod_base = OTHER; note = Uracil
  modified_base 10: mod_base = OTHER; note = Uracil
  modified_base 12: mod_base = OTHER; note = Uracil
  modified_base 14: mod_base = OTHER; note = Uracil
tcggtaagttctgtcc

SEQ ID NO: 3587 - DNA, 15 bp, synthetic construct
  misc_feature 1..15: note = Description of Artificial Sequence: Synthetic Antisense oligonucleotide
  misc_feature 1..15: note = Original Sequence: tcgguaaguucugtc
  modified_base 1..2: mod_base = OTHER; note = bicyclic nucleic acid (BNA)
  modified_base 14..15: mod_base = OTHER; note = bicyclic nucleic acid (BNA)
  source 1..15: mol_type = other DNA
  modified_base 5: mod_base = OTHER; note = Uracil
  modified_base 9: mod_base = OTHER; note = Uracil
  modified_base 10: mod_base = OTHER; note = Uracil
  modified_base 12: mod_base = OTHER; note = Uracil
tcggtaagttctgtc

SEQ ID NO: 3588 - DNA, 14 bp, synthetic construct
  misc_feature 1..14: note = Description of Artificial Sequence: Synthetic Antisense oligonucleotide
  misc_feature 1..14: note = Original Sequence: tcgguaaguucugt
  modified_base 1..2: mod_base = OTHER; note = bicyclic nucleic acid (BNA)
  modified_base 13..14: mod_base = OTHER; note = bicyclic nucleic acid (BNA)
  source 1..14: mol_type = other DNA
  modified_base 5: mod_base = OTHER; note = Uracil
  modified_base 9: mod_base = OTHER; note = Uracil
  modified_base 10: mod_base = OTHER; note = Uracil
  modified_base 12: mod_base = OTHER; note = Uracil
tcggtaagttctgt

SEQ ID NO: 3589 - DNA, 13 bp, synthetic construct
  misc_feature 1..13: note = Description of Artificial Sequence: Synthetic Antisense oligonucleotide
  misc_feature 1..13: note = Original Sequence: tcgguaaguuctg
  modified_base 1..2: mod_base = OTHER; note = bicyclic nucleic acid (BNA)
  modified_base 12..13: mod_base = OTHER; note = bicyclic nucleic acid (BNA)
  source 1..13: mol_type = other DNA
  modified_base 5: mod_base = OTHER; note = Uracil
  modified_base 9: mod_base = OTHER; note = Uracil
  modified_base 10: mod_base = OTHER; note = Uracil
tcggtaagttctg

SEQ ID NO: 3590 - DNA, 12 bp, synthetic construct
  misc_feature 1..12: note = Description of Artificial Sequence: Synthetic Antisense oligonucleotide
  misc_feature 1..12: note = Original Sequence: tcgguaaguuct
  modified_base 1..2: mod_base = OTHER; note = bicyclic nucleic acid (BNA)
  modified_base 11..12: mod_base = OTHER; note = bicyclic nucleic acid (BNA)
  source 1..12: mol_type = other DNA
  modified_base 5: mod_base = OTHER; note = Uracil
  modified_base 9: mod_base = OTHER; note = Uracil
  modified_base 10: mod_base = OTHER; note = Uracil
tcggtaagttct

SEQ ID NO: 3591 - DNA, 11 bp, synthetic construct
  misc_feature 1..11: note = Description of Artificial Sequence: Synthetic Antisense oligonucleotide
  misc_feature 1..11: note = Original Sequence: tcgguaagutc
  modified_base 1..2: mod_base = OTHER; note = bicyclic nucleic acid (BNA)
  modified_base 10..11: mod_base = OTHER; note = bicyclic nucleic acid (BNA)
  source 1..11: mol_type = other DNA
  modified_base 5: mod_base = OTHER; note = Uracil
  modified_base 9: mod_base = OTHER; note = Uracil
tcggtaagttc

SEQ ID NO: 3592 - DNA, 10 bp, synthetic construct
  misc_feature 1..10: note = Description of Artificial Sequence: Synthetic Antisense oligonucleotide
  misc_feature 1..10: note = Original Sequence: tcgguaagtt
  modified_base 1..2: mod_base = OTHER; note = bicyclic nucleic acid (BNA)
  modified_base 9..10: mod_base = OTHER; note = bicyclic nucleic acid (BNA)
  source 1..10: mol_type = other DNA
  modified_base 5: mod_base = OTHER; note = Uracil
tcggtaagtt

SEQ ID NO: 3593 - skipped

SEQ ID NO: 3594 - DNA, 20 bp, synthetic construct
  misc_feature 1..20: note = Description of Artificial Sequence: Synthetic Antisense oligonucleotide
  misc_feature 1..20: note = Original Sequence: gtcgguaaguucuguccaag
  modified_base 1..2: mod_base = OTHER; note = bicyclic nucleic acid (BNA)
  modified_base 19..20: mod_base = OTHER; note = bicyclic nucleic acid (BNA)
  source 1..20: mol_type = other DNA
  modified_base 6: mod_base = OTHER; note = Uracil
  modified_base 10: mod_base = OTHER; note = Uracil
  modified_base 11: mod_base = OTHER; note = Uracil
  modified_base 13: mod_base = OTHER; note = Uracil
  modified_base 15: mod_base = OTHER; note = Uracil
gtcggtaagttctgtccaag

SEQ ID NO: 3595 - DNA, 19 bp, synthetic construct
  misc_feature 1..19: note = Description of Artificial Sequence: Synthetic Antisense oligonucleotide
  misc_feature 1..19: note = Original Sequence: gtcgguaaguucuguccaa
  modified_base 1..2: mod_base = OTHER; note = bicyclic nucleic acid (BNA)
  modified_base 18..19: mod_base = OTHER; note = bicyclic nucleic acid (BNA)
  source 1..19: mol_type = other DNA
  modified_base 6: mod_base = OTHER; note = Uracil
  modified_base 10: mod_base = OTHER; note = Uracil
  modified_base 11: mod_base = OTHER; note = Uracil
  modified_base 13: mod_base = OTHER; note = Uracil
  modified_base 15: mod_base = OTHER; note = Uracil
gtcggtaagttctgtccaa

SEQ ID NO: 3596 - DNA, 18 bp, synthetic construct
  misc_feature 1..18: note = Description of Artificial Sequence: Synthetic Antisense oligonucleotide
  misc_feature 1..18: note = Original Sequence: gtcgguaaguucugucca
  modified_base 1..2: mod_base = OTHER; note = bicyclic nucleic acid (BNA)
  modified_base 17..18: mod_base = OTHER; note = bicyclic nucleic acid (BNA)
  source 1..18: mol_type = other DNA
  modified_base 6: mod_base = OTHER; note = Uracil
  modified_base 10: mod_base = OTHER; note = Uracil
  modified_base 11: mod_base = OTHER; note = Uracil
  modified_base 13: mod_base = OTHER; note = Uracil
  modified_base 15: mod_base = OTHER; note = Uracil
gtcggtaagttctgtcca

SEQ ID NO: 3597 - DNA, 17 bp, synthetic construct
  misc_feature 1..17: note = Description of Artificial Sequence: Synthetic Antisense oligonucleotide
  misc_feature 1..17: note = Original Sequence: gtcgguaaguucugucc
  modified_base 1..2: mod_base = OTHER; note = bicyclic nucleic acid (BNA)
  modified_base 16..17: mod_base = OTHER; note = bicyclic nucleic acid (BNA)
  source 1..17: mol_type = other DNA
  modified_base 6: mod_base = OTHER; note = Uracil
  modified_base 10: mod_base = OTHER; note = Uracil
  modified_base 11: mod_base = OTHER; note = Uracil
  modified_base 13: mod_base = OTHER; note = Uracil
  modified_base 15: mod_base = OTHER; note = Uracil
gtcggtaagttctgtcc

SEQ ID NO: 3598 - DNA, 16 bp, synthetic construct
  misc_feature 1..16: note = Description of Artificial Sequence: Synthetic Antisense oligonucleotide
  misc_feature 1..16: note = Original Sequence: gtcgguaaguucugtc
  modified_base 1..2: mod_base = OTHER; note = bicyclic nucleic acid (BNA)
  modified_base 15..16: mod_base = OTHER; note = bicyclic nucleic acid (BNA)
  source 1..16: mol_type = other DNA
  modified_base 6: mod_base = OTHER; note = Uracil
  modified_base 10: mod_base = OTHER; note = Uracil
  modified_base 11: mod_base = OTHER; note = Uracil
  modified_base 13: mod_base = OTHER; note = Uracil
gtcggtaagttctgtc

SEQ ID NO: 3599 - DNA, 15 bp, synthetic construct
  misc_feature 1..15: note = Description of Artificial Sequence: Synthetic Antisense oligonucleotide
  misc_feature 1..15: note = Original Sequence: gtcgguaaguucugt
  modified_base 1..2: mod_base = OTHER; note = bicyclic nucleic acid (BNA)
  modified_base 14..15: mod_base = OTHER; note = bicyclic nucleic acid (BNA)
  source 1..15: mol_type = other DNA
  modified_base 6: mod_base = OTHER; note = Uracil
  modified_base 10: mod_base = OTHER; note = Uracil
  modified_base 11: mod_base = OTHER; note = Uracil
  modified_base 13: mod_base = OTHER; note = Uracil
gtcggtaagttctgt

SEQ ID NO: 3600 - DNA, 14 bp, synthetic construct
  misc_feature 1..14: note = Description of Artificial Sequence: Synthetic Antisense oligonucleotide
  misc_feature 1..14: note = Original Sequence: gtcgguaaguuctg
  modified_base 1..2: mod_base = OTHER; note = bicyclic nucleic acid (BNA)
  modified_base 13..14: mod_base = OTHER; note = bicyclic nucleic acid (BNA)
  source 1..14: mol_type = other DNA
  modified_base 6: mod_base = OTHER; note = Uracil
  modified_base 10: mod_base = OTHER; note = Uracil
  modified_base 11: mod_base = OTHER; note = Uracil
gtcggtaagttctg

SEQ ID NO: 3601 - DNA, 13 bp, synthetic construct
  misc_feature 1..13: note = Description of Artificial Sequence: Synthetic Antisense oligonucleotide
  misc_feature 1..13: note = Original Sequence: gtcgguaaguuct
  modified_base 1..2: mod_base = OTHER; note = bicyclic nucleic acid (BNA)
  modified_base 12..13: mod_base = OTHER; note = bicyclic nucleic acid (BNA)
  source 1..13: mol_type = other DNA
  modified_base 6: mod_base = OTHER; note = Uracil
  modified_base 10: mod_base = OTHER; note = Uracil
  modified_base 11: mod_base = OTHER; note = Uracil
gtcggtaagttct

SEQ ID NO: 3602 - DNA, 12 bp, synthetic construct
  misc_feature 1..12: note = Description of Artificial Sequence: Synthetic Antisense oligonucleotide
  misc_feature 1..12: note = Original Sequence: gtcgguaagutc
  modified_base 1..2: mod_base = OTHER; note = bicyclic nucleic acid (BNA)
  modified_base 11..12: mod_base = OTHER; note = bicyclic nucleic acid (BNA)
  source 1..12: mol_type = other DNA
  modified_base 6: mod_base = OTHER; note = Uracil
  modified_base 10: mod_base = OTHER; note = Uracil
gtcggtaagttc

SEQ ID NO: 3603 - DNA, 11 bp, synthetic construct
  misc_feature 1..11: note = Description of Artificial Sequence: Synthetic Antisense oligonucleotide
  misc_feature 1..11: note = Original Sequence: gtcgguaagtt
  modified_base 1..2: mod_base = OTHER; note = bicyclic nucleic acid (BNA)
  modified_base 10..11: mod_base = OTHER; note = bicyclic nucleic acid (BNA)
  source 1..11: mol_type = other DNA
  modified_base 6: mod_base = OTHER; note = Uracil
gtcggtaagtt

SEQ ID NO: 3604 - DNA, 10 bp, synthetic construct
  misc_feature 1..10: note = Description of Artificial Sequence: Synthetic Antisense oligonucleotide
  misc_feature 1..10: note = Original Sequence: gtcgguaagt
  modified_base 1..2: mod_base = OTHER; note = bicyclic nucleic acid (BNA)
  modified_base 9..10: mod_base = OTHER; note = bicyclic nucleic acid (BNA)
  source 1..10: mol_type = other DNA
  modified_base 6: mod_base = OTHER; note = Uracil
gtcggtaagt

SEQ ID NO: 3605 - RNA, 20 nt, synthetic construct
  misc_feature 1..20: note = Description of Artificial Sequence: Synthetic Antisense oligonucleotide
  modified_base 1..2: mod_base = OTHER; note = bicyclic nucleic acid (BNA)
  modified_base 19..20: mod_base = OTHER; note = bicyclic nucleic acid (BNA)
  source 1..20: mol_type = other RNA
agtcggtaagttctgtccaa

SEQ ID NO: 3606 - RNA, 19 nt, synthetic construct
  misc_feature 1..19: note = Description of Artificial Sequence: Synthetic Antisense oligonucleotide
  modified_base 1..2: mod_base = OTHER; note = bicyclic nucleic acid (BNA)
  modified_base 18..19: mod_base = OTHER; note = bicyclic nucleic acid (BNA)
  source 1..19: mol_type = other RNA
agtcggtaagttctgtcca

SEQ ID NO: 3607 - DNA, 17 bp, synthetic construct
  misc_feature 1..17: note = Description of Artificial Sequence: Synthetic Antisense oligonucleotide
  misc_feature 1..17: note = Original Sequence: agucgguaaguucugtc
  modified_base 1..2: mod_base = OTHER; note = bicyclic nucleic acid (BNA)
  modified_base 16..17: mod_base = OTHER; note = bicyclic nucleic acid (BNA)
  source 1..17: mol_type = other DNA
  modified_base 3: mod_base = OTHER; note = Uracil
  modified_base 7: mod_base = OTHER; note = Uracil
  modified_base 11: mod_base = OTHER; note = Uracil
  modified_base 12: mod_base = OTHER; note = Uracil
  modified_base 14: mod_base = OTHER; note = Uracil
agtcggtaagttctgtc

SEQ ID NO: 3608 - DNA, 16 bp, synthetic construct
  misc_feature 1..16: note = Description of Artificial Sequence: Synthetic Antisense oligonucleotide
  misc_feature 1..16: note = Original Sequence: agucgguaaguucugt
  modified_base 1..2: mod_base = OTHER; note = bicyclic nucleic acid (BNA)
  modified_base 15..16: mod_base = OTHER; note = bicyclic nucleic acid (BNA)
  source 1..16: mol_type = other DNA
  modified_base 3: mod_base = OTHER; note = Uracil
  modified_base 7: mod_base = OTHER; note = Uracil
  modified_base 11: mod_base = OTHER; note = Uracil
  modified_base 12: mod_base = OTHER; note = Uracil
  modified_base 14: mod_base = OTHER; note = Uracil
agtcggtaagttctgt

SEQ ID NO: 3609 - DNA, 15 bp, synthetic construct
  misc_feature 1..15: note = Description of Artificial Sequence: Synthetic Antisense oligonucleotide
  misc_feature 1..15: note = Original Sequence: agucgguaaguuctg
  modified_base 1..2: mod_base = OTHER; note = bicyclic nucleic acid (BNA)
  modified_base 14..15: mod_base = OTHER; note = bicyclic nucleic acid (BNA)
  source 1..15: mol_type = other DNA
  modified_base 3: mod_base = OTHER; note = Uracil
  modified_base 7: mod_base = OTHER; note = Uracil
  modified_base 11: mod_base = OTHER; note = Uracil
  modified_base 12: mod_base = OTHER; note = Uracil
agtcggtaagttctg

SEQ ID NO: 3610 - DNA, 14 bp, synthetic construct
  misc_feature 1..14: note = Description of Artificial Sequence: Synthetic Antisense oligonucleotide
  misc_feature 1..14: note = Original Sequence: agucgguaaguuct
  modified_base 1..2: mod_base = OTHER; note = bicyclic nucleic acid (BNA)
  modified_base 13..14: mod_base = OTHER; note = bicyclic nucleic acid (BNA)
  source 1..14: mol_type = other DNA
  modified_base 3: mod_base = OTHER; note = Uracil
  modified_base 7: mod_base = OTHER; note = Uracil
  modified_base 11: mod_base = OTHER; note = Uracil
  modified_base 12: mod_base = OTHER; note = Uracil
agtcggtaagttct

SEQ ID NO: 3611 - DNA, 13 bp, synthetic construct
  misc_feature 1..13: note = Description of Artificial Sequence: Synthetic Antisense oligonucleotide
  misc_feature 1..13: note = Original Sequence: agucgguaagutc
  modified_base 1..2: mod_base = OTHER; note = bicyclic nucleic acid (BNA)
  modified_base 12..13: mod_base = OTHER; note = bicyclic nucleic acid (BNA)
  source 1..13: mol_type = other DNA
  modified_base 3: mod_base = OTHER; note = Uracil
  modified_base 7: mod_base = OTHER; note = Uracil
  modified_base 11: mod_base = OTHER; note = Uracil
agtcggtaagttc

SEQ ID NO: 3612 - DNA, 12 bp, synthetic construct
  misc_feature 1..12: note = Description of Artificial Sequence: Synthetic Antisense oligonucleotide
  misc_feature 1..12: note = Original Sequence: agucgguaagtt
  modified_base 1..2: mod_base = OTHER; note = bicyclic nucleic acid (BNA)
  modified_base 11..12: mod_base = OTHER; note = bicyclic nucleic acid (BNA)
  source 1..12: mol_type = other DNA
  modified_base 3: mod_base = OTHER; note = Uracil
  modified_base 7: mod_base = OTHER; note = Uracil
agtcggtaagtt

SEQ ID NO: 3613 - DNA, 11 bp, synthetic construct
  misc_feature 1..11: note = Description of Artificial Sequence: Synthetic Antisense oligonucleotide
  misc_feature 1..11: note = Original Sequence: agucgguaagt
  modified_base 1..2: mod_base = OTHER; note = bicyclic nucleic acid (BNA)
  modified_base 10..11: mod_base = OTHER; note = bicyclic nucleic acid (BNA)
  source 1..11: mol_type = other DNA
  modified_base 3: mod_base = OTHER; note = Uracil
  modified_base 7: mod_base = OTHER; note = Uracil
agtcggtaagt

SEQ ID NO: 3614 - RNA, 20 nt, synthetic construct
  misc_feature 1..20: note = Description of Artificial Sequence: Synthetic Antisense oligonucleotide
  modified_base 1..2: mod_base = OTHER; note = bicyclic nucleic acid (BNA)
  modified_base 19..20: mod_base = OTHER; note = bicyclic nucleic acid (BNA)
  source 1..20: mol_type = other RNA
cagtcggtaagttctgtcca

SEQ ID NO: 3615 - RNA, 19 nt, synthetic construct
  misc_feature 1..19: note = Description of Artificial Sequence: Synthetic Antisense oligonucleotide
  modified_base 1..2: mod_base = OTHER; note = bicyclic nucleic acid (BNA)
  modified_base 18..19: mod_base = OTHER; note = bicyclic nucleic acid (BNA)
  source 1..19: mol_type = other RNA
cagtcggtaagttctgtcc

SEQ ID NO: 3616 - DNA, 18 bp, synthetic construct
  misc_feature 1..18: note = Description of Artificial Sequence: Synthetic Antisense oligonucleotide
  misc_feature 1..18: note = Original Sequence: cagucgguaaguucugtc
  modified_base 1..2: mod_base = OTHER; note = bicyclic nucleic acid (BNA)
  modified_base 17..18: mod_base = OTHER; note = bicyclic nucleic acid (BNA)
  source 1..18: mol_type = other DNA
  modified_base 4: mod_base = OTHER; note = Uracil
  modified_base 8: mod_base = OTHER; note = Uracil
  modified_base 12: mod_base = OTHER; note = Uracil
  modified_base 13: mod_base = OTHER; note = Uracil
  modified_base 15: mod_base = OTHER; note = Uracil
cagtcggtaagttctgtc

SEQ ID NO: 3617 - DNA, 17 bp, synthetic construct
  misc_feature 1..17: note = Description of Artificial Sequence: Synthetic Antisense oligonucleotide
  misc_feature 1..17: note = Original Sequence: cagucgguaaguucugt
  modified_base 1..2: mod_base = OTHER; note = bicyclic nucleic acid (BNA)
  modified_base 16..17: mod_base = OTHER; note = bicyclic nucleic acid (BNA)
  source 1..17: mol_type = other DNA
  modified_base 4: mod_base = OTHER; note = Uracil
  modified_base 8: mod_base = OTHER; note = Uracil
  modified_base 12: mod_base = OTHER; note = Uracil
  modified_base 13: mod_base = OTHER; note = Uracil
  modified_base 15: mod_base = OTHER; note = Uracil
cagtcggtaagttctgt

SEQ ID NO: 3618 - DNA, 16 bp, synthetic construct
  misc_feature 1..16: note = Description of Artificial Sequence: Synthetic Antisense oligonucleotide
  misc_feature 1..16: note = Original Sequence: cagucgguaaguuctg
  modified_base 1..2: mod_base = OTHER; note = bicyclic nucleic acid (BNA)
  modified_base 15..16: mod_base = OTHER; note = bicyclic nucleic acid (BNA)
  source 1..16: mol_type = other DNA
  modified_base 4: mod_base = OTHER; note = Uracil
  modified_base 8: mod_base = OTHER; note = Uracil
  modified_base 12: mod_base = OTHER; note = Uracil
  modified_base 13: mod_base = OTHER; note = Uracil
cagtcggtaagttctg

SEQ ID NO: 3619 - DNA, 15 bp, synthetic construct
  misc_feature 1..15: note = Description of Artificial Sequence: Synthetic Antisense oligonucleotide
  misc_feature 1..15: note = Original Sequence: cagucgguaaguuct
  modified_base 1..2: mod_base = OTHER; note = bicyclic nucleic acid (BNA)
  modified_base 14..15: mod_base = OTHER; note = bicyclic nucleic acid (BNA)
  source 1..15: mol_type = other DNA
  modified_base 4: mod_base = OTHER; note = Uracil
  modified_base 8: mod_base = OTHER; note = Uracil
  modified_base 12: mod_base = OTHER; note = Uracil
  modified_base 13: mod_base = OTHER; note = Uracil
cagtcggtaagttct

SEQ ID NO: 3620 - DNA, 14 bp, synthetic construct
  misc_feature 1..14: note = Description of Artificial Sequence: Synthetic Antisense oligonucleotide
  misc_feature 1..14: note = Original Sequence: cagucgguaagutc
  modified_base 1..2: mod_base = OTHER; note = bicyclic nucleic acid (BNA)
  modified_base 13..14: mod_base = OTHER; note = bicyclic nucleic acid (BNA)
  source 1..14: mol_type = other DNA
  modified_base 4: mod_base = OTHER; note = Uracil
  modified_base 8: mod_base = OTHER; note = Uracil
  modified_base 12: mod_base = OTHER; note = Uracil
cagtcggtaagttc

SEQ ID NO: 3621 - DNA, 13 bp, synthetic construct
  misc_feature 1..13: note = Description of Artificial Sequence: Synthetic Antisense oligonucleotide
  misc_feature 1..13: note = Original Sequence: cagucgguaagtt
  modified_base 1..2: mod_base = OTHER; note = bicyclic nucleic acid (BNA)
  modified_base 12..13: mod_base = OTHER; note = bicyclic nucleic acid (BNA)
  source 1..13: mol_type = other DNA
  modified_base 4: mod_base = OTHER; note = Uracil
  modified_base 8: mod_base = OTHER; note = Uracil
cagtcggtaagtt

SEQ ID NO: 3622 - DNA, 12 bp, synthetic construct
  misc_feature 1..12: note = Description of Artificial Sequence: Synthetic Antisense oligonucleotide
  misc_feature 1..12: note = Original Sequence: cagucgguaagt
  modified_base 1..2: mod_base = OTHER; note = bicyclic nucleic acid (BNA)
  modified_base 11..12: mod_base = OTHER; note = bicyclic nucleic acid (BNA)
  source 1..12: mol_type = other DNA
  modified_base 4: mod_base = OTHER; note = Uracil
  modified_base 8: mod_base = OTHER; note = Uracil
cagtcggtaagt

SEQ ID NO: 3623 - RNA, 20 nt, synthetic construct
  misc_feature 1..20: note = Description of Artificial Sequence: Synthetic Antisense oligonucleotide
  modified_base 1..2: mod_base = OTHER; note = bicyclic nucleic acid (BNA)
  modified_base 19..20: mod_base = OTHER; note = bicyclic nucleic acid (BNA)
  source 1..20: mol_type = other RNA
ccagtcggtaagttctgtcc

SEQ ID NO: 3624 - DNA, 19 bp, synthetic construct
  misc_feature 1..19: note = Description of Artificial Sequence: Synthetic Antisense oligonucleotide
  misc_feature 1..19: note = Original Sequence: ccagucgguaaguucugtc
  modified_base 1..2: mod_base = OTHER; note = bicyclic nucleic acid (BNA)
  modified_base 18..19: mod_base = OTHER; note = bicyclic nucleic acid (BNA)
  source 1..19: mol_type = other DNA
  modified_base 5: mod_base = OTHER; note = Uracil
  modified_base 9: mod_base = OTHER; note = Uracil
  modified_base 13: mod_base = OTHER; note = Uracil
  modified_base 14: mod_base = OTHER; note = Uracil
  modified_base 16: mod_base = OTHER; note = Uracil
ccagtcggtaagttctgtc

SEQ ID NO: 3625 - DNA, 18 bp, synthetic construct
  misc_feature 1..18: note = Description of Artificial Sequence: Synthetic Antisense oligonucleotide
  misc_feature 1..18: note = Original Sequence: ccagucgguaaguucugt
  modified_base 1..2: mod_base = OTHER; note = bicyclic nucleic acid (BNA)
  modified_base 17..18: mod_base = OTHER; note = bicyclic nucleic acid (BNA)
  source 1..18: mol_type = other DNA
  modified_base 5: mod_base = OTHER; note = Uracil
  modified_base 9: mod_base = OTHER; note = Uracil
  modified_base 13: mod_base = OTHER; note = Uracil
  modified_base 14: mod_base = OTHER; note = Uracil
  modified_base 16: mod_base = OTHER; note = Uracil
ccagtcggtaagttctgt

SEQ ID NO: 3626 - DNA, 17 bp, synthetic construct
  misc_feature 1..17: note = Description of Artificial Sequence: Synthetic Antisense oligonucleotide
  misc_feature 1..17: note = Original Sequence: ccagucgguaaguuctg
  modified_base 1..2: mod_base = OTHER; note = bicyclic nucleic acid (BNA)
  modified_base 16..17: mod_base = OTHER; note = bicyclic nucleic acid (BNA)
  source 1..17: mol_type = other DNA
  modified_base 5: mod_base = OTHER; note = Uracil
  modified_base 9: mod_base = OTHER; note = Uracil
  modified_base 13: mod_base = OTHER; note = Uracil
  modified_base 14: mod_base = OTHER; note = Uracil
ccagtcggtaagttctg

SEQ ID NO: 3627 - DNA, 16 bp, synthetic construct
  misc_feature 1..16: note = Description of Artificial Sequence: Synthetic Antisense oligonucleotide
  misc_feature 1..16: note = Original Sequence: ccagucgguaaguuct
  modified_base 1..2: mod_base = OTHER; note = bicyclic nucleic acid (BNA)
  modified_base 15..16: mod_base = OTHER; note = bicyclic nucleic acid (BNA)
  source 1..16: mol_type = other DNA
  modified_base 5: mod_base = OTHER; note = Uracil
  modified_base 9: mod_base = OTHER; note = Uracil
  modified_base 13: mod_base = OTHER; note = Uracil
  modified_base 14: mod_base = OTHER; note = Uracil
ccagtcggtaagttct

SEQ ID NO: 3628 - DNA, 15 bp, synthetic construct
  misc_feature 1..15: note = Description of Artificial Sequence: Synthetic Antisense oligonucleotide
  misc_feature 1..15: note = Original Sequence: ccagucgguaagutc
  modified_base 1..2: mod_base = OTHER; note = bicyclic nucleic acid (BNA)
  modified_base 14..15: mod_base = OTHER; note = bicyclic nucleic acid (BNA)
  source 1..15: mol_type = other DNA
  modified_base 5: mod_base = OTHER; note = Uracil
  modified_base 9: mod_base = OTHER; note = Uracil
  modified_base 13: mod_base = OTHER; note = Uracil
ccagtcggtaagttc

SEQ ID NO: 3629 - DNA, 14 bp, synthetic construct
  misc_feature 1..14: note = Description of Artificial Sequence: Synthetic Antisense oligonucleotide
  misc_feature 1..14: note = Original Sequence: ccagucgguaagtt
  modified_base 1..2: mod_base = OTHER; note = bicyclic nucleic acid (BNA)
  modified_base 13..14: mod_base = OTHER; note = bicyclic nucleic acid (BNA)
  source 1..14: mol_type = other DNA
  modified_base 5: mod_base = OTHER; note = Uracil
  modified_base 9: mod_base = OTHER; note = Uracil
ccagtcggtaagtt

SEQ ID NO: 3630 - DNA, 13 bp, synthetic construct
  misc_feature 1..13: note = Description of Artificial Sequence: Synthetic Antisense oligonucleotide
  misc_feature 1..13: note = Original Sequence: ccagucgguaagt
  modified_base 1..2: mod_base = OTHER; note = bicyclic nucleic acid (BNA)
  modified_base 12..13: mod_base = OTHER; note = bicyclic nucleic acid (BNA)
  source 1..13: mol_type = other DNA
  modified_base 5: mod_base = OTHER; note = Uracil
  modified_base 9: mod_base = OTHER; note = Uracil
ccagtcggtaagt

SEQ ID NO: 3631 - DNA, 20 bp, synthetic construct
  misc_feature 1..20: note = Description of Artificial Sequence: Synthetic Antisense oligonucleotide
  misc_feature 1..20: note = Original Sequence: gccagucgguaaguucugtc
  modified_base 1..2: mod_base = OTHER; note = bicyclic nucleic acid (BNA)
  modified_base 19..20: mod_base = OTHER; note = bicyclic nucleic acid (BNA)
  source 1..20: mol_type = other DNA
  modified_base 6: mod_base = OTHER; note = Uracil
  modified_base 10: mod_base = OTHER; note = Uracil
  modified_base 14: mod_base = OTHER; note = Uracil
  modified_base 15: mod_base = OTHER; note = Uracil
  modified_base 17: mod_base = OTHER; note = Uracil
gccagtcggtaagttctgtc

SEQ ID NO: 3632 - DNA, 19 bp, synthetic construct
  misc_feature 1..19: note = Description of Artificial Sequence: Synthetic Antisense oligonucleotide
  misc_feature 1..19: note = Original Sequence: gccagucgguaaguucugt
  modified_base 1..2: mod_base = OTHER; note = bicyclic nucleic acid (BNA)
  modified_base 18..19: mod_base = OTHER; note = bicyclic nucleic acid (BNA)
  source 1..19: mol_type = other DNA
  modified_base 6: mod_base = OTHER; note = Uracil
  modified_base 10: mod_base = OTHER; note = Uracil
  modified_base 14: mod_base = OTHER; note = Uracil
  modified_base 15: mod_base = OTHER; note = Uracil
  modified_base 17: mod_base = OTHER; note = Uracil
gccagtcggtaagttctgt

SEQ ID NO: 3633 - DNA, 18 bp, synthetic construct
  misc_feature 1..18: note = Description of Artificial Sequence: Synthetic Antisense oligonucleotide
  misc_feature 1..18: note = Original Sequence: gccagucgguaaguuctg
  modified_base 1..2: mod_base = OTHER; note = bicyclic nucleic acid (BNA)
  modified_base 17..18: mod_base = OTHER; note = bicyclic nucleic acid (BNA)
  source 1..18: mol_type = other DNA
  modified_base 6: mod_base = OTHER; note = Uracil
  modified_base 10: mod_base = OTHER; note = Uracil
  modified_base 14: mod_base = OTHER; note = Uracil
  modified_base 15: mod_base = OTHER; note = Uracil
gccagtcggtaagttctg

SEQ ID NO: 3634 - DNA, 17 bp, synthetic construct
  misc_feature 1..17: note = Description of Artificial Sequence: Synthetic Antisense oligonucleotide
  misc_feature 1..17: note = Original Sequence: gccagucgguaaguuct
  modified_base 1..2: mod_base = OTHER; note = bicyclic nucleic acid (BNA)
  modified_base 16..17: mod_base = OTHER; note = bicyclic nucleic acid (BNA)
  source 1..17: mol_type = other DNA
  modified_base 6: mod_base = OTHER; note = Uracil
  modified_base 10: mod_base = OTHER; note = Uracil
  modified_base 14: mod_base = OTHER; note = Uracil
  modified_base 15: mod_base = OTHER; note = Uracil
gccagtcggtaagttct

SEQ ID NO: 3635 - DNA, 16 bp, synthetic construct
  misc_feature 1..16: note = Description of Artificial Sequence: Synthetic Antisense oligonucleotide
  misc_feature 1..16: note = Original Sequence: gccagucgguaagutc
  modified_base 1..2: mod_base = OTHER; note = bicyclic nucleic acid (BNA)
  modified_base 15..16: mod_base = OTHER; note = bicyclic nucleic acid (BNA)
  source 1..16: mol_type = other DNA
  modified_base 6: mod_base = OTHER; note = Uracil
  modified_base 10: mod_base = OTHER; note = Uracil
  modified_base 14: mod_base = OTHER; note = Uracil
gccagtcggtaagttc

SEQ ID NO: 3636 - DNA, 15 bp, synthetic construct
  misc_feature 1..15: note = Description of Artificial Sequence: Synthetic Antisense oligonucleotide
  misc_feature 1..15: note = Original Sequence: gccagucgguaagtt
  modified_base 1..2: mod_base = OTHER; note = bicyclic nucleic acid (BNA)
  modified_base 14..15: mod_base = OTHER; note = bicyclic nucleic acid (BNA)
  source 1..15: mol_type = other DNA
  modified_base 6: mod_base = OTHER; note = Uracil
  modified_base 10: mod_base = OTHER; note = Uracil
gccagtcggtaagtt

SEQ ID NO: 3637 - DNA, 14 bp, synthetic construct
  misc_feature 1..14: note = Description of Artificial Sequence: Synthetic Antisense oligonucleotide
  misc_feature 1..14: note = Original Sequence: gccagucgguaagt
  modified_base 1..2: mod_base = OTHER; note = bicyclic nucleic acid (BNA)
  modified_base 13..14: mod_base = OTHER; note = bicyclic nucleic acid (BNA)
  source 1..14: mol_type = other DNA
  modified_base 6: mod_base = OTHER; note = Uracil
  modified_base 10: mod_base = OTHER; note = Uracil
gccagtcggtaagt

SEQ ID NO: 3638 - DNA, 20 bp, synthetic construct
  misc_feature 1..20: note = Description of Artificial Sequence: Synthetic Antisense oligonucleotide
  misc_feature 1..20: note = Original Sequence: tcaaggaagauggcauuuct
  modified_base 1..2: mod_base = OTHER; note = bicyclic nucleic acid (BNA)
  modified_base 19..20: mod_base = OTHER; note = bicyclic nucleic acid (BNA)
  source 1..20: mol_type = other DNA
  modified_base 11: mod_base = OTHER; note = Uracil
  modified_base 16: mod_base = OTHER; note = Uracil
  modified_base 17: mod_base = OTHER; note = Uracil
  modified_base 18: mod_base = OTHER; note = Uracil
tcaaggaagatggcatttct

SEQ ID NO: 3639 - DNA, 22 bp, synthetic construct
  misc_feature 1..22: note = Description of Artificial Sequence: Synthetic Antisense oligonucleotide
  misc_feature 1..22: note = Original Sequence: tcaaggaagauggcauuucuag
  modified_base 1..2: mod_base = OTHER; note = bicyclic nucleic acid (BNA)
  modified_base 21..22: mod_base = OTHER; note = bicyclic nucleic acid (BNA)
  source 1..22: mol_type = other DNA
  modified_base 11: mod_base = OTHER; note = Uracil
  modified_base 16: mod_base = OTHER; note = Uracil
  modified_base 17: mod_base = OTHER; note = Uracil
  modified_base 18: mod_base = OTHER; note = Uracil
  modified_base 20: mod_base = OTHER; note = Uracil
tcaaggaagatggcatttctag

SEQ ID NO: 3640 - DNA, 16 bp, synthetic construct
  misc_feature 1..16: note = Description of Artificial Sequence: Synthetic Antisense oligonucleotide
  misc_feature 1..16: note = Original Sequence: tcaaggaagauggcat
  modified_base 1..2: mod_base = OTHER; note = bicyclic nucleic acid (BNA)
  modified_base 15..16: mod_base = OTHER; note = bicyclic nucleic acid (BNA)
  source 1..16: mol_type = other DNA
  modified_base 11: mod_base = OTHER; note = Uracil
tcaaggaagatggcat

SEQ ID NO: 3641 - DNA, 15 bp, synthetic construct
  misc_feature 1..15: note = Description of Artificial Sequence: Synthetic Antisense oligonucleotide
  misc_feature 1..15: note = Original Sequence: gaagauggcauuuct
  modified_base 1..2: mod_base = OTHER; note = bicyclic nucleic acid (BNA)
  modified_base 14..15: mod_base = OTHER; note = bicyclic nucleic acid (BNA)
  source 1..15: mol_type = other DNA
  modified_base 6: mod_base = OTHER; note = Uracil
  modified_base 11: mod_base = OTHER; note = Uracil
  modified_base 12: mod_base = OTHER; note = Uracil
  modified_base 13: mod_base = OTHER; note = Uracil
gaagatggcatttct

SEQ ID NO: 3642 - DNA, 21 bp, synthetic construct
  misc_feature 1..21: note = Description of Artificial Sequence: Synthetic Antisense oligonucleotide
  misc_feature 1..21: note = Original Sequence: tcaaggaagauggcauuucta
  modified_base 1..2: mod_base = OTHER; note = bicyclic nucleic acid (BNA)
  modified_base 20..21: mod_base = OTHER; note = bicyclic nucleic acid (BNA)
  source 1..21: mol_type = other DNA
  modified_base 11: mod_base = OTHER; note = Uracil
  modified_base 16: mod_base = OTHER; note = Uracil
  modified_base 17: mod_base = OTHER; note = Uracil
  modified_base 18: mod_base = OTHER; note = Uracil
tcaaggaagatggcatttcta

SEQ ID NO: 3643 - DNA, 19 bp, synthetic construct
  misc_feature 1..19: note = Description of Artificial Sequence: Synthetic Antisense oligonucleotide
  misc_feature 1..19: note = Original Sequence: tcaaggaagauggcauutc
  modified_base 1..2: mod_base = OTHER; note = bicyclic nucleic acid (BNA)
  modified_base 18..19: mod_base = OTHER; note = bicyclic nucleic acid (BNA)
  source 1..19: mol_type = other DNA
  modified_base 11: mod_base = OTHER; note = Uracil
  modified_base 16: mod_base = OTHER; note = Uracil
  modified_base 17: mod_base = OTHER; note = Uracil
tcaaggaagatggcatttc

SEQ ID NO: 3644 - DNA, 18 bp, synthetic construct
  misc_feature 1..18: note = Description of Artificial Sequence: Synthetic Antisense oligonucleotide
  misc_feature 1..18: note = Original Sequence: tcaaggaagauggcautt
  modified_base 1..2: mod_base = OTHER; note = bicyclic nucleic acid (BNA)
  modified_base 17..18: mod_base = OTHER; note = bicyclic nucleic acid (BNA)
  source 1..18: mol_type = other DNA
  modified_base 11: mod_base = OTHER; note = Uracil
  modified_base 16: mod_base = OTHER; note = Uracil
tcaaggaagatggcattt

SEQ ID NO: 3645 - DNA, 17 bp, synthetic construct
  misc_feature 1..17: note = Description of Artificial Sequence: Synthetic Antisense oligonucleotide
  misc_feature 1..17: note = Original Sequence: tcaaggaagauggcatt
  modified_base 1..2: mod_base = OTHER; note = bicyclic nucleic acid (BNA)
  modified_base 16..17: mod_base = OTHER; note = bicyclic nucleic acid (BNA)
  source 1..17: mol_type = other DNA
  modified_base 11: mod_base = OTHER; note = Uracil
tcaaggaagatggcatt

SEQ ID NO: 3646 - DNA, 15 bp, synthetic construct
  misc_feature 1..15: note = Description of Artificial Sequence: Synthetic Antisense oligonucleotide
  misc_feature 1..15: note = Original Sequence: tcaaggaagauggca
  modified_base 1..2: mod_base = OTHER; note = bicyclic nucleic acid (BNA)
  modified_base 14..15: mod_base = OTHER; note = bicyclic nucleic acid (BNA)
  source 1..15: mol_type = other DNA
  modified_base 11: mod_base = OTHER; note = Uracil
tcaaggaagatggca

SEQ ID NO: 3647 - DNA, 14 bp, synthetic construct
  misc_feature 1..14: note = Description of Artificial Sequence: Synthetic Antisense oligonucleotide
  misc_feature 1..14: note = Original Sequence: tcaaggaagauggc
  modified_base 1..2: mod_base = OTHER; note = bicyclic nucleic acid (BNA)
  modified_base 13..14: mod_base = OTHER; note = bicyclic nucleic acid (BNA)
  source 1..14: mol_type = other DNA
  modified_base 11: mod_base = OTHER; note = Uracil
tcaaggaagatggc

SEQ ID NO: 3648 - DNA, 13 bp, synthetic construct
  misc_feature 1..13: note = Description of Artificial Sequence: Synthetic Antisense oligonucleotide
  misc_feature 1..13: note = Original Sequence: tcaaggaagaugg
  modified_base 1..2: mod_base = OTHER; note = bicyclic nucleic acid (BNA)
  modified_base 12..13: mod_base = OTHER; note = bicyclic nucleic acid (BNA)
  source 1..13: mol_type = other DNA
  modified_base 11: mod_base = OTHER; note = Uracil
tcaaggaagatgg

SEQ ID NO: 3649 - DNA, 12 bp, synthetic construct
  misc_feature 1..12: note = Description of Artificial Sequence: Synthetic Antisense oligonucleotide
  modified_base 1..2: mod_base = OTHER; note = bicyclic nucleic acid (BNA)
  modified_base 11..12: mod_base = OTHER; note = bicyclic nucleic acid (BNA)
  source 1..12: mol_type = other DNA
tcaaggaagatg

SEQ ID NO: 3650 - DNA, 11 bp, synthetic construct
  misc_feature 1..11: note = Description of Artificial Sequence: Synthetic Antisense oligonucleotide
  modified_base 1..2: mod_base = OTHER; note = bicyclic nucleic acid (BNA)
  modified_base 10..11: mod_base = OTHER; note = bicyclic nucleic acid (BNA)
  source 1..11: mol_type = other DNA
tcaaggaagat

SEQ ID NO: 3651 - DNA, 10 bp, synthetic construct
  misc_feature 1..10: note = Description of Artificial Sequence: Synthetic Antisense oligonucleotide
  modified_base 1..2: mod_base = OTHER; note = bicyclic nucleic acid (BNA)
  modified_base 9..10: mod_base = OTHER; note = bicyclic nucleic acid (BNA)
  source 1..10: mol_type = other DNA
tcaaggaaga

SEQ ID NO: 3652 - skipped

SEQ ID NO: 3653 - RNA, 21 nt, synthetic construct
  misc_feature 1..21: note = Description of Artificial Sequence: Synthetic Antisense oligonucleotide
  modified_base 1..2: mod_base = OTHER; note = bicyclic nucleic acid (BNA)
  modified_base 20..21: mod_base = OTHER; note = bicyclic nucleic acid (BNA)
  source 1..21: mol_type = other RNA
caaggaagatggcatttctag

SEQ ID NO: 3654 - DNA, 20 bp, synthetic construct
  misc_feature 1..20: note = Description of Artificial Sequence: Synthetic Antisense oligonucleotide
  misc_feature 1..20: note = Original Sequence: caaggaagauggcauuucta
  modified_base 1..2: mod_base = OTHER; note = bicyclic nucleic acid (BNA)
  modified_base 19..20: mod_base = OTHER; note = bicyclic nucleic acid (BNA)
  source 1..20: mol_type = other DNA
  modified_base 10: mod_base = OTHER; note = Uracil
  modified_base 15: mod_base = OTHER; note = Uracil
  modified_base 16: mod_base = OTHER; note = Uracil
  modified_base 17: mod_base = OTHER; note = Uracil
caaggaagatggcatttcta

SEQ ID NO: 3655 - DNA, 19 bp, synthetic construct
  misc_feature 1..19: note = Description of Artificial Sequence: Synthetic Antisense oligonucleotide
  misc_feature 1..19: note = Original Sequence: caaggaagauggcauuuct
  modified_base 1..2: mod_base = OTHER; note = bicyclic nucleic acid (BNA)
  modified_base 18..19: mod_base = OTHER; note = bicyclic nucleic acid (BNA)
  source 1..19: mol_type = other DNA
  modified_base 10: mod_base = OTHER; note = Uracil
  modified_base 15: mod_base = OTHER; note = Uracil
  modified_base 16: mod_base = OTHER; note = Uracil
  modified_base 17: mod_base = OTHER; note = Uracil
caaggaagatggcatttct

SEQ ID NO: 3656 - DNA, 18 bp, synthetic construct
  misc_feature 1..18: note = Description of Artificial Sequence: Synthetic Antisense oligonucleotide
  misc_feature 1..18: note = Original Sequence: caaggaagauggcauutc
  modified_base 1..2: mod_base = OTHER; note = bicyclic nucleic acid (BNA)
  modified_base 17..18: mod_base = OTHER; note = bicyclic nucleic acid (BNA)
  source 1..18: mol_type = other DNA
  modified_base 10: mod_base = OTHER; note = Uracil
  modified_base 15: mod_base = OTHER; note = Uracil
  modified_base 16: mod_base = OTHER; note = Uracil
caaggaagatggcatttc

SEQ ID NO: 3657 - DNA, 17 bp, synthetic construct
  misc_feature 1..17: note = Description of Artificial Sequence: Synthetic Antisense oligonucleotide
  misc_feature 1..17: note = Original Sequence: caaggaagauggcautt
  modified_base 1..2: mod_base = OTHER; note = bicyclic nucleic acid (BNA)
  modified_base 16..17: mod_base = OTHER; note = bicyclic nucleic acid (BNA)
  source 1..17: mol_type = other DNA
  modified_base 10: mod_base = OTHER; note = Uracil
  modified_base 15: mod_base = OTHER; note = Uracil
caaggaagatggcattt

SEQ ID NO: 3658 - DNA, 16 bp, synthetic construct
  misc_feature 1..16: note = Description of Artificial Sequence: Synthetic Antisense oligonucleotide
  misc_feature 1..16: note = Original Sequence: caaggaagauggcatt
  modified_base 1..2: mod_base = OTHER; note = bicyclic nucleic acid (BNA)
  modified_base 15..16: mod_base = OTHER; note = bicyclic nucleic acid (BNA)
  source 1..16: mol_type = other DNA
  modified_base 10: mod_base = OTHER; note = Uracil
caaggaagatggcatt

SEQ ID NO: 3659 - DNA, 15 bp, synthetic construct
  misc_feature 1..15: note = Description of Artificial Sequence: Synthetic Antisense oligonucleotide
  misc_feature 1..15: note = Original Sequence: caaggaagauggcat
  modified_base 1..2: mod_base = OTHER; note = bicyclic nucleic acid (BNA)
  modified_base 14..15: mod_base = OTHER; note = bicyclic nucleic acid (BNA)
  source 1..15: mol_type = other DNA
  modified_base 10: mod_base = OTHER; note = Uracil
caaggaagatggcat

SEQ ID NO: 3660 - RNA, 14 nt, synthetic construct
  misc_feature 1..14: note = Description of Artificial Sequence: Synthetic Antisense oligonucleotide
  modified_base 1..2: mod_base = OTHER; note = bicyclic nucleic acid (BNA)
  modified_base 13..14: mod_base = OTHER; note = bicyclic nucleic acid (BNA)
  source 1..14: mol_type = other RNA
caaggaagatggca

SEQ ID NO: 3661 - RNA, 13 nt, synthetic construct
  misc_feature 1..13: note = Description of Artificial Sequence: Synthetic Antisense oligonucleotide
  modified_base 1..2: mod_base = OTHER; note = bicyclic nucleic acid (BNA)
  modified_base 12..13: mod_base = OTHER; note = bicyclic nucleic acid (BNA)
  source 1..13: mol_type = other RNA
caaggaagatggc

SEQ ID NO: 3662 - RNA, 12 nt, synthetic construct
  misc_feature 1..12: note = Description of Artificial Sequence: Synthetic Antisense oligonucleotide
  modified_base 1..2: mod_base = OTHER; note = bicyclic nucleic acid (BNA)
  modified_base 11..12: mod_base = OTHER; note = bicyclic nucleic acid (BNA)
  source 1..12: mol_type = other RNA
caaggaagatgg

SEQ ID NO: 3663 - DNA, 11 bp, synthetic construct
  misc_feature 1..11: note = Description of Artificial Sequence: Synthetic Antisense oligonucleotide
  modified_base 1..2: mod_base = OTHER; note = bicyclic nucleic acid (BNA)
  modified_base 10..11: mod_base = OTHER; note = bicyclic nucleic acid (BNA)
  source 1..11: mol_type = other DNA
caaggaagatg

SEQ ID NO: 3664 - DNA, 10 bp, synthetic construct
  misc_feature 1..10: note = Description of Artificial Sequence: Synthetic Antisense oligonucleotide
  modified_base 1..2: mod_base = OTHER; note = bicyclic nucleic acid (BNA)
  modified_base 9..10: mod_base = OTHER; note = bicyclic nucleic acid (BNA)
  source 1..10: mol_type = other DNA
caaggaagat

SEQ ID NO: 3665-3666 - skipped (2 entries)

SEQ ID NO: 3667 - RNA, 20 nt, synthetic construct
  misc_feature 1..20: note = Description of Artificial Sequence: Synthetic Antisense oligonucleotide
  modified_base 1..2: mod_base = OTHER; note = bicyclic nucleic acid (BNA)
  modified_base 19..20: mod_base = OTHER; note = bicyclic nucleic acid (BNA)
  source 1..20: mol_type = other RNA
aaggaagatggcatttctag

SEQ ID NO: 3668 - DNA, 19 bp, synthetic construct
  misc_feature 1..19: note = Description of Artificial Sequence: Synthetic Antisense oligonucleotide
  misc_feature 1..19: note = Original Sequence: aaggaagauggcauuucta
  modified_base 1..2: mod_base = OTHER; note = bicyclic nucleic acid (BNA)
  modified_base 18..19: mod_base = OTHER; note = bicyclic nucleic acid (BNA)
  source 1..19: mol_type = other DNA
  modified_base 9: mod_base = OTHER; note = Uracil
  modified_base 14: mod_base = OTHER; note = Uracil
  modified_base 15: mod_base = OTHER; note = Uracil
  modified_base 16: mod_base = OTHER; note = Uracil
aaggaagatggcatttcta

SEQ ID NO: 3669 - DNA, 18 bp, synthetic construct
  misc_feature 1..18: note = Description of Artificial Sequence: Synthetic Antisense oligonucleotide
  misc_feature 1..18: note = Original Sequence: aaggaagauggcauuuct
  modified_base 1..2: mod_base = OTHER; note = bicyclic nucleic acid (BNA)
  modified_base 17..18: mod_base = OTHER; note = bicyclic nucleic acid (BNA)
  source 1..18: mol_type = other DNA
  modified_base 9: mod_base = OTHER; note = Uracil
  modified_base 14: mod_base = OTHER; note = Uracil
  modified_base 15: mod_base = OTHER; note = Uracil
  modified_base 16: mod_base = OTHER; note = Uracil
aaggaagatggcatttct

SEQ ID NO: 3670 - DNA, 17 bp, synthetic construct
  misc_feature 1..17: note = Description of Artificial Sequence: Synthetic Antisense oligonucleotide
  misc_feature 1..17: note = Original Sequence: aaggaagauggcauutc
  modified_base 1..2: mod_base = OTHER; note = bicyclic nucleic acid (BNA)
  modified_base 16..17: mod_base = OTHER; note = bicyclic nucleic acid (BNA)
  source 1..17: mol_type = other DNA
  modified_base 9: mod_base = OTHER; note = Uracil
  modified_base 14: mod_base = OTHER; note = Uracil
  modified_base 15: mod_base = OTHER; note = Uracil
aaggaagatggcatttc

SEQ ID NO: 3671 - DNA, 16 bp, synthetic construct
  misc_feature 1..16: note = Description of Artificial Sequence: Synthetic Antisense oligonucleotide
  misc_feature 1..16: note = Original Sequence: aaggaagauggcautt
  modified_base 1..2: mod_base = OTHER; note = bicyclic nucleic acid (BNA)
  modified_base 15..16: mod_base = OTHER; note = bicyclic nucleic acid (BNA)
  source 1..16: mol_type = other DNA
  modified_base 9: mod_base = OTHER; note = Uracil
  modified_base 14: mod_base = OTHER; note = Uracil
aaggaagatggcattt

SEQ ID NO: 3672 - DNA, 15 bp, synthetic construct
  misc_feature 1..15: note = Description of Artificial Sequence: Synthetic Antisense oligonucleotide
  misc_feature 1..15: note = Original Sequence: aaggaagauggcatt
  modified_base 1..2: mod_base = OTHER; note = bicyclic nucleic acid (BNA)
  modified_base 14..15: mod_base = OTHER; note = bicyclic nucleic acid (BNA)
  source 1..15: mol_type = other DNA
  modified_base 9: mod_base = OTHER; note = Uracil
aaggaagatggcatt

SEQ ID NO: 3673 - DNA, 14 bp, synthetic construct
  misc_feature 1..14: note = Description of Artificial Sequence: Synthetic Antisense oligonucleotide
  misc_feature 1..14: note = Original Sequence: aaggaagauggcat
  modified_base 1..2: mod_base = OTHER; note = bicyclic nucleic acid (BNA)
  modified_base 13..14: mod_base = OTHER; note = bicyclic nucleic acid (BNA)
  source 1..14: mol_type = other DNA
  modified_base 9: mod_base = OTHER; note = Uracil
aaggaagatggcat

SEQ ID NO: 3674 - RNA, 13 nt, synthetic construct
  misc_feature 1..13: note = Description of Artificial Sequence: Synthetic Antisense oligonucleotide
  modified_base 1..2: mod_base = OTHER; note = bicyclic nucleic acid (BNA)
  modified_base 12..13: mod_base = OTHER; note = bicyclic nucleic acid (BNA)
  source 1..13: mol_type = other RNA
aaggaagatggca

SEQ ID NO: 3675 - RNA, 12 nt, synthetic construct
  misc_feature 1..12: note = Description of Artificial Sequence: Synthetic Antisense oligonucleotide
  modified_base 1..2: mod_base = OTHER; note = bicyclic nucleic acid (BNA)
  modified_base 11..12: mod_base = OTHER; note = bicyclic nucleic acid (BNA)
  source 1..12: mol_type = other RNA
aaggaagatggc

SEQ ID NO: 3676 - RNA, 11 nt, synthetic construct
  misc_feature 1..11: note = Description of Artificial Sequence: Synthetic Antisense oligonucleotide
  modified_base 1..2: mod_base = OTHER; note = bicyclic nucleic acid (BNA)
  modified_base 10..11: mod_base = OTHER; note = bicyclic nucleic acid (BNA)
  source 1..11: mol_type = other RNA
aaggaagatgg

SEQ ID NO: 3677 - DNA, 10 bp, synthetic construct
  misc_feature 1..10: note = Description of Artificial Sequence: Synthetic Antisense oligonucleotide
  modified_base 1..2: mod_base = OTHER; note = bicyclic nucleic acid (BNA)
  modified_base 9..10: mod_base = OTHER; note = bicyclic nucleic acid (BNA)
  source 1..10: mol_type = other DNA
aaggaagatg

SEQ ID NO: 3678-3679 - skipped (2 entries)

SEQ ID NO: 3680 - RNA, 19 nt, synthetic construct
  misc_feature 1..19: note = Description of Artificial Sequence: Synthetic Antisense oligonucleotide
  modified_base 1..2: mod_base = OTHER; note = bicyclic nucleic acid (BNA)
  modified_base 18..19: mod_base = OTHER; note = bicyclic nucleic acid (BNA)
  source 1..19: mol_type = other RNA
aggaagatggcatttctag

SEQ ID NO: 3681 - DNA, 18 bp, synthetic construct
  misc_feature 1..18: note = Description of Artificial Sequence: Synthetic Antisense oligonucleotide
  misc_feature 1..18: note = Original Sequence: aggaagauggcauuucta
  modified_base 1..2: mod_base = OTHER; note = bicyclic nucleic acid (BNA)
  modified_base 17..18: mod_base = OTHER; note = bicyclic nucleic acid (BNA)
  source 1..18: mol_type = other DNA
  modified_base 8: mod_base = OTHER; note = Uracil
  modified_base 13: mod_base = OTHER; note = Uracil
  modified_base 14: mod_base = OTHER; note = Uracil
  modified_base 15: mod_base = OTHER; note = Uracil
aggaagatggcatttcta

SEQ ID NO: 3682 - DNA, 17 bp, synthetic construct
  misc_feature 1..17: note = Description of Artificial Sequence: Synthetic Antisense oligonucleotide
  misc_feature 1..17: note = Original Sequence: aggaagauggcauuuct
  modified_base 1..2: mod_base = OTHER; note = bicyclic nucleic acid (BNA)
  modified_base 16..17: mod_base = OTHER; note = bicyclic nucleic acid (BNA)
  source 1..17: mol_type = other DNA
  modified_base 8: mod_base = OTHER; note = Uracil
  modified_base 13: mod_base = OTHER; note = Uracil
  modified_base 14: mod_base = OTHER; note = Uracil
  modified_base 15: mod_base = OTHER; note = Uracil
aggaagatggcatttct

SEQ ID NO: 3683 - DNA, 16 bp, synthetic construct
  misc_feature 1..16: note = Description of Artificial Sequence: Synthetic Antisense oligonucleotide
  misc_feature 1..16: note = Original Sequence: aggaagauggcauutc
  modified_base 1..2: mod_base = OTHER; note = bicyclic nucleic acid (BNA)
  modified_base 15..16: mod_base = OTHER; note = bicyclic nucleic acid (BNA)
  source 1..16: mol_type = other DNA
  modified_base 8: mod_base = OTHER; note = Uracil
  modified_base 13: mod_base = OTHER; note = Uracil
  modified_base 14: mod_base = OTHER; note = Uracil
aggaagatggcatttc

SEQ ID NO: 3684 - DNA, 15 bp, synthetic construct
  misc_feature 1..15: note = Description of Artificial Sequence: Synthetic Antisense oligonucleotide
  misc_feature 1..15: note = Original Sequence: aggaagauggcautt
  modified_base 1..2: mod_base = OTHER; note = bicyclic nucleic acid (BNA)
  modified_base 14..15: mod_base = OTHER; note = bicyclic nucleic acid (BNA)
  source 1..15: mol_type = other DNA
  modified_base 8: mod_base = OTHER; note = Uracil
  modified_base 13: mod_base = OTHER; note = Uracil
aggaagatggcattt

SEQ ID NO: 3685 - DNA, 14 bp, synthetic construct
  misc_feature 1..14: note = Description of Artificial Sequence: Synthetic Antisense oligonucleotide
  misc_feature 1..14: note = Original Sequence: aggaagauggcatt
  modified_base 1..2: mod_base = OTHER; note = bicyclic nucleic acid (BNA)
  modified_base 13..14: mod_base = OTHER; note = bicyclic nucleic acid (BNA)
  source 1..14: mol_type = other DNA
  modified_base 8: mod_base = OTHER; note = Uracil
aggaagatggcatt

SEQ ID NO: 3686 - DNA, 13 bp, synthetic construct
  misc_feature 1..13: note = Description of Artificial Sequence: Synthetic Antisense oligonucleotide
  misc_feature 1..13: note = Original Sequence: aggaagauggcat
  modified_base 1..2: mod_base = OTHER; note = bicyclic nucleic acid (BNA)
  modified_base 12..13: mod_base = OTHER; note = bicyclic nucleic acid (BNA)
  source 1..13: mol_type = other DNA
  modified_base 8: mod_base = OTHER; note = Uracil
aggaagatggcat

SEQ ID NO: 3687 - RNA, 12 nt, synthetic construct
  misc_feature 1..12: note = Description of Artificial Sequence: Synthetic Antisense oligonucleotide
  modified_base 1..2: mod_base = OTHER; note = bicyclic nucleic acid (BNA)
  modified_base 11..12: mod_base = OTHER; note = bicyclic nucleic acid (BNA)
  source 1..12: mol_type = other RNA
aggaagatggca

SEQ ID NO: 3688 - RNA, 10 nt, synthetic construct
  misc_feature 1..10: note = Description of Artificial Sequence: Synthetic Antisense oligonucleotide
  modified_base 1..2: mod_base = OTHER; note = bicyclic nucleic acid (BNA)
  modified_base 9..10: mod_base = OTHER; note = bicyclic nucleic acid (BNA)
  source 1..10: mol_type = other RNA
aggaagatgg

SEQ ID NO: 3689-3690 - skipped (2 entries)

SEQ ID NO: 3691 - RNA, 18 nt, synthetic construct
  misc_feature 1..18: note = Description of Artificial Sequence: Synthetic Antisense oligonucleotide
  modified_base 1..2: mod_base = OTHER; note = bicyclic nucleic acid (BNA)
  modified_base 17..18: mod_base = OTHER; note = bicyclic nucleic acid (BNA)
  source 1..18: mol_type = other RNA
ggaagatggcatttctag

SEQ ID NO: 3692 - DNA, 17 bp, synthetic construct
  misc_feature 1..17: note = Description of Artificial Sequence: Synthetic Antisense oligonucleotide
  misc_feature 1..17: note = Original Sequence: ggaagauggcauuucta
  modified_base 1..2: mod_base = OTHER; note = bicyclic nucleic acid (BNA)
  modified_base 16..17: mod_base = OTHER; note = bicyclic nucleic acid (BNA)
  source 1..17: mol_type = other DNA
  modified_base 7: mod_base = OTHER; note = Uracil
  modified_base 12: mod_base = OTHER; note = Uracil
  modified_base 13: mod_base = OTHER; note = Uracil
  modified_base 14: mod_base = OTHER; note = Uracil
ggaagatggcatttcta

SEQ ID NO: 3693 - DNA, 16 bp, synthetic construct
  misc_feature 1..16: note = Description of Artificial Sequence: Synthetic Antisense oligonucleotide
  misc_feature 1..16: note = Original Sequence: ggaagauggcauuuct
  modified_base 1..2: mod_base = OTHER; note = bicyclic nucleic acid (BNA)
  modified_base 15..16: mod_base = OTHER; note = bicyclic nucleic acid (BNA)
  source 1..16: mol_type = other DNA
  modified_base 7: mod_base = OTHER; note = Uracil
  modified_base 12: mod_base = OTHER; note = Uracil
  modified_base 13: mod_base = OTHER; note = Uracil
  modified_base 14: mod_base = OTHER; note = Uracil
ggaagatggcatttct

SEQ ID NO: 3694 - DNA, 15 bp, synthetic construct
  misc_feature 1..15: note = Description of Artificial Sequence: Synthetic Antisense oligonucleotide
  misc_feature 1..15: note = Original Sequence: ggaagauggcauutc
  modified_base 1..2: mod_base = OTHER; note = bicyclic nucleic acid (BNA)
  modified_base 14..15: mod_base = OTHER; note = bicyclic nucleic acid (BNA)
  source 1..15: mol_type = other DNA
  modified_base 7: mod_base = OTHER; note = Uracil
  modified_base 12: mod_base = OTHER; note = Uracil
  modified_base 13: mod_base = OTHER; note = Uracil
ggaagatggcatttc

SEQ ID NO: 3695 - DNA, 14 bp, synthetic construct
  misc_feature 1..14: note = Description of Artificial Sequence: Synthetic Antisense oligonucleotide
  misc_feature 1..14: note = Original Sequence: ggaagauggcautt
  modified_base 1..2: mod_base = OTHER; note = bicyclic nucleic acid (BNA)
  modified_base 13..14: mod_base = OTHER; note = bicyclic nucleic acid (BNA)
  source 1..14: mol_type = other DNA
  modified_base 7: mod_base = OTHER; note = Uracil
  modified_base 12: mod_base = OTHER; note = Uracil
ggaagatggcattt

SEQ ID NO: 3696 - DNA, 13 bp, synthetic construct
  misc_feature 1..13: note = Description of Artificial Sequence: Synthetic Antisense oligonucleotide
  misc_feature 1..13: note = Original Sequence: ggaagauggcatt
  modified_base 1..2: mod_base = OTHER; note = bicyclic nucleic acid (BNA)
  modified_base 12..13: mod_base = OTHER; note = bicyclic nucleic acid (BNA)
  source 1..13: mol_type = other DNA
  modified_base 7: mod_base = OTHER; note = Uracil
ggaagatggcatt

SEQ ID NO: 3697 - DNA, 12 bp, synthetic construct
  misc_feature 1..12: note = Description of Artificial Sequence: Synthetic Antisense oligonucleotide
  misc_feature 1..12: note = Original Sequence: ggaagauggcat
  modified_base 1..2: mod_base = OTHER; note = bicyclic nucleic acid (BNA)
  modified_base 11..12: mod_base = OTHER; note = bicyclic nucleic acid (BNA)
  source 1..12: mol_type = other DNA
  modified_base 7: mod_base = OTHER; note = Uracil
ggaagatggcat

SEQ ID NO: 3698 - RNA, 11 nt, synthetic construct
  misc_feature 1..11: note = Description of Artificial Sequence: Synthetic Antisense oligonucleotide
  modified_base 1..2: mod_base = OTHER; note = bicyclic nucleic acid (BNA)
  modified_base 10..11: mod_base = OTHER; note = bicyclic nucleic acid (BNA)
  source 1..11: mol_type = other RNA
ggaagatggca

SEQ ID NO: 3699 - RNA, 10 nt, synthetic construct
  misc_feature 1..10: note = Description of Artificial Sequence: Synthetic Antisense oligonucleotide
  modified_base 1..2: mod_base = OTHER; note = bicyclic nucleic acid (BNA)
  modified_base 9..10: mod_base = OTHER; note = bicyclic nucleic acid (BNA)
  source 1..10: mol_type = other RNA
ggaagatggc

SEQ ID NO: 3700 - skipped

SEQ ID NO: 3701 - RNA, 17 nt, synthetic construct
  misc_feature 1..17: note = Description of Artificial Sequence: Synthetic Antisense oligonucleotide
  modified_base 1..2: mod_base = OTHER; note = bicyclic nucleic acid (BNA)
  modified_base 16..17: mod_base = OTHER; note = bicyclic nucleic acid (BNA)
  source 1..17: mol_type = other RNA
gaagatggcatttctag

SEQ ID NO: 3702 - DNA, 16 bp, synthetic construct
  misc_feature 1..16: note = Description of Artificial Sequence: Synthetic Antisense oligonucleotide
  misc_feature 1..16: note = Original Sequence: gaagauggcauuucta
  modified_base 1..2: mod_base = OTHER; note = bicyclic nucleic acid (BNA)
  modified_base 15..16: mod_base = OTHER; note = bicyclic nucleic acid (BNA)
  source 1..16: mol_type = other DNA
  modified_base 6: mod_base = OTHER; note = Uracil
  modified_base 11: mod_base = OTHER; note = Uracil
  modified_base 12: mod_base = OTHER; note = Uracil
  modified_base 13: mod_base = OTHER; note = Uracil
gaagatggcatttcta

SEQ ID NO: 3703 - DNA, 14 bp, synthetic construct
  misc_feature 1..14: note = Description of Artificial Sequence: Synthetic Antisense oligonucleotide
  misc_feature 1..14: note = Original Sequence: gaagauggcauutc
  modified_base 1..2: mod_base = OTHER; note = bicyclic nucleic acid (BNA)
  modified_base 13..14: mod_base = OTHER; note = bicyclic nucleic acid (BNA)
  source 1..14: mol_type = other DNA
  modified_base 6: mod_base = OTHER; note = Uracil
  modified_base 11: mod_base = OTHER; note = Uracil
  modified_base 12: mod_base = OTHER; note = Uracil
gaagatggcatttc

SEQ ID NO: 3704 - DNA, 13 bp, synthetic construct
  misc_feature 1..13: note = Description of Artificial Sequence: Synthetic Antisense oligonucleotide
  misc_feature 1..13: note = Original Sequence: gaagauggcautt
  modified_base 1..2: mod_base = OTHER; note = bicyclic nucleic acid (BNA)
  modified_base 12..13: mod_base = OTHER; note = bicyclic nucleic acid (BNA)
  source 1..13: mol_type = other DNA
  modified_base 6: mod_base = OTHER; note = Uracil
  modified_base 11: mod_base = OTHER; note = Uracil
gaagatggcattt

SEQ ID NO: 3705 - DNA, 12 bp, synthetic construct
  misc_feature 1..12: note = Description of Artificial Sequence: Synthetic Antisense oligonucleotide
  misc_feature 1..12: note = Original Sequence: gaagauggcatt
  modified_base 1..2: mod_base = OTHER; note = bicyclic nucleic acid (BNA)
  modified_base 11..12: mod_base = OTHER; note = bicyclic nucleic acid (BNA)
  source 1..12: mol_type = other DNA
  modified_base 6: mod_base = OTHER; note = Uracil
gaagatggcatt

SEQ ID NO: 3706 - DNA, 11 bp, synthetic construct
  misc_feature 1..11: note = Description of Artificial Sequence: Synthetic Antisense oligonucleotide
  misc_feature 1..11: note = Original Sequence: gaagauggcat
  modified_base 1..2: mod_base = OTHER; note = bicyclic nucleic acid (BNA)
  modified_base 10..11: mod_base = OTHER; note = bicyclic nucleic acid (BNA)
  source 1..11: mol_type = other DNA
  modified_base 6: mod_base = OTHER; note = Uracil
gaagatggcat

SEQ ID NO: 3707 - RNA, 10 nt, synthetic construct
  misc_feature 1..10: note = Description of Artificial Sequence: Synthetic Antisense oligonucleotide
  modified_base 1..2: mod_base = OTHER; note = bicyclic nucleic acid (BNA)
  modified_base 9..10: mod_base = OTHER; note = bicyclic nucleic acid (BNA)
  source 1..10: mol_type = other RNA
gaagatggca

SEQ ID NO: 3708-3709 - skipped (2 entries)

SEQ ID NO: 3710 - RNA, 16 nt, synthetic construct
  misc_feature 1..16: note = Description of Artificial Sequence: Synthetic Antisense oligonucleotide
  modified_base 1..2: mod_base = OTHER; note = bicyclic nucleic acid (BNA)
  modified_base 15..16: mod_base = OTHER; note = bicyclic nucleic acid (BNA)
  source 1..16: mol_type = other RNA
aagatggcatttctag

SEQ ID NO: 3711 - DNA, 15 bp, synthetic construct
  misc_feature 1..15: note = Description of Artificial Sequence: Synthetic Antisense oligonucleotide
  misc_feature 1..15: note = Original Sequence: aagauggcauuucta
  modified_base 1..2: mod_base = OTHER; note = bicyclic nucleic acid (BNA)
  modified_base 14..15: mod_base = OTHER; note = bicyclic nucleic acid (BNA)
  source 1..15: mol_type = other DNA
  modified_base 5: mod_base = OTHER; note = Uracil
  modified_base 10: mod_base = OTHER; note = Uracil
  modified_base 11: mod_base = OTHER; note = Uracil
  modified_base 12: mod_base = OTHER; note = Uracil
aagatggcatttcta

SEQ ID NO: 3712 - DNA, 14 bp, synthetic construct
  misc_feature 1..14: note = Description of Artificial Sequence: Synthetic Antisense oligonucleotide
  misc_feature 1..14: note = Original Sequence: aagauggcauuuct
  modified_base 1..2: mod_base = OTHER; note = bicyclic nucleic acid (BNA)
  modified_base 13..14: mod_base = OTHER; note = bicyclic nucleic acid (BNA)
  source 1..14: mol_type = other DNA
  modified_base 5: mod_base = OTHER; note = Uracil
  modified_base 10: mod_base = OTHER; note = Uracil
  modified_base 11: mod_base = OTHER; note = Uracil
  modified_base 12: mod_base = OTHER; note = Uracil
aagatggcatttct

SEQ ID NO: 3713 - DNA, 13 bp, synthetic construct
  misc_feature 1..13: note = Description of Artificial Sequence: Synthetic Antisense oligonucleotide
  misc_feature 1..13: note = Original Sequence: aagauggcauutc
  modified_base 1..2: mod_base = OTHER; note = bicyclic nucleic acid (BNA)
  modified_base 12..13: mod_base = OTHER; note = bicyclic nucleic acid (BNA)
  source 1..13: mol_type = other DNA
  modified_base 5: mod_base = OTHER; note = Uracil
  modified_base 10: mod_base = OTHER; note = Uracil
  modified_base 11: mod_base = OTHER; note = Uracil
aagatggcatttc

SEQ ID NO: 3714 - DNA, 12 bp, synthetic construct
  misc_feature 1..12: note = Description of Artificial Sequence: Synthetic Antisense oligonucleotide
  misc_feature 1..12: note = Original Sequence: aagauggcautt
  modified_base 1..2: mod_base = OTHER; note = bicyclic nucleic acid (BNA)
  modified_base 11..12: mod_base = OTHER; note = bicyclic nucleic acid (BNA)
  source 1..12: mol_type = other DNA
  modified_base 5: mod_base = OTHER; note = Uracil
  modified_base 10: mod_base = OTHER; note = Uracil
aagatggcattt

SEQ ID NO: 3715 - DNA, 11 bp, synthetic construct
  misc_feature 1..11: note = Description of Artificial Sequence: Synthetic Antisense oligonucleotide
  misc_feature 1..11: note = Original Sequence: aagauggcatt
  modified_base 1..2: mod_base = OTHER; note = bicyclic nucleic acid (BNA)
  modified_base 10..11: mod_base = OTHER; note = bicyclic nucleic acid (BNA)
  source 1..11: mol_type = other DNA
  modified_base 5: mod_base = OTHER; note = Uracil
aagatggcatt

SEQ ID NO: 3716 - DNA, 10 bp, synthetic construct
  misc_feature 1..10: note = Description of Artificial Sequence: Synthetic Antisense oligonucleotide
  misc_feature 1..10: note = Original Sequence: aagauggcat
  modified_base 1..2: mod_base = OTHER; note = bicyclic nucleic acid (BNA)
  modified_base 9..10: mod_base = OTHER; note = bicyclic nucleic acid (BNA)
  source 1..10: mol_type = other DNA
  modified_base 5: mod_base = OTHER; note = Uracil
aagatggcat

SEQ ID NO: 3717-3718 - skipped (2 entries)

SEQ ID NO: 3719 - RNA, 15 nt, synthetic construct
  misc_feature 1..15: note = Description of Artificial Sequence: Synthetic Antisense oligonucleotide
  modified_base 1..2: mod_base = OTHER; note = bicyclic nucleic acid (BNA)
  modified_base 14..15: mod_base = OTHER; note = bicyclic nucleic acid (BNA)
  source 1..15: mol_type = other RNA
agatggcatttctag

SEQ ID NO: 3720 - DNA, 14 bp, synthetic construct
  misc_feature 1..14: note = Description of Artificial Sequence: Synthetic Antisense oligonucleotide
  misc_feature 1..14: note = Original Sequence: agauggcauuucta
  modified_base 1..2: mod_base = OTHER; note = bicyclic nucleic acid (BNA)
  modified_base 13..14: mod_base = OTHER; note = bicyclic nucleic acid (BNA)
  source 1..14: mol_type = other DNA
  modified_base 4: mod_base = OTHER; note = Uracil
  modified_base 9: mod_base = OTHER; note = Uracil
  modified_base 10: mod_base = OTHER; note = Uracil
  modified_base 11: mod_base = OTHER; note = Uracil
agatggcatttcta

SEQ ID NO: 3721 - DNA, 13 bp, synthetic construct
  misc_feature 1..13: note = Description of Artificial Sequence: Synthetic Antisense oligonucleotide
  misc_feature 1..13: note = Original Sequence: agauggcauuuct
  modified_base 1..2: mod_base = OTHER; note = bicyclic nucleic acid (BNA)
  modified_base 12..13: mod_base = OTHER; note = bicyclic nucleic acid (BNA)
  source 1..13: mol_type = other DNA
  modified_base 4: mod_base = OTHER; note = Uracil
  modified_base 9: mod_base = OTHER; note = Uracil
  modified_base 10: mod_base = OTHER; note = Uracil
  modified_base 11: mod_base = OTHER; note = Uracil
agatggcatttct

SEQ ID NO: 3722 - DNA, 12 bp, synthetic construct
  misc_feature 1..12: note = Description of Artificial Sequence: Synthetic Antisense oligonucleotide
  misc_feature 1..12: note = Original Sequence: agauggcauutc
  modified_base 1..2: mod_base = OTHER; note = bicyclic nucleic acid (BNA)
  modified_base 11..12: mod_base = OTHER; note = bicyclic nucleic acid (BNA)
  source 1..12: mol_type = other DNA
  modified_base 4: mod_base = OTHER; note = Uracil
  modified_base 9: mod_base = OTHER; note = Uracil
  modified_base 10: mod_base = OTHER; note = Uracil
agatggcatttc

SEQ ID NO: 3723 - DNA, 11 bp, synthetic construct
  misc_feature 1..11: note = Description of Artificial Sequence: Synthetic Antisense oligonucleotide
  misc_feature 1..11: note = Original Sequence: agauggcautt
  modified_base 1..2: mod_base = OTHER; note = bicyclic nucleic acid (BNA)
  modified_base 10..11: mod_base = OTHER; note = bicyclic nucleic acid (BNA)
  source 1..11: mol_type = other DNA
  modified_base 4: mod_base = OTHER; note = Uracil
  modified_base 9: mod_base = OTHER; note = Uracil
agatggcattt

SEQ ID NO: 3724 - DNA, 10 bp, synthetic construct
  misc_feature 1..10: note = Description of Artificial Sequence: Synthetic Antisense oligonucleotide
  misc_feature 1..10: note = Original Sequence: agauggcatt
  modified_base 1..2: mod_base = OTHER; note = bicyclic nucleic acid (BNA)
  modified_base 9..10: mod_base = OTHER; note = bicyclic nucleic acid (BNA)
  source 1..10: mol_type = other DNA
  modified_base 4: mod_base = OTHER; note = Uracil
agatggcatt

SEQ ID NO: 3725-3726 - skipped (2 entries)

SEQ ID NO: 3727 - DNA, 30 bp, synthetic construct; identical to SEQ ID NO: 8
  misc_feature 1..30: note = Description of Artificial Sequence: Synthetic Antisense oligonucleotide
  misc_feature 1..30: note = Original Sequence: ctccaacaucaaggaagauggcauuucuag
  modified_base 1..2: mod_base = OTHER; note = bicyclic nucleic acid (BNA)
  modified_base 29..30: mod_base = OTHER; note = bicyclic nucleic acid (BNA)
  source 1..30: mol_type = other DNA
  modified_base 9: mod_base = OTHER; note = Uracil
  modified_base 19: mod_base = OTHER; note = Uracil
  modified_base 24: mod_base = OTHER; note = Uracil
  modified_base 25: mod_base = OTHER; note = Uracil
  modified_base 26: mod_base = OTHER; note = Uracil
  modified_base 28: mod_base = OTHER; note = Uracil

SEQ ID NO: 3728 - DNA, 29 bp, synthetic construct
  misc_feature 1..29: note = Description of Artificial Sequence: Synthetic Antisense oligonucleotide
  misc_feature 1..29: note = Original Sequence: ctccaacaucaaggaagauggcauuucta
  modified_base 1..2: mod_base = OTHER; note = bicyclic nucleic acid (BNA)
  modified_base 28..29: mod_base = OTHER; note = bicyclic nucleic acid (BNA)
  source 1..29: mol_type = other DNA
  modified_base 9: mod_base = OTHER; note = Uracil
  modified_base 19: mod_base = OTHER; note = Uracil
  modified_base 24: mod_base = OTHER; note = Uracil
  modified_base 25: mod_base = OTHER; note = Uracil
  modified_base 26: mod_base = OTHER; note = Uracil
ctccaacatcaaggaagatggcatttcta

SEQ ID NO: 3729 - DNA, 28 bp, synthetic construct
  misc_feature 1..28: note = Description of Artificial Sequence: Synthetic Antisense oligonucleotide
  misc_feature 1..28: note = Original Sequence: ctccaacaucaaggaagauggcauuuct
  modified_base 1..2: mod_base = OTHER; note = bicyclic nucleic acid (BNA)
  modified_base 27..28: mod_base = OTHER; note = bicyclic nucleic acid (BNA)
  source 1..28: mol_type = other DNA
  modified_base 9: mod_base = OTHER; note = Uracil
  modified_base 19: mod_base = OTHER; note = Uracil
  modified_base 24: mod_base = OTHER; note = Uracil
  modified_base 25: mod_base = OTHER; note = Uracil
  modified_base 26: mod_base = OTHER; note = Uracil
ctccaacatcaaggaagatggcatttct

SEQ ID NO: 3730 - DNA, 27 bp, synthetic construct
  misc_feature 1..27: note = Description of Artificial Sequence: Synthetic Antisense oligonucleotide
  misc_feature 1..27: note = Original Sequence: ctccaacaucaaggaagauggcauutc
  modified_base 1..2: mod_base = OTHER; note = bicyclic nucleic acid (BNA)
  modified_base 26..27: mod_base = OTHER; note = bicyclic nucleic acid (BNA)
  source 1..27: mol_type = other DNA
  modified_base 9: mod_base = OTHER; note = Uracil
  modified_base 19: mod_base = OTHER; note = Uracil
  modified_base 24: mod_base = OTHER; note = Uracil
  modified_base 25: mod_base = OTHER; note = Uracil
ctccaacatcaaggaagatggcatttc

SEQ ID NO: 3731 - DNA, 26 bp, synthetic construct
  misc_feature 1..26: note = Description of Artificial Sequence: Synthetic Antisense oligonucleotide
  misc_feature 1..26: note = Original Sequence: ctccaacaucaaggaagauggcautt
  modified_base 1..2: mod_base = OTHER; note = bicyclic nucleic acid (BNA)
  modified_base 25..26: mod_base = OTHER; note = bicyclic nucleic acid (BNA)
  source 1..26: mol_type = other DNA
  modified_base 9: mod_base = OTHER; note = Uracil
  modified_base 19: mod_base = OTHER; note = Uracil
  modified_base 24: mod_base = OTHER; note = Uracil
ctccaacatcaaggaagatggcattt

SEQ ID NO: 3732 - DNA, 25 bp, synthetic construct
  misc_feature 1..25: note = Description of Artificial Sequence: Synthetic Antisense oligonucleotide
  misc_feature 1..25: note = Original Sequence: ctccaacaucaaggaagauggcatt
  modified_base 1..2: mod_base = OTHER; note = bicyclic nucleic acid (BNA)
  modified_base 24..25: mod_base = OTHER; note = bicyclic nucleic acid (BNA)
  source 1..25: mol_type = other DNA
  modified_base 9: mod_base = OTHER; note = Uracil
  modified_base 19: mod_base = OTHER; note = Uracil
ctccaacatcaaggaagatggcatt

SEQ ID NO: 3733 - DNA, 24 bp, synthetic construct
  misc_feature 1..24: note = Description of Artificial Sequence: Synthetic Antisense oligonucleotide
  misc_feature 1..24: note = Original Sequence: ctccaacaucaaggaagauggcat
  modified_base 1..2: mod_base = OTHER; note = bicyclic nucleic acid (BNA)
  modified_base 23..24: mod_base = OTHER; note = bicyclic nucleic acid (BNA)
  source 1..24: mol_type = other DNA
  modified_base 9: mod_base = OTHER; note = Uracil
  modified_base 19: mod_base = OTHER; note = Uracil
ctccaacatcaaggaagatggcat

SEQ ID NO: 3734 - DNA, 23 bp, synthetic construct
  misc_feature 1..23: note = Description of Artificial Sequence: Synthetic Antisense oligonucleotide
  misc_feature 1..23: note = Original Sequence: ctccaacaucaaggaagauggca
  modified_base 1..2: mod_base = OTHER; note = bicyclic nucleic acid (BNA)
  modified_base 22..23: mod_base = OTHER; note = bicyclic nucleic acid (BNA)
  source 1..23: mol_type = other DNA
  modified_base 9: mod_base = OTHER; note = Uracil
  modified_base 19: mod_base = OTHER; note = Uracil
ctccaacatcaaggaagatggca

SEQ ID NO: 3735 - DNA, 22 bp, synthetic construct
  misc_feature 1..22: note = Description of Artificial Sequence: Synthetic Antisense oligonucleotide
  misc_feature 1..22: note = Original Sequence: ctccaacaucaaggaagauggc
  modified_base 1..2: mod_base = OTHER; note = bicyclic nucleic acid (BNA)
  modified_base 21..22: mod_base = OTHER; note = bicyclic nucleic acid (BNA)
  source 1..22: mol_type = other DNA
  modified_base 9: mod_base = OTHER; note = Uracil
  modified_base 19: mod_base = OTHER; note = Uracil
ctccaacatcaaggaagatggc

SEQ ID NO: 3736 - DNA, 21 bp, synthetic construct
  misc_feature 1..21: note = Description of Artificial Sequence: Synthetic Antisense oligonucleotide
  misc_feature 1..21: note = Original Sequence: ctccaacaucaaggaagaugg
  modified_base 1..2: mod_base = OTHER; note = bicyclic nucleic acid (BNA)
  modified_base 20..21: mod_base = OTHER; note = bicyclic nucleic acid (BNA)
  source 1..21: mol_type = other DNA
  modified_base 9: mod_base = OTHER; note = Uracil
  modified_base 19: mod_base = OTHER; note = Uracil
ctccaacatcaaggaagatgg

SEQ ID NO: 3737 - DNA, 20 bp, synthetic construct
  misc_feature 1..20: note = Description of Artificial Sequence: Synthetic Antisense oligonucleotide
  misc_feature 1..20: note = Original Sequence: ctccaacaucaaggaagatg
  modified_base 1..2: mod_base = OTHER; note = bicyclic nucleic acid (BNA)
  modified_base 19..20: mod_base = OTHER; note = bicyclic nucleic acid (BNA)
  source 1..20: mol_type = other DNA
  modified_base 9: mod_base = OTHER; note = Uracil
ctccaacatcaaggaagatg

SEQ ID NO: 3738 - DNA, 19 bp, synthetic construct
  misc_feature 1..19: note = Description of Artificial Sequence: Synthetic Antisense oligonucleotide
  misc_feature 1..19: note = Original Sequence: ctccaacaucaaggaagat
  modified_base 1..2: mod_base = OTHER; note = bicyclic nucleic acid (BNA)
  modified_base 18..19: mod_base = OTHER; note = bicyclic nucleic acid (BNA)
  source 1..19: mol_type = other DNA
  modified_base 9: mod_base = OTHER; note = Uracil
ctccaacatcaaggaagat

SEQ ID NO: 3739 - DNA, 18 bp, synthetic construct
  misc_feature 1..18: note = Description of Artificial Sequence: Synthetic Antisense oligonucleotide
  misc_feature 1..18: note = Original Sequence: ctccaacaucaaggaaga
  modified_base 1..2: mod_base = OTHER; note = bicyclic nucleic acid (BNA)
  modified_base 17..18: mod_base = OTHER; note = bicyclic nucleic acid (BNA)
  source 1..18: mol_type = other DNA
  modified_base 9: mod_base = OTHER; note = Uracil
ctccaacatcaaggaaga

SEQ ID NO: 3740 - DNA, 17 bp, synthetic construct
  misc_feature 1..17: note = Description of Artificial Sequence: Synthetic Antisense oligonucleotide
  misc_feature 1..17: note = Original Sequence: ctccaacaucaaggaag
  modified_base 1..2: mod_base = OTHER; note = bicyclic nucleic acid (BNA)
  modified_base 16..17: mod_base = OTHER; note = bicyclic nucleic acid (BNA)
  source 1..17: mol_type = other DNA
  modified_base 9: mod_base = OTHER; note = Uracil
ctccaacatcaaggaag

SEQ ID NO: 3741 - DNA, 29 bp, synthetic construct
  misc_feature 1..29: note = Description of Artificial Sequence: Synthetic Antisense oligonucleotide
  misc_feature 1..29: note = Original Sequence: tccaacaucaaggaagauggcauuucuag
  modified_base 1..2: mod_base = OTHER; note = bicyclic nucleic acid (BNA)
  modified_base 28..29: mod_base = OTHER; note = bicyclic nucleic acid (BNA)
  source 1..29: mol_type = other DNA
  modified_base 8: mod_base = OTHER; note = Uracil
  modified_base 18: mod_base = OTHER; note = Uracil
  modified_base 23: mod_base = OTHER; note = Uracil
  modified_base 24: mod_base = OTHER; note = Uracil
  modified_base 25: mod_base = OTHER; note = Uracil
  modified_base 27: mod_base = OTHER; note = Uracil
tccaacatcaaggaagatggcatttctag

SEQ ID NO: 3742 - DNA, 28 bp, synthetic construct
  misc_feature 1..28: note = Description of Artificial Sequence: Synthetic Antisense oligonucleotide
  misc_feature 1..28: note = Original Sequence: tccaacaucaaggaagauggcauuucta
  modified_base 1..2: mod_base = OTHER; note = bicyclic nucleic acid (BNA)
  modified_base 27..28: mod_base = OTHER; note = bicyclic nucleic acid (BNA)
  source 1..28: mol_type = other DNA
  modified_base 8: mod_base = OTHER; note = Uracil
  modified_base 18: mod_base = OTHER; note = Uracil
  modified_base 23: mod_base = OTHER; note = Uracil
  modified_base 24: mod_base = OTHER; note = Uracil
  modified_base 25: mod_base = OTHER; note = Uracil
tccaacatcaaggaagatggcatttcta

SEQ ID NO: 3743 - DNA, 27 bp, synthetic construct
  misc_feature 1..27: note = Description of Artificial Sequence: Synthetic Antisense oligonucleotide
  misc_feature 1..27: note = Original Sequence: tccaacaucaaggaagauggcauuuct
  modified_base 1..2: mod_base = OTHER; note = bicyclic nucleic acid (BNA)
  modified_base 26..27: mod_base = OTHER; note = bicyclic nucleic acid (BNA)
  source 1..27: mol_type = other DNA
  modified_base 8: mod_base = OTHER; note = Uracil
  modified_base 18: mod_base = OTHER; note = Uracil
  modified_base 23: mod_base = OTHER; note = Uracil
  modified_base 24: mod_base = OTHER; note = Uracil
  modified_base 25: mod_base = OTHER; note = Uracil
tccaacatcaaggaagatggcatttct

SEQ ID NO: 3744 - DNA, 26 bp, synthetic construct
  misc_feature 1..26: note = Description of Artificial Sequence: Synthetic Antisense oligonucleotide
  misc_feature 1..26: note = Original Sequence: tccaacaucaaggaagauggcauutc
  modified_base 1..2: mod_base = OTHER; note = bicyclic nucleic acid (BNA)
  modified_base 25..26: mod_base = OTHER; note = bicyclic nucleic acid (BNA)
  source 1..26: mol_type = other DNA
  modified_base 8: mod_base = OTHER; note = Uracil
  modified_base 18: mod_base = OTHER; note = Uracil
  modified_base 23: mod_base = OTHER; note = Uracil
  modified_base 24: mod_base = OTHER; note = Uracil
tccaacatcaaggaagatggcatttc

SEQ ID NO: 3745 - DNA, 25 bp, synthetic construct
  misc_feature 1..25: note = Description of Artificial Sequence: Synthetic Antisense oligonucleotide
  misc_feature 1..25: note = Original Sequence: tccaacaucaaggaagauggcautt
  modified_base 1..2: mod_base = OTHER; note = bicyclic nucleic acid (BNA)
  modified_base 24..25: mod_base = OTHER; note = bicyclic nucleic acid (BNA)
  source 1..25: mol_type = other DNA
  modified_base 8: mod_base = OTHER; note = Uracil
  modified_base 18: mod_base = OTHER; note = Uracil
  modified_base 23: mod_base = OTHER; note = Uracil
tccaacatcaaggaagatggcattt

SEQ ID NO: 3746 - DNA, 24 bp, synthetic construct
  misc_feature 1..24: note = Description of Artificial Sequence: Synthetic Antisense oligonucleotide
  misc_feature 1..24: note = Original Sequence: tccaacaucaaggaagauggcatt
  modified_base 1..2: mod_base = OTHER; note = bicyclic nucleic acid (BNA)
  modified_base 23..24: mod_base = OTHER; note = bicyclic nucleic acid (BNA)
  source 1..24: mol_type = other DNA
  modified_base 8: mod_base = OTHER; note = Uracil
  modified_base 18: mod_base = OTHER; note = Uracil
tccaacatcaaggaagatggcatt

SEQ ID NO: 3747 - DNA, 23 bp, synthetic construct
  misc_feature 1..23: note = Description of Artificial Sequence: Synthetic Antisense oligonucleotide
  misc_feature 1..23: note = Original Sequence: tccaacaucaaggaagauggcat
  modified_base 1..2: mod_base = OTHER; note = bicyclic nucleic acid (BNA)
  modified_base 22..23: mod_base = OTHER; note = bicyclic nucleic acid (BNA)
  source 1..23: mol_type = other DNA
  modified_base 8: mod_base = OTHER; note = Uracil
  modified_base 18: mod_base = OTHER; note = Uracil
tccaacatcaaggaagatggcat

SEQ ID NO: 3748 - DNA, 22 bp, synthetic construct
  misc_feature 1..22: note = Description of Artificial Sequence: Synthetic Antisense oligonucleotide
  misc_feature 1..22: note = Original Sequence: tccaacaucaaggaagauggca
  modified_base 1..2: mod_base = OTHER; note = bicyclic nucleic acid (BNA)
  modified_base 21..22: mod_base = OTHER; note = bicyclic nucleic acid (BNA)
  source 1..22: mol_type = other DNA
  modified_base 8: mod_base = OTHER; note = Uracil
  modified_base 18: mod_base = OTHER; note = Uracil
tccaacatcaaggaagatggca

SEQ ID NO: 3749 - DNA, 21 bp, synthetic construct
  misc_feature 1..21: note = Description of Artificial Sequence: Synthetic Antisense oligonucleotide
  misc_feature 1..21: note = Original Sequence: tccaacaucaaggaagauggc
  modified_base 1..2: mod_base = OTHER; note = bicyclic nucleic acid (BNA)
  modified_base 20..21: mod_base = OTHER; note = bicyclic nucleic acid (BNA)
  source 1..21: mol_type = other DNA
  modified_base 8: mod_base = OTHER; note = Uracil
  modified_base 18: mod_base = OTHER; note = Uracil
tccaacatcaaggaagatggc

SEQ ID NO: 3750 - DNA, 20 bp, synthetic construct
  misc_feature 1..20: note = Description of Artificial Sequence: Synthetic Antisense oligonucleotide
  misc_feature 1..20: note = Original Sequence: tccaacaucaaggaagaugg
  modified_base 1..2: mod_base = OTHER; note = bicyclic nucleic acid (BNA)
  modified_base 19..20: mod_base = OTHER; note = bicyclic nucleic acid (BNA)
  source 1..20: mol_type = other DNA
  modified_base 8: mod_base = OTHER; note = Uracil
  modified_base 18: mod_base = OTHER; note = Uracil
tccaacatcaaggaagatgg

SEQ ID NO: 3751 - DNA, 19 bp, synthetic construct
  misc_feature 1..19: note = Description of Artificial Sequence: Synthetic Antisense oligonucleotide
  misc_feature 1..19: note = Original Sequence: tccaacaucaaggaagatg
  modified_base 1..2: mod_base = OTHER; note = bicyclic nucleic acid (BNA)
  modified_base 18..19: mod_base = OTHER; note = bicyclic nucleic acid (BNA)
  source 1..19: mol_type = other DNA
  modified_base 8: mod_base = OTHER; note = Uracil
tccaacatcaaggaagatg

SEQ ID NO: 3752 - DNA, 18 bp, synthetic construct
  misc_feature 1..18: note = Description of Artificial Sequence: Synthetic Antisense oligonucleotide
  misc_feature 1..18: note = Original Sequence: tccaacaucaaggaagat
  modified_base 1..2: mod_base = OTHER; note = bicyclic nucleic acid (BNA)
  modified_base 17..18: mod_base = OTHER; note = bicyclic nucleic acid (BNA)
  source 1..18: mol_type = other DNA
  modified_base 8: mod_base = OTHER; note = Uracil
tccaacatcaaggaagat

SEQ ID NO: 3753 - DNA, 17 bp, synthetic construct
  misc_feature 1..17: note = Description of Artificial Sequence: Synthetic Antisense oligonucleotide
  misc_feature 1..17: note = Original Sequence: tccaacaucaaggaaga
  modified_base 1..2: mod_base = OTHER; note = bicyclic nucleic acid (BNA)
  modified_base 16..17: mod_base = OTHER; note = bicyclic nucleic acid (BNA)
  source 1..17: mol_type = other DNA
  modified_base 8: mod_base = OTHER; note = Uracil
tccaacatcaaggaaga

SEQ ID NO: 3754 - DNA, 16 bp, synthetic construct
  misc_feature 1..16: note = Description of Artificial Sequence: Synthetic Antisense oligonucleotide
  misc_feature 1..16: note = Original Sequence: tccaacaucaaggaag
  modified_base 1..2: mod_base = OTHER; note = bicyclic nucleic acid (BNA)
  modified_base 15..16: mod_base = OTHER; note = bicyclic nucleic acid (BNA)
  source 1..16: mol_type = other DNA
  modified_base 8: mod_base = OTHER; note = Uracil
tccaacatcaaggaag

SEQ ID NO: 3755 - RNA, 28 nt, synthetic construct
  misc_feature 1..28: note = Description of Artificial Sequence: Synthetic Antisense oligonucleotide
  modified_base 1..2: mod_base = OTHER; note = bicyclic nucleic acid (BNA)
  modified_base 27..28: mod_base = OTHER; note = bicyclic nucleic acid (BNA)
  source 1..28: mol_type = other RNA
ccaacatcaaggaagatggcatttctag

SEQ ID NO: 3756 - DNA, 27 bp, synthetic construct
  misc_feature 1..27: note = Description of Artificial Sequence: Synthetic Antisense oligonucleotide
  misc_feature 1..27: note = Original Sequence: ccaacaucaaggaagauggcauuucta
  modified_base 1..2: mod_base = OTHER; note = bicyclic nucleic acid (BNA)
  modified_base 26..27: mod_base = OTHER; note = bicyclic nucleic acid (BNA)
  source 1..27: mol_type = other DNA
  modified_base 7: mod_base = OTHER; note = Uracil
  modified_base 17: mod_base = OTHER; note = Uracil
  modified_base 22: mod_base = OTHER; note = Uracil
  modified_base 23: mod_base = OTHER; note = Uracil
  modified_base 24: mod_base = OTHER; note = Uracil
ccaacatcaaggaagatggcatttcta

SEQ ID NO: 3757 - DNA, 26 bp, synthetic construct
  misc_feature 1..26: note = Description of Artificial Sequence: Synthetic Antisense oligonucleotide
  misc_feature 1..26: note = Original Sequence: ccaacaucaaggaagauggcauuuct
  modified_base 1..2: mod_base = OTHER; note = bicyclic nucleic acid (BNA)
  modified_base 25..26: mod_base = OTHER; note = bicyclic nucleic acid (BNA)
  source 1..26: mol_type = other DNA
  modified_base 7: mod_base = OTHER; note = Uracil
  modified_base 17: mod_base = OTHER; note = Uracil
  modified_base 22: mod_base = OTHER; note = Uracil
  modified_base 23: mod_base = OTHER; note = Uracil
  modified_base 24: mod_base = OTHER; note = Uracil
ccaacatcaaggaagatggcatttct

SEQ ID NO: 3758 - DNA, 25 bp, synthetic construct
  misc_feature 1..25: note = Description of Artificial Sequence: Synthetic Antisense oligonucleotide
  misc_feature 1..25: note = Original Sequence: ccaacaucaaggaagauggcauutc
  modified_base 1..2: mod_base = OTHER; note = bicyclic nucleic acid (BNA)
  modified_base 24..25: mod_base = OTHER; note = bicyclic nucleic acid (BNA)
  source 1..25: mol_type = other DNA
  modified_base 7: mod_base = OTHER; note = Uracil
  modified_base 17: mod_base = OTHER; note = Uracil
  modified_base 22: mod_base = OTHER; note = Uracil
  modified_base 23: mod_base = OTHER; note = Uracil
ccaacatcaaggaagatggcatttc

SEQ ID NO: 3759 - DNA, 24 bp, synthetic construct
  misc_feature 1..24: note = Description of Artificial Sequence: Synthetic Antisense oligonucleotide
  misc_feature 1..24: note = Original Sequence: ccaacaucaaggaagauggcautt
  modified_base 1..2: mod_base = OTHER; note = bicyclic nucleic acid (BNA)
  modified_base 23..24: mod_base = OTHER; note = bicyclic nucleic acid (BNA)
  source 1..24: mol_type = other DNA
  modified_base 7: mod_base = OTHER; note = Uracil
  modified_base 17: mod_base = OTHER; note = Uracil
  modified_base 22: mod_base = OTHER; note = Uracil
ccaacatcaaggaagatggcattt

SEQ ID NO: 3760 - DNA, 23 bp, synthetic construct
  misc_feature 1..23: note = Description of Artificial Sequence: Synthetic Antisense oligonucleotide
  misc_feature 1..23: note = Original Sequence: ccaacaucaaggaagauggcatt
  modified_base 1..2: mod_base = OTHER; note = bicyclic nucleic acid (BNA)
  modified_base 22..23: mod_base = OTHER; note = bicyclic nucleic acid (BNA)
  source 1..23: mol_type = other DNA
  modified_base 7: mod_base = OTHER; note = Uracil
  modified_base 17: mod_base = OTHER; note = Uracil
ccaacatcaaggaagatggcatt

SEQ ID NO: 3761 - DNA, 22 bp, synthetic construct
  misc_feature 1..22: note = Description of Artificial Sequence: Synthetic Antisense oligonucleotide
  misc_feature 1..22: note = Original Sequence: ccaacaucaaggaagauggcat
  modified_base 1..2: mod_base = OTHER; note = bicyclic nucleic acid (BNA)
  modified_base 21..22: mod_base = OTHER; note = bicyclic nucleic acid (BNA)
  source 1..22: mol_type = other DNA
  modified_base 7: mod_base = OTHER; note = Uracil
  modified_base 17: mod_base = OTHER; note = Uracil
ccaacatcaaggaagatggcat

SEQ ID NO: 3762 - RNA, 21 nt, synthetic construct
  misc_feature 1..21: note = Description of Artificial Sequence: Synthetic Antisense oligonucleotide
  modified_base 1..2: mod_base = OTHER; note = bicyclic nucleic acid (BNA)
  modified_base 20..21: mod_base = OTHER; note = bicyclic nucleic acid (BNA)
  source 1..21: mol_type = other RNA
ccaacatcaaggaagatggca

SEQ ID NO: 3763 - RNA, 20 nt, synthetic construct
  misc_feature 1..20: note = Description of Artificial Sequence: Synthetic Antisense oligonucleotide
  modified_base 1..2: mod_base = OTHER; note = bicyclic nucleic acid (BNA)
  modified_base 19..20: mod_base = OTHER; note = bicyclic nucleic acid (BNA)
  source 1..20: mol_type = other RNA
ccaacatcaaggaagatggc

SEQ ID NO: 3764 - RNA, 19 nt, synthetic construct
  misc_feature 1..19: note = Description of Artificial Sequence: Synthetic Antisense oligonucleotide
  modified_base 1..2: mod_base = OTHER; note = bicyclic nucleic acid (BNA)
  modified_base 18..19: mod_base = OTHER; note = bicyclic nucleic acid (BNA)
  source 1..19: mol_type = other RNA
ccaacatcaaggaagatgg

SEQ ID NO: 3765 - DNA, 18 bp, synthetic construct
  misc_feature 1..18: note = Description of Artificial Sequence: Synthetic Antisense oligonucleotide
  misc_feature 1..18: note = Original Sequence: ccaacaucaaggaagatg
  modified_base 1..2: mod_base = OTHER; note = bicyclic nucleic acid (BNA)
  modified_base 17..18: mod_base = OTHER; note = bicyclic nucleic acid (BNA)
  source 1..18: mol_type = other DNA
  modified_base 7: mod_base = OTHER; note = Uracil
ccaacatcaaggaagatg

SEQ ID NO: 3766 - DNA, 17 bp, synthetic construct
  misc_feature 1..17: note = Description of Artificial Sequence: Synthetic Antisense oligonucleotide
  misc_feature 1..17: note = Original Sequence: ccaacaucaaggaagat
  modified_base 1..2: mod_base = OTHER; note = bicyclic nucleic acid (BNA)
  modified_base 16..17: mod_base = OTHER; note = bicyclic nucleic acid (BNA)
  source 1..17: mol_type = other DNA
  modified_base 7: mod_base = OTHER; note = Uracil
ccaacatcaaggaagat

SEQ ID NO: 3767 - RNA, 16 nt, synthetic construct
  misc_feature 1..16: note = Description of Artificial Sequence: Synthetic Antisense oligonucleotide
  modified_base 1..2: mod_base = OTHER; note = bicyclic nucleic acid (BNA)
  modified_base 15..16: mod_base = OTHER; note = bicyclic nucleic acid (BNA)
  source 1..16: mol_type = other RNA
ccaacatcaaggaaga

SEQ ID NO: 3768 - RNA, 15 nt, synthetic construct
  misc_feature 1..15: note = Description of Artificial Sequence: Synthetic Antisense oligonucleotide
  modified_base 1..2: mod_base = OTHER; note = bicyclic nucleic acid (BNA)
  modified_base 14..15: mod_base = OTHER; note = bicyclic nucleic acid (BNA)
  source 1..15: mol_type = other RNA
ccaacatcaaggaag

SEQ ID NO: 3769 - RNA, 27 nt, synthetic construct
  misc_feature 1..27: note = Description of Artificial Sequence: Synthetic Antisense oligonucleotide
  modified_base 1..2: mod_base = OTHER; note = bicyclic nucleic acid (BNA)
  modified_base 26..27: mod_base = OTHER; note = bicyclic nucleic acid (BNA)
  source 1..27: mol_type = other RNA
caacatcaaggaagatggcatttctag

SEQ ID NO: 3770 - DNA, 26 bp, synthetic construct
  misc_feature 1..26: note = Description of Artificial Sequence: Synthetic Antisense oligonucleotide
  misc_feature 1..26: note = Original Sequence: caacaucaaggaagauggcauuucta
  modified_base 1..2: mod_base = OTHER; note = bicyclic nucleic acid (BNA)
  modified_base 25..26: mod_base = OTHER; note = bicyclic nucleic acid (BNA)
  source 1..26: mol_type = other DNA
  modified_base 6: mod_base = OTHER; note = Uracil
  modified_base 16: mod_base = OTHER; note = Uracil
  modified_base 21: mod_base = OTHER; note = Uracil
  modified_base 22: mod_base = OTHER; note = Uracil
  modified_base 23: mod_base = OTHER; note = Uracil
caacatcaaggaagatggcatttcta

SEQ ID NO: 3771 - DNA, 25 bp, synthetic construct
  misc_feature 1..25: note = Description of Artificial Sequence: Synthetic Antisense oligonucleotide
  misc_feature 1..25: note = Original Sequence: caacaucaaggaagauggcauuuct
  modified_base 1..2: mod_base = OTHER; note = bicyclic nucleic acid (BNA)
  modified_base 24..25: mod_base = OTHER; note = bicyclic nucleic acid (BNA)
  source 1..25: mol_type = other DNA
  modified_base 6: mod_base = OTHER; note = Uracil
  modified_base 16: mod_base = OTHER; note = Uracil
  modified_base 21: mod_base = OTHER; note = Uracil
  modified_base 22: mod_base = OTHER; note = Uracil
  modified_base 23: mod_base = OTHER; note = Uracil
caacatcaaggaagatggcatttct

SEQ ID NO: 3772 - DNA, 24 bp, synthetic construct
  misc_feature 1..24: note = Description of Artificial Sequence: Synthetic Antisense oligonucleotide
  misc_feature 1..24: note = Original Sequence: caacaucaaggaagauggcauutc
  modified_base 1..2: mod_base = OTHER; note = bicyclic nucleic acid (BNA)
  modified_base 23..24: mod_base = OTHER; note = bicyclic nucleic acid (BNA)
  source 1..24: mol_type = other DNA
  modified_base 6: mod_base = OTHER; note = Uracil
  modified_base 16: mod_base = OTHER; note = Uracil
  modified_base 21: mod_base = OTHER; note = Uracil
  modified_base 22: mod_base = OTHER; note = Uracil
caacatcaaggaagatggcatttc

SEQ ID NO: 3773 - DNA, 23 bp, synthetic construct
  misc_feature 1..23: note = Description of Artificial Sequence: Synthetic Antisense oligonucleotide
  misc_feature 1..23: note = Original Sequence: caacaucaaggaagauggcautt
  modified_base 1..2: mod_base = OTHER; note = bicyclic nucleic acid (BNA)
  modified_base 22..23: mod_base = OTHER; note = bicyclic nucleic acid (BNA)
  source 1..23: mol_type = other DNA
  modified_base 6: mod_base = OTHER; note = Uracil
  modified_base 16: mod_base = OTHER; note = Uracil
  modified_base 21: mod_base = OTHER; note = Uracil
caacatcaaggaagatggcattt

SEQ ID NO: 3774 - DNA, 22 bp, synthetic construct
  misc_feature 1..22: note = Description of Artificial Sequence: Synthetic Antisense oligonucleotide
  misc_feature 1..22: note = Original Sequence: caacaucaaggaagauggcatt
  modified_base 1..2: mod_base = OTHER; note = bicyclic nucleic acid (BNA)
  modified_base 21..22: mod_base = OTHER; note = bicyclic nucleic acid (BNA)
  source 1..22: mol_type = other DNA
  modified_base 6: mod_base = OTHER; note = Uracil
  modified_base 16: mod_base = OTHER; note = Uracil
caacatcaaggaagatggcatt

SEQ ID NO: 3775 - DNA, 21 bp, synthetic construct
  misc_feature 1..21: note = Description of Artificial Sequence: Synthetic Antisense oligonucleotide
  misc_feature 1..21: note = Original Sequence: caacaucaaggaagauggcat
  modified_base 1..2: mod_base = OTHER; note = bicyclic nucleic acid (BNA)
  modified_base 20..21: mod_base = OTHER; note = bicyclic nucleic acid (BNA)
  source 1..21: mol_type = other DNA
  modified_base 6: mod_base = OTHER; note = Uracil
  modified_base 16: mod_base = OTHER; note = Uracil
caacatcaaggaagatggcat

SEQ ID NO: 3776 - RNA, 20 nt, synthetic construct
  misc_feature 1..20: note = Description of Artificial Sequence: Synthetic Antisense oligonucleotide
  modified_base 1..2: mod_base = OTHER; note = bicyclic nucleic acid (BNA)
  modified_base 19..20: mod_base = OTHER; note = bicyclic nucleic acid (BNA)
  source 1..20: mol_type = other RNA
caacatcaaggaagatggca

SEQ ID NO: 3777 - RNA, 19 nt, synthetic construct
  misc_feature 1..19: note = Description of Artificial Sequence: Synthetic Antisense oligonucleotide
  modified_base 1..2: mod_base = OTHER; note = bicyclic nucleic acid (BNA)
  modified_base 18..19: mod_base = OTHER; note = bicyclic nucleic acid (BNA)
  source 1..19: mol_type = other RNA
caacatcaaggaagatggc

SEQ ID NO: 3778 - RNA, 18 nt, synthetic construct
  misc_feature 1..18: note = Description of Artificial Sequence: Synthetic Antisense oligonucleotide
  modified_base 1..2: mod_base = OTHER; note = bicyclic nucleic acid (BNA)
  modified_base 17..18: mod_base = OTHER; note = bicyclic nucleic acid (BNA)
  source 1..18: mol_type = other RNA
caacatcaaggaagatgg

SEQ ID NO: 3779 - DNA, 17 bp, synthetic construct
  misc_feature 1..17: note = Description of Artificial Sequence: Synthetic Antisense oligonucleotide
  misc_feature 1..17: note = Original Sequence: caacaucaaggaagatg
  modified_base 1..2: mod_base = OTHER; note = bicyclic nucleic acid (BNA)
  modified_base 16..17: mod_base = OTHER; note = bicyclic nucleic acid (BNA)
  source 1..17: mol_type = other DNA
  modified_base 6: mod_base = OTHER; note = Uracil
caacatcaaggaagatg

SEQ ID NO: 3780 - DNA, 16 bp, synthetic construct
  misc_feature 1..16: note = Description of Artificial Sequence: Synthetic Antisense oligonucleotide
  misc_feature 1..16: note = Original Sequence: caacaucaaggaagat
  modified_base 1..2: mod_base = OTHER; note = bicyclic nucleic acid (BNA)
  modified_base 15..16: mod_base = OTHER; note = bicyclic nucleic acid (BNA)
  source 1..16: mol_type = other DNA
  modified_base 6: mod_base = OTHER; note = Uracil
caacatcaaggaagat

SEQ ID NO: 3781 - RNA, 15 nt, synthetic construct
  misc_feature 1..15: note = Description of Artificial Sequence: Synthetic Antisense oligonucleotide
  modified_base 1..2: mod_base = OTHER; note = bicyclic nucleic acid (BNA)
  modified_base 14..15: mod_base = OTHER; note = bicyclic nucleic acid (BNA)
  source 1..15: mol_type = other RNA
caacatcaaggaaga

SEQ ID NO: 3782 - RNA, 14 nt, synthetic construct
  misc_feature 1..14: note = Description of Artificial Sequence: Synthetic Antisense oligonucleotide
  modified_base 1..2: mod_base = OTHER; note = bicyclic nucleic acid (BNA)
  modified_base 13..14: mod_base = OTHER; note = bicyclic nucleic acid (BNA)
  source 1..14: mol_type = other RNA
caacatcaaggaag

SEQ ID NO: 3783 - RNA, 26 nt, synthetic construct
  misc_feature 1..26: note = Description of Artificial Sequence: Synthetic Antisense oligonucleotide
  modified_base 1..2: mod_base = OTHER; note = bicyclic nucleic acid (BNA)
  modified_base 25..26: mod_base = OTHER; note = bicyclic nucleic acid (BNA)
  source 1..26: mol_type = other RNA
aacatcaaggaagatggcatttctag

SEQ ID NO: 3784 - DNA, 25 bp, synthetic construct
  misc_feature 1..25: note = Description of Artificial Sequence: Synthetic Antisense oligonucleotide
  misc_feature 1..25: note = Original Sequence: aacaucaaggaagauggcauuucta
  modified_base 1..2: mod_base = OTHER; note = bicyclic nucleic acid (BNA)
  modified_base 24..25: mod_base = OTHER; note = bicyclic nucleic acid (BNA)
  source 1..25: mol_type = other DNA
  modified_base 5: mod_base = OTHER; note = Uracil
  modified_base 15: mod_base = OTHER; note = Uracil
  modified_base 20: mod_base = OTHER; note = Uracil
  modified_base 21: mod_base = OTHER; note = Uracil
  modified_base 22: mod_base = OTHER; note = Uracil
aacatcaaggaagatggcatttcta

SEQ ID NO: 3785 - DNA, 24 bp, synthetic construct
  misc_feature 1..24: note = Description of Artificial Sequence: Synthetic Antisense oligonucleotide
  misc_feature 1..24: note = Original Sequence: aacaucaaggaagauggcauuuct
  modified_base 1..2: mod_base = OTHER; note = bicyclic nucleic acid (BNA)
  modified_base 23..24: mod_base = OTHER; note = bicyclic nucleic acid (BNA)
  source 1..24: mol_type = other DNA
  modified_base 5: mod_base = OTHER; note = Uracil
  modified_base 15: mod_base = OTHER; note = Uracil
  modified_base 20: mod_base = OTHER; note = Uracil
  modified_base 21: mod_base = OTHER; note = Uracil
  modified_base 22: mod_base = OTHER; note = Uracil
aacatcaaggaagatggcatttct

SEQ ID NO: 3786 - DNA, 23 bp, synthetic construct
  misc_feature 1..23: note = Description of Artificial Sequence: Synthetic Antisense oligonucleotide
  misc_feature 1..23: note = Original Sequence: aacaucaaggaagauggcauutc
  modified_base 1..2: mod_base = OTHER; note = bicyclic nucleic acid (BNA)
  modified_base 22..23: mod_base = OTHER; note = bicyclic nucleic acid (BNA)
  source 1..23: mol_type = other DNA
  modified_base 5: mod_base = OTHER; note = Uracil
  modified_base 15: mod_base = OTHER; note = Uracil
  modified_base 20: mod_base = OTHER; note = Uracil
  modified_base 21: mod_base = OTHER; note = Uracil
aacatcaaggaagatggcatttc

SEQ ID NO: 3787 - DNA, 22 bp, synthetic construct
  misc_feature 1..22: note = Description of Artificial Sequence: Synthetic Antisense oligonucleotide
  misc_feature 1..22: note = Original Sequence: aacaucaaggaagauggcautt
  modified_base 1..2: mod_base = OTHER; note = bicyclic nucleic acid (BNA)
  modified_base 21..22: mod_base = OTHER; note = bicyclic nucleic acid (BNA)
  source 1..22: mol_type = other DNA
  modified_base 5: mod_base = OTHER; note = Uracil
  modified_base 15: mod_base = OTHER; note = Uracil
  modified_base 20: mod_base = OTHER; note = Uracil
aacatcaaggaagatggcattt

SEQ ID NO: 3788 - DNA, 21 bp, synthetic construct
  misc_feature 1..21: note = Description of Artificial Sequence: Synthetic Antisense oligonucleotide
  misc_feature 1..21: note = Original Sequence: aacaucaaggaagauggcatt
  modified_base 1..2: mod_base = OTHER; note = bicyclic nucleic acid (BNA)
  modified_base 20..21: mod_base = OTHER; note = bicyclic nucleic acid (BNA)
  source 1..21: mol_type = other DNA
  modified_base 5: mod_base = OTHER; note = Uracil
  modified_base 15: mod_base = OTHER; note = Uracil
aacatcaaggaagatggcatt

SEQ ID NO: 3789 - DNA, 20 bp, synthetic construct
  misc_feature 1..20: note = Description of Artificial Sequence: Synthetic Antisense oligonucleotide
  misc_feature 1..20: note = Original Sequence: aacaucaaggaagauggcat
  modified_base 1..2: mod_base = OTHER; note = bicyclic nucleic acid (BNA)
  modified_base 19..20: mod_base = OTHER; note = bicyclic nucleic acid (BNA)
  source 1..20: mol_type = other DNA
  modified_base 5: mod_base = OTHER; note = Uracil
  modified_base 15: mod_base = OTHER; note = Uracil
aacatcaaggaagatggcat

SEQ ID NO: 3790 - RNA, 19 nt, synthetic construct
  misc_feature 1..19: note = Description of Artificial Sequence: Synthetic Antisense oligonucleotide
  modified_base 1..2: mod_base = OTHER; note = bicyclic nucleic acid (BNA)
  modified_base 18..19: mod_base = OTHER; note = bicyclic nucleic acid (BNA)
  source 1..19: mol_type = other RNA
aacatcaaggaagatggca

SEQ ID NO: 3791 - RNA, 18 nt, synthetic construct
  misc_feature 1..18: note = Description of Artificial Sequence: Synthetic Antisense oligonucleotide
  modified_base 1..2: mod_base = OTHER; note = bicyclic nucleic acid (BNA)
  modified_base 17..18: mod_base = OTHER; note = bicyclic nucleic acid (BNA)
  source 1..18: mol_type = other RNA
aacatcaaggaagatggc

SEQ ID NO: 3792 - RNA, 17 nt, synthetic construct
  misc_feature 1..17: note = Description of Artificial Sequence: Synthetic Antisense oligonucleotide
  modified_base 1..2: mod_base = OTHER; note = bicyclic nucleic acid (BNA)
  modified_base 16..17: mod_base = OTHER; note = bicyclic nucleic acid (BNA)
  source 1..17: mol_type = other RNA
aacatcaaggaagatgg

SEQ ID NO: 3793 - DNA, 16 bp, synthetic construct
  misc_feature 1..16: note = Description of Artificial Sequence: Synthetic Antisense oligonucleotide
  misc_feature 1..16: note = Original Sequence: aacaucaaggaagatg
  modified_base 1..2: mod_base = OTHER; note = bicyclic nucleic acid (BNA)
  modified_base 15..16: mod_base = OTHER; note = bicyclic nucleic acid (BNA)
  source 1..16: mol_type = other DNA
  modified_base 5: mod_base = OTHER; note = Uracil
aacatcaaggaagatg

SEQ ID NO: 3794 - DNA, 15 bp, synthetic construct
  misc_feature 1..15: note = Description of Artificial Sequence: Synthetic Antisense oligonucleotide
  misc_feature 1..15: note = Original Sequence: aacaucaaggaagat
  modified_base 1..2: mod_base = OTHER; note = bicyclic nucleic acid (BNA)
  modified_base 14..15: mod_base = OTHER; note = bicyclic nucleic acid (BNA)
  source 1..15: mol_type = other DNA
  modified_base 5: mod_base = OTHER; note = Uracil
aacatcaaggaagat

SEQ ID NO: 3795 - RNA, 14 nt, synthetic construct
  misc_feature 1..14: note = Description of Artificial Sequence: Synthetic Antisense oligonucleotide
  modified_base 1..2: mod_base = OTHER; note = bicyclic nucleic acid (BNA)
  modified_base 13..14: mod_base = OTHER; note = bicyclic nucleic acid (BNA)
  source 1..14: mol_type = other RNA
aacatcaaggaaga

SEQ ID NO: 3796 - RNA, 13 nt, synthetic construct
  misc_feature 1..13: note = Description of Artificial Sequence: Synthetic Antisense oligonucleotide
  modified_base 1..2: mod_base = OTHER; note = bicyclic nucleic acid (BNA)
  modified_base 12..13: mod_base = OTHER; note = bicyclic nucleic acid (BNA)
  source 1..13: mol_type = other RNA
aacatcaaggaag

SEQ ID NO: 3797 - RNA, 25 nt, synthetic construct
  misc_feature 1..25: note = Description of Artificial Sequence: Synthetic Antisense oligonucleotide
  modified_base 1..2: mod_base = OTHER; note = bicyclic nucleic acid (BNA)
  modified_base 24..25: mod_base = OTHER; note = bicyclic nucleic acid (BNA)
  source 1..25: mol_type = other RNA
acatcaaggaagatggcatttctag

SEQ ID NO: 3798 - DNA, 24 bp, synthetic construct
  misc_feature 1..24: note = Description of Artificial Sequence: Synthetic Antisense oligonucleotide
  misc_feature 1..24: note = Original Sequence: acaucaaggaagauggcauuucta
  modified_base 1..2: mod_base = OTHER; note = bicyclic nucleic acid (BNA)
  modified_base 23..24: mod_base = OTHER; note = bicyclic nucleic acid (BNA)
  source 1..24: mol_type = other DNA
  modified_base 4: mod_base = OTHER; note = Uracil
  modified_base 14: mod_base = OTHER; note = Uracil
  modified_base 19: mod_base = OTHER; note = Uracil
  modified_base 20: mod_base = OTHER; note = Uracil
  modified_base 21: mod_base = OTHER; note = Uracil
acatcaaggaagatggcatttcta

SEQ ID NO: 3799 - DNA, 23 bp, synthetic construct
  misc_feature 1..23: note = Description of Artificial Sequence: Synthetic Antisense oligonucleotide
  misc_feature 1..23: note = Original Sequence: acaucaaggaagauggcauuuct
  modified_base 1..2: mod_base = OTHER; note = bicyclic nucleic acid (BNA)
  modified_base 22..23: mod_base = OTHER; note = bicyclic nucleic acid (BNA)
  source 1..23: mol_type = other DNA
  modified_base 4: mod_base = OTHER; note = Uracil
  modified_base 14: mod_base = OTHER; note = Uracil
  modified_base 19: mod_base = OTHER; note = Uracil
  modified_base 20: mod_base = OTHER; note = Uracil
  modified_base 21: mod_base = OTHER; note = Uracil
acatcaaggaagatggcatttct

SEQ ID NO: 3800 - DNA, 22 bp, synthetic construct
  misc_feature 1..22: note = Description of Artificial Sequence: Synthetic Antisense oligonucleotide
  misc_feature 1..22: note = Original Sequence: acaucaaggaagauggcauutc
  modified_base 1..2: mod_base = OTHER; note = bicyclic nucleic acid (BNA)
  modified_base 21..22: mod_base = OTHER; note = bicyclic nucleic acid (BNA)
  source 1..22: mol_type = other DNA
  modified_base 4: mod_base = OTHER; note = Uracil
  modified_base 14: mod_base = OTHER; note = Uracil
  modified_base 19: mod_base = OTHER; note = Uracil
  modified_base 20: mod_base = OTHER; note = Uracil
acatcaaggaagatggcatttc

SEQ ID NO: 3801 - DNA, 21 bp, synthetic construct
  misc_feature 1..21: note = Description of Artificial Sequence: Synthetic Antisense oligonucleotide
  misc_feature 1..21: note = Original Sequence: acaucaaggaagauggcautt
  modified_base 1..2: mod_base = OTHER; note = bicyclic nucleic acid (BNA)
  modified_base 20..21: mod_base = OTHER; note = bicyclic nucleic acid (BNA)
  source 1..21: mol_type = other DNA
  modified_base 4: mod_base = OTHER; note = Uracil
  modified_base 14: mod_base = OTHER; note = Uracil
  modified_base 19: mod_base = OTHER; note = Uracil
acatcaaggaagatggcattt

SEQ ID NO: 3802 - DNA, 20 bp, synthetic construct
  misc_feature 1..20: note = Description of Artificial Sequence: Synthetic Antisense oligonucleotide
  misc_feature 1..20: note = Original Sequence: acaucaaggaagauggcatt
  modified_base 1..2: mod_base = OTHER; note = bicyclic nucleic acid (BNA)
  modified_base 19..20: mod_base = OTHER; note = bicyclic nucleic acid (BNA)
  source 1..20: mol_type = other DNA
  modified_base 4: mod_base = OTHER; note = Uracil
  modified_base 14: mod_base = OTHER; note = Uracil
acatcaaggaagatggcatt

SEQ ID NO: 3803 - DNA, 19 bp, synthetic construct
  misc_feature 1..19: note = Description of Artificial Sequence: Synthetic Antisense oligonucleotide
  misc_feature 1..19: note = Original Sequence: acaucaaggaagauggcat
  modified_base 1..2: mod_base = OTHER; note = bicyclic nucleic acid (BNA)
  modified_base 18..19: mod_base = OTHER; note = bicyclic nucleic acid (BNA)
  source 1..19: mol_type = other DNA
  modified_base 4: mod_base = OTHER; note = Uracil
  modified_base 14: mod_base = OTHER; note = Uracil
acatcaaggaagatggcat

SEQ ID NO: 3804 - RNA, 18 nt, synthetic construct
  misc_feature 1..18: note = Description of Artificial Sequence: Synthetic Antisense oligonucleotide
  modified_base 1..2: mod_base = OTHER; note = bicyclic nucleic acid (BNA)
  modified_base 17..18: mod_base = OTHER; note = bicyclic nucleic acid (BNA)
  source 1..18: mol_type = other RNA
acatcaaggaagatggca

SEQ ID NO: 3805 - RNA, 17 nt, synthetic construct
  misc_feature 1..17: note = Description of Artificial Sequence: Synthetic Antisense oligonucleotide
  modified_base 1..2: mod_base = OTHER; note = bicyclic nucleic acid (BNA)
  modified_base 16..17: mod_base = OTHER; note = bicyclic nucleic acid (BNA)
  source 1..17: mol_type = other RNA
acatcaaggaagatggc

SEQ ID NO: 3806 - RNA, 16 nt, synthetic construct
  misc_feature 1..16: note = Description of Artificial Sequence: Synthetic Antisense oligonucleotide
  modified_base 1..2: mod_base = OTHER; note = bicyclic nucleic acid (BNA)
  modified_base 15..16: mod_base = OTHER; note = bicyclic nucleic acid (BNA)
  source 1..16: mol_type = other RNA
acatcaaggaagatgg

SEQ ID NO: 3807 - DNA, 15 bp, synthetic construct
  misc_feature 1..15: note = Description of Artificial Sequence: Synthetic Antisense oligonucleotide
  misc_feature 1..15: note = Original Sequence: acaucaaggaagatg
  modified_base 1..2: mod_base = OTHER; note = bicyclic nucleic acid (BNA)
  modified_base 14..15: mod_base = OTHER; note = bicyclic nucleic acid (BNA)
  source 1..15: mol_type = other DNA
  modified_base 4: mod_base = OTHER; note = Uracil
acatcaaggaagatg

SEQ ID NO: 3808 - DNA, 14 bp, synthetic construct
  misc_feature 1..14: note = Description of Artificial Sequence: Synthetic Antisense oligonucleotide
  misc_feature 1..14: note = Original Sequence: acaucaaggaagat
  modified_base 1..2: mod_base = OTHER; note = bicyclic nucleic acid (BNA)
  modified_base 13..14: mod_base = OTHER; note = bicyclic nucleic acid (BNA)
  source 1..14: mol_type = other DNA
  modified_base 4: mod_base = OTHER; note = Uracil
acatcaaggaagat

SEQ ID NO: 3809 - RNA, 13 nt, synthetic construct
  misc_feature 1..13: note = Description of Artificial Sequence: Synthetic Antisense oligonucleotide
  modified_base 1..2: mod_base = OTHER; note = bicyclic nucleic acid (BNA)
  modified_base 12..13: mod_base = OTHER; note = bicyclic nucleic acid (BNA)
  source 1..13: mol_type = other RNA
acatcaaggaaga

SEQ ID NO: 3810 - RNA, 12 nt, synthetic construct
  misc_feature 1..12: note = Description of Artificial Sequence: Synthetic Antisense oligonucleotide
  modified_base 1..2: mod_base = OTHER; note = bicyclic nucleic acid (BNA)
  modified_base 11..12: mod_base = OTHER; note = bicyclic nucleic acid (BNA)
  source 1..12: mol_type = other RNA
acatcaaggaag

SEQ ID NO: 3811 - RNA, 24 nt, synthetic construct
  misc_feature 1..24: note = Description of Artificial Sequence: Synthetic Antisense oligonucleotide
  modified_base 1..2: mod_base = OTHER; note = bicyclic nucleic acid (BNA)
  modified_base 23..24: mod_base = OTHER; note = bicyclic nucleic acid (BNA)
  source 1..24: mol_type = other RNA
catcaaggaagatggcatttctag

SEQ ID NO: 3812 - DNA, 23 bp, synthetic construct
  misc_feature 1..23: note = Description of Artificial Sequence: Synthetic Antisense oligonucleotide
  misc_feature 1..23: note = Original Sequence: caucaaggaagauggcauuucta
  modified_base 1..2: mod_base = OTHER; note = bicyclic nucleic acid (BNA)
  modified_base 22..23: mod_base = OTHER; note = bicyclic nucleic acid (BNA)
  source 1..23: mol_type = other DNA
  modified_base 3: mod_base = OTHER; note = Uracil
  modified_base 13: mod_base = OTHER; note = Uracil
  modified_base 18: mod_base = OTHER; note = Uracil
  modified_base 19: mod_base = OTHER; note = Uracil
  modified_base 20: mod_base = OTHER; note = Uracil
catcaaggaagatggcatttcta

SEQ ID NO: 3813 - DNA, 22 bp, synthetic construct
  misc_feature 1..22: note = Description of Artificial Sequence: Synthetic Antisense oligonucleotide
  misc_feature 1..22: note = Original Sequence: caucaaggaagauggcauuuct
  modified_base 1..2: mod_base = OTHER; note = bicyclic nucleic acid (BNA)
  modified_base 21..22: mod_base = OTHER; note = bicyclic nucleic acid (BNA)
  source 1..22: mol_type = other DNA
  modified_base 3: mod_base = OTHER; note = Uracil
  modified_base 13: mod_base = OTHER; note = Uracil
  modified_base 18: mod_base = OTHER; note = Uracil
  modified_base 19: mod_base = OTHER; note = Uracil
  modified_base 20: mod_base = OTHER; note = Uracil
catcaaggaagatggcatttct

SEQ ID NO: 3814 - DNA, 21 bp, synthetic construct
  misc_feature 1..21: note = Description of Artificial Sequence: Synthetic Antisense oligonucleotide
  misc_feature 1..21: note = Original Sequence: caucaaggaagauggcauutc
  modified_base 1..2: mod_base = OTHER; note = bicyclic nucleic acid (BNA)
  modified_base 20..21: mod_base = OTHER; note = bicyclic nucleic acid (BNA)
  source 1..21: mol_type = other DNA
  modified_base 3: mod_base = OTHER; note = Uracil
  modified_base 13: mod_base = OTHER; note = Uracil
  modified_base 18: mod_base = OTHER; note = Uracil
  modified_base 19: mod_base = OTHER; note = Uracil
catcaaggaagatggcatttc

SEQ ID NO: 3815 - DNA, 20 bp, synthetic construct
  misc_feature 1..20: note = Description of Artificial Sequence: Synthetic Antisense oligonucleotide
  misc_feature 1..20: note = Original Sequence: caucaaggaagauggcautt
  modified_base 1..2: mod_base = OTHER; note = bicyclic nucleic acid (BNA)
  modified_base 19..20: mod_base = OTHER; note = bicyclic nucleic acid (BNA)
  source 1..20: mol_type = other DNA
  modified_base 3: mod_base = OTHER; note = Uracil
  modified_base 13: mod_base = OTHER; note = Uracil
  modified_base 18: mod_base = OTHER; note = Uracil
catcaaggaagatggcattt

SEQ ID NO: 3816 - DNA, 19 bp, synthetic construct
  misc_feature 1..19: note = Description of Artificial Sequence: Synthetic Antisense oligonucleotide
  misc_feature 1..19: note = Original Sequence: caucaaggaagauggcatt
  modified_base 1..2: mod_base = OTHER; note = bicyclic nucleic acid (BNA)
  modified_base 18..19: mod_base = OTHER; note = bicyclic nucleic acid (BNA)
  source 1..19: mol_type = other DNA
  modified_base 3: mod_base = OTHER; note = Uracil
  modified_base 13: mod_base = OTHER; note = Uracil
catcaaggaagatggcatt

SEQ ID NO: 3817 - DNA, 18 bp, synthetic construct
  misc_feature 1..18: note = Description of Artificial Sequence: Synthetic Antisense oligonucleotide
  misc_feature 1..18: note = Original Sequence: caucaaggaagauggcat
  modified_base 1..2: mod_base = OTHER; note = bicyclic nucleic acid (BNA)
  modified_base 17..18: mod_base = OTHER; note = bicyclic nucleic acid (BNA)
  source 1..18: mol_type = other DNA
  modified_base 3: mod_base = OTHER; note = Uracil
  modified_base 13: mod_base = OTHER; note = Uracil
catcaaggaagatggcat

SEQ ID NO: 3818 - RNA, 17 nt, synthetic construct
  misc_feature 1..17: note = Description of Artificial Sequence: Synthetic Antisense oligonucleotide
  modified_base 1..2: mod_base = OTHER; note = bicyclic nucleic acid (BNA)
  modified_base 16..17: mod_base = OTHER; note = bicyclic nucleic acid (BNA)
  source 1..17: mol_type = other RNA
catcaaggaagatggca

SEQ ID NO: 3819 - RNA, 16 nt, synthetic construct
  misc_feature 1..16: note = Description of Artificial Sequence: Synthetic Antisense oligonucleotide
  modified_base 1..2: mod_base = OTHER; note = bicyclic nucleic acid (BNA)
  modified_base 15..16: mod_base = OTHER; note = bicyclic nucleic acid (BNA)
  source 1..16: mol_type = other RNA
catcaaggaagatggc

SEQ ID NO: 3820 - RNA, 15 nt, synthetic construct
  misc_feature 1..15: note = Description of Artificial Sequence: Synthetic Antisense oligonucleotide
  modified_base 1..2: mod_base = OTHER; note = bicyclic nucleic acid (BNA)
  modified_base 14..15: mod_base = OTHER; note = bicyclic nucleic acid (BNA)
  source 1..15: mol_type = other RNA
catcaaggaagatgg

SEQ ID NO: 3821 - DNA, 14 bp, synthetic construct
  misc_feature 1..14: note = Description of Artificial Sequence: Synthetic Antisense oligonucleotide
  misc_feature 1..14: note = Original Sequence: caucaaggaagatg
  modified_base 1..2: mod_base = OTHER; note = bicyclic nucleic acid (BNA)
  modified_base 13..14: mod_base = OTHER; note = bicyclic nucleic acid (BNA)
  source 1..14: mol_type = other DNA
  modified_base 3: mod_base = OTHER; note = Uracil
catcaaggaagatg

SEQ ID NO: 3822 - DNA, 13 bp, synthetic construct
  misc_feature 1..13: note = Description of Artificial Sequence: Synthetic Antisense oligonucleotide
  misc_feature 1..13: note = Original Sequence: caucaaggaagat
  modified_base 1..2: mod_base = OTHER; note = bicyclic nucleic acid (BNA)
  modified_base 12..13: mod_base = OTHER; note = bicyclic nucleic acid (BNA)
  source 1..13: mol_type = other DNA
  modified_base 3: mod_base = OTHER; note = Uracil
catcaaggaagat

SEQ ID NO: 3823 - RNA, 12 nt, synthetic construct
  misc_feature 1..12: note = Description of Artificial Sequence: Synthetic Antisense oligonucleotide
  modified_base 1..2: mod_base = OTHER; note = bicyclic nucleic acid (BNA)
  modified_base 11..12: mod_base = OTHER; note = bicyclic nucleic acid (BNA)
  source 1..12: mol_type = other RNA
catcaaggaaga

SEQ ID NO: 3824 - RNA, 11 nt, synthetic construct
  misc_feature 1..11: note = Description of Artificial Sequence: Synthetic Antisense oligonucleotide
  modified_base 1..2: mod_base = OTHER; note = bicyclic nucleic acid (BNA)
  modified_base 10..11: mod_base = OTHER; note = bicyclic nucleic acid (BNA)
  source 1..11: mol_type = other RNA
catcaaggaag

SEQ ID NO: 3825 - DNA, 23 bp, synthetic construct
  misc_feature 1..23: note = Description of Artificial Sequence: Synthetic Antisense oligonucleotide
  misc_feature 1..23: note = Original Sequence: atcaaggaagauggcauuucuag
  modified_base 1..2: mod_base = OTHER; note = bicyclic nucleic acid (BNA)
  modified_base 22..23: mod_base = OTHER; note = bicyclic nucleic acid (BNA)
  source 1..23: mol_type = other DNA
  modified_base 12: mod_base = OTHER; note = Uracil
  modified_base 17: mod_base = OTHER; note = Uracil
  modified_base 18: mod_base = OTHER; note = Uracil
  modified_base 19: mod_base = OTHER; note = Uracil
  modified_base 21: mod_base = OTHER; note = Uracil
atcaaggaagatggcatttctag

SEQ ID NO: 3826 - DNA, 22 bp, synthetic construct
  misc_feature 1..22: note = Description of Artificial Sequence: Synthetic Antisense oligonucleotide
  misc_feature 1..22: note = Original Sequence: atcaaggaagauggcauuucta
  modified_base 1..2: mod_base = OTHER; note = bicyclic nucleic acid (BNA)
  modified_base 21..22: mod_base = OTHER; note = bicyclic nucleic acid (BNA)
  source 1..22: mol_type = other DNA
  modified_base 12: mod_base = OTHER; note = Uracil
  modified_base 17: mod_base = OTHER; note = Uracil
  modified_base 18: mod_base = OTHER; note = Uracil
  modified_base 19: mod_base = OTHER; note = Uracil
atcaaggaagatggcatttcta

SEQ ID NO: 3827 - DNA, 21 bp, synthetic construct
  misc_feature 1..21: note = Description of Artificial Sequence: Synthetic Antisense oligonucleotide
  misc_feature 1..21: note = Original Sequence: atcaaggaagauggcauuuct
  modified_base 1..2: mod_base = OTHER; note = bicyclic nucleic acid (BNA)
  modified_base 20..21: mod_base = OTHER; note = bicyclic nucleic acid (BNA)
  source 1..21: mol_type = other DNA
  modified_base 12: mod_base = OTHER; note = Uracil
  modified_base 17: mod_base = OTHER; note = Uracil
  modified_base 18: mod_base = OTHER; note = Uracil
  modified_base 19: mod_base = OTHER; note = Uracil
atcaaggaagatggcatttct

SEQ ID NO: 3828 - DNA, 20 bp, synthetic construct
  misc_feature 1..20: note = Description of Artificial Sequence: Synthetic Antisense oligonucleotide
  misc_feature 1..20: note = Original Sequence: atcaaggaagauggcauutc
  modified_base 1..2: mod_base = OTHER; note = bicyclic nucleic acid (BNA)
  modified_base 19..20: mod_base = OTHER; note = bicyclic nucleic acid (BNA)
  source 1..20: mol_type = other DNA
  modified_base 12: mod_base = OTHER; note = Uracil
  modified_base 17: mod_base = OTHER; note = Uracil
  modified_base 18: mod_base = OTHER; note = Uracil
atcaaggaagatggcatttc

SEQ ID NO: 3829 - DNA, 19 bp, synthetic construct
  misc_feature 1..19: note = Description of Artificial Sequence: Synthetic Antisense oligonucleotide
  misc_feature 1..19: note = Original Sequence: atcaaggaagauggcautt
  modified_base 1..2: mod_base = OTHER; note = bicyclic nucleic acid (BNA)
  modified_base 18..19: mod_base = OTHER; note = bicyclic nucleic acid (BNA)
  source 1..19: mol_type = other DNA
  modified_base 12: mod_base = OTHER; note = Uracil
  modified_base 17: mod_base = OTHER; note = Uracil
atcaaggaagatggcattt

SEQ ID NO: 3830 - DNA, 18 bp, synthetic construct
  misc_feature 1..18: note = Description of Artificial Sequence: Synthetic Antisense oligonucleotide
  misc_feature 1..18: note = Original Sequence: atcaaggaagauggcatt
  modified_base 1..2: mod_base = OTHER; note = bicyclic nucleic acid (BNA)
  modified_base 17..18: mod_base = OTHER; note = bicyclic nucleic acid (BNA)
  source 1..18: mol_type = other DNA
  modified_base 12: mod_base = OTHER; note = Uracil
atcaaggaagatggcatt

SEQ ID NO: 3831 - DNA, 17 bp, synthetic construct
  misc_feature 1..17: note = Description of Artificial Sequence: Synthetic Antisense oligonucleotide
  misc_feature 1..17: note = Original Sequence: atcaaggaagauggcat
  modified_base 1..2: mod_base = OTHER; note = bicyclic nucleic acid (BNA)
  modified_base 16..17: mod_base = OTHER; note = bicyclic nucleic acid (BNA)
  source 1..17: mol_type = other DNA
  modified_base 12: mod_base = OTHER; note = Uracil
atcaaggaagatggcat

SEQ ID NO: 3832 - DNA, 16 bp, synthetic construct
  misc_feature 1..16: note = Description of Artificial Sequence: Synthetic Antisense oligonucleotide
  misc_feature 1..16: note = Original Sequence: atcaaggaagauggca
  modified_base 1..2: mod_base = OTHER; note = bicyclic nucleic acid (BNA)
  modified_base 15..16: mod_base = OTHER; note = bicyclic nucleic acid (BNA)
  source 1..16: mol_type = other DNA
  modified_base 12: mod_base = OTHER; note = Uracil
atcaaggaagatggca

SEQ ID NO: 3833 - DNA, 15 bp, synthetic construct
  misc_feature 1..15: note = Description of Artificial Sequence: Synthetic Antisense oligonucleotide
  misc_feature 1..15: note = Original Sequence: atcaaggaagauggc
  modified_base 1..2: mod_base = OTHER; note = bicyclic nucleic acid (BNA)
  modified_base 14..15: mod_base = OTHER; note = bicyclic nucleic acid (BNA)
  source 1..15: mol_type = other DNA
  modified_base 12: mod_base = OTHER; note = Uracil
atcaaggaagatggc

SEQ ID NO: 3834 - DNA, 14 bp, synthetic construct
  misc_feature 1..14: note = Description of Artificial Sequence: Synthetic Antisense oligonucleotide
  misc_feature 1..14: note = Original Sequence: atcaaggaagaugg
  modified_base 1..2: mod_base = OTHER; note = bicyclic nucleic acid (BNA)
  modified_base 13..14: mod_base = OTHER; note = bicyclic nucleic acid (BNA)
  source 1..14: mol_type = other DNA
  modified_base 12: mod_base = OTHER; note = Uracil
atcaaggaagatgg

SEQ ID NO: 3835 - DNA, 13 bp, synthetic construct
  misc_feature 1..13: note = Description of Artificial Sequence: Synthetic Antisense oligonucleotide
  modified_base 1..2: mod_base = OTHER; note = bicyclic nucleic acid (BNA)
  modified_base 12..13: mod_base = OTHER; note = bicyclic nucleic acid (BNA)
  source 1..13: mol_type = other DNA
atcaaggaagatg

SEQ ID NO: 3836 - DNA, 12 bp, synthetic construct
  misc_feature 1..12: note = Description of Artificial Sequence: Synthetic Antisense oligonucleotide
  modified_base 1..2: mod_base = OTHER; note = bicyclic nucleic acid (BNA)
  modified_base 11..12: mod_base = OTHER; note = bicyclic nucleic acid (BNA)
  source 1..12: mol_type = other DNA
atcaaggaagat

SEQ ID NO: 3837 - DNA, 11 bp, synthetic construct
  misc_feature 1..11: note = Description of Artificial Sequence: Synthetic Antisense oligonucleotide
  modified_base 1..2: mod_base = OTHER; note = bicyclic nucleic acid (BNA)
  modified_base 10..11: mod_base = OTHER; note = bicyclic nucleic acid (BNA)
  source 1..11: mol_type = other DNA
atcaaggaaga

SEQ ID NO: 3838 - DNA, 10 bp, synthetic construct
  misc_feature 1..10: note = Description of Artificial Sequence: Synthetic Antisense oligonucleotide
  modified_base 1..2: mod_base = OTHER; note = bicyclic nucleic acid (BNA)
  modified_base 9..10: mod_base = OTHER; note = bicyclic nucleic acid (BNA)
  source 1..10: mol_type = other DNA
atcaaggaag

SEQ ID NO: 3839 - RNA, 18 nt, synthetic construct
  misc_feature 1..18: note = Description of Artificial Sequence: Synthetic Antisense oligonucleotide
  modified_base 1: mod_base = OTHER; note = bicyclic nucleic acid (BNA)
  modified_base 9: mod_base = OTHER; note = 5-methyl
  modified_base 13..14: mod_base = OTHER; note = 5-methyl
  modified_base 18: mod_base = OTHER; note = 5-methyl
  source 1..18: mol_type = other RNA
ggtaagttctgtccaagc

SEQ ID NO: 3840 - RNA, 18 nt, synthetic construct
  misc_feature 1..18: note = Description of Artificial Sequence: Synthetic Antisense oligonucleotide
  modified_base 1: mod_base = OTHER; note = bicyclic nucleic acid (BNA)
  modified_base 8: mod_base = OTHER; note = 5-methyl
  modified_base 12..13: mod_base = OTHER; note = 5-methyl
  modified_base 17..18: mod_base = OTHER; note = 5-methyl
  source 1..18: mol_type = other RNA
gtaagttctgtccaagcc

SEQ ID NO: 3841 - RNA, 18 nt, synthetic construct
  misc_feature 1..18: note = Description of Artificial Sequence: Synthetic Antisense oligonucleotide
  modified_base 1: mod_base = OTHER; note = bicyclic nucleic acid (BNA)
  modified_base 4: mod_base = OTHER; note = 5-methyl
  modified_base 13: mod_base = OTHER; note = 5-methyl
  modified_base 17..18: mod_base = OTHER; note = 5-methyl
  source 1..18: mol_type = other RNA
agtcggtaagttctgtcc

SEQ ID NO: 3842 - RNA, 18 nt, synthetic construct
  misc_feature 1..18: note = Description of Artificial Sequence: Synthetic Antisense oligonucleotide
  modified_base 1: mod_base = OTHER; note = 5-methyl
  modified_base 5..6: mod_base = OTHER; note = 5-methyl
  modified_base 10..12: mod_base = OTHER; note = 5-methyl
  modified_base 1: mod_base = OTHER; note = bicyclic nucleic acid (BNA)
  source 1..18: mol_type = other RNA
ctgtccaagcccggttga

SEQ ID NO: 3843 - DNA, 15 bp, synthetic construct
  misc_feature 1..15: note = Description of Artificial Sequence: Synthetic Antisense oligonucleotide
  misc_feature 1..15: note = Original Sequence: taaguucuguccaag
  modified_base 1: mod_base = OTHER; note = bicyclic nucleic acid (BNA)
  modified_base 7: mod_base = OTHER; note = 5-methyl
  modified_base 11..12: mod_base = OTHER; note = 5-methyl
  source 1..15: mol_type = other DNA
  modified_base 5: mod_base = OTHER; note = Uracil
  modified_base 6: mod_base = OTHER; note = Uracil
  modified_base 8: mod_base = OTHER; note = Uracil
  modified_base 10: mod_base = OTHER; note = Uracil
taagttctgtccaag

SEQ ID NO: 3844 - DNA, 20 bp, synthetic construct
  misc_feature 1..20: note = Description of Artificial Sequence: Synthetic Antisense oligonucleotide
  misc_feature 1..20: note = Original Sequence: tucuguccaagcccgguuga
  modified_base 1: mod_base = OTHER; note = bicyclic nucleic acid (BNA)
  modified_base 3: mod_base = OTHER; note = 5-methyl
  modified_base 7..8: mod_base = OTHER; note = 5-methyl
  modified_base 12..14: mod_base = OTHER; note = 5-methyl
  source 1..20: mol_type = other DNA
  modified_base 2: mod_base = OTHER; note = Uracil
  modified_base 4: mod_base = OTHER; note = Uracil
  modified_base 6: mod_base = OTHER; note = Uracil
  modified_base 17: mod_base = OTHER; note = Uracil
  modified_base 18: mod_base = OTHER; note = Uracil
ttctgtccaagcccggttga

SEQ ID NO: 3845 - DNA, 19 bp, synthetic construct
  misc_feature 1..19: note = Description of Artificial Sequence: Synthetic Antisense oligonucleotide
  misc_feature 1..19: note = Original Sequence: tucuguccaagcccgguug
  modified_base 1: mod_base = OTHER; note = bicyclic nucleic acid (BNA)
  modified_base 3: mod_base = OTHER; note = 5-methyl
  modified_base 7..8: mod_base = OTHER; note = 5-methyl
  modified_base 12..14: mod_base = OTHER; note = 5-methyl
  source 1..19: mol_type = other DNA
  modified_base 2: mod_base = OTHER; note = Uracil
  modified_base 4: mod_base = OTHER; note = Uracil
  modified_base 6: mod_base = OTHER; note = Uracil
  modified_base 17: mod_base = OTHER; note = Uracil
  modified_base 18: mod_base = OTHER; note = Uracil
ttctgtccaagcccggttg

SEQ ID NO: 3846 - DNA, 18 bp, synthetic construct
  misc_feature 1..18: note = Description of Artificial Sequence: Synthetic Antisense oligonucleotide
  misc_feature 1..18: note = Original Sequence: tucuguccaagcccgguu
  modified_base 1: mod_base = OTHER; note = bicyclic nucleic acid (BNA)
  modified_base 3: mod_base = OTHER; note = 5-methyl
  modified_base 7..8: mod_base = OTHER; note = 5-methyl
  modified_base 12..14: mod_base = OTHER; note = 5-methyl
  source 1..18: mol_type = other DNA
  modified_base 2: mod_base = OTHER; note = Uracil
  modified_base 4: mod_base = OTHER; note = Uracil
  modified_base 6: mod_base = OTHER; note = Uracil
  modified_base 17: mod_base = OTHER; note = Uracil
  modified_base 18: mod_base = OTHER; note = Uracil
ttctgtccaagcccggtt

SEQ ID NO: 3847 - DNA, 17 bp, synthetic construct
  misc_feature 1..17: note = Description of Artificial Sequence: Synthetic Antisense oligonucleotide
  misc_feature 1..17: note = Original Sequence: tucuguccaagcccggu
  modified_base 1: mod_base = OTHER; note = bicyclic nucleic acid (BNA)
  modified_base 3: mod_base = OTHER; note = 5-methyl
  modified_base 7..8: mod_base = OTHER; note = 5-methyl
  modified_base 12..14: mod_base = OTHER; note = 5-methyl
  source 1..17: mol_type = other DNA
  modified_base 2: mod_base = OTHER; note = Uracil
  modified_base 4: mod_base = OTHER; note = Uracil
  modified_base 6: mod_base = OTHER; note = Uracil
  modified_base 17: mod_base = OTHER; note = Uracil
ttctgtccaagcccggt

SEQ ID NO: 3848 - DNA, 16 bp, synthetic construct
  misc_feature 1..16: note = Description of Artificial Sequence: Synthetic Antisense oligonucleotide
  misc_feature 1..16: note = Original Sequence: tucuguccaagcccgg
  modified_base 1: mod_base = OTHER; note = bicyclic nucleic acid (BNA)
  modified_base 3: mod_base = OTHER; note = 5-methyl
  modified_base 7..8: mod_base = OTHER; note = 5-methyl
  modified_base 12..14: mod_base = OTHER; note = 5-methyl
  source 1..16: mol_type = other DNA
  modified_base 2: mod_base = OTHER; note = Uracil
  modified_base 4: mod_base = OTHER; note = Uracil
  modified_base 6: mod_base = OTHER; note = Uracil
ttctgtccaagcccgg

SEQ ID NO: 3849 - DNA, 15 bp, synthetic construct
  misc_feature 1..15: note = Description of Artificial Sequence: Synthetic Antisense oligonucleotide
  misc_feature 1..15: note = Original Sequence: tucuguccaagcccg
  modified_base 1: mod_base = OTHER; note = bicyclic nucleic acid (BNA)
  modified_base 3: mod_base = OTHER; note = 5-methyl
  modified_base 7..8: mod_base = OTHER; note = 5-methyl
  modified_base 12..14: mod_base = OTHER; note = 5-methyl
  source 1..15: mol_type = other DNA
  modified_base 2: mod_base = OTHER; note = Uracil
  modified_base 4: mod_base = OTHER; note = Uracil
  modified_base 6: mod_base = OTHER; note = Uracil
ttctgtccaagcccg

SEQ ID NO: 3850 - DNA, 14 bp, synthetic construct
  misc_feature 1..14: note = Description of Artificial Sequence: Synthetic Antisense oligonucleotide
  misc_feature 1..14: note = Original Sequence: tucuguccaagccc
  modified_base 1: mod_base = OTHER; note = bicyclic nucleic acid (BNA)
  modified_base 3: mod_base = OTHER; note = 5-methyl
  modified_base 7..8: mod_base = OTHER; note = 5-methyl
  modified_base 12..14: mod_base = OTHER; note = 5-methyl
  source 1..14: mol_type = other DNA
  modified_base 2: mod_base = OTHER; note = Uracil
  modified_base 4: mod_base = OTHER; note = Uracil
  modified_base 6: mod_base = OTHER; note = Uracil
ttctgtccaagccc

SEQ ID NO: 3851 - DNA, 13 bp, synthetic construct
  misc_feature 1..13: note = Description of Artificial Sequence: Synthetic Antisense oligonucleotide
  misc_feature 1..13: note = Original Sequence: tucuguccaagcc
  modified_base 1: mod_base = OTHER; note = bicyclic nucleic acid (BNA)
  modified_base 3: mod_base = OTHER; note = 5-methyl
  modified_base 7..8: mod_base = OTHER; note = 5-methyl
  modified_base 12..13: mod_base = OTHER; note = 5-methyl
  source 1..13: mol_type = other DNA
  modified_base 2: mod_base = OTHER; note = Uracil
  modified_base 4: mod_base = OTHER; note = Uracil
  modified_base 6: mod_base = OTHER; note = Uracil
ttctgtccaagcc

SEQ ID NO: 3852 - DNA, 12 bp, synthetic construct
  misc_feature 1..12: note = Description of Artificial Sequence: Synthetic Antisense oligonucleotide
  misc_feature 1..12: note = Original Sequence: tucuguccaagc
  modified_base 1: mod_base = OTHER; note = bicyclic nucleic acid (BNA)
  modified_base 3: mod_base = OTHER; note = 5-methyl
  modified_base 7..8: mod_base = OTHER; note = 5-methyl
  modified_base 12: mod_base = OTHER; note = 5-methyl
  source 1..12: mol_type = other DNA
  modified_base 2: mod_base = OTHER; note = Uracil
  modified_base 4: mod_base = OTHER; note = Uracil
  modified_base 6: mod_base = OTHER; note = Uracil
ttctgtccaagc

SEQ ID NO: 3853 - DNA, 11 bp, synthetic construct
  misc_feature 1..11: note = Description of Artificial Sequence: Synthetic Antisense oligonucleotide
  misc_feature 1..11: note = Original Sequence: tucuguccaag
  modified_base 1: mod_base = OTHER; note = bicyclic nucleic acid (BNA)
  modified_base 3: mod_base = OTHER; note = 5-methyl
  modified_base 7..8: mod_base = OTHER; note = 5-methyl
  source 1..11: mol_type = other DNA
  modified_base 2: mod_base = OTHER; note = Uracil
  modified_base 4: mod_base = OTHER; note = Uracil
  modified_base 6: mod_base = OTHER; note = Uracil
ttctgtccaag

SEQ ID NO: 3854 - DNA, 10 bp, synthetic construct
  misc_feature 1..10: note = Description of Artificial Sequence: Synthetic Antisense oligonucleotide
  misc_feature 1..10: note = Original Sequence: tucuguccaa
  modified_base 1: mod_base = OTHER; note = bicyclic nucleic acid (BNA)
  modified_base 3: mod_base = OTHER; note = 5-methyl
  modified_base 7..8: mod_base = OTHER; note = 5-methyl
  source 1..10: mol_type = other DNA
  modified_base 2: mod_base = OTHER; note = Uracil
  modified_base 4: mod_base = OTHER; note = Uracil
  modified_base 6: mod_base = OTHER; note = Uracil
ttctgtccaa

SEQ ID NO: 3855-3856 - skipped (2 entries)

SEQ ID NO: 3857 - DNA, 19 bp, synthetic construct
  misc_feature 1..19: note = Description of Artificial Sequence: Synthetic Antisense oligonucleotide
  misc_feature 1..19: note = Original Sequence: tcuguccaagcccgguuga
  modified_base 1: mod_base = OTHER; note = bicyclic nucleic acid (BNA)
  modified_base 2: mod_base = OTHER; note = 5-methyl
  modified_base 6..7: mod_base = OTHER; note = 5-methyl
  modified_base 11..13: mod_base = OTHER; note = 5-methyl
  source 1..19: mol_type = other DNA
  modified_base 3: mod_base = OTHER; note = Uracil
  modified_base 5: mod_base = OTHER; note = Uracil
  modified_base 16: mod_base = OTHER; note = Uracil
  modified_base 17: mod_base = OTHER; note = Uracil
tctgtccaagcccggttga

SEQ ID NO: 3858 - DNA, 18 bp, synthetic construct
  misc_feature 1..18: note = Description of Artificial Sequence: Synthetic Antisense oligonucleotide
  misc_feature 1..18: note = Original Sequence: tcuguccaagcccgguug
  modified_base 1: mod_base = OTHER; note = bicyclic nucleic acid (BNA)
  modified_base 2: mod_base = OTHER; note = 5-methyl
  modified_base 6..7: mod_base = OTHER; note = 5-methyl
  modified_base 11..13: mod_base = OTHER; note = 5-methyl
  source 1..18: mol_type = other DNA
  modified_base 3: mod_base = OTHER; note = Uracil
  modified_base 5: mod_base = OTHER; note = Uracil
  modified_base 16: mod_base = OTHER; note = Uracil
  modified_base 17: mod_base = OTHER; note = Uracil
tctgtccaagcccggttg

SEQ ID NO: 3859 - DNA, 17 bp, synthetic construct
  misc_feature 1..17: note = Description of Artificial Sequence: Synthetic Antisense oligonucleotide
  misc_feature 1..17: note = Original Sequence: tcuguccaagcccgguu
  modified_base 1: mod_base = OTHER; note = bicyclic nucleic acid (BNA)
  modified_base 2: mod_base = OTHER; note = 5-methyl
  modified_base 6..7: mod_base = OTHER; note = 5-methyl
  modified_base 11..13: mod_base = OTHER; note = 5-methyl
  source 1..17: mol_type = other DNA
  modified_base 3: mod_base = OTHER; note = Uracil
  modified_base 5: mod_base = OTHER; note = Uracil
  modified_base 16: mod_base = OTHER; note = Uracil
  modified_base 17: mod_base = OTHER; note = Uracil
tctgtccaagcccggtt

SEQ ID NO: 3860 - DNA, 16 bp, synthetic construct
  misc_feature 1..16: note = Description of Artificial Sequence: Synthetic Antisense oligonucleotide
  misc_feature 1..16: note = Original Sequence: tcuguccaagcccggu
  modified_base 1: mod_base = OTHER; note = bicyclic nucleic acid (BNA)
  modified_base 2: mod_base = OTHER; note = 5-methyl
  modified_base 6..7: mod_base = OTHER; note = 5-methyl
  modified_base 11..13: mod_base = OTHER; note = 5-methyl
  source 1..16: mol_type = other DNA
  modified_base 3: mod_base = OTHER; note = Uracil
  modified_base 5: mod_base = OTHER; note = Uracil
  modified_base 16: mod_base = OTHER; note = Uracil
tctgtccaagcccggt

SEQ ID NO: 3861 - DNA, 15 bp, synthetic construct
  misc_feature 1..15: note = Description of Artificial Sequence: Synthetic Antisense oligonucleotide
  misc_feature 1..15: note = Original Sequence: tcuguccaagcccgg
  modified_base 1: mod_base = OTHER; note = bicyclic nucleic acid (BNA)
  modified_base 2: mod_base = OTHER; note = 5-methyl
  modified_base 6..7: mod_base = OTHER; note = 5-methyl
  modified_base 11..13: mod_base = OTHER; note = 5-methyl
  source 1..15: mol_type = other DNA
  modified_base 3: mod_base = OTHER; note = Uracil
  modified_base 5: mod_base = OTHER; note = Uracil
tctgtccaagcccgg

SEQ ID NO: 3862 - DNA, 14 bp, synthetic construct
  misc_feature 1..14: note = Description of Artificial Sequence: Synthetic Antisense oligonucleotide
  misc_feature 1..14: note = Original Sequence: tcuguccaagcccg
  modified_base 1: mod_base = OTHER; note = bicyclic nucleic acid (BNA)
  modified_base 2: mod_base = OTHER; note = 5-methyl
  modified_base 6..7: mod_base = OTHER; note = 5-methyl
  modified_base 11..13: mod_base = OTHER; note = 5-methyl
  source 1..14: mol_type = other DNA
  modified_base 3: mod_base = OTHER; note = Uracil
  modified_base 5: mod_base = OTHER; note = Uracil
tctgtccaagcccg

SEQ ID NO: 3863 - DNA, 13 bp, synthetic construct
  misc_feature 1..13: note = Description of Artificial Sequence: Synthetic Antisense oligonucleotide
  misc_feature 1..13: note = Original Sequence: tcuguccaagccc
  modified_base 1: mod_base = OTHER; note = bicyclic nucleic acid (BNA)
  modified_base 2: mod_base = OTHER; note = 5-methyl
  modified_base 6..7: mod_base = OTHER; note = 5-methyl
  modified_base 11..13: mod_base = OTHER; note = 5-methyl
  source 1..13: mol_type = other DNA
  modified_base 3: mod_base = OTHER; note = Uracil
  modified_base 5: mod_base = OTHER; note = Uracil
tctgtccaagccc

SEQ ID NO: 3864 - DNA, 12 bp, synthetic construct
  misc_feature 1..12: note = Description of Artificial Sequence: Synthetic Antisense oligonucleotide
  misc_feature 1..12: note = Original Sequence: tcuguccaagcc
  modified_base 1: mod_base = OTHER; note = bicyclic nucleic acid (BNA)
  modified_base 2: mod_base = OTHER; note = 5-methyl
  modified_base 6..7: mod_base = OTHER; note = 5-methyl
  modified_base 11..12: mod_base = OTHER; note = 5-methyl
  source 1..12: mol_type = other DNA
  modified_base 3: mod_base = OTHER; note = Uracil
  modified_base 5: mod_base = OTHER; note = Uracil
tctgtccaagcc

SEQ ID NO: 3865 - DNA, 11 bp, synthetic construct
  misc_feature 1..11: note = Description of Artificial Sequence: Synthetic Antisense oligonucleotide
  misc_feature 1..11: note = Original Sequence: tcuguccaagc
  modified_base 1: mod_base = OTHER; note = bicyclic nucleic acid (BNA)
  modified_base 2: mod_base = OTHER; note = 5-methyl
  modified_base 6..7: mod_base = OTHER; note = 5-methyl
  modified_base 11: mod_base = OTHER; note = 5-methyl
  source 1..11: mol_type = other DNA
  modified_base 3: mod_base = OTHER; note = Uracil
  modified_base 5: mod_base = OTHER; note = Uracil
tctgtccaagc

SEQ ID NO: 3866 - DNA, 10 bp, synthetic construct
  misc_feature 1..10: note = Description of Artificial Sequence: Synthetic Antisense oligonucleotide
  misc_feature 1..10: note = Original Sequence: tcuguccaag
  modified_base 1: mod_base = OTHER; note = bicyclic nucleic acid (BNA)
  modified_base 2: mod_base = OTHER; note = 5-methyl
  modified_base 6..7: mod_base = OTHER; note = 5-methyl
  source 1..10: mol_type = other DNA
  modified_base 3: mod_base = OTHER; note = Uracil
  modified_base 5: mod_base = OTHER; note = Uracil
tctgtccaag

SEQ ID NO: 3867-3868 - skipped (2 entries)

SEQ ID NO: 3869 - RNA, 17 nt, synthetic construct
  misc_feature 1..17: note = Description of Artificial Sequence: Synthetic Antisense oligonucleotide
  modified_base 1: mod_base = OTHER; note = 5-methyl
  modified_base 5..6: mod_base = OTHER; note = 5-methyl
  modified_base 10..12: mod_base = OTHER; note = 5-methyl
  modified_base 1: mod_base = OTHER; note = bicyclic nucleic acid (BNA)
  source 1..17: mol_type = other RNA
ctgtccaagcccggttg

SEQ ID NO: 3870 - RNA, 16 nt, synthetic construct
  misc_feature 1..16: note = Description of Artificial Sequence: Synthetic Antisense oligonucleotide
  modified_base 1: mod_base = OTHER; note = 5-methyl
  modified_base 5..6: mod_base = OTHER; note = 5-methyl
  modified_base 10..12: mod_base = OTHER; note = 5-methyl
  modified_base 1: mod_base = OTHER; note = bicyclic nucleic acid (BNA)
  source 1..16: mol_type = other RNA
ctgtccaagcccggtt

SEQ ID NO: 3871 - RNA, 15 nt, synthetic construct
  misc_feature 1..15: note = Description of Artificial Sequence: Synthetic Antisense oligonucleotide
  modified_base 1: mod_base = OTHER; note = 5-methyl
  modified_base 5..6: mod_base = OTHER; note = 5-methyl
  modified_base 10..12: mod_base = OTHER; note = 5-methyl
  modified_base 1: mod_base = OTHER; note = bicyclic nucleic acid (BNA)
  source 1..15: mol_type = other RNA
ctgtccaagcccggt

SEQ ID NO: 3872 - RNA, 14 nt, synthetic construct
  misc_feature 1..14: note = Description of Artificial Sequence: Synthetic Antisense oligonucleotide
  modified_base 1: mod_base = OTHER; note = 5-methyl
  modified_base 5..6: mod_base = OTHER; note = 5-methyl
  modified_base 10..12: mod_base = OTHER; note = 5-methyl
  modified_base 1: mod_base = OTHER; note = bicyclic nucleic acid (BNA)
  source 1..14: mol_type = other RNA
ctgtccaagcccgg

SEQ ID NO: 3873 - RNA, 13 nt, synthetic construct
  misc_feature 1..13: note = Description of Artificial Sequence: Synthetic Antisense oligonucleotide
  modified_base 1: mod_base = OTHER; note = 5-methyl
  modified_base 5..6: mod_base = OTHER; note = 5-methyl
  modified_base 10..12: mod_base = OTHER; note = 5-methyl
  modified_base 1: mod_base = OTHER; note = bicyclic nucleic acid (BNA)
  source 1..13: mol_type = other RNA
ctgtccaagcccg

SEQ ID NO: 3874 - RNA, 12 nt, synthetic construct
  misc_feature 1..12: note = Description of Artificial Sequence: Synthetic Antisense oligonucleotide
  modified_base 1: mod_base = OTHER; note = 5-methyl
  modified_base 5..6: mod_base = OTHER; note = 5-methyl
  modified_base 10..12: mod_base = OTHER; note = 5-methyl
  modified_base 1: mod_base = OTHER; note = bicyclic nucleic acid (BNA)
  source 1..12: mol_type = other RNA
ctgtccaagccc

SEQ ID NO: 3875 - RNA, 11 nt, synthetic construct
  misc_feature 1..11: note = Description of Artificial Sequence: Synthetic Antisense oligonucleotide
  modified_base 1: mod_base = OTHER; note = 5-methyl
  modified_base 5..6: mod_base = OTHER; note = 5-methyl
  modified_base 10..11: mod_base = OTHER; note = 5-methyl
  modified_base 1: mod_base = OTHER; note = bicyclic nucleic acid (BNA)
  source 1..11: mol_type = other RNA
ctgtccaagcc

SEQ ID NO: 3876 - RNA, 10 nt, synthetic construct
  misc_feature 1..10: note = Description of Artificial Sequence: Synthetic Antisense oligonucleotide
  modified_base 1: mod_base = OTHER; note = 5-methyl
  modified_base 5..6: mod_base = OTHER; note = 5-methyl
  modified_base 10: mod_base = OTHER; note = 5-methyl
  modified_base 1: mod_base = OTHER; note = bicyclic nucleic acid (BNA)
  source 1..10: mol_type = other RNA
ctgtccaagc

SEQ ID NO: 3877-3878 - skipped (2 entries)

SEQ ID NO: 3879 - RNA, 20 nt, synthetic construct
  misc_feature 1..20: note = Description of Artificial Sequence: Synthetic Antisense oligonucleotide
  modified_base 1: mod_base = OTHER; note = bicyclic nucleic acid (BNA)
  modified_base 4: mod_base = OTHER; note = 5-methyl
  modified_base 8..9: mod_base = OTHER; note = 5-methyl
  modified_base 13..15: mod_base = OTHER; note = 5-methyl
  source 1..20: mol_type = other RNA
gttctgtccaagcccggttg

SEQ ID NO: 3880 - RNA, 19 nt, synthetic construct
  misc_feature 1..19: note = Description of Artificial Sequence: Synthetic Antisense oligonucleotide
  modified_base 1: mod_base = OTHER; note = bicyclic nucleic acid (BNA)
  modified_base 4: mod_base = OTHER; note = 5-methyl
  modified_base 8..9: mod_base = OTHER; note = 5-methyl
  modified_base 13..15: mod_base = OTHER; note = 5-methyl
  source 1..19: mol_type = other RNA
gttctgtccaagcccggtt

SEQ ID NO: 3881 - RNA, 18 nt, synthetic construct
  misc_feature 1..18: note = Description of Artificial Sequence: Synthetic Antisense oligonucleotide
  modified_base 1: mod_base = OTHER; note = bicyclic nucleic acid (BNA)
  modified_base 4: mod_base = OTHER; note = 5-methyl
  modified_base 8..9: mod_base = OTHER; note = 5-methyl
  modified_base 13..15: mod_base = OTHER; note = 5-methyl
  source 1..18: mol_type = other RNA
gttctgtccaagcccggt

SEQ ID NO: 3882 - RNA, 17 nt, synthetic construct
  misc_feature 1..17: note = Description of Artificial Sequence: Synthetic Antisense oligonucleotide
  modified_base 1: mod_base = OTHER; note = bicyclic nucleic acid (BNA)
  modified_base 4: mod_base = OTHER; note = 5-methyl
  modified_base 8..9: mod_base = OTHER; note = 5-methyl
  modified_base 13..15: mod_base = OTHER; note = 5-methyl
  source 1..17: mol_type = other RNA
gttctgtccaagcccgg

SEQ ID NO: 3883 - RNA, 16 nt, synthetic construct
  misc_feature 1..16: note = Description of Artificial Sequence: Synthetic Antisense oligonucleotide
  modified_base 1: mod_base = OTHER; note = bicyclic nucleic acid (BNA)
  modified_base 4: mod_base = OTHER; note = 5-methyl
  modified_base 8..9: mod_base = OTHER; note = 5-methyl
  modified_base 13..15: mod_base = OTHER; note = 5-methyl
  source 1..16: mol_type = other RNA
gttctgtccaagcccg

SEQ ID NO: 3884 - RNA, 15 nt, synthetic construct
  misc_feature 1..15: note = Description of Artificial Sequence: Synthetic Antisense oligonucleotide
  modified_base 1: mod_base = OTHER; note = bicyclic nucleic acid (BNA)
  modified_base 4: mod_base = OTHER; note = 5-methyl
  modified_base 8..9: mod_base = OTHER; note = 5-methyl
  modified_base 13..15: mod_base = OTHER; note = 5-methyl
  source 1..15: mol_type = other RNA
gttctgtccaagccc

SEQ ID NO: 3885 - RNA, 14 nt, synthetic construct
  misc_feature 1..14: note = Description of Artificial Sequence: Synthetic Antisense oligonucleotide
  modified_base 1: mod_base = OTHER; note = bicyclic nucleic acid (BNA)
  modified_base 4: mod_base = OTHER; note = 5-methyl
  modified_base 8..9: mod_base = OTHER; note = 5-methyl
  modified_base 13..14: mod_base = OTHER; note = 5-methyl
  source 1..14: mol_type = other RNA
gttctgtccaagcc

SEQ ID NO: 3886 - RNA, 13 nt, synthetic construct
  misc_feature 1..13: note = Description of Artificial Sequence: Synthetic Antisense oligonucleotide
  modified_base 1: mod_base = OTHER; note = bicyclic nucleic acid (BNA)
  modified_base 4: mod_base = OTHER; note = 5-methyl
  modified_base 8..9: mod_base = OTHER; note = 5-methyl
  modified_base 13: mod_base = OTHER; note = 5-methyl
  source 1..13: mol_type = other RNA
gttctgtccaagc

SEQ ID NO: 3887 - RNA, 12 nt, synthetic construct
  misc_feature 1..12: note = Description of Artificial Sequence: Synthetic Antisense oligonucleotide
  modified_base 1: mod_base = OTHER; note = bicyclic nucleic acid (BNA)
  modified_base 4: mod_base = OTHER; note = 5-methyl
  modified_base 8..9: mod_base = OTHER; note = 5-methyl
  source 1..12: mol_type = other RNA
gttctgtccaag

SEQ ID NO: 3888 - RNA, 11 nt, synthetic construct
  misc_feature 1..11: note = Description of Artificial Sequence: Synthetic Antisense oligonucleotide
  modified_base 1: mod_base = OTHER; note = bicyclic nucleic acid (BNA)
  modified_base 4: mod_base = OTHER; note = 5-methyl
  modified_base 8..9: mod_base = OTHER; note = 5-methyl
  source 1..11: mol_type = other RNA
gttctgtccaa

SEQ ID NO: 3889 - RNA, 10 nt, synthetic construct
  misc_feature 1..10: note = Description of Artificial Sequence: Synthetic Antisense oligonucleotide
  modified_base 1: mod_base = OTHER; note = bicyclic nucleic acid (BNA)
  modified_base 4: mod_base = OTHER; note = 5-methyl
  modified_base 8..9: mod_base = OTHER; note = 5-methyl
  source 1..10: mol_type = other RNA
gttctgtcca

SEQ ID NO: 3890-3891 - skipped (2 entries)

SEQ ID NO: 3892 - RNA, 20 nt, synthetic construct
  misc_feature 1..20: note = Description of Artificial Sequence: Synthetic Antisense oligonucleotide
  modified_base 1: mod_base = OTHER; note = bicyclic nucleic acid (BNA)
  modified_base 5: mod_base = OTHER; note = 5-methyl
  modified_base 9..10: mod_base = OTHER; note = 5-methyl
  modified_base 14..16: mod_base = OTHER; note = 5-methyl
  source 1..20: mol_type = other RNA
agttctgtccaagcccggtt

SEQ ID NO: 3893 - RNA, 19 nt, synthetic construct
  misc_feature 1..19: note = Description of Artificial Sequence: Synthetic Antisense oligonucleotide
  modified_base 1: mod_base = OTHER; note = bicyclic nucleic acid (BNA)
  modified_base 5: mod_base = OTHER; note = 5-methyl
  modified_base 9..10: mod_base = OTHER; note = 5-methyl
  modified_base 14..16: mod_base = OTHER; note = 5-methyl
  source 1..19: mol_type = other RNA
agttctgtccaagcccggt

SEQ ID NO: 3894 - RNA, 18 nt, synthetic construct
  misc_feature 1..18: note = Description of Artificial Sequence: Synthetic Antisense oligonucleotide
  modified_base 1: mod_base = OTHER; note = bicyclic nucleic acid (BNA)
  modified_base 5: mod_base = OTHER; note = 5-methyl
  modified_base 9..10: mod_base = OTHER; note = 5-methyl
  modified_base 14..16: mod_base = OTHER; note = 5-methyl
  source 1..18: mol_type = other RNA
agttctgtccaagcccgg

SEQ ID NO: 3895 - RNA, 17 nt, synthetic construct
  misc_feature 1..17: note = Description of Artificial Sequence: Synthetic Antisense oligonucleotide
  modified_base 1: mod_base = OTHER; note = bicyclic nucleic acid (BNA)
  modified_base 5: mod_base = OTHER; note = 5-methyl
  modified_base 9..10: mod_base = OTHER; note = 5-methyl
  modified_base 14..16: mod_base = OTHER; note = 5-methyl
  source 1..17: mol_type = other RNA
agttctgtccaagcccg

SEQ ID NO: 3896 - RNA, 16 nt, synthetic construct
  misc_feature 1..16: note = Description of Artificial Sequence: Synthetic Antisense oligonucleotide
  modified_base 1: mod_base = OTHER; note = bicyclic nucleic acid (BNA)
  modified_base 5: mod_base = OTHER; note = 5-methyl
  modified_base 9..10: mod_base = OTHER; note = 5-methyl
  modified_base 14..16: mod_base = OTHER; note = 5-methyl
  source 1..16: mol_type = other RNA
agttctgtccaagccc

SEQ ID NO: 3897 - RNA, 15 nt, synthetic construct
  misc_feature 1..15: note = Description of Artificial Sequence: Synthetic Antisense oligonucleotide
  modified_base 1: mod_base = OTHER; note = bicyclic nucleic acid (BNA)
  modified_base 5: mod_base = OTHER; note = 5-methyl
  modified_base 9..10: mod_base = OTHER; note = 5-methyl
  modified_base 14..15: mod_base = OTHER; note = 5-methyl
  source 1..15: mol_type = other RNA
agttctgtccaagcc

SEQ ID NO: 3898 - RNA, 14 nt, synthetic construct
  misc_feature 1..14: note = Description of Artificial Sequence: Synthetic Antisense oligonucleotide
  modified_base 1: mod_base = OTHER; note = bicyclic nucleic acid (BNA)
  modified_base 5: mod_base = OTHER; note = 5-methyl
  modified_base 9..10: mod_base = OTHER; note = 5-methyl
  modified_base 14: mod_base = OTHER; note = 5-methyl
  source 1..14: mol_type = other RNA
agttctgtccaagc

SEQ ID NO: 3899 - RNA, 13 nt, synthetic construct
  misc_feature 1..13: note = Description of Artificial Sequence: Synthetic Antisense oligonucleotide
  modified_base 1: mod_base = OTHER; note = bicyclic nucleic acid (BNA)
  modified_base 5: mod_base = OTHER; note = 5-methyl
  modified_base 9..10: mod_base = OTHER; note = 5-methyl
  source 1..13: mol_type = other RNA
agttctgtccaag

SEQ ID NO: 3900 - RNA, 12 nt, synthetic construct
  misc_feature 1..12: note = Description of Artificial Sequence: Synthetic Antisense oligonucleotide
  modified_base 1: mod_base = OTHER; note = bicyclic nucleic acid (BNA)
  modified_base 5: mod_base = OTHER; note = 5-methyl
  modified_base 9..10: mod_base = OTHER; note = 5-methyl
  source 1..12: mol_type = other RNA
agttctgtccaa

SEQ ID NO: 3901 - RNA, 11 nt, synthetic construct
  misc_feature 1..11: note = Description of Artificial Sequence: Synthetic Antisense oligonucleotide
  modified_base 1: mod_base = OTHER; note = bicyclic nucleic acid (BNA)
  modified_base 5: mod_base = OTHER; note = 5-methyl
  modified_base 9..10: mod_base = OTHER; note = 5-methyl
  source 1..11: mol_type = other RNA
agttctgtcca

SEQ ID NO: 3902 - RNA, 10 nt, synthetic construct
  misc_feature 1..10: note = Description of Artificial Sequence: Synthetic Antisense oligonucleotide
  modified_base 1: mod_base = OTHER; note = bicyclic nucleic acid (BNA)
  modified_base 5: mod_base = OTHER; note = 5-methyl
  modified_base 9..10: mod_base = OTHER; note = 5-methyl
  source 1..10: mol_type = other RNA
agttctgtcc

SEQ ID NO: 3903-3904 - skipped (2 entries)

SEQ ID NO: 3905 - RNA, 20 nt, synthetic construct
  misc_feature 1..20: note = Description of Artificial Sequence: Synthetic Antisense oligonucleotide
  modified_base 1: mod_base = OTHER; note = bicyclic nucleic acid (BNA)
  modified_base 6: mod_base = OTHER; note = 5-methyl
  modified_base 10..11: mod_base = OTHER; note = 5-methyl
  modified_base 15..17: mod_base = OTHER; note = 5-methyl
  source 1..20: mol_type = other RNA
aagttctgtccaagcccggt

SEQ ID NO: 3906 - RNA, 19 nt, synthetic construct
  misc_feature 1..19: note = Description of Artificial Sequence: Synthetic Antisense oligonucleotide
  modified_base 1: mod_base = OTHER; note = bicyclic nucleic acid (BNA)
  modified_base 6: mod_base = OTHER; note = 5-methyl
  modified_base 10..11: mod_base = OTHER; note = 5-methyl
  modified_base 15..17: mod_base = OTHER; note = 5-methyl
  source 1..19: mol_type = other RNA
aagttctgtccaagcccgg

SEQ ID NO: 3907 - RNA, 18 nt, synthetic construct
  misc_feature 1..18: note = Description of Artificial Sequence: Synthetic Antisense oligonucleotide
  modified_base 1: mod_base = OTHER; note = bicyclic nucleic acid (BNA)
  modified_base 6: mod_base = OTHER; note = 5-methyl
  modified_base 10..11: mod_base = OTHER; note = 5-methyl
  modified_base 15..17: mod_base = OTHER; note = 5-methyl
  source 1..18: mol_type = other RNA
aagttctgtccaagcccg

SEQ ID NO: 3908 - RNA, 17 nt, synthetic construct
  misc_feature 1..17: note = Description of Artificial Sequence: Synthetic Antisense oligonucleotide
  modified_base 1: mod_base = OTHER; note = bicyclic nucleic acid (BNA)
  modified_base 6: mod_base = OTHER; note = 5-methyl
  modified_base 10..11: mod_base = OTHER; note = 5-methyl
  modified_base 15..17: mod_base = OTHER; note = 5-methyl
  source 1..17: mol_type = other RNA
aagttctgtccaagccc

SEQ ID NO: 3909 - RNA, 16 nt, synthetic construct
  misc_feature 1..16: note = Description of Artificial Sequence: Synthetic Antisense oligonucleotide
  modified_base 1: mod_base = OTHER; note = bicyclic nucleic acid (BNA)
  modified_base 6: mod_base = OTHER; note = 5-methyl
  modified_base 10..11: mod_base = OTHER; note = 5-methyl
  modified_base 15..16: mod_base = OTHER; note = 5-methyl
  source 1..16: mol_type = other RNA
aagttctgtccaagcc

SEQ ID NO: 3910 - RNA, 15 nt, synthetic construct
  misc_feature 1..15: note = Description of Artificial Sequence: Synthetic Antisense oligonucleotide
  modified_base 1: mod_base = OTHER; note = bicyclic nucleic acid (BNA)
  modified_base 6: mod_base = OTHER; note = 5-methyl
  modified_base 10..11: mod_base = OTHER; note = 5-methyl
  modified_base 15: mod_base = OTHER; note = 5-methyl
  source 1..15: mol_type = other RNA
aagttctgtccaagc

SEQ ID NO: 3911 - RNA, 14 nt, synthetic construct
  misc_feature 1..14: note = Description of Artificial Sequence: Synthetic Antisense oligonucleotide
  modified_base 1: mod_base = OTHER; note = bicyclic nucleic acid (BNA)
  modified_base 6: mod_base = OTHER; note = 5-methyl
  modified_base 10..11: mod_base = OTHER; note = 5-methyl
  source 1..14: mol_type = other RNA
aagttctgtccaag

SEQ ID NO: 3912 - RNA, 13 nt, synthetic construct
  misc_feature 1..13: note = Description of Artificial Sequence: Synthetic Antisense oligonucleotide
  modified_base 1: mod_base = OTHER; note = bicyclic nucleic acid (BNA)
  modified_base 6: mod_base = OTHER; note = 5-methyl
  modified_base 10..11: mod_base = OTHER; note = 5-methyl
  source 1..13: mol_type = other RNA
aagttctgtccaa

SEQ ID NO: 3913 - RNA, 12 nt, synthetic construct
  misc_feature 1..12: note = Description of Artificial Sequence: Synthetic Antisense oligonucleotide
  modified_base 1: mod_base = OTHER; note = bicyclic nucleic acid (BNA)
  modified_base 6: mod_base = OTHER; note = 5-methyl
  modified_base 10..11: mod_base = OTHER; note = 5-methyl
  source 1..12: mol_type = other RNA
aagttctgtcca

SEQ ID NO: 3914 - RNA, 11 nt, synthetic construct
  misc_feature 1..11: note = Description of Artificial Sequence: Synthetic Antisense oligonucleotide
  modified_base 1: mod_base = OTHER; note = bicyclic nucleic acid (BNA)
  modified_base 6: mod_base = OTHER; note = 5-methyl
  modified_base 10..11: mod_base = OTHER; note = 5-methyl
  source 1..11: mol_type = other RNA
aagttctgtcc

SEQ ID NO: 3915 - RNA, 10 nt, synthetic construct
  misc_feature 1..10: note = Description of Artificial Sequence: Synthetic Antisense oligonucleotide
  modified_base 1: mod_base = OTHER; note = bicyclic nucleic acid (BNA)
  modified_base 6: mod_base = OTHER; note = 5-methyl
  modified_base 10: mod_base = OTHER; note = 5-methyl
  source 1..10: mol_type = other RNA
aagttctgtc

SEQ ID NO: 3916-3917 - skipped (2 entries)

SEQ ID NO: 3918 - DNA, 20 bp, synthetic construct
  misc_feature 1..20: note = Description of Artificial Sequence: Synthetic Antisense oligonucleotide
  misc_feature 1..20: note = Original Sequence: taaguucuguccaagcccgg
  modified_base 1: mod_base = OTHER; note = bicyclic nucleic acid (BNA)
  modified_base 7: mod_base = OTHER; note = 5-methyl
  modified_base 11..12: mod_base = OTHER; note = 5-methyl
  modified_base 16..18: mod_base = OTHER; note = 5-methyl
  source 1..20: mol_type = other DNA
  modified_base 5: mod_base = OTHER; note = Uracil
  modified_base 6: mod_base = OTHER; note = Uracil
  modified_base 8: mod_base = OTHER; note = Uracil
  modified_base 10: mod_base = OTHER; note = Uracil
taagttctgtccaagcccgg

SEQ ID NO: 3919 - DNA, 19 bp, synthetic construct
  misc_feature 1..19: note = Description of Artificial Sequence: Synthetic Antisense oligonucleotide
  misc_feature 1..19: note = Original Sequence: taaguucuguccaagcccg
  modified_base 1: mod_base = OTHER; note = bicyclic nucleic acid (BNA)
  modified_base 7: mod_base = OTHER; note = 5-methyl
  modified_base 11..12: mod_base = OTHER; note = 5-methyl
  modified_base 16..18: mod_base = OTHER; note = 5-methyl
  source 1..19: mol_type = other DNA
  modified_base 5: mod_base = OTHER; note = Uracil
  modified_base 6: mod_base = OTHER; note = Uracil
  modified_base 8: mod_base = OTHER; note = Uracil
  modified_base 10: mod_base = OTHER; note = Uracil
taagttctgtccaagcccg

SEQ ID NO: 3920 - DNA, 18 bp, synthetic construct
  misc_feature 1..18: note = Description of Artificial Sequence: Synthetic Antisense oligonucleotide
  misc_feature 1..18: note = Original Sequence: taaguucuguccaagccc
  modified_base 1: mod_base = OTHER; note = bicyclic nucleic acid (BNA)
  modified_base 7: mod_base = OTHER; note = 5-methyl
  modified_base 11..12: mod_base = OTHER; note = 5-methyl
  modified_base 16..18: mod_base = OTHER; note = 5-methyl
  source 1..18: mol_type = other DNA
  modified_base 5: mod_base = OTHER; note = Uracil
  modified_base 6: mod_base = OTHER; note = Uracil
  modified_base 8: mod_base = OTHER; note = Uracil
  modified_base 10: mod_base = OTHER; note = Uracil
taagttctgtccaagccc

SEQ ID NO: 3921 - DNA, 17 bp, synthetic construct
  misc_feature 1..17: note = Description of Artificial Sequence: Synthetic Antisense oligonucleotide
  misc_feature 1..17: note = Original Sequence: taaguucuguccaagcc
  modified_base 1: mod_base = OTHER; note = bicyclic nucleic acid (BNA)
  modified_base 7: mod_base = OTHER; note = 5-methyl
  modified_base 11..12: mod_base = OTHER; note = 5-methyl
  modified_base 16..17: mod_base = OTHER; note = 5-methyl
  source 1..17: mol_type = other DNA
  modified_base 5: mod_base = OTHER; note = Uracil
  modified_base 6: mod_base = OTHER; note = Uracil
  modified_base 8: mod_base = OTHER; note = Uracil
  modified_base 10: mod_base = OTHER; note = Uracil
taagttctgtccaagcc

SEQ ID NO: 3922 - DNA, 16 bp, synthetic construct
  misc_feature 1..16: note = Description of Artificial Sequence: Synthetic Antisense oligonucleotide
  misc_feature 1..16: note = Original Sequence: taaguucuguccaagc
  modified_base 1: mod_base = OTHER; note = bicyclic nucleic acid (BNA)
  modified_base 7: mod_base = OTHER; note = 5-methyl
  modified_base 11..12: mod_base = OTHER; note = 5-methyl
  modified_base 16: mod_base = OTHER; note = 5-methyl
  source 1..16: mol_type = other DNA
  modified_base 5: mod_base = OTHER; note = Uracil
  modified_base 6: mod_base = OTHER; note = Uracil
  modified_base 8: mod_base = OTHER; note = Uracil
  modified_base 10: mod_base = OTHER; note = Uracil
taagttctgtccaagc

SEQ ID NO: 3923 - DNA, 14 bp, synthetic construct
  misc_feature 1..14: note = Description of Artificial Sequence: Synthetic Antisense oligonucleotide
  misc_feature 1..14: note = Original Sequence: taaguucuguccaa
  modified_base 1: mod_base = OTHER; note = bicyclic nucleic acid (BNA)
  modified_base 7: mod_base = OTHER; note = 5-methyl
  modified_base 11..12: mod_base = OTHER; note = 5-methyl
  source 1..14: mol_type = other DNA
  modified_base 5: mod_base = OTHER; note = Uracil
  modified_base 6: mod_base = OTHER; note = Uracil
  modified_base 8: mod_base = OTHER; note = Uracil
  modified_base 10: mod_base = OTHER; note = Uracil
taagttctgtccaa

SEQ ID NO: 3924 - DNA, 13 bp, synthetic construct
  misc_feature 1..13: note = Description of Artificial Sequence: Synthetic Antisense oligonucleotide
  misc_feature 1..13: note = Original Sequence: taaguucugucca
  modified_base 1: mod_base = OTHER; note = bicyclic nucleic acid (BNA)
  modified_base 7: mod_base = OTHER; note = 5-methyl
  modified_base 11..12: mod_base = OTHER; note = 5-methyl
  source 1..13: mol_type = other DNA
  modified_base 5: mod_base = OTHER; note = Uracil
  modified_base 6: mod_base = OTHER; note = Uracil
  modified_base 8: mod_base = OTHER; note = Uracil
  modified_base 10: mod_base = OTHER; note = Uracil
taagttctgtcca

SEQ ID NO: 3925 - DNA, 12 bp, synthetic construct
  misc_feature 1..12: note = Description of Artificial Sequence: Synthetic Antisense oligonucleotide
  misc_feature 1..12: note = Original Sequence: taaguucugucc
  modified_base 1: mod_base = OTHER; note = bicyclic nucleic acid (BNA)
  modified_base 7: mod_base = OTHER; note = 5-methyl
  modified_base 11..12: mod_base = OTHER; note = 5-methyl
  source 1..12: mol_type = other DNA
  modified_base 5: mod_base = OTHER; note = Uracil
  modified_base 6: mod_base = OTHER; note = Uracil
  modified_base 8: mod_base = OTHER; note = Uracil
  modified_base 10: mod_base = OTHER; note = Uracil
taagttctgtcc

SEQ ID NO: 3926 - DNA, 11 bp, synthetic construct
  misc_feature 1..11: note = Description of Artificial Sequence: Synthetic Antisense oligonucleotide
  misc_feature 1..11: note = Original Sequence: taaguucuguc
  modified_base 1: mod_base = OTHER; note = bicyclic nucleic acid (BNA)
  modified_base 7: mod_base = OTHER; note = 5-methyl
  modified_base 11: mod_base = OTHER; note = 5-methyl
  source 1..11: mol_type = other DNA
  modified_base 5: mod_base = OTHER; note = Uracil
  modified_base 6: mod_base = OTHER; note = Uracil
  modified_base 8: mod_base = OTHER; note = Uracil
  modified_base 10: mod_base = OTHER; note = Uracil
taagttctgtc

SEQ ID NO: 3927 - DNA, 10 bp, synthetic construct
  misc_feature 1..10: note = Description of Artificial Sequence: Synthetic Antisense oligonucleotide
  misc_feature 1..10: note = Original Sequence: taaguucugu
  modified_base 1: mod_base = OTHER; note = bicyclic nucleic acid (BNA)
  modified_base 7: mod_base = OTHER; note = 5-methyl
  source 1..10: mol_type = other DNA
  modified_base 5: mod_base = OTHER; note = Uracil
  modified_base 6: mod_base = OTHER; note = Uracil
  modified_base 8: mod_base = OTHER; note = Uracil
  modified_base 10: mod_base = OTHER; note = Uracil
taagttctgt

SEQ ID NO: 3928-3929 - skipped (2 entries)

SEQ ID NO: 3930 - RNA, 20 nt, synthetic construct
  misc_feature 1..20: note = Description of Artificial Sequence: Synthetic Antisense oligonucleotide
  modified_base 1: mod_base = OTHER; note = bicyclic nucleic acid (BNA)
  modified_base 8: mod_base = OTHER; note = 5-methyl
  modified_base 12..13: mod_base = OTHER; note = 5-methyl
  modified_base 17..19: mod_base = OTHER; note = 5-methyl
  source 1..20: mol_type = other RNA
gtaagttctgtccaagcccg

SEQ ID NO: 3931 - RNA, 19 nt, synthetic construct
  misc_feature 1..19: note = Description of Artificial Sequence: Synthetic Antisense oligonucleotide
  modified_base 1: mod_base = OTHER; note = bicyclic nucleic acid (BNA)
  modified_base 8: mod_base = OTHER; note = 5-methyl
  modified_base 12..13: mod_base = OTHER; note = 5-methyl
  modified_base 17..19: mod_base = OTHER; note = 5-methyl
  source 1..19: mol_type = other RNA
gtaagttctgtccaagccc

SEQ ID NO: 3932 - RNA, 17 nt, synthetic construct
  misc_feature 1..17: note = Description of Artificial Sequence: Synthetic Antisense oligonucleotide
  modified_base 1: mod_base = OTHER; note = bicyclic nucleic acid (BNA)
  modified_base 8: mod_base = OTHER; note = 5-methyl
  modified_base 12..13: mod_base = OTHER; note = 5-methyl
  modified_base 17: mod_base = OTHER; note = 5-methyl
  source 1..17: mol_type = other RNA
gtaagttctgtccaagc

SEQ ID NO: 3933 - RNA, 16 nt, synthetic construct
  misc_feature 1..16: note = Description of Artificial Sequence: Synthetic Antisense oligonucleotide
  modified_base 1: mod_base = OTHER; note = bicyclic nucleic acid (BNA)
  modified_base 8: mod_base = OTHER; note = 5-methyl
  modified_base 12..13: mod_base = OTHER; note = 5-methyl
  source 1..16: mol_type = other RNA
gtaagttctgtccaag

SEQ ID NO: 3934 - RNA, 15 nt, synthetic construct
  misc_feature 1..15: note = Description of Artificial Sequence: Synthetic Antisense oligonucleotide
  modified_base 1: mod_base = OTHER; note = bicyclic nucleic acid (BNA)
  modified_base 8: mod_base = OTHER; note = 5-methyl
  modified_base 12..13: mod_base = OTHER; note = 5-methyl
  source 1..15: mol_type = other RNA
gtaagttctgtccaa

SEQ ID NO: 3935 - RNA, 14 nt, synthetic construct
  misc_feature 1..14: note = Description of Artificial Sequence: Synthetic Antisense oligonucleotide
  modified_base 1: mod_base = OTHER; note = bicyclic nucleic acid (BNA)
  modified_base 8: mod_base = OTHER; note = 5-methyl
  modified_base 12..13: mod_base = OTHER; note = 5-methyl
  source 1..14: mol_type = other RNA
gtaagttctgtcca

SEQ ID NO: 3936 - RNA, 13 nt, synthetic construct
  misc_feature 1..13: note = Description of Artificial Sequence: Synthetic Antisense oligonucleotide
  modified_base 1: mod_base = OTHER; note = bicyclic nucleic acid (BNA)
  modified_base 8: mod_base = OTHER; note = 5-methyl
  modified_base 12..13: mod_base = OTHER; note = 5-methyl
  source 1..13: mol_type = other RNA
gtaagttctgtcc

SEQ ID NO: 3937 - RNA, 12 nt, synthetic construct
  misc_feature 1..12: note = Description of Artificial Sequence: Synthetic Antisense oligonucleotide
  modified_base 1: mod_base = OTHER; note = bicyclic nucleic acid (BNA)
  modified_base 8: mod_base = OTHER; note = 5-methyl
  modified_base 12: mod_base = OTHER; note = 5-methyl
  source 1..12: mol_type = other RNA
gtaagttctgtc

SEQ ID NO: 3938 - RNA, 11 nt, synthetic construct
  misc_feature 1..11: note = Description of Artificial Sequence: Synthetic Antisense oligonucleotide
  modified_base 1: mod_base = OTHER; note = bicyclic nucleic acid (BNA)
  modified_base 8: mod_base = OTHER; note = 5-methyl
  source 1..11: mol_type = other RNA
gtaagttctgt

SEQ ID NO: 3939 - RNA, 10 nt, synthetic construct
  misc_feature 1..10: note = Description of Artificial Sequence: Synthetic Antisense oligonucleotide
  modified_base 1: mod_base = OTHER; note = bicyclic nucleic acid (BNA)
  modified_base 8: mod_base = OTHER; note = 5-methyl
  source 1..10: mol_type = other RNA
gtaagttctg

SEQ ID NO: 3940-3941 - skipped (2 entries)

SEQ ID NO: 3942 - RNA, 20 nt, synthetic construct
  misc_feature 1..20: note = Description of Artificial Sequence: Synthetic Antisense oligonucleotide
  modified_base 1: mod_base = OTHER; note = bicyclic nucleic acid (BNA)
  modified_base 9: mod_base = OTHER; note = 5-methyl
  modified_base 13..14: mod_base = OTHER; note = 5-methyl
  modified_base 18..20: mod_base = OTHER; note = 5-methyl
  source 1..20: mol_type = other RNA
ggtaagttctgtccaagccc

SEQ ID NO: 3943 - RNA, 19 nt, synthetic construct
  misc_feature 1..19: note = Description of Artificial Sequence: Synthetic Antisense oligonucleotide
  modified_base 1: mod_base = OTHER; note = bicyclic nucleic acid (BNA)
  modified_base 9: mod_base = OTHER; note = 5-methyl
  modified_base 13..14: mod_base = OTHER; note = 5-methyl
  modified_base 18..19: mod_base = OTHER; note = 5-methyl
  source 1..19: mol_type = other RNA
ggtaagttctgtccaagcc

SEQ ID NO: 3944 - RNA, 17 nt, synthetic construct
  misc_feature 1..17: note = Description of Artificial Sequence: Synthetic Antisense oligonucleotide
  modified_base 1: mod_base = OTHER; note = bicyclic nucleic acid (BNA)
  modified_base 9: mod_base = OTHER; note = 5-methyl
  modified_base 13..14: mod_base = OTHER; note = 5-methyl
  source 1..17: mol_type = other RNA
ggtaagttctgtccaag

SEQ ID NO: 3945 - RNA, 16 nt, synthetic construct
  misc_feature 1..16: note = Description of Artificial Sequence: Synthetic Antisense oligonucleotide
  modified_base 1: mod_base = OTHER; note = bicyclic nucleic acid (BNA)
  modified_base 9: mod_base = OTHER; note = 5-methyl
  modified_base 13..14: mod_base = OTHER; note = 5-methyl
  source 1..16: mol_type = other RNA
ggtaagttctgtccaa

SEQ ID NO: 3946 - RNA, 15 nt, synthetic construct
  misc_feature 1..15: note = Description of Artificial Sequence: Synthetic Antisense oligonucleotide
  modified_base 1: mod_base = OTHER; note = bicyclic nucleic acid (BNA)
  modified_base 9: mod_base = OTHER; note = 5-methyl
  modified_base 13..14: mod_base = OTHER; note = 5-methyl
  source 1..15: mol_type = other RNA
ggtaagttctgtcca

SEQ ID NO: 3947 - RNA, 14 nt, synthetic construct
  misc_feature 1..14: note = Description of Artificial Sequence: Synthetic Antisense oligonucleotide
  modified_base 1: mod_base = OTHER; note = bicyclic nucleic acid (BNA)
  modified_base 9: mod_base = OTHER; note = 5-methyl
  modified_base 13..14: mod_base = OTHER; note = 5-methyl
  source 1..14: mol_type = other RNA
ggtaagttctgtcc

SEQ ID NO: 3948 - RNA, 13 nt, synthetic construct
  misc_feature 1..13: note = Description of Artificial Sequence: Synthetic Antisense oligonucleotide
  modified_base 1: mod_base = OTHER; note = bicyclic nucleic acid (BNA)
  modified_base 9: mod_base = OTHER; note = 5-methyl
  modified_base 13: mod_base = OTHER; note = 5-methyl
  source 1..13: mol_type = other RNA
ggtaagttctgtc

SEQ ID NO: 3949 - RNA, 12 nt, synthetic construct
  misc_feature 1..12: note = Description of Artificial Sequence: Synthetic Antisense oligonucleotide
  modified_base 1: mod_base = OTHER; note = bicyclic nucleic acid (BNA)
  modified_base 9: mod_base = OTHER; note = 5-methyl
  source 1..12: mol_type = other RNA
ggtaagttctgt

SEQ ID NO: 3950 - RNA, 11 nt, synthetic construct
  misc_feature 1..11: note = Description of Artificial Sequence: Synthetic Antisense oligonucleotide
  modified_base 1: mod_base = OTHER; note = bicyclic nucleic acid (BNA)
  modified_base 9: mod_base = OTHER; note = 5-methyl
  source 1..11: mol_type = other RNA
ggtaagttctg

SEQ ID NO: 3951 - RNA, 10 nt, synthetic construct
  misc_feature 1..10: note = Description of Artificial Sequence: Synthetic Antisense oligonucleotide
  modified_base 1: mod_base = OTHER; note = bicyclic nucleic acid (BNA)
  modified_base 9: mod_base = OTHER; note = 5-methyl
  source 1..10: mol_type = other RNA
ggtaagttct

SEQ ID NO: 3952 - skipped

SEQ ID NO: 3953 - RNA, 20 nt, synthetic construct
  misc_feature 1..20: note = Description of Artificial Sequence: Synthetic Antisense oligonucleotide
  modified_base 1: mod_base = OTHER; note = 5-methyl
  modified_base 10: mod_base = OTHER; note = 5-methyl
  modified_base 14..15: mod_base = OTHER; note = 5-methyl
  modified_base 19..20: mod_base = OTHER; note = 5-methyl
  modified_base 1: mod_base = OTHER; note = bicyclic nucleic acid (BNA)
  source 1..20: mol_type = other RNA
cggtaagttctgtccaagcc

SEQ ID NO: 3954 - RNA, 19 nt, synthetic construct
  misc_feature 1..19: note = Description of Artificial Sequence: Synthetic Antisense oligonucleotide
  modified_base 1: mod_base = OTHER; note = 5-methyl
  modified_base 10: mod_base = OTHER; note = 5-methyl
  modified_base 14..15: mod_base = OTHER; note = 5-methyl
  modified_base 19: mod_base = OTHER; note = 5-methyl
  modified_base 1: mod_base = OTHER; note = bicyclic nucleic acid (BNA)
  source 1..19: mol_type = other RNA
cggtaagttctgtccaagc

SEQ ID NO: 3955 - RNA, 18 nt, synthetic construct
  misc_feature 1..18: note = Description of Artificial Sequence: Synthetic Antisense oligonucleotide
  modified_base 1: mod_base = OTHER; note = 5-methyl
  modified_base 10: mod_base = OTHER; note = 5-methyl
  modified_base 14..15: mod_base = OTHER; note = 5-methyl
  modified_base 1: mod_base = OTHER; note = bicyclic nucleic acid (BNA)
  source 1..18: mol_type = other RNA
cggtaagttctgtccaag

SEQ ID NO: 3956 - RNA, 17 nt, synthetic construct
  misc_feature 1..17: note = Description of Artificial Sequence: Synthetic Antisense oligonucleotide
  modified_base 1: mod_base = OTHER; note = 5-methyl
  modified_base 10: mod_base = OTHER; note = 5-methyl
  modified_base 14..15: mod_base = OTHER; note = 5-methyl
  modified_base 1: mod_base = OTHER; note = bicyclic nucleic acid (BNA)
  source 1..17: mol_type = other RNA
cggtaagttctgtccaa

SEQ ID NO: 3957 - RNA, 16 nt, synthetic construct
  misc_feature 1..16: note = Description of Artificial Sequence: Synthetic Antisense oligonucleotide
  modified_base 1: mod_base = OTHER; note = 5-methyl
  modified_base 10: mod_base = OTHER; note = 5-methyl
  modified_base 14..15: mod_base = OTHER; note = 5-methyl
  modified_base 1: mod_base = OTHER; note = bicyclic nucleic acid (BNA)
  source 1..16: mol_type = other RNA
cggtaagttctgtcca

SEQ ID NO: 3958 - RNA, 15 nt, synthetic construct
  misc_feature 1..15: note = Description of Artificial Sequence: Synthetic Antisense oligonucleotide
  modified_base 1: mod_base = OTHER; note = 5-methyl
  modified_base 10: mod_base = OTHER; note = 5-methyl
  modified_base 14..15: mod_base = OTHER; note = 5-methyl
  modified_base 1: mod_base = OTHER; note = bicyclic nucleic acid (BNA)
  source 1..15: mol_type = other RNA
cggtaagttctgtcc

SEQ ID NO: 3959 - RNA, 14 nt, synthetic construct
  misc_feature 1..14: note = Description of Artificial Sequence: Synthetic Antisense oligonucleotide
  modified_base 1: mod_base = OTHER; note = 5-methyl
  modified_base 10: mod_base = OTHER; note = 5-methyl
  modified_base 14: mod_base = OTHER; note = 5-methyl
  modified_base 1: mod_base = OTHER; note = bicyclic nucleic acid (BNA)
  source 1..14: mol_type = other RNA
cggtaagttctgtc

SEQ ID NO: 3960 - RNA, 13 nt, synthetic construct
  misc_feature 1..13: note = Description of Artificial Sequence: Synthetic Antisense oligonucleotide
  modified_base 1: mod_base = OTHER; note = 5-methyl
  modified_base 10: mod_base = OTHER; note = 5-methyl
  modified_base 1: mod_base = OTHER; note = bicyclic nucleic acid (BNA)
  source 1..13: mol_type = other RNA
cggtaagttctgt

SEQ ID NO: 3961 - RNA, 12 nt, synthetic construct
  misc_feature 1..12: note = Description of Artificial Sequence: Synthetic Antisense oligonucleotide
  modified_base 1: mod_base = OTHER; note = 5-methyl
  modified_base 10: mod_base = OTHER; note = 5-methyl
  modified_base 1: mod_base = OTHER; note = bicyclic nucleic acid (BNA)
  source 1..12: mol_type = other RNA
cggtaagttctg

SEQ ID NO: 3962 - RNA, 11 nt, synthetic construct
  misc_feature 1..11: note = Description of Artificial Sequence: Synthetic Antisense oligonucleotide
  modified_base 1: mod_base = OTHER; note = 5-methyl
  modified_base 10: mod_base = OTHER; note = 5-methyl
  modified_base 1: mod_base = OTHER; note = bicyclic nucleic acid (BNA)
  source 1..11: mol_type = other RNA
cggtaagttct

SEQ ID NO: 3963 - RNA, 10 nt, synthetic construct
  misc_feature 1..10: note = Description of Artificial Sequence: Synthetic Antisense oligonucleotide
  modified_base 1: mod_base = OTHER; note = 5-methyl
  modified_base 10: mod_base = OTHER; note = 5-methyl
  modified_base 1: mod_base = OTHER; note = bicyclic nucleic acid (BNA)
  source 1..10: mol_type = other RNA
cggtaagttc

SEQ ID NO: 3964-3965 - skipped (2 entries)

SEQ ID NO: 3966 - DNA, 20 bp, synthetic construct
  misc_feature 1..20: note = Description of Artificial Sequence: Synthetic Antisense oligonucleotide
  misc_feature 1..20: note = Original Sequence: tcgguaaguucuguccaagc
  modified_base 1: mod_base = OTHER; note = bicyclic nucleic acid (BNA)
  modified_base 2: mod_base = OTHER; note = 5-methyl
  modified_base 11: mod_base = OTHER; note = 5-methyl
  modified_base 15..16: mod_base = OTHER; note = 5-methyl
  modified_base 20: mod_base = OTHER; note = 5-methyl
  source 1..20: mol_type = other DNA
  modified_base 5: mod_base = OTHER; note = Uracil
  modified_base 9: mod_base = OTHER; note = Uracil
  modified_base 10: mod_base = OTHER; note = Uracil
  modified_base 12: mod_base = OTHER; note = Uracil
  modified_base 14: mod_base = OTHER; note = Uracil
tcggtaagttctgtccaagc

SEQ ID NO: 3967 - DNA, 19 bp, synthetic construct
  misc_feature 1..19: note = Description of Artificial Sequence: Synthetic Antisense oligonucleotide
  misc_feature 1..19: note = Original Sequence: tcgguaaguucuguccaag
  modified_base 1: mod_base = OTHER; note = bicyclic nucleic acid (BNA)
  modified_base 2: mod_base = OTHER; note = 5-methyl
  modified_base 11: mod_base = OTHER; note = 5-methyl
  modified_base 15..16: mod_base = OTHER; note = 5-methyl
  source 1..19: mol_type = other DNA
  modified_base 5: mod_base = OTHER; note = Uracil
  modified_base 9: mod_base = OTHER; note = Uracil
  modified_base 10: mod_base = OTHER; note = Uracil
  modified_base 12: mod_base = OTHER; note = Uracil
  modified_base 14: mod_base = OTHER; note = Uracil
tcggtaagttctgtccaag

SEQ ID NO: 3968 - DNA, 18 bp, synthetic construct
  misc_feature 1..18: note = Description of Artificial Sequence: Synthetic Antisense oligonucleotide
  misc_feature 1..18: note = Original Sequence: tcgguaaguucuguccaa
  modified_base 1: mod_base = OTHER; note = bicyclic nucleic acid (BNA)
  modified_base 2: mod_base = OTHER; note = 5-methyl
  modified_base 11: mod_base = OTHER; note = 5-methyl
  modified_base 15..16: mod_base = OTHER; note = 5-methyl
  source 1..18: mol_type = other DNA
  modified_base 5: mod_base = OTHER; note = Uracil
  modified_base 9: mod_base = OTHER; note = Uracil
  modified_base 10: mod_base = OTHER; note = Uracil
  modified_base 12: mod_base = OTHER; note = Uracil
  modified_base 14: mod_base = OTHER; note = Uracil
tcggtaagttctgtccaa

SEQ ID NO: 3969 - DNA, 17 bp, synthetic construct
  misc_feature 1..17: note = Description of Artificial Sequence: Synthetic Antisense oligonucleotide
  misc_feature 1..17: note = Original Sequence: tcgguaaguucugucca
  modified_base 1: mod_base = OTHER; note = bicyclic nucleic acid (BNA)
  modified_base 2: mod_base = OTHER; note = 5-methyl
  modified_base 11: mod_base = OTHER; note = 5-methyl
  modified_base 15..16: mod_base = OTHER; note = 5-methyl
  source 1..17: mol_type = other DNA
  modified_base 5: mod_base = OTHER; note = Uracil
  modified_base 9: mod_base = OTHER; note = Uracil
  modified_base 10: mod_base = OTHER; note = Uracil
  modified_base 12: mod_base = OTHER; note = Uracil
  modified_base 14: mod_base = OTHER; note = Uracil
tcggtaagttctgtcca

SEQ ID NO: 3970 - DNA, 16 bp, synthetic construct
  misc_feature 1..16: note = Description of Artificial Sequence: Synthetic Antisense oligonucleotide
  misc_feature 1..16: note = Original Sequence: tcgguaaguucugucc
  modified_base 1: mod_base = OTHER; note = bicyclic nucleic acid (BNA)
  modified_base 2: mod_base = OTHER; note = 5-methyl
  modified_base 11: mod_base = OTHER; note = 5-methyl
  modified_base 15..16: mod_base = OTHER; note = 5-methyl
  source 1..16: mol_type = other DNA
  modified_base 5: mod_base = OTHER; note = Uracil
  modified_base 9: mod_base = OTHER; note = Uracil
  modified_base 10: mod_base = OTHER; note = Uracil
  modified_base 12: mod_base = OTHER; note = Uracil
  modified_base 14: mod_base = OTHER; note = Uracil
tcggtaagttctgtcc

SEQ ID NO: 3971 - DNA, 15 bp, synthetic construct
  misc_feature 1..15: note = Description of Artificial Sequence: Synthetic Antisense oligonucleotide
  misc_feature 1..15: note = Original Sequence: tcgguaaguucuguc
  modified_base 1: mod_base = OTHER; note = bicyclic nucleic acid (BNA)
  modified_base 2: mod_base = OTHER; note = 5-methyl
  modified_base 11: mod_base = OTHER; note = 5-methyl
  modified_base 15: mod_base = OTHER; note = 5-methyl
  source 1..15: mol_type = other DNA
  modified_base 5: mod_base = OTHER; note = Uracil
  modified_base 9: mod_base = OTHER; note = Uracil
  modified_base 10: mod_base = OTHER; note = Uracil
  modified_base 12: mod_base = OTHER; note = Uracil
  modified_base 14: mod_base = OTHER; note = Uracil
tcggtaagttctgtc

SEQ ID NO: 3972 - DNA, 14 bp, synthetic construct
  misc_feature 1..14: note = Description of Artificial Sequence: Synthetic Antisense oligonucleotide
  misc_feature 1..14: note = Original Sequence: tcgguaaguucugu
  modified_base 1: mod_base = OTHER; note = bicyclic nucleic acid (BNA)
  modified_base 2: mod_base = OTHER; note = 5-methyl
  modified_base 11: mod_base = OTHER; note = 5-methyl
  source 1..14: mol_type = other DNA
  modified_base 5: mod_base = OTHER; note = Uracil
  modified_base 9: mod_base = OTHER; note = Uracil
  modified_base 10: mod_base = OTHER; note = Uracil
  modified_base 12: mod_base = OTHER; note = Uracil
  modified_base 14: mod_base = OTHER; note = Uracil
tcggtaagttctgt

SEQ ID NO: 3973 - DNA, 13 bp, synthetic construct
  misc_feature 1..13: note = Description of Artificial Sequence: Synthetic Antisense oligonucleotide
  misc_feature 1..13: note = Original Sequence: tcgguaaguucug
  modified_base 1: mod_base = OTHER; note = bicyclic nucleic acid (BNA)
  modified_base 2: mod_base = OTHER; note = 5-methyl
  modified_base 11: mod_base = OTHER; note = 5-methyl
  source 1..13: mol_type = other DNA
  modified_base 5: mod_base = OTHER; note = Uracil
  modified_base 9: mod_base = OTHER; note = Uracil
  modified_base 10: mod_base = OTHER; note = Uracil
  modified_base 12: mod_base = OTHER; note = Uracil
tcggtaagttctg

SEQ ID NO: 3974 - DNA, 12 bp, synthetic construct
  misc_feature 1..12: note = Description of Artificial Sequence: Synthetic Antisense oligonucleotide
  misc_feature 1..12: note = Original Sequence: tcgguaaguucu
  modified_base 1: mod_base = OTHER; note = bicyclic nucleic acid (BNA)
  modified_base 2: mod_base = OTHER; note = 5-methyl
  modified_base 11: mod_base = OTHER; note = 5-methyl
  source 1..12: mol_type = other DNA
  modified_base 5: mod_base = OTHER; note = Uracil
  modified_base 9: mod_base = OTHER; note = Uracil
  modified_base 10: mod_base = OTHER; note = Uracil
  modified_base 12: mod_base = OTHER; note = Uracil
tcggtaagttct

SEQ ID NO: 3975 - DNA, 11 bp, synthetic construct
  misc_feature 1..11: note = Description of Artificial Sequence: Synthetic Antisense oligonucleotide
  misc_feature 1..11: note = Original Sequence: tcgguaaguuc
  modified_base 1: mod_base = OTHER; note = bicyclic nucleic acid (BNA)
  modified_base 2: mod_base = OTHER; note = 5-methyl
  modified_base 11: mod_base = OTHER; note = 5-methyl
  source 1..11: mol_type = other DNA
  modified_base 5: mod_base = OTHER; note = Uracil
  modified_base 9: mod_base = OTHER; note = Uracil
  modified_base 10: mod_base = OTHER; note = Uracil
tcggtaagttc

SEQ ID NO: 3976 - DNA, 10 bp, synthetic construct
  misc_feature 1..10: note = Description of Artificial Sequence: Synthetic Antisense oligonucleotide
  misc_feature 1..10: note = Original Sequence: tcgguaaguu
  modified_base 1: mod_base = OTHER; note = bicyclic nucleic acid (BNA)
  modified_base 2: mod_base = OTHER; note = 5-methyl
  source 1..10: mol_type = other DNA
  modified_base 5: mod_base = OTHER; note = Uracil
  modified_base 9: mod_base = OTHER; note = Uracil
  modified_base 10: mod_base = OTHER; note = Uracil
tcggtaagtt

SEQ ID NO: 3977 - skipped

SEQ ID NO: 3978 - RNA, 20 nt, synthetic construct
  misc_feature 1..20: note = Description of Artificial Sequence: Synthetic Antisense oligonucleotide
  modified_base 1: mod_base = OTHER; note = bicyclic nucleic acid (BNA)
  modified_base 3: mod_base = OTHER; note = 5-methyl
  modified_base 12: mod_base = OTHER; note = 5-methyl
  modified_base 16..17: mod_base = OTHER; note = 5-methyl
  source 1..20: mol_type = other RNA
gtcggtaagttctgtccaag

SEQ ID NO: 3979 - RNA, 19 nt, synthetic construct
  misc_feature 1..19: note = Description of Artificial Sequence: Synthetic Antisense oligonucleotide
  modified_base 1: mod_base = OTHER; note = bicyclic nucleic acid (BNA)
  modified_base 3: mod_base = OTHER; note = 5-methyl
  modified_base 12: mod_base = OTHER; note = 5-methyl
  modified_base 16..17: mod_base = OTHER; note = 5-methyl
  source 1..19: mol_type = other RNA
gtcggtaagttctgtccaa

SEQ ID NO: 3980 - RNA, 18 nt, synthetic construct
  misc_feature 1..18: note = Description of Artificial Sequence: Synthetic Antisense oligonucleotide
  modified_base 1: mod_base = OTHER; note = bicyclic nucleic acid (BNA)
  modified_base 3: mod_base = OTHER; note = 5-methyl
  modified_base 12: mod_base = OTHER; note = 5-methyl
  modified_base 16..17: mod_base = OTHER; note = 5-methyl
  source 1..18: mol_type = other RNA
gtcggtaagttctgtcca

SEQ ID NO: 3981 - RNA, 17 nt, synthetic construct
  misc_feature 1..17: note = Description of Artificial Sequence: Synthetic Antisense oligonucleotide
  modified_base 1: mod_base = OTHER; note = bicyclic nucleic acid (BNA)
  modified_base 3: mod_base = OTHER; note = 5-methyl
  modified_base 12: mod_base = OTHER; note = 5-methyl
  modified_base 16..17: mod_base = OTHER; note = 5-methyl
  source 1..17: mol_type = other RNA
gtcggtaagttctgtcc

SEQ ID NO: 3982 - RNA, 16 nt, synthetic construct
  misc_feature 1..16: note = Description of Artificial Sequence: Synthetic Antisense oligonucleotide
  modified_base 1: mod_base = OTHER; note = bicyclic nucleic acid (BNA)
  modified_base 3: mod_base = OTHER; note = 5-methyl
  modified_base 12: mod_base = OTHER; note = 5-methyl
  modified_base 16: mod_base = OTHER; note = 5-methyl
  source 1..16: mol_type = other RNA
gtcggtaagttctgtc

SEQ ID NO: 3983 - RNA, 15 nt, synthetic construct
  misc_feature 1..15: note = Description of Artificial Sequence: Synthetic Antisense oligonucleotide
  modified_base 1: mod_base = OTHER; note = bicyclic nucleic acid (BNA)
  modified_base 3: mod_base = OTHER; note = 5-methyl
  modified_base 12: mod_base = OTHER; note = 5-methyl
  source 1..15: mol_type = other RNA
gtcggtaagttctgt

SEQ ID NO: 3984 - RNA, 14 nt, synthetic construct
  misc_feature 1..14: note = Description of Artificial Sequence: Synthetic Antisense oligonucleotide
  modified_base 1: mod_base = OTHER; note = bicyclic nucleic acid (BNA)
  modified_base 3: mod_base = OTHER; note = 5-methyl
  modified_base 12: mod_base = OTHER; note = 5-methyl
  source 1..14: mol_type = other RNA
gtcggtaagttctg

SEQ ID NO: 3985 - RNA, 13 nt, synthetic construct
  misc_feature 1..13: note = Description of Artificial Sequence: Synthetic Antisense oligonucleotide
  modified_base 1: mod_base = OTHER; note = bicyclic nucleic acid (BNA)
  modified_base 3: mod_base = OTHER; note = 5-methyl
  modified_base 12: mod_base = OTHER; note = 5-methyl
  source 1..13: mol_type = other RNA
gtcggtaagttct

SEQ ID NO: 3986 - RNA, 12 nt, synthetic construct
  misc_feature 1..12: note = Description of Artificial Sequence: Synthetic Antisense oligonucleotide
  modified_base 1: mod_base = OTHER; note = bicyclic nucleic acid (BNA)
  modified_base 3: mod_base = OTHER; note = 5-methyl
  modified_base 12: mod_base = OTHER; note = 5-methyl
  source 1..12: mol_type = other RNA
gtcggtaagttc

SEQ ID NO: 3987 - RNA, 11 nt, synthetic construct
  misc_feature 1..11: note = Description of Artificial Sequence: Synthetic Antisense oligonucleotide
  modified_base 1: mod_base = OTHER; note = bicyclic nucleic acid (BNA)
  modified_base 3: mod_base = OTHER; note = 5-methyl
  source 1..11: mol_type = other RNA
gtcggtaagtt

SEQ ID NO: 3988 - RNA, 10 nt, synthetic construct
  misc_feature 1..10: note = Description of Artificial Sequence: Synthetic Antisense oligonucleotide
  modified_base 1: mod_base = OTHER; note = bicyclic nucleic acid (BNA)
  modified_base 3: mod_base = OTHER; note = 5-methyl
  source 1..10: mol_type = other RNA
gtcggtaagt

SEQ ID NO: 3989 - RNA, 20 nt, synthetic construct
  misc_feature 1..20: note = Description of Artificial Sequence: Synthetic Antisense oligonucleotide
  modified_base 1: mod_base = OTHER; note = bicyclic nucleic acid (BNA)
  modified_base 4: mod_base = OTHER; note = 5-methyl
  modified_base 13: mod_base = OTHER; note = 5-methyl
  modified_base 17..18: mod_base = OTHER; note = 5-methyl
  source 1..20: mol_type = other RNA
agtcggtaagttctgtccaa

SEQ ID NO: 3990 - RNA, 19 nt, synthetic construct
  misc_feature 1..19: note = Description of Artificial Sequence: Synthetic Antisense oligonucleotide
  modified_base 1: mod_base = OTHER; note = bicyclic nucleic acid (BNA)
  modified_base 4: mod_base = OTHER; note = 5-methyl
  modified_base 13: mod_base = OTHER; note = 5-methyl
  modified_base 17..18: mod_base = OTHER; note = 5-methyl
  source 1..19: mol_type = other RNA
agtcggtaagttctgtcca

SEQ ID NO: 3991 - RNA, 17 nt, synthetic construct
  misc_feature 1..17: note = Description of Artificial Sequence: Synthetic Antisense oligonucleotide
  modified_base 1: mod_base = OTHER; note = bicyclic nucleic acid (BNA)
  modified_base 4: mod_base = OTHER; note = 5-methyl
  modified_base 13: mod_base = OTHER; note = 5-methyl
  modified_base 17: mod_base = OTHER; note = 5-methyl
  source 1..17: mol_type = other RNA
agtcggtaagttctgtc

SEQ ID NO: 3992 - RNA, 16 nt, synthetic construct
  misc_feature 1..16: note = Description of Artificial Sequence: Synthetic Antisense oligonucleotide
  modified_base 1: mod_base = OTHER; note = bicyclic nucleic acid (BNA)
  modified_base 4: mod_base = OTHER; note = 5-methyl
  modified_base 13: mod_base = OTHER; note = 5-methyl
  source 1..16: mol_type = other RNA
agtcggtaagttctgt

SEQ ID NO: 3993 - RNA, 15 nt, synthetic construct
  misc_feature 1..15: note = Description of Artificial Sequence: Synthetic Antisense oligonucleotide
  modified_base 1: mod_base = OTHER; note = bicyclic nucleic acid (BNA)
  modified_base 4: mod_base = OTHER; note = 5-methyl
  modified_base 13: mod_base = OTHER; note = 5-methyl
  source 1..15: mol_type = other RNA
agtcggtaagttctg

SEQ ID NO: 3994 - RNA, 14 nt, synthetic construct
  misc_feature 1..14: note = Description of Artificial Sequence: Synthetic Antisense oligonucleotide
  modified_base 1: mod_base = OTHER; note = bicyclic nucleic acid (BNA)
  modified_base 4: mod_base = OTHER; note = 5-methyl
  modified_base 13: mod_base = OTHER; note = 5-methyl
  source 1..14: mol_type = other RNA
agtcggtaagttct

SEQ ID NO: 3995 - RNA, 13 nt, synthetic construct
  misc_feature 1..13: note = Description of Artificial Sequence: Synthetic Antisense oligonucleotide
  modified_base 1: mod_base = OTHER; note = bicyclic nucleic acid (BNA)
  modified_base 4: mod_base = OTHER; note = 5-methyl
  modified_base 13: mod_base = OTHER; note = 5-methyl
  source 1..13: mol_type = other RNA
agtcggtaagttc

SEQ ID NO: 3996 - RNA, 12 nt, synthetic construct
  misc_feature 1..12: note = Description of Artificial Sequence: Synthetic Antisense oligonucleotide
  modified_base 1: mod_base = OTHER; note = bicyclic nucleic acid (BNA)
  modified_base 4: mod_base = OTHER; note = 5-methyl
  source 1..12: mol_type = other RNA
agtcggtaagtt

SEQ ID NO: 3997 - RNA, 11 nt, synthetic construct
  misc_feature 1..11: note = Description of Artificial Sequence: Synthetic Antisense oligonucleotide
  modified_base 1: mod_base = OTHER; note = bicyclic nucleic acid (BNA)
  modified_base 4: mod_base = OTHER; note = 5-methyl
  source 1..11: mol_type = other RNA
agtcggtaagt

SEQ ID NO: 3998 - RNA, 20 nt, synthetic construct
  misc_feature 1..20: note = Description of Artificial Sequence: Synthetic Antisense oligonucleotide
  modified_base 1: mod_base = OTHER; note = 5-methyl
  modified_base 5: mod_base = OTHER; note = 5-methyl
  modified_base 14: mod_base = OTHER; note = 5-methyl
  modified_base 18..19: mod_base = OTHER; note = 5-methyl
  modified_base 1: mod_base = OTHER; note = bicyclic nucleic acid (BNA)
  source 1..20: mol_type = other RNA
cagtcggtaagttctgtcca

SEQ ID NO: 3999 - RNA, 19 nt, synthetic construct
  misc_feature 1..19: note = Description of Artificial Sequence: Synthetic Antisense oligonucleotide
  modified_base 1: mod_base = OTHER; note = 5-methyl
  modified_base 5: mod_base = OTHER; note = 5-methyl
  modified_base 14: mod_base = OTHER; note = 5-methyl
  modified_base 18..19: mod_base = OTHER; note = 5-methyl
  modified_base 1: mod_base = OTHER; note = bicyclic nucleic acid (BNA)
  source 1..19: mol_type = other RNA
cagtcggtaagttctgtcc

SEQ ID NO: 4000 - RNA, 18 nt, synthetic construct
  misc_feature 1..18: note = Description of Artificial Sequence: Synthetic Antisense oligonucleotide
  modified_base 1: mod_base = OTHER; note = 5-methyl
  modified_base 5: mod_base = OTHER; note = 5-methyl
  modified_base 14: mod_base = OTHER; note = 5-methyl
  modified_base 18: mod_base = OTHER; note = 5-methyl
  modified_base 1: mod_base = OTHER; note = bicyclic nucleic acid (BNA)
  source 1..18: mol_type = other RNA
cagtcggtaagttctgtc

SEQ ID NO: 4001 - RNA, 17 nt, synthetic construct
  misc_feature 1..17: note = Description of Artificial Sequence: Synthetic Antisense oligonucleotide
  modified_base 1: mod_base = OTHER; note = 5-methyl
  modified_base 5: mod_base = OTHER; note = 5-methyl
  modified_base 14: mod_base = OTHER; note = 5-methyl
  modified_base 1: mod_base = OTHER; note = bicyclic nucleic acid (BNA)
  source 1..17: mol_type = other RNA
cagtcggtaagttctgt

SEQ ID NO: 4002 - RNA, 16 nt, synthetic construct
  misc_feature 1..16: note = Description of Artificial Sequence: Synthetic Antisense oligonucleotide
  modified_base 1: mod_base = OTHER; note = 5-methyl
  modified_base 5: mod_base = OTHER; note = 5-methyl
  modified_base 14: mod_base = OTHER; note = 5-methyl
  modified_base 1: mod_base = OTHER; note = bicyclic nucleic acid (BNA)
  source 1..16: mol_type = other RNA
cagtcggtaagttctg

SEQ ID NO: 4003 - RNA, 15 nt, synthetic construct
  misc_feature 1..15: note = Description of Artificial Sequence: Synthetic Antisense oligonucleotide
  modified_base 1: mod_base = OTHER; note = 5-methyl
  modified_base 5: mod_base = OTHER; note = 5-methyl
  modified_base 14: mod_base = OTHER; note = 5-methyl
  modified_base 1: mod_base = OTHER; note = bicyclic nucleic acid (BNA)
  source 1..15: mol_type = other RNA
cagtcggtaagttct

SEQ ID NO: 4004 - RNA, 14 nt, synthetic construct
  misc_feature 1..14: note = Description of Artificial Sequence: Synthetic Antisense oligonucleotide
  modified_base 1: mod_base = OTHER; note = 5-methyl
  modified_base 5: mod_base = OTHER; note = 5-methyl
  modified_base 14: mod_base = OTHER; note = 5-methyl
  modified_base 1: mod_base = OTHER; note = bicyclic nucleic acid (BNA)
  source 1..14: mol_type = other RNA
cagtcggtaagttc

SEQ ID NO: 4005 - RNA, 13 nt, synthetic construct
  misc_feature 1..13: note = Description of Artificial Sequence: Synthetic Antisense oligonucleotide
  modified_base 1: mod_base = OTHER; note = 5-methyl
  modified_base 5: mod_base = OTHER; note = 5-methyl
  modified_base 1: mod_base = OTHER; note = bicyclic nucleic acid (BNA)
  source 1..13: mol_type = other RNA
cagtcggtaagtt

SEQ ID NO: 4006 - RNA, 12 nt, synthetic construct
  misc_feature 1..12: note = Description of Artificial Sequence: Synthetic Antisense oligonucleotide
  modified_base 1: mod_base = OTHER; note = 5-methyl
  modified_base 5: mod_base = OTHER; note = 5-methyl
  modified_base 1: mod_base = OTHER; note = bicyclic nucleic acid (BNA)
  source 1..12: mol_type = other RNA
cagtcggtaagt

SEQ ID NO: 4007 - RNA, 20 nt, synthetic construct
  misc_feature 1..20: note = Description of Artificial Sequence: Synthetic Antisense oligonucleotide
  modified_base 1..2: mod_base = OTHER; note = 5-methyl
  modified_base 6: mod_base = OTHER; note = 5-methyl
  modified_base 15: mod_base = OTHER; note = 5-methyl
  modified_base 19..20: mod_base = OTHER; note = 5-methyl
  modified_base 1: mod_base = OTHER; note = bicyclic nucleic acid (BNA)
  source 1..20: mol_type = other RNA
ccagtcggtaagttctgtcc

SEQ ID NO: 4008 - RNA, 19 nt, synthetic construct
  misc_feature 1..19: note = Description of Artificial Sequence: Synthetic Antisense oligonucleotide
  modified_base 1..2: mod_base = OTHER; note = 5-methyl
  modified_base 6: mod_base = OTHER; note = 5-methyl
  modified_base 15: mod_base = OTHER; note = 5-methyl
  modified_base 19: mod_base = OTHER; note = 5-methyl
  modified_base 1: mod_base = OTHER; note = bicyclic nucleic acid (BNA)
  source 1..19: mol_type = other RNA
ccagtcggtaagttctgtc

SEQ ID NO: 4009 - RNA, 18 nt, synthetic construct
  misc_feature 1..18: note = Description of Artificial Sequence: Synthetic Antisense oligonucleotide
  modified_base 1..2: mod_base = OTHER; note = 5-methyl
  modified_base 6: mod_base = OTHER; note = 5-methyl
  modified_base 15: mod_base = OTHER; note = 5-methyl
  modified_base 1: mod_base = OTHER; note = bicyclic nucleic acid (BNA)
  source 1..18: mol_type = other RNA
ccagtcggtaagttctgt

SEQ ID NO: 4010 - RNA, 17 nt, synthetic construct
  misc_feature 1..17: note = Description of Artificial Sequence: Synthetic Antisense oligonucleotide
  modified_base 1..2: mod_base = OTHER; note = 5-methyl
  modified_base 6: mod_base = OTHER; note = 5-methyl
  modified_base 15: mod_base = OTHER; note = 5-methyl
  modified_base 1: mod_base = OTHER; note = bicyclic nucleic acid (BNA)
  source 1..17: mol_type = other RNA
ccagtcggtaagttctg

SEQ ID NO: 4011 - RNA, 16 nt, synthetic construct
  misc_feature 1..16: note = Description of Artificial Sequence: Synthetic Antisense oligonucleotide
  modified_base 1..2: mod_base = OTHER; note = 5-methyl
  modified_base 6: mod_base = OTHER; note = 5-methyl
  modified_base 15: mod_base = OTHER; note = 5-methyl
  modified_base 1: mod_base = OTHER; note = bicyclic nucleic acid (BNA)
  source 1..16: mol_type = other RNA
ccagtcggtaagttct

SEQ ID NO: 4012 - RNA, 15 nt, synthetic construct
  misc_feature 1..15: note = Description of Artificial Sequence: Synthetic Antisense oligonucleotide
  modified_base 1..2: mod_base = OTHER; note = 5-methyl
  modified_base 6: mod_base = OTHER; note = 5-methyl
  modified_base 15: mod_base = OTHER; note = 5-methyl
  modified_base 1: mod_base = OTHER; note = bicyclic nucleic acid (BNA)
  source 1..15: mol_type = other RNA
ccagtcggtaagttc

SEQ ID NO: 4013 - RNA, 14 nt, synthetic construct
  misc_feature 1..14: note = Description of Artificial Sequence: Synthetic Antisense oligonucleotide
  modified_base 1..2: mod_base = OTHER; note = 5-methyl
  modified_base 6: mod_base = OTHER; note = 5-methyl
  modified_base 1: mod_base = OTHER; note = bicyclic nucleic acid (BNA)
  source 1..14: mol_type = other RNA
ccagtcggtaagtt

SEQ ID NO: 4014 - RNA, 13 nt, synthetic construct
  misc_feature 1..13: note = Description of Artificial Sequence: Synthetic Antisense oligonucleotide
  modified_base 1..2: mod_base = OTHER; note = 5-methyl
  modified_base 6: mod_base = OTHER; note = 5-methyl
  modified_base 1: mod_base = OTHER; note = bicyclic nucleic acid (BNA)
  source 1..13: mol_type = other RNA
ccagtcggtaagt

SEQ ID NO: 4015 - RNA, 20 nt, synthetic construct
  misc_feature 1..20: note = Description of Artificial Sequence: Synthetic Antisense oligonucleotide
  modified_base 1: mod_base = OTHER; note = bicyclic nucleic acid (BNA)
  modified_base 2..3: mod_base = OTHER; note = 5-methyl
  modified_base 7: mod_base = OTHER; note = 5-methyl
  modified_base 16: mod_base = OTHER; note = 5-methyl
  modified_base 20: mod_base = OTHER; note = 5-methyl
  source 1..20: mol_type = other RNA
gccagtcggtaagttctgtc

SEQ ID NO: 4016 - RNA, 19 nt, synthetic construct
  misc_feature 1..19: note = Description of Artificial Sequence: Synthetic Antisense oligonucleotide
  modified_base 1: mod_base = OTHER; note = bicyclic nucleic acid (BNA)
  modified_base 2..3: mod_base = OTHER; note = 5-methyl
  modified_base 7: mod_base = OTHER; note = 5-methyl
  modified_base 16: mod_base = OTHER; note = 5-methyl
  source 1..19: mol_type = other RNA
gccagtcggtaagttctgt

SEQ ID NO: 4017 - RNA, 18 nt, synthetic construct
  misc_feature 1..18: note = Description of Artificial Sequence: Synthetic Antisense oligonucleotide
  modified_base 1: mod_base = OTHER; note = bicyclic nucleic acid (BNA)
  modified_base 2..3: mod_base = OTHER; note = 5-methyl
  modified_base 7: mod_base = OTHER; note = 5-methyl
  modified_base 16: mod_base = OTHER; note = 5-methyl
  source 1..18: mol_type = other RNA
gccagtcggtaagttctg

SEQ ID NO: 4018 - RNA, 17 nt, synthetic construct
  misc_feature 1..17: note = Description of Artificial Sequence: Synthetic Antisense oligonucleotide
  modified_base 1: mod_base = OTHER; note = bicyclic nucleic acid (BNA)
  modified_base 2..3: mod_base = OTHER; note = 5-methyl
  modified_base 7: mod_base = OTHER; note = 5-methyl
  modified_base 16: mod_base = OTHER; note = 5-methyl
  source 1..17: mol_type = other RNA
gccagtcggtaagttct

SEQ ID NO: 4019 - RNA, 16 nt, synthetic construct
  misc_feature 1..16: note = Description of Artificial Sequence: Synthetic Antisense oligonucleotide
  modified_base 1: mod_base = OTHER; note = bicyclic nucleic acid (BNA)
  modified_base 2..3: mod_base = OTHER; note = 5-methyl
  modified_base 7: mod_base = OTHER; note = 5-methyl
  modified_base 16: mod_base = OTHER; note = 5-methyl
  source 1..16: mol_type = other RNA
gccagtcggtaagttc

SEQ ID NO: 4020 - RNA, 15 nt, synthetic construct
  misc_feature 1..15: note = Description of Artificial Sequence: Synthetic Antisense oligonucleotide
  modified_base 1: mod_base = OTHER; note = bicyclic nucleic acid (BNA)
  modified_base 2..3: mod_base = OTHER; note = 5-methyl
  modified_base 7: mod_base = OTHER; note = 5-methyl
  source 1..15: mol_type = other RNA
gccagtcggtaagtt

SEQ ID NO: 4021 - RNA, 14 nt, synthetic construct
  misc_feature 1..14: note = Description of Artificial Sequence: Synthetic Antisense oligonucleotide
  modified_base 1: mod_base = OTHER; note = bicyclic nucleic acid (BNA)
  modified_base 2..3: mod_base = OTHER; note = 5-methyl
  modified_base 7: mod_base = OTHER; note = 5-methyl
  source 1..14: mol_type = other RNA
gccagtcggtaagt

SEQ ID NO: 4022 - DNA, 20 bp, synthetic construct
  misc_feature 1..20: note = Description of Artificial Sequence: Synthetic Antisense oligonucleotide
  misc_feature 1..20: note = Original Sequence: tcaaggaagauggcauuucu
  modified_base 1: mod_base = OTHER; note = bicyclic nucleic acid (BNA)
  modified_base 2: mod_base = OTHER; note = 5-methyl
  modified_base 14: mod_base = OTHER; note = 5-methyl
  modified_base 19: mod_base = OTHER; note = 5-methyl
  source 1..20: mol_type = other DNA
  modified_base 11: mod_base = OTHER; note = Uracil
  modified_base 16: mod_base = OTHER; note = Uracil
  modified_base 17: mod_base = OTHER; note = Uracil
  modified_base 18: mod_base = OTHER; note = Uracil
  modified_base 20: mod_base = OTHER; note = Uracil
tcaaggaagatggcatttct

SEQ ID NO: 4023 - DNA, 22 bp, synthetic construct
  misc_feature 1..22: note = Description of Artificial Sequence: Synthetic Antisense oligonucleotide
  misc_feature 1..22: note = Original Sequence: tcaaggaagauggcauuucuag
  modified_base 1: mod_base = OTHER; note = bicyclic nucleic acid (BNA)
  modified_base 2: mod_base = OTHER; note = 5-methyl
  modified_base 14: mod_base = OTHER; note = 5-methyl
  modified_base 19: mod_base = OTHER; note = 5-methyl
  source 1..22: mol_type = other DNA
  modified_base 11: mod_base = OTHER; note = Uracil
  modified_base 16: mod_base = OTHER; note = Uracil
  modified_base 17: mod_base = OTHER; note = Uracil
  modified_base 18: mod_base = OTHER; note = Uracil
  modified_base 20: mod_base = OTHER; note = Uracil
tcaaggaagatggcatttctag

SEQ ID NO: 4024 - DNA, 16 bp, synthetic construct
  misc_feature 1..16: note = Description of Artificial Sequence: Synthetic Antisense oligonucleotide
  misc_feature 1..16: note = Original Sequence: tcaaggaagauggcau
  modified_base 1: mod_base = OTHER; note = bicyclic nucleic acid (BNA)
  modified_base 2: mod_base = OTHER; note = 5-methyl
  modified_base 14: mod_base = OTHER; note = 5-methyl
  source 1..16: mol_type = other DNA
  modified_base 11: mod_base = OTHER; note = Uracil
  modified_base 16: mod_base = OTHER; note = Uracil
tcaaggaagatggcat

SEQ ID NO: 4025 - RNA, 15 nt, synthetic construct
  misc_feature 1..15: note = Description of Artificial Sequence: Synthetic Antisense oligonucleotide
  modified_base 1: mod_base = OTHER; note = bicyclic nucleic acid (BNA)
  modified_base 9: mod_base = OTHER; note = 5-methyl
  modified_base 14: mod_base = OTHER; note = 5-methyl
  source 1..15: mol_type = other RNA
gaagatggcatttct

SEQ ID NO: 4026 - DNA, 21 bp, synthetic construct
  misc_feature 1..21: note = Description of Artificial Sequence: Synthetic Antisense oligonucleotide
  misc_feature 1..21: note = Original Sequence: tcaaggaagauggcauuucua
  modified_base 1: mod_base = OTHER; note = bicyclic nucleic acid (BNA)
  modified_base 2: mod_base = OTHER; note = 5-methyl
  modified_base 14: mod_base = OTHER; note = 5-methyl
  modified_base 19: mod_base = OTHER; note = 5-methyl
  source 1..21: mol_type = other DNA
  modified_base 11: mod_base = OTHER; note = Uracil
  modified_base 16: mod_base = OTHER; note = Uracil
  modified_base 17: mod_base = OTHER; note = Uracil
  modified_base 18: mod_base = OTHER; note = Uracil
  modified_base 20: mod_base = OTHER; note = Uracil
tcaaggaagatggcatttcta

SEQ ID NO: 4027 - DNA, 19 bp, synthetic construct
  misc_feature 1..19: note = Description of Artificial Sequence: Synthetic Antisense oligonucleotide
  misc_feature 1..19: note = Original Sequence: tcaaggaagauggcauuuc
  modified_base 1: mod_base = OTHER; note = bicyclic nucleic acid (BNA)
  modified_base 2: mod_base = OTHER; note = 5-methyl
  modified_base 14: mod_base = OTHER; note = 5-methyl
  modified_base 19: mod_base = OTHER; note = 5-methyl
  source 1..19: mol_type = other DNA
  modified_base 11: mod_base = OTHER; note = Uracil
  modified_base 16: mod_base = OTHER; note = Uracil
  modified_base 17: mod_base = OTHER; note = Uracil
  modified_base 18: mod_base = OTHER; note = Uracil
tcaaggaagatggcatttc

SEQ ID NO: 4028 - DNA, 18 bp, synthetic construct
  misc_feature 1..18: note = Description of Artificial Sequence: Synthetic Antisense oligonucleotide
  misc_feature 1..18: note = Original Sequence: tcaaggaagauggcauuu
  modified_base 1: mod_base = OTHER; note = bicyclic nucleic acid (BNA)
  modified_base 2: mod_base = OTHER; note = 5-methyl
  modified_base 14: mod_base = OTHER; note = 5-methyl
  source 1..18: mol_type = other DNA
  modified_base 11: mod_base = OTHER; note = Uracil
  modified_base 16: mod_base = OTHER; note = Uracil
  modified_base 17: mod_base = OTHER; note = Uracil
  modified_base 18: mod_base = OTHER; note = Uracil
tcaaggaagatggcattt

SEQ ID NO: 4029 - DNA, 17 bp, synthetic construct
  misc_feature 1..17: note = Description of Artificial Sequence: Synthetic Antisense oligonucleotide
  misc_feature 1..17: note = Original Sequence: tcaaggaagauggcauu
  modified_base 1: mod_base = OTHER; note = bicyclic nucleic acid (BNA)
  modified_base 2: mod_base = OTHER; note = 5-methyl
  modified_base 14: mod_base = OTHER; note = 5-methyl
  source 1..17: mol_type = other DNA
  modified_base 11: mod_base = OTHER; note = Uracil
  modified_base 16: mod_base = OTHER; note = Uracil
  modified_base 17: mod_base = OTHER; note = Uracil
tcaaggaagatggcatt

SEQ ID NO: 4030 - DNA, 15 bp, synthetic construct
  misc_feature 1..15: note = Description of Artificial Sequence: Synthetic Antisense oligonucleotide
  misc_feature 1..15: note = Original Sequence: tcaaggaagauggca
  modified_base 1: mod_base = OTHER; note = bicyclic nucleic acid (BNA)
  modified_base 2: mod_base = OTHER; note = 5-methyl
  modified_base 14: mod_base = OTHER; note = 5-methyl
  source 1..15: mol_type = other DNA
  modified_base 11: mod_base = OTHER; note = Uracil
tcaaggaagatggca

SEQ ID NO: 4031 - DNA, 14 bp, synthetic construct
  misc_feature 1..14: note = Description of Artificial Sequence: Synthetic Antisense oligonucleotide
  misc_feature 1..14: note = Original Sequence: tcaaggaagauggc
  modified_base 1: mod_base = OTHER; note = bicyclic nucleic acid (BNA)
  modified_base 2: mod_base = OTHER; note = 5-methyl
  modified_base 14: mod_base = OTHER; note = 5-methyl
  source 1..14: mol_type = other DNA
  modified_base 11: mod_base = OTHER; note = Uracil
tcaaggaagatggc

SEQ ID NO: 4032 - DNA, 13 bp, synthetic construct
  misc_feature 1..13: note = Description of Artificial Sequence: Synthetic Antisense oligonucleotide
  misc_feature 1..13: note = Original Sequence: tcaaggaagaugg
  modified_base 1: mod_base = OTHER; note = bicyclic nucleic acid (BNA)
  modified_base 2: mod_base = OTHER; note = 5-methyl
  source 1..13: mol_type = other DNA
  modified_base 11: mod_base = OTHER; note = Uracil
tcaaggaagatgg

SEQ ID NO: 4033 - DNA, 12 bp, synthetic construct
  misc_feature 1..12: note = Description of Artificial Sequence: Synthetic Antisense oligonucleotide
  misc_feature 1..12: note = Original Sequence: tcaaggaagaug
  modified_base 1: mod_base = OTHER; note = bicyclic nucleic acid (BNA)
  modified_base 2: mod_base = OTHER; note = 5-methyl
  source 1..12: mol_type = other DNA
  modified_base 11: mod_base = OTHER; note = Uracil
tcaaggaagatg

SEQ ID NO: 4034 - DNA, 11 bp, synthetic construct
  misc_feature 1..11: note = Description of Artificial Sequence: Synthetic Antisense oligonucleotide
  misc_feature 1..11: note = Original Sequence: tcaaggaagau
  modified_base 1: mod_base = OTHER; note = bicyclic nucleic acid (BNA)
  modified_base 2: mod_base = OTHER; note = 5-methyl
  source 1..11: mol_type = other DNA
  modified_base 11: mod_base = OTHER; note = Uracil
tcaaggaagat

SEQ ID NO: 4035 - DNA, 10 bp, synthetic construct
  misc_feature 1..10: note = Description of Artificial Sequence: Synthetic Antisense oligonucleotide
  modified_base 1: mod_base = OTHER; note = bicyclic nucleic acid (BNA)
  modified_base 2: mod_base = OTHER; note = 5-methyl
  source 1..10: mol_type = other DNA
tcaaggaaga

SEQ ID NO: 4036 - skipped

SEQ ID NO: 4037 - RNA, 21 nt, synthetic construct
  misc_feature 1..21: note = Description of Artificial Sequence: Synthetic Antisense oligonucleotide
  modified_base 1: mod_base = OTHER; note = 5-methyl
  modified_base 13: mod_base = OTHER; note = 5-methyl
  modified_base 18: mod_base = OTHER; note = 5-methyl
  modified_base 1: mod_base = OTHER; note = bicyclic nucleic acid (BNA)
  source 1..21: mol_type = other RNA
caaggaagatggcatttctag

SEQ ID NO: 4038 - RNA, 20 nt, synthetic construct
  misc_feature 1..20: note = Description of Artificial Sequence: Synthetic Antisense oligonucleotide
  modified_base 1: mod_base = OTHER; note = 5-methyl
  modified_base 13: mod_base = OTHER; note = 5-methyl
  modified_base 18: mod_base = OTHER; note = 5-methyl
  modified_base 1: mod_base = OTHER; note = bicyclic nucleic acid (BNA)
  source 1..20: mol_type = other RNA
caaggaagatggcatttcta

SEQ ID NO: 4039 - RNA, 19 nt, synthetic construct
  misc_feature 1..19: note = Description of Artificial Sequence: Synthetic Antisense oligonucleotide
  modified_base 1: mod_base = OTHER; note = 5-methyl
  modified_base 13: mod_base = OTHER; note = 5-methyl
  modified_base 18: mod_base = OTHER; note = 5-methyl
  modified_base 1: mod_base = OTHER; note = bicyclic nucleic acid (BNA)
  source 1..19: mol_type = other RNA
caaggaagatggcatttct

SEQ ID NO: 4040 - RNA, 18 nt, synthetic construct
  misc_feature 1..18: note = Description of Artificial Sequence: Synthetic Antisense oligonucleotide
  modified_base 1: mod_base = OTHER; note = 5-methyl
  modified_base 13: mod_base = OTHER; note = 5-methyl
  modified_base 18: mod_base = OTHER; note = 5-methyl
  modified_base 1: mod_base = OTHER; note = bicyclic nucleic acid (BNA)
  source 1..18: mol_type = other RNA
caaggaagatggcatttc

SEQ ID NO: 4041 - RNA, 17 nt, synthetic construct
  misc_feature 1..17: note = Description of Artificial Sequence: Synthetic Antisense oligonucleotide
  modified_base 1: mod_base = OTHER; note = 5-methyl
  modified_base 13: mod_base = OTHER; note = 5-methyl
  modified_base 1: mod_base = OTHER; note = bicyclic nucleic acid (BNA)
  source 1..17: mol_type = other RNA
caaggaagatggcattt

SEQ ID NO: 4042 - RNA, 16 nt, synthetic construct
  misc_feature 1..16: note = Description of Artificial Sequence: Synthetic Antisense oligonucleotide
  modified_base 1: mod_base = OTHER; note = 5-methyl
  modified_base 13: mod_base = OTHER; note = 5-methyl
  modified_base 1: mod_base = OTHER; note = bicyclic nucleic acid (BNA)
  source 1..16: mol_type = other RNA
caaggaagatggcatt

SEQ ID NO: 4043 - RNA, 15 nt, synthetic construct
  misc_feature 1..15: note = Description of Artificial Sequence: Synthetic Antisense oligonucleotide
  modified_base 1: mod_base = OTHER; note = 5-methyl
  modified_base 13: mod_base = OTHER; note = 5-methyl
  modified_base 1: mod_base = OTHER; note = bicyclic nucleic acid (BNA)
  source 1..15: mol_type = other RNA
caaggaagatggcat

SEQ ID NO: 4044 - RNA, 14 nt, synthetic construct
  misc_feature 1..14: note = Description of Artificial Sequence: Synthetic Antisense oligonucleotide
  modified_base 1: mod_base = OTHER; note = 5-methyl
  modified_base 13: mod_base = OTHER; note = 5-methyl
  modified_base 1: mod_base = OTHER; note = bicyclic nucleic acid (BNA)
  source 1..14: mol_type = other RNA
caaggaagatggca

SEQ ID NO: 4045 - RNA, 13 nt, synthetic construct
  misc_feature 1..13: note = Description of Artificial Sequence: Synthetic Antisense oligonucleotide
  modified_base 1: mod_base = OTHER; note = 5-methyl
  modified_base 13: mod_base = OTHER; note = 5-methyl
  modified_base 1: mod_base = OTHER; note = bicyclic nucleic acid (BNA)
  source 1..13: mol_type = other RNA
caaggaagatggc

SEQ ID NO: 4046 - RNA, 12 nt, synthetic construct
  misc_feature 1..12: note = Description of Artificial Sequence: Synthetic Antisense oligonucleotide
  modified_base 1: mod_base = OTHER; note = 5-methyl
  modified_base 1: mod_base = OTHER; note = bicyclic nucleic acid (BNA)
  source 1..12: mol_type = other RNA
caaggaagatgg

SEQ ID NO: 4047 - RNA, 11 nt, synthetic construct
  misc_feature 1..11: note = Description of Artificial Sequence: Synthetic Antisense oligonucleotide
  modified_base 1: mod_base = OTHER; note = 5-methyl
  modified_base 1: mod_base = OTHER; note = bicyclic nucleic acid (BNA)
  source 1..11: mol_type = other RNA
caaggaagatg

SEQ ID NO: 4048 - RNA, 10 nt, synthetic construct
  misc_feature 1..10: note = Description of Artificial Sequence: Synthetic Antisense oligonucleotide
  modified_base 1: mod_base = OTHER; note = 5-methyl
  modified_base 1: mod_base = OTHER; note = bicyclic nucleic acid (BNA)
  source 1..10: mol_type = other RNA
caaggaagat

SEQ ID NO: 4049-4050 - skipped (2 entries)

SEQ ID NO: 4051 - RNA, 20 nt, synthetic construct
  misc_feature 1..20: note = Description of Artificial Sequence: Synthetic Antisense oligonucleotide
  modified_base 1: mod_base = OTHER; note = bicyclic nucleic acid (BNA)
  modified_base 12: mod_base = OTHER; note = 5-methyl
  modified_base 17: mod_base = OTHER; note = 5-methyl
  source 1..20: mol_type = other RNA
aaggaagatggcatttctag

SEQ ID NO: 4052 - RNA, 19 nt, synthetic construct
  misc_feature 1..19: note = Description of Artificial Sequence: Synthetic Antisense oligonucleotide
  modified_base 1: mod_base = OTHER; note = bicyclic nucleic acid (BNA)
  modified_base 12: mod_base = OTHER; note = 5-methyl
  modified_base 17: mod_base = OTHER; note = 5-methyl
  source 1..19: mol_type = other RNA
aaggaagatggcatttcta

SEQ ID NO: 4053 - RNA, 18 nt, synthetic construct
  misc_feature 1..18: note = Description of Artificial Sequence: Synthetic Antisense oligonucleotide
  modified_base 1: mod_base = OTHER; note = bicyclic nucleic acid (BNA)
  modified_base 12: mod_base = OTHER; note = 5-methyl
  modified_base 17: mod_base = OTHER; note = 5-methyl
  source 1..18: mol_type = other RNA
aaggaagatggcatttct

SEQ ID NO: 4054 - RNA, 17 nt, synthetic construct
  misc_feature 1..17: note = Description of Artificial Sequence: Synthetic Antisense oligonucleotide
  modified_base 1: mod_base = OTHER; note = bicyclic nucleic acid (BNA)
  modified_base 12: mod_base = OTHER; note = 5-methyl
  modified_base 17: mod_base = OTHER; note = 5-methyl
  source 1..17: mol_type = other RNA
aaggaagatggcatttc

SEQ ID NO: 4055 - RNA, 16 nt, synthetic construct
  misc_feature 1..16: note = Description of Artificial Sequence: Synthetic Antisense oligonucleotide
  modified_base 1: mod_base = OTHER; note = bicyclic nucleic acid (BNA)
  modified_base 12: mod_base = OTHER; note = 5-methyl
  source 1..16: mol_type = other RNA
aaggaagatggcattt

SEQ ID NO: 4056 - RNA, 15 nt, synthetic construct
  misc_feature 1..15: note = Description of Artificial Sequence: Synthetic Antisense oligonucleotide
  modified_base 1: mod_base = OTHER; note = bicyclic nucleic acid (BNA)
  modified_base 12: mod_base = OTHER; note = 5-methyl
  source 1..15: mol_type = other RNA
aaggaagatggcatt

SEQ ID NO: 4057 - RNA, 14 nt, synthetic construct
  misc_feature 1..14: note = Description of Artificial Sequence: Synthetic Antisense oligonucleotide
  modified_base 1: mod_base = OTHER; note = bicyclic nucleic acid (BNA)
  modified_base 12: mod_base = OTHER; note = 5-methyl
  source 1..14: mol_type = other RNA
aaggaagatggcat

SEQ ID NO: 4058 - RNA, 13 nt, synthetic construct
  misc_feature 1..13: note = Description of Artificial Sequence: Synthetic Antisense oligonucleotide
  modified_base 1: mod_base = OTHER; note = bicyclic nucleic acid (BNA)
  modified_base 12: mod_base = OTHER; note = 5-methyl
  source 1..13: mol_type = other RNA
aaggaagatggca

SEQ ID NO: 4059 - RNA, 12 nt, synthetic construct
  misc_feature 1..12: note = Description of Artificial Sequence: Synthetic Antisense oligonucleotide
  modified_base 1: mod_base = OTHER; note = bicyclic nucleic acid (BNA)
  modified_base 12: mod_base = OTHER; note = 5-methyl
  source 1..12: mol_type = other RNA
aaggaagatggc

SEQ ID NO: 4060 - RNA, 19 nt, synthetic construct
  misc_feature 1..19: note = Description of Artificial Sequence: Synthetic Antisense oligonucleotide
  modified_base 1: mod_base = OTHER; note = bicyclic nucleic acid (BNA)
  modified_base 11: mod_base = OTHER; note = 5-methyl
  modified_base 16: mod_base = OTHER; note = 5-methyl
  source 1..19: mol_type = other RNA
aggaagatggcatttctag

SEQ ID NO: 4061 - RNA, 18 nt, synthetic construct
  misc_feature 1..18: note = Description of Artificial Sequence: Synthetic Antisense oligonucleotide
  modified_base 1: mod_base = OTHER; note = bicyclic nucleic acid (BNA)
  modified_base 11: mod_base = OTHER; note = 5-methyl
  modified_base 16: mod_base = OTHER; note = 5-methyl
  source 1..18: mol_type = other RNA
aggaagatggcatttcta

SEQ ID NO: 4062 - RNA, 17 nt, synthetic construct
  misc_feature 1..17: note = Description of Artificial Sequence: Synthetic Antisense oligonucleotide
  modified_base 1: mod_base = OTHER; note = bicyclic nucleic acid (BNA)
  modified_base 11: mod_base = OTHER; note = 5-methyl
  modified_base 16: mod_base = OTHER; note = 5-methyl
  source 1..17: mol_type = other RNA
aggaagatggcatttct

SEQ ID NO: 4063 - RNA, 16 nt, synthetic construct
  misc_feature 1..16: note = Description of Artificial Sequence: Synthetic Antisense oligonucleotide
  modified_base 1: mod_base = OTHER; note = bicyclic nucleic acid (BNA)
  modified_base 11: mod_base = OTHER; note = 5-methyl
  modified_base 16: mod_base = OTHER; note = 5-methyl
  source 1..16: mol_type = other RNA
aggaagatggcatttc

SEQ ID NO: 4064 - RNA, 15 nt, synthetic construct
  misc_feature 1..15: note = Description of Artificial Sequence: Synthetic Antisense oligonucleotide
  modified_base 1: mod_base = OTHER; note = bicyclic nucleic acid (BNA)
  modified_base 11: mod_base = OTHER; note = 5-methyl
  source 1..15: mol_type = other RNA
aggaagatggcattt

SEQ ID NO: 4065 - RNA, 14 nt, synthetic construct
  misc_feature 1..14: note = Description of Artificial Sequence: Synthetic Antisense oligonucleotide
  modified_base 1: mod_base = OTHER; note = bicyclic nucleic acid (BNA)
  modified_base 11: mod_base = OTHER; note = 5-methyl
  source 1..14: mol_type = other RNA
aggaagatggcatt

SEQ ID NO: 4066 - RNA, 13 nt, synthetic construct
  misc_feature 1..13: note = Description of Artificial Sequence: Synthetic Antisense oligonucleotide
  modified_base 1: mod_base = OTHER; note = bicyclic nucleic acid (BNA)
  modified_base 11: mod_base = OTHER; note = 5-methyl
  source 1..13: mol_type = other RNA
aggaagatggcat

SEQ ID NO: 4067 - RNA, 12 nt, synthetic construct
  misc_feature 1..12: note = Description of Artificial Sequence: Synthetic Antisense oligonucleotide
  modified_base 1: mod_base = OTHER; note = bicyclic nucleic acid (BNA)
  modified_base 11: mod_base = OTHER; note = 5-methyl
  source 1..12: mol_type = other RNA
aggaagatggca

SEQ ID NO: 4068 - RNA, 18 nt, synthetic construct
  misc_feature 1..18: note = Description of Artificial Sequence: Synthetic Antisense oligonucleotide
  modified_base 1: mod_base = OTHER; note = bicyclic nucleic acid (BNA)
  modified_base 10: mod_base = OTHER; note = 5-methyl
  modified_base 15: mod_base = OTHER; note = 5-methyl
  source 1..18: mol_type = other RNA
ggaagatggcatttctag

SEQ ID NO: 4069 - RNA, 17 nt, synthetic construct
  misc_feature 1..17: note = Description of Artificial Sequence: Synthetic Antisense oligonucleotide
  modified_base 1: mod_base = OTHER; note = bicyclic nucleic acid (BNA)
  modified_base 10: mod_base = OTHER; note = 5-methyl
  modified_base 15: mod_base = OTHER; note = 5-methyl
  source 1..17: mol_type = other RNA
ggaagatggcatttcta

SEQ ID NO: 4070 - RNA, 16 nt, synthetic construct
  misc_feature 1..16: note = Description of Artificial Sequence: Synthetic Antisense oligonucleotide
  modified_base 1: mod_base = OTHER; note = bicyclic nucleic acid (BNA)
  modified_base 10: mod_base = OTHER; note = 5-methyl
  modified_base 15: mod_base = OTHER; note = 5-methyl
  source 1..16: mol_type = other RNA
ggaagatggcatttct

SEQ ID NO: 4071 - RNA, 15 nt, synthetic construct
  misc_feature 1..15: note = Description of Artificial Sequence: Synthetic Antisense oligonucleotide
  modified_base 1: mod_base = OTHER; note = bicyclic nucleic acid (BNA)
  modified_base 10: mod_base = OTHER; note = 5-methyl
  modified_base 15: mod_base = OTHER; note = 5-methyl
  source 1..15: mol_type = other RNA
ggaagatggcatttc

SEQ ID NO: 4072 - RNA, 14 nt, synthetic construct
  misc_feature 1..14: note = Description of Artificial Sequence: Synthetic Antisense oligonucleotide
  modified_base 1: mod_base = OTHER; note = bicyclic nucleic acid (BNA)
  modified_base 10: mod_base = OTHER; note = 5-methyl
  source 1..14: mol_type = other RNA
ggaagatggcattt

SEQ ID NO: 4073 - RNA, 13 nt, synthetic construct
  misc_feature 1..13: note = Description of Artificial Sequence: Synthetic Antisense oligonucleotide
  modified_base 1: mod_base = OTHER; note = bicyclic nucleic acid (BNA)
  modified_base 10: mod_base = OTHER; note = 5-methyl
  source 1..13: mol_type = other RNA
ggaagatggcatt

SEQ ID NO: 4074 - RNA, 12 nt, synthetic construct
  misc_feature 1..12: note = Description of Artificial Sequence: Synthetic Antisense oligonucleotide
  modified_base 1: mod_base = OTHER; note = bicyclic nucleic acid (BNA)
  modified_base 10: mod_base = OTHER; note = 5-methyl
  source 1..12: mol_type = other RNA
ggaagatggcat

SEQ ID NO: 4075 - RNA, 11 nt, synthetic construct
  misc_feature 1..11: note = Description of Artificial Sequence: Synthetic Antisense oligonucleotide
  modified_base 1: mod_base = OTHER; note = bicyclic nucleic acid (BNA)
  modified_base 10: mod_base = OTHER; note = 5-methyl
  source 1..11: mol_type = other RNA
ggaagatggca

SEQ ID NO: 4076 - RNA, 10 nt, synthetic construct
  misc_feature 1..10: note = Description of Artificial Sequence: Synthetic Antisense oligonucleotide
  modified_base 1: mod_base = OTHER; note = bicyclic nucleic acid (BNA)
  modified_base 10: mod_base = OTHER; note = 5-methyl
  source 1..10: mol_type = other RNA
ggaagatggc

SEQ ID NO: 4077 - RNA, 17 nt, synthetic construct
  misc_feature 1..17: note = Description of Artificial Sequence: Synthetic Antisense oligonucleotide
  modified_base 1: mod_base = OTHER; note = bicyclic nucleic acid (BNA)
  modified_base 9: mod_base = OTHER; note = 5-methyl
  modified_base 14: mod_base = OTHER; note = 5-methyl
  source 1..17: mol_type = other RNA
gaagatggcatttctag

SEQ ID NO: 4078 - RNA, 16 nt, synthetic construct
  misc_feature 1..16: note = Description of Artificial Sequence: Synthetic Antisense oligonucleotide
  modified_base 1: mod_base = OTHER; note = bicyclic nucleic acid (BNA)
  modified_base 9: mod_base = OTHER; note = 5-methyl
  modified_base 14: mod_base = OTHER; note = 5-methyl
  source 1..16: mol_type = other RNA
gaagatggcatttcta

SEQ ID NO: 4079 - RNA, 14 nt, synthetic construct
  misc_feature 1..14: note = Description of Artificial Sequence: Synthetic Antisense oligonucleotide
  modified_base 1: mod_base = OTHER; note = bicyclic nucleic acid (BNA)
  modified_base 9: mod_base = OTHER; note = 5-methyl
  modified_base 14: mod_base = OTHER; note = 5-methyl
  source 1..14: mol_type = other RNA
gaagatggcatttc

SEQ ID NO: 4080 - RNA, 13 nt, synthetic construct
  misc_feature 1..13: note = Description of Artificial Sequence: Synthetic Antisense oligonucleotide
  modified_base 1: mod_base = OTHER; note = bicyclic nucleic acid (BNA)
  modified_base 9: mod_base = OTHER; note = 5-methyl
  source 1..13: mol_type = other RNA
gaagatggcattt

SEQ ID NO: 4081 - RNA, 12 nt, synthetic construct
  misc_feature 1..12: note = Description of Artificial Sequence: Synthetic Antisense oligonucleotide
  modified_base 1: mod_base = OTHER; note = bicyclic nucleic acid (BNA)
  modified_base 9: mod_base = OTHER; note = 5-methyl
  source 1..12: mol_type = other RNA
gaagatggcatt

SEQ ID NO: 4082 - RNA, 11 nt, synthetic construct
  misc_feature 1..11: note = Description of Artificial Sequence: Synthetic Antisense oligonucleotide
  modified_base 1: mod_base = OTHER; note = bicyclic nucleic acid (BNA)
  modified_base 9: mod_base = OTHER; note = 5-methyl
  source 1..11: mol_type = other RNA
gaagatggcat

SEQ ID NO: 4083 - RNA, 10 nt, synthetic construct
  misc_feature 1..10: note = Description of Artificial Sequence: Synthetic Antisense oligonucleotide
  modified_base 1: mod_base = OTHER; note = bicyclic nucleic acid (BNA)
  modified_base 9: mod_base = OTHER; note = 5-methyl
  source 1..10: mol_type = other RNA
gaagatggca

SEQ ID NO: 4084 - skipped

SEQ ID NO: 4085 - RNA, 16 nt, synthetic construct
  misc_feature 1..16: note = Description of Artificial Sequence: Synthetic Antisense oligonucleotide
  modified_base 1: mod_base = OTHER; note = bicyclic nucleic acid (BNA)
  modified_base 8: mod_base = OTHER; note = 5-methyl
  modified_base 13: mod_base = OTHER; note = 5-methyl
  source 1..16: mol_type = other RNA
aagatggcatttctag

SEQ ID NO: 4086 - RNA, 15 nt, synthetic construct
  misc_feature 1..15: note = Description of Artificial Sequence: Synthetic Antisense oligonucleotide
  modified_base 1: mod_base = OTHER; note = bicyclic nucleic acid (BNA)
  modified_base 8: mod_base = OTHER; note = 5-methyl
  modified_base 13: mod_base = OTHER; note = 5-methyl
  source 1..15: mol_type = other RNA
aagatggcatttcta

SEQ ID NO: 4087 - RNA, 14 nt, synthetic construct
  misc_feature 1..14: note = Description of Artificial Sequence: Synthetic Antisense oligonucleotide
  modified_base 1: mod_base = OTHER; note = bicyclic nucleic acid (BNA)
  modified_base 8: mod_base = OTHER; note = 5-methyl
  modified_base 13: mod_base = OTHER; note = 5-methyl
  source 1..14: mol_type = other RNA
aagatggcatttct

SEQ ID NO: 4088 - RNA, 13 nt, synthetic construct
  misc_feature 1..13: note = Description of Artificial Sequence: Synthetic Antisense oligonucleotide
  modified_base 1: mod_base = OTHER; note = bicyclic nucleic acid (BNA)
  modified_base 8: mod_base = OTHER; note = 5-methyl
  modified_base 13: mod_base = OTHER; note = 5-methyl
  source 1..13: mol_type = other RNA
aagatggcatttc

SEQ ID NO: 4089 - RNA, 12 nt, synthetic construct
  misc_feature 1..12: note = Description of Artificial Sequence: Synthetic Antisense oligonucleotide
  modified_base 1: mod_base = OTHER; note = bicyclic nucleic acid (BNA)
  modified_base 8: mod_base = OTHER; note = 5-methyl
  source 1..12: mol_type = other RNA
aagatggcattt

SEQ ID NO: 4090 - RNA, 11 nt, synthetic construct
  misc_feature 1..11: note = Description of Artificial Sequence: Synthetic Antisense oligonucleotide
  modified_base 1: mod_base = OTHER; note = bicyclic nucleic acid (BNA)
  modified_base 8: mod_base = OTHER; note = 5-methyl
  source 1..11: mol_type = other RNA
aagatggcatt

SEQ ID NO: 4091 - RNA, 10 nt, synthetic construct
  misc_feature 1..10: note = Description of Artificial Sequence: Synthetic Antisense oligonucleotide
  modified_base 1: mod_base = OTHER; note = bicyclic nucleic acid (BNA)
  modified_base 8: mod_base = OTHER; note = 5-methyl
  source 1..10: mol_type = other RNA
aagatggcat

SEQ ID NO: 4092-4093 - skipped (2 entries)

SEQ ID NO: 4094 - RNA, 15 nt, synthetic construct
  misc_feature 1..15: note = Description of Artificial Sequence: Synthetic Antisense oligonucleotide
  modified_base 1: mod_base = OTHER; note = bicyclic nucleic acid (BNA)
  modified_base 7: mod_base = OTHER; note = 5-methyl
  modified_base 12: mod_base = OTHER; note = 5-methyl
  source 1..15: mol_type = other RNA
agatggcatttctag

SEQ ID NO: 4095 - RNA, 14 nt, synthetic construct
  misc_feature 1..14: note = Description of Artificial Sequence: Synthetic Antisense oligonucleotide
  modified_base 1: mod_base = OTHER; note = bicyclic nucleic acid (BNA)
  modified_base 7: mod_base = OTHER; note = 5-methyl
  modified_base 12: mod_base = OTHER; note = 5-methyl
  source 1..14: mol_type = other RNA
agatggcatttcta

SEQ ID NO: 4096 - RNA, 13 nt, synthetic construct
  misc_feature 1..13: note = Description of Artificial Sequence: Synthetic Antisense oligonucleotide
  modified_base 1: mod_base = OTHER; note = bicyclic nucleic acid (BNA)
  modified_base 7: mod_base = OTHER; note = 5-methyl
  modified_base 12: mod_base = OTHER; note = 5-methyl
  source 1..13: mol_type = other RNA
agatggcatttct

SEQ ID NO: 4097 - RNA, 12 nt, synthetic construct
  misc_feature 1..12: note = Description of Artificial Sequence: Synthetic Antisense oligonucleotide
  modified_base 1: mod_base = OTHER; note = bicyclic nucleic acid (BNA)
  modified_base 7: mod_base = OTHER; note = 5-methyl
  modified_base 12: mod_base = OTHER; note = 5-methyl
  source 1..12: mol_type = other RNA
agatggcatttc

SEQ ID NO: 4098 - RNA, 11 nt, synthetic construct
  misc_feature 1..11: note = Description of Artificial Sequence: Synthetic Antisense oligonucleotide
  modified_base 1: mod_base = OTHER; note = bicyclic nucleic acid (BNA)
  modified_base 7: mod_base = OTHER; note = 5-methyl
  source 1..11: mol_type = other RNA
agatggcattt

SEQ ID NO: 4099 - RNA, 10 nt, synthetic construct
  misc_feature 1..10: note = Description of Artificial Sequence: Synthetic Antisense oligonucleotide
  modified_base 1: mod_base = OTHER; note = bicyclic nucleic acid (BNA)
  modified_base 7: mod_base = OTHER; note = 5-methyl
  source 1..10: mol_type = other RNA
agatggcatt

SEQ ID NO: 4100-4101 - skipped (2 entries)

SEQ ID NO: 4102 - RNA, 30 nt, synthetic construct; identical to SEQ ID NO: 287
  misc_feature 1..30: note = Description of Artificial Sequence: Synthetic Antisense oligonucleotide
  modified_base 1: mod_base = OTHER; note = 5-methyl
  modified_base 3..4: mod_base = OTHER; note = 5-methyl
  modified_base 7: mod_base = OTHER; note = 5-methyl
  modified_base 10: mod_base = OTHER; note = 5-methyl
  modified_base 22: mod_base = OTHER; note = 5-methyl
  modified_base 27: mod_base = OTHER; note = 5-methyl
  modified_base 1: mod_base = OTHER; note = bicyclic nucleic acid (BNA)
  source 1..30: mol_type = other RNA

SEQ ID NO: 4103 - RNA, 29 nt, synthetic construct
  misc_feature 1..29: note = Description of Artificial Sequence: Synthetic Antisense oligonucleotide
  modified_base 1: mod_base = OTHER; note = 5-methyl
  modified_base 3..4: mod_base = OTHER; note = 5-methyl
  modified_base 7: mod_base = OTHER; note = 5-methyl
  modified_base 10: mod_base = OTHER; note = 5-methyl
  modified_base 22: mod_base = OTHER; note = 5-methyl
  modified_base 27: mod_base = OTHER; note = 5-methyl
  modified_base 1: mod_base = OTHER; note = bicyclic nucleic acid (BNA)
  source 1..29: mol_type = other RNA
ctccaacatcaaggaagatggcatttcta

SEQ ID NO: 4104 - RNA, 28 nt, synthetic construct
  misc_feature 1..28: note = Description of Artificial Sequence: Synthetic Antisense oligonucleotide
  modified_base 1: mod_base = OTHER; note = 5-methyl
  modified_base 3..4: mod_base = OTHER; note = 5-methyl
  modified_base 7: mod_base = OTHER; note = 5-methyl
  modified_base 10: mod_base = OTHER; note = 5-methyl
  modified_base 22: mod_base = OTHER; note = 5-methyl
  modified_base 27: mod_base = OTHER; note = 5-methyl
  modified_base 1: mod_base = OTHER; note = bicyclic nucleic acid (BNA)
  source 1..28: mol_type = other RNA
ctccaacatcaaggaagatggcatttct

SEQ ID NO: 4105 - RNA, 27 nt, synthetic construct
  misc_feature 1..27: note = Description of Artificial Sequence: Synthetic Antisense oligonucleotide
  modified_base 1: mod_base = OTHER; note = 5-methyl
  modified_base 3..4: mod_base = OTHER; note = 5-methyl
  modified_base 7: mod_base = OTHER; note = 5-methyl
  modified_base 10: mod_base = OTHER; note = 5-methyl
  modified_base 22: mod_base = OTHER; note = 5-methyl
  modified_base 27: mod_base = OTHER; note = 5-methyl
  modified_base 1: mod_base = OTHER; note = bicyclic nucleic acid (BNA)
  source 1..27: mol_type = other RNA
ctccaacatcaaggaagatggcatttc

SEQ ID NO: 4106 - RNA, 26 nt, synthetic construct
  misc_feature 1..26: note = Description of Artificial Sequence: Synthetic Antisense oligonucleotide
  modified_base 1: mod_base = OTHER; note = 5-methyl
  modified_base 3..4: mod_base = OTHER; note = 5-methyl
  modified_base 7: mod_base = OTHER; note = 5-methyl
  modified_base 10: mod_base = OTHER; note = 5-methyl
  modified_base 22: mod_base = OTHER; note = 5-methyl
  modified_base 1: mod_base = OTHER; note = bicyclic nucleic acid (BNA)
  source 1..26: mol_type = other RNA
ctccaacatcaaggaagatggcattt

SEQ ID NO: 4107 - RNA, 25 nt, synthetic construct
  misc_feature 1..25: note = Description of Artificial Sequence: Synthetic Antisense oligonucleotide
  modified_base 1: mod_base = OTHER; note = 5-methyl
  modified_base 3..4: mod_base = OTHER; note = 5-methyl
  modified_base 7: mod_base = OTHER; note = 5-methyl
  modified_base 10: mod_base = OTHER; note = 5-methyl
  modified_base 22: mod_base = OTHER; note = 5-methyl
  modified_base 1: mod_base = OTHER; note = bicyclic nucleic acid (BNA)
  source 1..25: mol_type = other RNA
ctccaacatcaaggaagatggcatt

SEQ ID NO: 4108 - RNA, 24 nt, synthetic construct
  misc_feature 1..24: note = Description of Artificial Sequence: Synthetic Antisense oligonucleotide
  modified_base 1: mod_base = OTHER; note = 5-methyl
  modified_base 3..4: mod_base = OTHER; note = 5-methyl
  modified_base 7: mod_base = OTHER; note = 5-methyl
  modified_base 10: mod_base = OTHER; note = 5-methyl
  modified_base 22: mod_base = OTHER; note = 5-methyl
  modified_base 1: mod_base = OTHER; note = bicyclic nucleic acid (BNA)
  source 1..24: mol_type = other RNA
ctccaacatcaaggaagatggcat

SEQ ID NO: 4109 - RNA, 23 nt, synthetic construct
  misc_feature 1..23: note = Description of Artificial Sequence: Synthetic Antisense oligonucleotide
  modified_base 1: mod_base = OTHER; note = 5-methyl
  modified_base 3..4: mod_base = OTHER; note = 5-methyl
  modified_base 7: mod_base = OTHER; note = 5-methyl
  modified_base 10: mod_base = OTHER; note = 5-methyl
  modified_base 22: mod_base = OTHER; note = 5-methyl
  modified_base 1: mod_base = OTHER; note = bicyclic nucleic acid (BNA)
  source 1..23: mol_type = other RNA
ctccaacatcaaggaagatggca

SEQ ID NO: 4110 - RNA, 22 nt, synthetic construct
  misc_feature 1..22: note = Description of Artificial Sequence: Synthetic Antisense oligonucleotide
  modified_base 1: mod_base = OTHER; note = 5-methyl
  modified_base 3..4: mod_base = OTHER; note = 5-methyl
  modified_base 7: mod_base = OTHER; note = 5-methyl
  modified_base 10: mod_base = OTHER; note = 5-methyl
  modified_base 22: mod_base = OTHER; note = 5-methyl
  modified_base 1: mod_base = OTHER; note = bicyclic nucleic acid (BNA)
  source 1..22: mol_type = other RNA
ctccaacatcaaggaagatggc

SEQ ID NO: 4111 - RNA, 21 nt, synthetic construct
  misc_feature 1..21: note = Description of Artificial Sequence: Synthetic Antisense oligonucleotide
  modified_base 1: mod_base = OTHER; note = 5-methyl
  modified_base 3..4: mod_base = OTHER; note = 5-methyl
  modified_base 7: mod_base = OTHER; note = 5-methyl
  modified_base 10: mod_base = OTHER; note = 5-methyl
  modified_base 1: mod_base = OTHER; note = bicyclic nucleic acid (BNA)
  source 1..21: mol_type = other RNA
ctccaacatcaaggaagatgg

SEQ ID NO: 4112 - RNA, 20 nt, synthetic construct
  misc_feature 1..20: note = Description of Artificial Sequence: Synthetic Antisense oligonucleotide
  modified_base 1: mod_base = OTHER; note = 5-methyl
  modified_base 3..4: mod_base = OTHER; note = 5-methyl
  modified_base 7: mod_base = OTHER; note = 5-methyl
  modified_base 10: mod_base = OTHER; note = 5-methyl
  modified_base 1: mod_base = OTHER; note = bicyclic nucleic acid (BNA)
  source 1..20: mol_type = other RNA
ctccaacatcaaggaagatg

SEQ ID NO: 4113 - RNA, 19 nt, synthetic construct
  misc_feature 1..19: note = Description of Artificial Sequence: Synthetic Antisense oligonucleotide
  modified_base 1: mod_base = OTHER; note = 5-methyl
  modified_base 3..4: mod_base = OTHER; note = 5-methyl
  modified_base 7: mod_base = OTHER; note = 5-methyl
  modified_base 10: mod_base = OTHER; note = 5-methyl
  modified_base 1: mod_base = OTHER; note = bicyclic nucleic acid (BNA)
  source 1..19: mol_type = other RNA
ctccaacatcaaggaagat

SEQ ID NO: 4114 - RNA, 18 nt, synthetic construct
  misc_feature 1..18: note = Description of Artificial Sequence: Synthetic Antisense oligonucleotide
  modified_base 1: mod_base = OTHER; note = 5-methyl
  modified_base 3..4: mod_base = OTHER; note = 5-methyl
  modified_base 7: mod_base = OTHER; note = 5-methyl
  modified_base 10: mod_base = OTHER; note = 5-methyl
  modified_base 1: mod_base = OTHER; note = bicyclic nucleic acid (BNA)
  source 1..18: mol_type = other RNA
ctccaacatcaaggaaga

SEQ ID NO: 4115 - RNA, 17 nt, synthetic construct
  misc_feature 1..17: note = Description of Artificial Sequence: Synthetic Antisense oligonucleotide
  modified_base 1: mod_base = OTHER; note = 5-methyl
  modified_base 3..4: mod_base = OTHER; note = 5-methyl
  modified_base 7: mod_base = OTHER; note = 5-methyl
  modified_base 10: mod_base = OTHER; note = 5-methyl
  modified_base 1: mod_base = OTHER; note = bicyclic nucleic acid (BNA)
  source 1..17: mol_type = other RNA
ctccaacatcaaggaag

SEQ ID NO: 4116 - DNA, 29 bp, synthetic construct
  misc_feature 1..29: note = Description of Artificial Sequence: Synthetic Antisense oligonucleotide
  misc_feature 1..29: note = Original Sequence: tccaacaucaaggaagauggcauuucuag
  modified_base 1: mod_base = OTHER; note = bicyclic nucleic acid (BNA)
  modified_base 2..3: mod_base = OTHER; note = 5-methyl
  modified_base 6: mod_base = OTHER; note = 5-methyl
  modified_base 9: mod_base = OTHER; note = 5-methyl
  modified_base 21: mod_base = OTHER; note = 5-methyl
  modified_base 26: mod_base = OTHER; note = 5-methyl
  source 1..29: mol_type = other DNA
  modified_base 8: mod_base = OTHER; note = Uracil
  modified_base 18: mod_base = OTHER; note = Uracil
  modified_base 23: mod_base = OTHER; note = Uracil
  modified_base 24: mod_base = OTHER; note = Uracil
  modified_base 25: mod_base = OTHER; note = Uracil
  modified_base 27: mod_base = OTHER; note = Uracil
tccaacatcaaggaagatggcatttctag

SEQ ID NO: 4117 - DNA, 28 bp, synthetic construct
  misc_feature 1..28: note = Description of Artificial Sequence: Synthetic Antisense oligonucleotide
  misc_feature 1..28: note = Original Sequence: tccaacaucaaggaagauggcauuucua
  modified_base 1: mod_base = OTHER; note = bicyclic nucleic acid (BNA)
  modified_base 2..3: mod_base = OTHER; note = 5-methyl
  modified_base 6: mod_base = OTHER; note = 5-methyl
  modified_base 9: mod_base = OTHER; note = 5-methyl
  modified_base 21: mod_base = OTHER; note = 5-methyl
  modified_base 26: mod_base = OTHER; note = 5-methyl
  source 1..28: mol_type = other DNA
  modified_base 8: mod_base = OTHER; note = Uracil
  modified_base 18: mod_base = OTHER; note = Uracil
  modified_base 23: mod_base = OTHER; note = Uracil
  modified_base 24: mod_base = OTHER; note = Uracil
  modified_base 25: mod_base = OTHER; note = Uracil
  modified_base 27: mod_base = OTHER; note = Uracil
tccaacatcaaggaagatggcatttcta

SEQ ID NO: 4118 - DNA, 27 bp, synthetic construct
  misc_feature 1..27: note = Description of Artificial Sequence: Synthetic Antisense oligonucleotide
  misc_feature 1..27: note = Original Sequence: tccaacaucaaggaagauggcauuucu
  modified_base 1: mod_base = OTHER; note = bicyclic nucleic acid (BNA)
  modified_base 2..3: mod_base = OTHER; note = 5-methyl
  modified_base 6: mod_base = OTHER; note = 5-methyl
  modified_base 9: mod_base = OTHER; note = 5-methyl
  modified_base 21: mod_base = OTHER; note = 5-methyl
  modified_base 26: mod_base = OTHER; note = 5-methyl
  source 1..27: mol_type = other DNA
  modified_base 8: mod_base = OTHER; note = Uracil
  modified_base 18: mod_base = OTHER; note = Uracil
  modified_base 23: mod_base = OTHER; note = Uracil
  modified_base 24: mod_base = OTHER; note = Uracil
  modified_base 25: mod_base = OTHER; note = Uracil
  modified_base 27: mod_base = OTHER; note = Uracil
tccaacatcaaggaagatggcatttct

SEQ ID NO: 4119 - DNA, 26 bp, synthetic construct
  misc_feature 1..26: note = Description of Artificial Sequence: Synthetic Antisense oligonucleotide
  misc_feature 1..26: note = Original Sequence: tccaacaucaaggaagauggcauuuc
  modified_base 1: mod_base = OTHER; note = bicyclic nucleic acid (BNA)
  modified_base 2..3: mod_base = OTHER; note = 5-methyl
  modified_base 6: mod_base = OTHER; note = 5-methyl
  modified_base 9: mod_base = OTHER; note = 5-methyl
  modified_base 21: mod_base = OTHER; note = 5-methyl
  modified_base 26: mod_base = OTHER; note = 5-methyl
  source 1..26: mol_type = other DNA
  modified_base 8: mod_base = OTHER; note = Uracil
  modified_base 18: mod_base = OTHER; note = Uracil
  modified_base 23: mod_base = OTHER; note = Uracil
  modified_base 24: mod_base = OTHER; note = Uracil
  modified_base 25: mod_base = OTHER; note = Uracil
tccaacatcaaggaagatggcatttc

SEQ ID NO: 4120 - DNA, 25 bp, synthetic construct
  misc_feature 1..25: note = Description of Artificial Sequence: Synthetic Antisense oligonucleotide
  misc_feature 1..25: note = Original Sequence: tccaacaucaaggaagauggcauuu
  modified_base 1: mod_base = OTHER; note = bicyclic nucleic acid (BNA)
  modified_base 2..3: mod_base = OTHER; note = 5-methyl
  modified_base 6: mod_base = OTHER; note = 5-methyl
  modified_base 9: mod_base = OTHER; note = 5-methyl
  modified_base 21: mod_base = OTHER; note = 5-methyl
  source 1..25: mol_type = other DNA
  modified_base 8: mod_base = OTHER; note = Uracil
  modified_base 18: mod_base = OTHER; note = Uracil
  modified_base 23: mod_base = OTHER; note = Uracil
  modified_base 24: mod_base = OTHER; note = Uracil
  modified_base 25: mod_base = OTHER; note = Uracil
tccaacatcaaggaagatggcattt

SEQ ID NO: 4121 - DNA, 24 bp, synthetic construct
  misc_feature 1..24: note = Description of Artificial Sequence: Synthetic Antisense oligonucleotide
  misc_feature 1..24: note = Original Sequence: tccaacaucaaggaagauggcauu
  modified_base 1: mod_base = OTHER; note = bicyclic nucleic acid (BNA)
  modified_base 2..3: mod_base = OTHER; note = 5-methyl
  modified_base 6: mod_base = OTHER; note = 5-methyl
  modified_base 9: mod_base = OTHER; note = 5-methyl
  modified_base 21: mod_base = OTHER; note = 5-methyl
  source 1..24: mol_type = other DNA
  modified_base 8: mod_base = OTHER; note = Uracil
  modified_base 18: mod_base = OTHER; note = Uracil
  modified_base 23: mod_base = OTHER; note = Uracil
  modified_base 24: mod_base = OTHER; note = Uracil
tccaacatcaaggaagatggcatt

SEQ ID NO: 4122 - DNA, 23 bp, synthetic construct
  misc_feature 1..23: note = Description of Artificial Sequence: Synthetic Antisense oligonucleotide
  misc_feature 1..23: note = Original Sequence: tccaacaucaaggaagauggcau
  modified_base 1: mod_base = OTHER; note = bicyclic nucleic acid (BNA)
  modified_base 2..3: mod_base = OTHER; note = 5-methyl
  modified_base 6: mod_base = OTHER; note = 5-methyl
  modified_base 9: mod_base = OTHER; note = 5-methyl
  modified_base 21: mod_base = OTHER; note = 5-methyl
  source 1..23: mol_type = other DNA
  modified_base 8: mod_base = OTHER; note = Uracil
  modified_base 18: mod_base = OTHER; note = Uracil
  modified_base 23: mod_base = OTHER; note = Uracil
tccaacatcaaggaagatggcat

SEQ ID NO: 4123 - DNA, 22 bp, synthetic construct
  misc_feature 1..22: note = Description of Artificial Sequence: Synthetic Antisense oligonucleotide
  misc_feature 1..22: note = Original Sequence: tccaacaucaaggaagauggca
  modified_base 1: mod_base = OTHER; note = bicyclic nucleic acid (BNA)
  modified_base 2..3: mod_base = OTHER; note = 5-methyl
  modified_base 6: mod_base = OTHER; note = 5-methyl
  modified_base 9: mod_base = OTHER; note = 5-methyl
  modified_base 21: mod_base = OTHER; note = 5-methyl
  source 1..22: mol_type = other DNA
  modified_base 8: mod_base = OTHER; note = Uracil
  modified_base 18: mod_base = OTHER; note = Uracil
tccaacatcaaggaagatggca

SEQ ID NO: 4124 - DNA, 21 bp, synthetic construct
  misc_feature 1..21: note = Description of Artificial Sequence: Synthetic Antisense oligonucleotide
  misc_feature 1..21: note = Original Sequence: tccaacaucaaggaagauggc
  modified_base 1: mod_base = OTHER; note = bicyclic nucleic acid (BNA)
  modified_base 2..3: mod_base = OTHER; note = 5-methyl
  modified_base 6: mod_base = OTHER; note = 5-methyl
  modified_base 9: mod_base = OTHER; note = 5-methyl
  modified_base 21: mod_base = OTHER; note = 5-methyl
  source 1..21: mol_type = other DNA
  modified_base 8: mod_base = OTHER; note = Uracil
  modified_base 18: mod_base = OTHER; note = Uracil
tccaacatcaaggaagatggc

SEQ ID NO: 4125 - DNA, 20 bp, synthetic construct
  misc_feature 1..20: note = Description of Artificial Sequence: Synthetic Antisense oligonucleotide
  misc_feature 1..20: note = Original Sequence: tccaacaucaaggaagaugg
  modified_base 1: mod_base = OTHER; note = bicyclic nucleic acid (BNA)
  modified_base 2..3: mod_base = OTHER; note = 5-methyl
  modified_base 6: mod_base = OTHER; note = 5-methyl
  modified_base 9: mod_base = OTHER; note = 5-methyl
  source 1..20: mol_type = other DNA
  modified_base 8: mod_base = OTHER; note = Uracil
  modified_base 18: mod_base = OTHER; note = Uracil
tccaacatcaaggaagatgg

SEQ ID NO: 4126 - DNA, 19 bp, synthetic construct
  misc_feature 1..19: note = Description of Artificial Sequence: Synthetic Antisense oligonucleotide
  misc_feature 1..19: note = Original Sequence: tccaacaucaaggaagaug
  modified_base 1: mod_base = OTHER; note = bicyclic nucleic acid (BNA)
  modified_base 2..3: mod_base = OTHER; note = 5-methyl
  modified_base 6: mod_base = OTHER; note = 5-methyl
  modified_base 9: mod_base = OTHER; note = 5-methyl
  source 1..19: mol_type = other DNA
  modified_base 8: mod_base = OTHER; note = Uracil
  modified_base 18: mod_base = OTHER; note = Uracil
tccaacatcaaggaagatg

SEQ ID NO: 4127 - DNA, 18 bp, synthetic construct
  misc_feature 1..18: note = Description of Artificial Sequence: Synthetic Antisense oligonucleotide
  misc_feature 1..18: note = Original Sequence: tccaacaucaaggaagau
  modified_base 1: mod_base = OTHER; note = bicyclic nucleic acid (BNA)
  modified_base 2..3: mod_base = OTHER; note = 5-methyl
  modified_base 6: mod_base = OTHER; note = 5-methyl
  modified_base 9: mod_base = OTHER; note = 5-methyl
  source 1..18: mol_type = other DNA
  modified_base 8: mod_base = OTHER; note = Uracil
  modified_base 18: mod_base = OTHER; note = Uracil
tccaacatcaaggaagat

SEQ ID NO: 4128 - DNA, 17 bp, synthetic construct
  misc_feature 1..17: note = Description of Artificial Sequence: Synthetic Antisense oligonucleotide
  misc_feature 1..17: note = Original Sequence: tccaacaucaaggaaga
  modified_base 1: mod_base = OTHER; note = bicyclic nucleic acid (BNA)
  modified_base 2..3: mod_base = OTHER; note = 5-methyl
  modified_base 6: mod_base = OTHER; note = 5-methyl
  modified_base 9: mod_base = OTHER; note = 5-methyl
  source 1..17: mol_type = other DNA
  modified_base 8: mod_base = OTHER; note = Uracil
tccaacatcaaggaaga

SEQ ID NO: 4129 - DNA, 16 bp, synthetic construct
  misc_feature 1..16: note = Description of Artificial Sequence: Synthetic Antisense oligonucleotide
  misc_feature 1..16: note = Original Sequence: tccaacaucaaggaag
  modified_base 1: mod_base = OTHER; note = bicyclic nucleic acid (BNA)
  modified_base 2..3: mod_base = OTHER; note = 5-methyl
  modified_base 6: mod_base = OTHER; note = 5-methyl
  modified_base 9: mod_base = OTHER; note = 5-methyl
  source 1..16: mol_type = other DNA
  modified_base 8: mod_base = OTHER; note = Uracil
tccaacatcaaggaag

SEQ ID NO: 4130 - RNA, 28 nt, synthetic construct
  misc_feature 1..28: note = Description of Artificial Sequence: Synthetic Antisense oligonucleotide
  modified_base 1..2: mod_base = OTHER; note = 5-methyl
  modified_base 5: mod_base = OTHER; note = 5-methyl
  modified_base 8: mod_base = OTHER; note = 5-methyl
  modified_base 20: mod_base = OTHER; note = 5-methyl
  modified_base 25: mod_base = OTHER; note = 5-methyl
  modified_base 1: mod_base = OTHER; note = bicyclic nucleic acid (BNA)
  source 1..28: mol_type = other RNA
ccaacatcaaggaagatggcatttctag

SEQ ID NO: 4131 - RNA, 27 nt, synthetic construct
  misc_feature 1..27: note = Description of Artificial Sequence: Synthetic Antisense oligonucleotide
  modified_base 1..2: mod_base = OTHER; note = 5-methyl
  modified_base 5: mod_base = OTHER; note = 5-methyl
  modified_base 8: mod_base = OTHER; note = 5-methyl
  modified_base 20: mod_base = OTHER; note = 5-methyl
  modified_base 25: mod_base = OTHER; note = 5-methyl
  modified_base 1: mod_base = OTHER; note = bicyclic nucleic acid (BNA)
  source 1..27: mol_type = other RNA
ccaacatcaaggaagatggcatttcta

SEQ ID NO: 4132 - RNA, 26 nt, synthetic construct
  misc_feature 1..26: note = Description of Artificial Sequence: Synthetic Antisense oligonucleotide
  modified_base 1..2: mod_base = OTHER; note = 5-methyl
  modified_base 5: mod_base = OTHER; note = 5-methyl
  modified_base 8: mod_base = OTHER; note = 5-methyl
  modified_base 20: mod_base = OTHER; note = 5-methyl
  modified_base 25: mod_base = OTHER; note = 5-methyl
  modified_base 1: mod_base = OTHER; note = bicyclic nucleic acid (BNA)
  source 1..26: mol_type = other RNA
ccaacatcaaggaagatggcatttct

SEQ ID NO: 4133 - RNA, 25 nt, synthetic construct
  misc_feature 1..25: note = Description of Artificial Sequence: Synthetic Antisense oligonucleotide
  modified_base 1..2: mod_base = OTHER; note = 5-methyl
  modified_base 5: mod_base = OTHER; note = 5-methyl
  modified_base 8: mod_base = OTHER; note = 5-methyl
  modified_base 20: mod_base = OTHER; note = 5-methyl
  modified_base 25: mod_base = OTHER; note = 5-methyl
  modified_base 1: mod_base = OTHER; note = bicyclic nucleic acid (BNA)
  source 1..25: mol_type = other RNA
ccaacatcaaggaagatggcatttc

SEQ ID NO: 4134 - RNA, 24 nt, synthetic construct
  misc_feature 1..24: note = Description of Artificial Sequence: Synthetic Antisense oligonucleotide
  modified_base 1..2: mod_base = OTHER; note = 5-methyl
  modified_base 5: mod_base = OTHER; note = 5-methyl
  modified_base 8: mod_base = OTHER; note = 5-methyl
  modified_base 20: mod_base = OTHER; note = 5-methyl
  modified_base 1: mod_base = OTHER; note = bicyclic nucleic acid (BNA)
  source 1..24: mol_type = other RNA
ccaacatcaaggaagatggcattt

SEQ ID NO: 4135 - RNA, 23 nt, synthetic construct
  misc_feature 1..23: note = Description of Artificial Sequence: Synthetic Antisense oligonucleotide
  modified_base 1..2: mod_base = OTHER; note = 5-methyl
  modified_base 5: mod_base = OTHER; note = 5-methyl
  modified_base 8: mod_base = OTHER; note = 5-methyl
  modified_base 20: mod_base = OTHER; note = 5-methyl
  modified_base 1: mod_base = OTHER; note = bicyclic nucleic acid (BNA)
  source 1..23: mol_type = other RNA
ccaacatcaaggaagatggcatt

SEQ ID NO: 4136 - RNA, 22 nt, synthetic construct
  misc_feature 1..22: note = Description of Artificial Sequence: Synthetic Antisense oligonucleotide
  modified_base 1..2: mod_base = OTHER; note = 5-methyl
  modified_base 5: mod_base = OTHER; note = 5-methyl
  modified_base 8: mod_base = OTHER; note = 5-methyl
  modified_base 20: mod_base = OTHER; note = 5-methyl
  modified_base 1: mod_base = OTHER; note = bicyclic nucleic acid (BNA)
  source 1..22: mol_type = other RNA
ccaacatcaaggaagatggcat

SEQ ID NO: 4137 - RNA, 21 nt, synthetic construct
  misc_feature 1..21: note = Description of Artificial Sequence: Synthetic Antisense oligonucleotide
  modified_base 1..2: mod_base = OTHER; note = 5-methyl
  modified_base 5: mod_base = OTHER; note = 5-methyl
  modified_base 8: mod_base = OTHER; note = 5-methyl
  modified_base 20: mod_base = OTHER; note = 5-methyl
  modified_base 1: mod_base = OTHER; note = bicyclic nucleic acid (BNA)
  source 1..21: mol_type = other RNA
ccaacatcaaggaagatggca

SEQ ID NO: 4138 - RNA, 20 nt, synthetic construct
  misc_feature 1..20: note = Description of Artificial Sequence: Synthetic Antisense oligonucleotide
  modified_base 1..2: mod_base = OTHER; note = 5-methyl
  modified_base 5: mod_base = OTHER; note = 5-methyl
  modified_base 8: mod_base = OTHER; note = 5-methyl
  modified_base 20: mod_base = OTHER; note = 5-methyl
  modified_base 1: mod_base = OTHER; note = bicyclic nucleic acid (BNA)
  source 1..20: mol_type = other RNA
ccaacatcaaggaagatggc

SEQ ID NO: 4139 - RNA, 19 nt, synthetic construct
  misc_feature 1..19: note = Description of Artificial Sequence: Synthetic Antisense oligonucleotide
  modified_base 1..2: mod_base = OTHER; note = 5-methyl
  modified_base 5: mod_base = OTHER; note = 5-methyl
  modified_base 8: mod_base = OTHER; note = 5-methyl
  modified_base 1: mod_base = OTHER; note = bicyclic nucleic acid (BNA)
  source 1..19: mol_type = other RNA
ccaacatcaaggaagatgg

SEQ ID NO: 4140 - RNA, 18 nt, synthetic construct
  misc_feature 1..18: note = Description of Artificial Sequence: Synthetic Antisense oligonucleotide
  modified_base 1..2: mod_base = OTHER; note = 5-methyl
  modified_base 5: mod_base = OTHER; note = 5-methyl
  modified_base 8: mod_base = OTHER; note = 5-methyl
  modified_base 1: mod_base = OTHER; note = bicyclic nucleic acid (BNA)
  source 1..18: mol_type = other RNA
ccaacatcaaggaagatg

SEQ ID NO: 4141 - RNA, 17 nt, synthetic construct
  misc_feature 1..17: note = Description of Artificial Sequence: Synthetic Antisense oligonucleotide
  modified_base 1..2: mod_base = OTHER; note = 5-methyl
  modified_base 5: mod_base = OTHER; note = 5-methyl
  modified_base 8: mod_base = OTHER; note = 5-methyl
  modified_base 1: mod_base = OTHER; note = bicyclic nucleic acid (BNA)
  source 1..17: mol_type = other RNA
ccaacatcaaggaagat

SEQ ID NO: 4142 - RNA, 16 nt, synthetic construct
  misc_feature 1..16: note = Description of Artificial Sequence: Synthetic Antisense oligonucleotide
  modified_base 1..2: mod_base = OTHER; note = 5-methyl
  modified_base 5: mod_base = OTHER; note = 5-methyl
  modified_base 8: mod_base = OTHER; note = 5-methyl
  modified_base 1: mod_base = OTHER; note = bicyclic nucleic acid (BNA)
  source 1..16: mol_type = other RNA
ccaacatcaaggaaga

SEQ ID NO: 4143 - RNA, 15 nt, synthetic construct
  misc_feature 1..15: note = Description of Artificial Sequence: Synthetic Antisense oligonucleotide
  modified_base 1..2: mod_base = OTHER; note = 5-methyl
  modified_base 5: mod_base = OTHER; note = 5-methyl
  modified_base 8: mod_base = OTHER; note = 5-methyl
  modified_base 1: mod_base = OTHER; note = bicyclic nucleic acid (BNA)
  source 1..15: mol_type = other RNA
ccaacatcaaggaag

SEQ ID NO: 4144 - RNA, 27 nt, synthetic construct
  misc_feature 1..27: note = Description of Artificial Sequence: Synthetic Antisense oligonucleotide
  modified_base 1: mod_base = OTHER; note = 5-methyl
  modified_base 4: mod_base = OTHER; note = 5-methyl
  modified_base 7: mod_base = OTHER; note = 5-methyl
  modified_base 19: mod_base = OTHER; note = 5-methyl
  modified_base 24: mod_base = OTHER; note = 5-methyl
  modified_base 1: mod_base = OTHER; note = bicyclic nucleic acid (BNA)
  source 1..27: mol_type = other RNA
caacatcaaggaagatggcatttctag

SEQ ID NO: 4145 - RNA, 26 nt, synthetic construct
  misc_feature 1..26: note = Description of Artificial Sequence: Synthetic Antisense oligonucleotide
  modified_base 1: mod_base = OTHER; note = 5-methyl
  modified_base 4: mod_base = OTHER; note = 5-methyl
  modified_base 7: mod_base = OTHER; note = 5-methyl
  modified_base 19: mod_base = OTHER; note = 5-methyl
  modified_base 24: mod_base = OTHER; note = 5-methyl
  modified_base 1: mod_base = OTHER; note = bicyclic nucleic acid (BNA)
  source 1..26: mol_type = other RNA
caacatcaaggaagatggcatttcta

SEQ ID NO: 4146 - RNA, 25 nt, synthetic construct
  misc_feature 1..25: note = Description of Artificial Sequence: Synthetic Antisense oligonucleotide
  modified_base 1: mod_base = OTHER; note = 5-methyl
  modified_base 4: mod_base = OTHER; note = 5-methyl
  modified_base 7: mod_base = OTHER; note = 5-methyl
  modified_base 19: mod_base = OTHER; note = 5-methyl
  modified_base 24: mod_base = OTHER; note = 5-methyl
  modified_base 1: mod_base = OTHER; note = bicyclic nucleic acid (BNA)
  source 1..25: mol_type = other RNA
caacatcaaggaagatggcatttct

SEQ ID NO: 4147 - RNA, 24 nt, synthetic construct
  misc_feature 1..24: note = Description of Artificial Sequence: Synthetic Antisense oligonucleotide
  modified_base 1: mod_base = OTHER; note = 5-methyl
  modified_base 4: mod_base = OTHER; note = 5-methyl
  modified_base 7: mod_base = OTHER; note = 5-methyl
  modified_base 19: mod_base = OTHER; note = 5-methyl
  modified_base 24: mod_base = OTHER; note = 5-methyl
  modified_base 1: mod_base = OTHER; note = bicyclic nucleic acid (BNA)
  source 1..24: mol_type = other RNA
caacatcaaggaagatggcatttc

SEQ ID NO: 4148 - RNA, 23 nt, synthetic construct
  misc_feature 1..23: note = Description of Artificial Sequence: Synthetic Antisense oligonucleotide
  modified_base 1: mod_base = OTHER; note = 5-methyl
  modified_base 4: mod_base = OTHER; note = 5-methyl
  modified_base 7: mod_base = OTHER; note = 5-methyl
  modified_base 19: mod_base = OTHER; note = 5-methyl
  modified_base 1: mod_base = OTHER; note = bicyclic nucleic acid (BNA)
  source 1..23: mol_type = other RNA
caacatcaaggaagatggcattt

SEQ ID NO: 4149 - RNA, 22 nt, synthetic construct
  misc_feature 1..22: note = Description of Artificial Sequence: Synthetic Antisense oligonucleotide
  modified_base 1: mod_base = OTHER; note = 5-methyl
  modified_base 4: mod_base = OTHER; note = 5-methyl
  modified_base 7: mod_base = OTHER; note = 5-methyl
  modified_base 19: mod_base = OTHER; note = 5-methyl
  modified_base 1: mod_base = OTHER; note = bicyclic nucleic acid (BNA)
  source 1..22: mol_type = other RNA
caacatcaaggaagatggcatt

SEQ ID NO: 4150 - RNA, 21 nt, synthetic construct
  misc_feature 1..21: note = Description of Artificial Sequence: Synthetic Antisense oligonucleotide
  modified_base 1: mod_base = OTHER; note = 5-methyl
  modified_base 4: mod_base = OTHER; note = 5-methyl
  modified_base 7: mod_base = OTHER; note = 5-methyl
  modified_base 19: mod_base = OTHER; note = 5-methyl
  modified_base 1: mod_base = OTHER; note = bicyclic nucleic acid (BNA)
  source 1..21: mol_type = other RNA
caacatcaaggaagatggcat

SEQ ID NO: 4151 - RNA, 20 nt, synthetic construct
  misc_feature 1..20: note = Description of Artificial Sequence: Synthetic Antisense oligonucleotide
  modified_base 1: mod_base = OTHER; note = 5-methyl
  modified_base 4: mod_base = OTHER; note = 5-methyl
  modified_base 7: mod_base = OTHER; note = 5-methyl
  modified_base 19: mod_base = OTHER; note = 5-methyl
  modified_base 1: mod_base = OTHER; note = bicyclic nucleic acid (BNA)
  source 1..20: mol_type = other RNA
caacatcaaggaagatggca

SEQ ID NO: 4152 - RNA, 19 nt, synthetic construct
  misc_feature 1..19: note = Description of Artificial Sequence: Synthetic Antisense oligonucleotide
  modified_base 1: mod_base = OTHER; note = 5-methyl
  modified_base 4: mod_base = OTHER; note = 5-methyl
  modified_base 7: mod_base = OTHER; note = 5-methyl
  modified_base 19: mod_base = OTHER; note = 5-methyl
  modified_base 1: mod_base = OTHER; note = bicyclic nucleic acid (BNA)
  source 1..19: mol_type = other RNA
caacatcaaggaagatggc

SEQ ID NO: 4153 - RNA, 18 nt, synthetic construct
  misc_feature 1..18: note = Description of Artificial Sequence: Synthetic Antisense oligonucleotide
  modified_base 1: mod_base = OTHER; note = 5-methyl
  modified_base 4: mod_base = OTHER; note = 5-methyl
  modified_base 7: mod_base = OTHER; note = 5-methyl
  modified_base 1: mod_base = OTHER; note = bicyclic nucleic acid (BNA)
  source 1..18: mol_type = other RNA
caacatcaaggaagatgg

SEQ ID NO: 4154 - RNA, 17 nt, synthetic construct
  misc_feature 1..17: note = Description of Artificial Sequence: Synthetic Antisense oligonucleotide
  modified_base 1: mod_base = OTHER; note = 5-methyl
  modified_base 4: mod_base = OTHER; note = 5-methyl
  modified_base 7: mod_base = OTHER; note = 5-methyl
  modified_base 1: mod_base = OTHER; note = bicyclic nucleic acid (BNA)
  source 1..17: mol_type = other RNA
caacatcaaggaagatg

SEQ ID NO: 4155 - RNA, 16 nt, synthetic construct
  misc_feature 1..16: note = Description of Artificial Sequence: Synthetic Antisense oligonucleotide
  modified_base 1: mod_base = OTHER; note = 5-methyl
  modified_base 4: mod_base = OTHER; note = 5-methyl
  modified_base 7: mod_base = OTHER; note = 5-methyl
  modified_base 1: mod_base = OTHER; note = bicyclic nucleic acid (BNA)
  source 1..16: mol_type = other RNA
caacatcaaggaagat

SEQ ID NO: 4156 - RNA, 15 nt, synthetic construct
  misc_feature 1..15: note = Description of Artificial Sequence: Synthetic Antisense oligonucleotide
  modified_base 1: mod_base = OTHER; note = 5-methyl
  modified_base 4: mod_base = OTHER; note = 5-methyl
  modified_base 7: mod_base = OTHER; note = 5-methyl
  modified_base 1: mod_base = OTHER; note = bicyclic nucleic acid (BNA)
  source 1..15: mol_type = other RNA
caacatcaaggaaga

SEQ ID NO: 4157 - RNA, 14 nt, synthetic construct
  misc_feature 1..14: note = Description of Artificial Sequence: Synthetic Antisense oligonucleotide
  modified_base 1: mod_base = OTHER; note = 5-methyl
  modified_base 4: mod_base = OTHER; note = 5-methyl
  modified_base 7: mod_base = OTHER; note = 5-methyl
  modified_base 1: mod_base = OTHER; note = bicyclic nucleic acid (BNA)
  source 1..14: mol_type = other RNA
caacatcaaggaag

SEQ ID NO: 4158 - RNA, 26 nt, synthetic construct
  misc_feature 1..26: note = Description of Artificial Sequence: Synthetic Antisense oligonucleotide
  modified_base 1: mod_base = OTHER; note = bicyclic nucleic acid (BNA)
  modified_base 3: mod_base = OTHER; note = 5-methyl
  modified_base 6: mod_base = OTHER; note = 5-methyl
  modified_base 18: mod_base = OTHER; note = 5-methyl
  modified_base 23: mod_base = OTHER; note = 5-methyl
  source 1..26: mol_type = other RNA
aacatcaaggaagatggcatttctag

SEQ ID NO: 4159 - RNA, 25 nt, synthetic construct
  misc_feature 1..25: note = Description of Artificial Sequence: Synthetic Antisense oligonucleotide
  modified_base 1: mod_base = OTHER; note = bicyclic nucleic acid (BNA)
  modified_base 3: mod_base = OTHER; note = 5-methyl
  modified_base 6: mod_base = OTHER; note = 5-methyl
  modified_base 18: mod_base = OTHER; note = 5-methyl
  modified_base 23: mod_base = OTHER; note = 5-methyl
  source 1..25: mol_type = other RNA
aacatcaaggaagatggcatttcta

SEQ ID NO: 4160 - RNA, 24 nt, synthetic construct
  misc_feature 1..24: note = Description of Artificial Sequence: Synthetic Antisense oligonucleotide
  modified_base 1: mod_base = OTHER; note = bicyclic nucleic acid (BNA)
  modified_base 3: mod_base = OTHER; note = 5-methyl
  modified_base 6: mod_base = OTHER; note = 5-methyl
  modified_base 18: mod_base = OTHER; note = 5-methyl
  modified_base 23: mod_base = OTHER; note = 5-methyl
  source 1..24: mol_type = other RNA
aacatcaaggaagatggcatttct

SEQ ID NO: 4161 - RNA, 23 nt, synthetic construct
  misc_feature 1..23: note = Description of Artificial Sequence: Synthetic Antisense oligonucleotide
  modified_base 1: mod_base = OTHER; note = bicyclic nucleic acid (BNA)
  modified_base 3: mod_base = OTHER; note = 5-methyl
  modified_base 6: mod_base = OTHER; note = 5-methyl
  modified_base 18: mod_base = OTHER; note = 5-methyl
  modified_base 23: mod_base = OTHER; note = 5-methyl
  source 1..23: mol_type = other RNA
aacatcaaggaagatggcatttc

SEQ ID NO: 4162 - RNA, 22 nt, synthetic construct
  misc_feature 1..22: note = Description of Artificial Sequence: Synthetic Antisense oligonucleotide
  modified_base 1: mod_base = OTHER; note = bicyclic nucleic acid (BNA)
  modified_base 3: mod_base = OTHER; note = 5-methyl
  modified_base 6: mod_base = OTHER; note = 5-methyl
  modified_base 18: mod_base = OTHER; note = 5-methyl
  source 1..22: mol_type = other RNA
aacatcaaggaagatggcattt

SEQ ID NO: 4163 - RNA, 21 nt, synthetic construct
  misc_feature 1..21: note = Description of Artificial Sequence: Synthetic Antisense oligonucleotide
  modified_base 1: mod_base = OTHER; note = bicyclic nucleic acid (BNA)
  modified_base 3: mod_base = OTHER; note = 5-methyl
  modified_base 6: mod_base = OTHER; note = 5-methyl
  modified_base 18: mod_base = OTHER; note = 5-methyl
  source 1..21: mol_type = other RNA
aacatcaaggaagatggcatt

SEQ ID NO: 4164 - RNA, 20 nt, synthetic construct
  misc_feature 1..20: note = Description of Artificial Sequence: Synthetic Antisense oligonucleotide
  modified_base 1: mod_base = OTHER; note = bicyclic nucleic acid (BNA)
  modified_base 3: mod_base = OTHER; note = 5-methyl
  modified_base 6: mod_base = OTHER; note = 5-methyl
  modified_base 18: mod_base = OTHER; note = 5-methyl
  source 1..20: mol_type = other RNA
aacatcaaggaagatggcat

SEQ ID NO: 4165 - RNA, 19 nt, synthetic construct
  misc_feature 1..19: note = Description of Artificial Sequence: Synthetic Antisense oligonucleotide
  modified_base 1: mod_base = OTHER; note = bicyclic nucleic acid (BNA)
  modified_base 3: mod_base = OTHER; note = 5-methyl
  modified_base 6: mod_base = OTHER; note = 5-methyl
  modified_base 18: mod_base = OTHER; note = 5-methyl
  source 1..19: mol_type = other RNA
aacatcaaggaagatggca

SEQ ID NO: 4166 - RNA, 18 nt, synthetic construct
  misc_feature 1..18: note = Description of Artificial Sequence: Synthetic Antisense oligonucleotide
  modified_base 1: mod_base = OTHER; note = bicyclic nucleic acid (BNA)
  modified_base 3: mod_base = OTHER; note = 5-methyl
  modified_base 6: mod_base = OTHER; note = 5-methyl
  modified_base 18: mod_base = OTHER; note = 5-methyl
  source 1..18: mol_type = other RNA
aacatcaaggaagatggc

SEQ ID NO: 4167 - RNA, 17 nt, synthetic construct
  misc_feature 1..17: note = Description of Artificial Sequence: Synthetic Antisense oligonucleotide
  modified_base 1: mod_base = OTHER; note = bicyclic nucleic acid (BNA)
  modified_base 3: mod_base = OTHER; note = 5-methyl
  modified_base 6: mod_base = OTHER; note = 5-methyl
  source 1..17: mol_type = other RNA
aacatcaaggaagatgg

SEQ ID NO: 4168 - RNA, 16 nt, synthetic construct
  misc_feature 1..16: note = Description of Artificial Sequence: Synthetic Antisense oligonucleotide
  modified_base 1: mod_base = OTHER; note = bicyclic nucleic acid (BNA)
  modified_base 3: mod_base = OTHER; note = 5-methyl
  modified_base 6: mod_base = OTHER; note = 5-methyl
  source 1..16: mol_type = other RNA
aacatcaaggaagatg

SEQ ID NO: 4169 - RNA, 15 nt, synthetic construct
  misc_feature 1..15: note = Description of Artificial Sequence: Synthetic Antisense oligonucleotide
  modified_base 1: mod_base = OTHER; note = bicyclic nucleic acid (BNA)
  modified_base 3: mod_base = OTHER; note = 5-methyl
  modified_base 6: mod_base = OTHER; note = 5-methyl
  source 1..15: mol_type = other RNA
aacatcaaggaagat

SEQ ID NO: 4170 - RNA, 14 nt, synthetic construct
  misc_feature 1..14: note = Description of Artificial Sequence: Synthetic Antisense oligonucleotide
  modified_base 1: mod_base = OTHER; note = bicyclic nucleic acid (BNA)
  modified_base 3: mod_base = OTHER; note = 5-methyl
  modified_base 6: mod_base = OTHER; note = 5-methyl
  source 1..14: mol_type = other RNA
aacatcaaggaaga

SEQ ID NO: 4171 - RNA, 13 nt, synthetic construct
  misc_feature 1..13: note = Description of Artificial Sequence: Synthetic Antisense oligonucleotide
  modified_base 1: mod_base = OTHER; note = bicyclic nucleic acid (BNA)
  modified_base 3: mod_base = OTHER; note = 5-methyl
  modified_base 6: mod_base = OTHER; note = 5-methyl
  source 1..13: mol_type = other RNA
aacatcaaggaag

SEQ ID NO: 4172 - RNA, 25 nt, synthetic construct
  misc_feature 1..25: note = Description of Artificial Sequence: Synthetic Antisense oligonucleotide
  modified_base 1: mod_base = OTHER; note = bicyclic nucleic acid (BNA)
  modified_base 2: mod_base = OTHER; note = 5-methyl
  modified_base 5: mod_base = OTHER; note = 5-methyl
  modified_base 17: mod_base = OTHER; note = 5-methyl
  modified_base 22: mod_base = OTHER; note = 5-methyl
  source 1..25: mol_type = other RNA
acatcaaggaagatggcatttctag

SEQ ID NO: 4173 - RNA, 24 nt, synthetic construct
  misc_feature 1..24: note = Description of Artificial Sequence: Synthetic Antisense oligonucleotide
  modified_base 1: mod_base = OTHER; note = bicyclic nucleic acid (BNA)
  modified_base 2: mod_base = OTHER; note = 5-methyl
  modified_base 5: mod_base = OTHER; note = 5-methyl
  modified_base 17: mod_base = OTHER; note = 5-methyl
  modified_base 22: mod_base = OTHER; note = 5-methyl
  source 1..24: mol_type = other RNA
acatcaaggaagatggcatttcta

SEQ ID NO: 4174 - RNA, 23 nt, synthetic construct
  misc_feature 1..23: note = Description of Artificial Sequence: Synthetic Antisense oligonucleotide
  modified_base 1: mod_base = OTHER; note = bicyclic nucleic acid (BNA)
  modified_base 2: mod_base = OTHER; note = 5-methyl
  modified_base 5: mod_base = OTHER; note = 5-methyl
  modified_base 17: mod_base = OTHER; note = 5-methyl
  modified_base 22: mod_base = OTHER; note = 5-methyl
  source 1..23: mol_type = other RNA
acatcaaggaagatggcatttct

SEQ ID NO: 4175 - RNA, 22 nt, synthetic construct
  misc_feature 1..22: note = Description of Artificial Sequence: Synthetic Antisense oligonucleotide
  modified_base 1: mod_base = OTHER; note = bicyclic nucleic acid (BNA)
  modified_base 2: mod_base = OTHER; note = 5-methyl
  modified_base 5: mod_base = OTHER; note = 5-methyl
  modified_base 17: mod_base = OTHER; note = 5-methyl
  modified_base 22: mod_base = OTHER; note = 5-methyl
  source 1..22: mol_type = other RNA
acatcaaggaagatggcatttc

SEQ ID NO: 4176 - RNA, 21 nt, synthetic construct
  misc_feature 1..21: note = Description of Artificial Sequence: Synthetic Antisense oligonucleotide
  modified_base 1: mod_base = OTHER; note = bicyclic nucleic acid (BNA)
  modified_base 2: mod_base = OTHER; note = 5-methyl
  modified_base 5: mod_base = OTHER; note = 5-methyl
  modified_base 17: mod_base = OTHER; note = 5-methyl
  source 1..21: mol_type = other RNA
acatcaaggaagatggcattt

SEQ ID NO: 4177 - RNA, 20 nt, synthetic construct
  misc_feature 1..20: note = Description of Artificial Sequence: Synthetic Antisense oligonucleotide
  modified_base 1: mod_base = OTHER; note = bicyclic nucleic acid (BNA)
  modified_base 2: mod_base = OTHER; note = 5-methyl
  modified_base 5: mod_base = OTHER; note = 5-methyl
  modified_base 17: mod_base = OTHER; note = 5-methyl
  source 1..20: mol_type = other RNA
acatcaaggaagatggcatt

SEQ ID NO: 4178 - RNA, 19 nt, synthetic construct
  misc_feature 1..19: note = Description of Artificial Sequence: Synthetic Antisense oligonucleotide
  modified_base 1: mod_base = OTHER; note = bicyclic nucleic acid (BNA)
  modified_base 2: mod_base = OTHER; note = 5-methyl
  modified_base 5: mod_base = OTHER; note = 5-methyl
  modified_base 17: mod_base = OTHER; note = 5-methyl
  source 1..19: mol_type = other RNA
acatcaaggaagatggcat

SEQ ID NO: 4179 - RNA, 18 nt, synthetic construct
  misc_feature 1..18: note = Description of Artificial Sequence: Synthetic Antisense oligonucleotide
  modified_base 1: mod_base = OTHER; note = bicyclic nucleic acid (BNA)
  modified_base 2: mod_base = OTHER; note = 5-methyl
  modified_base 5: mod_base = OTHER; note = 5-methyl
  modified_base 17: mod_base = OTHER; note = 5-methyl
  source 1..18: mol_type = other RNA
acatcaaggaagatggca

SEQ ID NO: 4180 - RNA, 17 nt, synthetic construct
  misc_feature 1..17: note = Description of Artificial Sequence: Synthetic Antisense oligonucleotide
  modified_base 1: mod_base = OTHER; note = bicyclic nucleic acid (BNA)
  modified_base 2: mod_base = OTHER; note = 5-methyl
  modified_base 5: mod_base = OTHER; note = 5-methyl
  modified_base 17: mod_base = OTHER; note = 5-methyl
  source 1..17: mol_type = other RNA
acatcaaggaagatggc

SEQ ID NO: 4181 - RNA, 16 nt, synthetic construct
  misc_feature 1..16: note = Description of Artificial Sequence: Synthetic Antisense oligonucleotide
  modified_base 1: mod_base = OTHER; note = bicyclic nucleic acid (BNA)
  modified_base 2: mod_base = OTHER; note = 5-methyl
  modified_base 5: mod_base = OTHER; note = 5-methyl
  source 1..16: mol_type = other RNA
acatcaaggaagatgg

SEQ ID NO: 4182 - RNA, 15 nt, synthetic construct
  misc_feature 1..15: note = Description of Artificial Sequence: Synthetic Antisense oligonucleotide
  modified_base 1: mod_base = OTHER; note = bicyclic nucleic acid (BNA)
  modified_base 2: mod_base = OTHER; note = 5-methyl
  modified_base 5: mod_base = OTHER; note = 5-methyl
  source 1..15: mol_type = other RNA
acatcaaggaagatg

SEQ ID NO: 4183 - RNA, 14 nt, synthetic construct
  misc_feature 1..14: note = Description of Artificial Sequence: Synthetic Antisense oligonucleotide
  modified_base 1: mod_base = OTHER; note = bicyclic nucleic acid (BNA)
  modified_base 2: mod_base = OTHER; note = 5-methyl
  modified_base 5: mod_base = OTHER; note = 5-methyl
  source 1..14: mol_type = other RNA
acatcaaggaagat

SEQ ID NO: 4184 - RNA, 13 nt, synthetic construct
  misc_feature 1..13: note = Description of Artificial Sequence: Synthetic Antisense oligonucleotide
  modified_base 1: mod_base = OTHER; note = bicyclic nucleic acid (BNA)
  modified_base 2: mod_base = OTHER; note = 5-methyl
  modified_base 5: mod_base = OTHER; note = 5-methyl
  source 1..13: mol_type = other RNA
acatcaaggaaga

SEQ ID NO: 4185 - RNA, 12 nt, synthetic construct
  misc_feature 1..12: note = Description of Artificial Sequence: Synthetic Antisense oligonucleotide
  modified_base 1: mod_base = OTHER; note = bicyclic nucleic acid (BNA)
  modified_base 2: mod_base = OTHER; note = 5-methyl
  modified_base 5: mod_base = OTHER; note = 5-methyl
  source 1..12: mol_type = other RNA
acatcaaggaag

SEQ ID NO: 4186 - RNA, 24 nt, synthetic construct
  misc_feature 1..24: note = Description of Artificial Sequence: Synthetic Antisense oligonucleotide
  modified_base 1: mod_base = OTHER; note = 5-methyl
  modified_base 4: mod_base = OTHER; note = 5-methyl
  modified_base 16: mod_base = OTHER; note = 5-methyl
  modified_base 21: mod_base = OTHER; note = 5-methyl
  modified_base 1: mod_base = OTHER; note = bicyclic nucleic acid (BNA)
  source 1..24: mol_type = other RNA
catcaaggaagatggcatttctag

SEQ ID NO: 4187 - RNA, 23 nt, synthetic construct
  misc_feature 1..23: note = Description of Artificial Sequence: Synthetic Antisense oligonucleotide
  modified_base 1: mod_base = OTHER; note = 5-methyl
  modified_base 4: mod_base = OTHER; note = 5-methyl
  modified_base 16: mod_base = OTHER; note = 5-methyl
  modified_base 21: mod_base = OTHER; note = 5-methyl
  modified_base 1: mod_base = OTHER; note = bicyclic nucleic acid (BNA)
  source 1..23: mol_type = other RNA
catcaaggaagatggcatttcta

SEQ ID NO: 4188 - RNA, 22 nt, synthetic construct
  misc_feature 1..22: note = Description of Artificial Sequence: Synthetic Antisense oligonucleotide
  modified_base 1: mod_base = OTHER; note = 5-methyl
  modified_base 4: mod_base = OTHER; note = 5-methyl
  modified_base 16: mod_base = OTHER; note = 5-methyl
  modified_base 21: mod_base = OTHER; note = 5-methyl
  modified_base 1: mod_base = OTHER; note = bicyclic nucleic acid (BNA)
  source 1..22: mol_type = other RNA
catcaaggaagatggcatttct

SEQ ID NO: 4189 - RNA, 21 nt, synthetic construct
  misc_feature 1..21: note = Description of Artificial Sequence: Synthetic Antisense oligonucleotide
  modified_base 1: mod_base = OTHER; note = 5-methyl
  modified_base 4: mod_base = OTHER; note = 5-methyl
  modified_base 16: mod_base = OTHER; note = 5-methyl
  modified_base 21: mod_base = OTHER; note = 5-methyl
  modified_base 1: mod_base = OTHER; note = bicyclic nucleic acid (BNA)
  source 1..21: mol_type = other RNA
catcaaggaagatggcatttc

SEQ ID NO: 4190 - RNA, 20 nt, synthetic construct
  misc_feature 1..20: note = Description of Artificial Sequence: Synthetic Antisense oligonucleotide
  modified_base 1: mod_base = OTHER; note = 5-methyl
  modified_base 4: mod_base = OTHER; note = 5-methyl
  modified_base 16: mod_base = OTHER; note = 5-methyl
  modified_base 1: mod_base = OTHER; note = bicyclic nucleic acid (BNA)
  source 1..20: mol_type = other RNA
catcaaggaagatggcattt

SEQ ID NO: 4191 - RNA, 19 nt, synthetic construct
  misc_feature 1..19: note = Description of Artificial Sequence: Synthetic Antisense oligonucleotide
  modified_base 1: mod_base = OTHER; note = 5-methyl
  modified_base 4: mod_base = OTHER; note = 5-methyl
  modified_base 16: mod_base = OTHER; note = 5-methyl
  modified_base 1: mod_base = OTHER; note = bicyclic nucleic acid (BNA)
  source 1..19: mol_type = other RNA
catcaaggaagatggcatt

SEQ ID NO: 4192 - RNA, 18 nt, synthetic construct
  misc_feature 1..18: note = Description of Artificial Sequence: Synthetic Antisense oligonucleotide
  modified_base 1: mod_base = OTHER; note = 5-methyl
  modified_base 4: mod_base = OTHER; note = 5-methyl
  modified_base 16: mod_base = OTHER; note = 5-methyl
  modified_base 1: mod_base = OTHER; note = bicyclic nucleic acid (BNA)
  source 1..18: mol_type = other RNA
catcaaggaagatggcat

SEQ ID NO: 4193 - RNA, 17 nt, synthetic construct
  misc_feature 1..17: note = Description of Artificial Sequence: Synthetic Antisense oligonucleotide
  modified_base 1: mod_base = OTHER; note = 5-methyl
  modified_base 4: mod_base = OTHER; note = 5-methyl
  modified_base 16: mod_base = OTHER; note = 5-methyl
  modified_base 1: mod_base = OTHER; note = bicyclic nucleic acid (BNA)
  source 1..17: mol_type = other RNA
catcaaggaagatggca

SEQ ID NO: 4194 - RNA, 16 nt, synthetic construct
  misc_feature 1..16: note = Description of Artificial Sequence: Synthetic Antisense oligonucleotide
  modified_base 1: mod_base = OTHER; note = 5-methyl
  modified_base 4: mod_base = OTHER; note = 5-methyl
  modified_base 16: mod_base = OTHER; note = 5-methyl
  modified_base 1: mod_base = OTHER; note = bicyclic nucleic acid (BNA)
  source 1..16: mol_type = other RNA
catcaaggaagatggc

SEQ ID NO: 4195 - RNA, 15 nt, synthetic construct
  misc_feature 1..15: note = Description of Artificial Sequence: Synthetic Antisense oligonucleotide
  modified_base 1: mod_base = OTHER; note = 5-methyl
  modified_base 4: mod_base = OTHER; note = 5-methyl
  modified_base 1: mod_base = OTHER; note = bicyclic nucleic acid (BNA)
  source 1..15: mol_type = other RNA
catcaaggaagatgg

SEQ ID NO: 4196 - RNA, 14 nt, synthetic construct
  misc_feature 1..14: note = Description of Artificial Sequence: Synthetic Antisense oligonucleotide
  modified_base 1: mod_base = OTHER; note = 5-methyl
  modified_base 4: mod_base = OTHER; note = 5-methyl
  modified_base 1: mod_base = OTHER; note = bicyclic nucleic acid (BNA)
  source 1..14: mol_type = other RNA
catcaaggaagatg

SEQ ID NO: 4197 - RNA, 13 nt, synthetic construct
  misc_feature 1..13: note = Description of Artificial Sequence: Synthetic Antisense oligonucleotide
  modified_base 1: mod_base = OTHER; note = 5-methyl
  modified_base 4: mod_base = OTHER; note = 5-methyl
  modified_base 1: mod_base = OTHER; note = bicyclic nucleic acid (BNA)
  source 1..13: mol_type = other RNA
catcaaggaagat

SEQ ID NO: 4198 - RNA, 12 nt, synthetic construct
  misc_feature 1..12: note = Description of Artificial Sequence: Synthetic Antisense oligonucleotide
  modified_base 1: mod_base = OTHER; note = 5-methyl
  modified_base 4: mod_base = OTHER; note = 5-methyl
  modified_base 1: mod_base = OTHER; note = bicyclic nucleic acid (BNA)
  source 1..12: mol_type = other RNA
catcaaggaaga

SEQ ID NO: 4199 - RNA, 11 nt, synthetic construct
  misc_feature 1..11: note = Description of Artificial Sequence: Synthetic Antisense oligonucleotide
  modified_base 1: mod_base = OTHER; note = 5-methyl
  modified_base 4: mod_base = OTHER; note = 5-methyl
  modified_base 1: mod_base = OTHER; note = bicyclic nucleic acid (BNA)
  source 1..11: mol_type = other RNA
catcaaggaag

SEQ ID NO: 4200 - RNA, 23 nt, synthetic construct
  misc_feature 1..23: note = Description of Artificial Sequence: Synthetic Antisense oligonucleotide
  modified_base 1: mod_base = OTHER; note = bicyclic nucleic acid (BNA)
  modified_base 3: mod_base = OTHER; note = 5-methyl
  modified_base 15: mod_base = OTHER; note = 5-methyl
  modified_base 20: mod_base = OTHER; note = 5-methyl
  source 1..23: mol_type = other RNA
atcaaggaagatggcatttctag

SEQ ID NO: 4201 - RNA, 22 nt, synthetic construct
  misc_feature 1..22: note = Description of Artificial Sequence: Synthetic Antisense oligonucleotide
  modified_base 1: mod_base = OTHER; note = bicyclic nucleic acid (BNA)
  modified_base 3: mod_base = OTHER; note = 5-methyl
  modified_base 15: mod_base = OTHER; note = 5-methyl
  modified_base 20: mod_base = OTHER; note = 5-methyl
  source 1..22: mol_type = other RNA
atcaaggaagatggcatttcta

SEQ ID NO: 4202 - RNA, 21 nt, synthetic construct
  misc_feature 1..21: note = Description of Artificial Sequence: Synthetic Antisense oligonucleotide
  modified_base 1: mod_base = OTHER; note = bicyclic nucleic acid (BNA)
  modified_base 3: mod_base = OTHER; note = 5-methyl
  modified_base 15: mod_base = OTHER; note = 5-methyl
  modified_base 20: mod_base = OTHER; note = 5-methyl
  source 1..21: mol_type = other RNA
atcaaggaagatggcatttct

SEQ ID NO: 4203 - RNA, 20 nt, synthetic construct
  misc_feature 1..20: note = Description of Artificial Sequence: Synthetic Antisense oligonucleotide
  modified_base 1: mod_base = OTHER; note = bicyclic nucleic acid (BNA)
  modified_base 3: mod_base = OTHER; note = 5-methyl
  modified_base 15: mod_base = OTHER; note = 5-methyl
  modified_base 20: mod_base = OTHER; note = 5-methyl
  source 1..20: mol_type = other RNA
atcaaggaagatggcatttc

SEQ ID NO: 4204 - RNA, 19 nt, synthetic construct
  misc_feature 1..19: note = Description of Artificial Sequence: Synthetic Antisense oligonucleotide
  modified_base 1: mod_base = OTHER; note = bicyclic nucleic acid (BNA)
  modified_base 3: mod_base = OTHER; note = 5-methyl
  modified_base 15: mod_base = OTHER; note = 5-methyl
  source 1..19: mol_type = other RNA
atcaaggaagatggcattt

SEQ ID NO: 4205 - RNA, 18 nt, synthetic construct
  misc_feature 1..18: note = Description of Artificial Sequence: Synthetic Antisense oligonucleotide
  modified_base 1: mod_base = OTHER; note = bicyclic nucleic acid (BNA)
  modified_base 3: mod_base = OTHER; note = 5-methyl
  modified_base 15: mod_base = OTHER; note = 5-methyl
  source 1..18: mol_type = other RNA
atcaaggaagatggcatt

SEQ ID NO: 4206 - RNA, 17 nt, synthetic construct
  misc_feature 1..17: note = Description of Artificial Sequence: Synthetic Antisense oligonucleotide
  modified_base 1: mod_base = OTHER; note = bicyclic nucleic acid (BNA)
  modified_base 3: mod_base = OTHER; note = 5-methyl
  modified_base 15: mod_base = OTHER; note = 5-methyl
  source 1..17: mol_type = other RNA
atcaaggaagatggcat

SEQ ID NO: 4207 - RNA, 16 nt, synthetic construct
  misc_feature 1..16: note = Description of Artificial Sequence: Synthetic Antisense oligonucleotide
  modified_base 1: mod_base = OTHER; note = bicyclic nucleic acid (BNA)
  modified_base 3: mod_base = OTHER; note = 5-methyl
  modified_base 15: mod_base = OTHER; note = 5-methyl
  source 1..16: mol_type = other RNA
atcaaggaagatggca

SEQ ID NO: 4208 - RNA, 15 nt, synthetic construct
  misc_feature 1..15: note = Description of Artificial Sequence: Synthetic Antisense oligonucleotide
  modified_base 1: mod_base = OTHER; note = bicyclic nucleic acid (BNA)
  modified_base 3: mod_base = OTHER; note = 5-methyl
  modified_base 15: mod_base = OTHER; note = 5-methyl
  source 1..15: mol_type = other RNA
atcaaggaagatggc

SEQ ID NO: 4209 - RNA, 14 nt, synthetic construct
  misc_feature 1..14: note = Description of Artificial Sequence: Synthetic Antisense oligonucleotide
  modified_base 1: mod_base = OTHER; note = bicyclic nucleic acid (BNA)
  modified_base 3: mod_base = OTHER; note = 5-methyl
  source 1..14: mol_type = other RNA
atcaaggaagatgg

SEQ ID NO: 4210 - RNA, 13 nt, synthetic construct
  misc_feature 1..13: note = Description of Artificial Sequence: Synthetic Antisense oligonucleotide
  modified_base 1: mod_base = OTHER; note = bicyclic nucleic acid (BNA)
  modified_base 3: mod_base = OTHER; note = 5-methyl
  source 1..13: mol_type = other RNA
atcaaggaagatg

SEQ ID NO: 4211 - RNA, 12 nt, synthetic construct
  misc_feature 1..12: note = Description of Artificial Sequence: Synthetic Antisense oligonucleotide
  modified_base 1: mod_base = OTHER; note = bicyclic nucleic acid (BNA)
  modified_base 3: mod_base = OTHER; note = 5-methyl
  source 1..12: mol_type = other RNA
atcaaggaagat

SEQ ID NO: 4212 - RNA, 11 nt, synthetic construct
  misc_feature 1..11: note = Description of Artificial Sequence: Synthetic Antisense oligonucleotide
  modified_base 1: mod_base = OTHER; note = bicyclic nucleic acid (BNA)
  modified_base 3: mod_base = OTHER; note = 5-methyl
  source 1..11: mol_type = other RNA
atcaaggaaga

SEQ ID NO: 4213 - RNA, 10 nt, synthetic construct
  misc_feature 1..10: note = Description of Artificial Sequence: Synthetic Antisense oligonucleotide
  modified_base 1: mod_base = OTHER; note = bicyclic nucleic acid (BNA)
  modified_base 3: mod_base = OTHER; note = 5-methyl
  source 1..10: mol_type = other RNA
atcaaggaag

SEQ ID NO: 4214 - RNA, 18 nt, synthetic construct
  misc_feature 1..18: note = Description of Artificial Sequence: Synthetic Antisense oligonucleotide
  modified_base 9: mod_base = OTHER; note = 5-methyl
  modified_base 13..14: mod_base = OTHER; note = 5-methyl
  modified_base 18: mod_base = OTHER; note = 5-methyl
  modified_base 18: mod_base = OTHER; note = bicyclic nucleic acid (BNA)
  source 1..18: mol_type = other RNA
ggtaagttctgtccaagc

SEQ ID NO: 4215 - RNA, 18 nt, synthetic construct
  misc_feature 1..18: note = Description of Artificial Sequence: Synthetic Antisense oligonucleotide
  modified_base 8: mod_base = OTHER; note = 5-methyl
  modified_base 12..13: mod_base = OTHER; note = 5-methyl
  modified_base 17..18: mod_base = OTHER; note = 5-methyl
  modified_base 18: mod_base = OTHER; note = bicyclic nucleic acid (BNA)
  source 1..18: mol_type = other RNA
gtaagttctgtccaagcc

SEQ ID NO: 4216 - RNA, 18 nt, synthetic construct
  misc_feature 1..18: note = Description of Artificial Sequence: Synthetic Antisense oligonucleotide
  modified_base 4: mod_base = OTHER; note = 5-methyl
  modified_base 13: mod_base = OTHER; note = 5-methyl
  modified_base 17..18: mod_base = OTHER; note = 5-methyl
  modified_base 18: mod_base = OTHER; note = bicyclic nucleic acid (BNA)
  source 1..18: mol_type = other RNA
agtcggtaagttctgtcc

SEQ ID NO: 4217 - RNA, 18 nt, synthetic construct
  misc_feature 1..18: note = Description of Artificial Sequence: Synthetic Antisense oligonucleotide
  modified_base 1: mod_base = OTHER; note = 5-methyl
  modified_base 5..6: mod_base = OTHER; note = 5-methyl
  modified_base 10..12: mod_base = OTHER; note = 5-methyl
  modified_base 18: mod_base = OTHER; note = bicyclic nucleic acid (BNA)
  source 1..18: mol_type = other RNA
ctgtccaagcccggttga

SEQ ID NO: 4218 - RNA, 15 nt, synthetic construct
  misc_feature 1..15: note = Description of Artificial Sequence: Synthetic Antisense oligonucleotide
  modified_base 7: mod_base = OTHER; note = 5-methyl
  modified_base 11..12: mod_base = OTHER; note = 5-methyl
  modified_base 15: mod_base = OTHER; note = bicyclic nucleic acid (BNA)
  source 1..15: mol_type = other RNA
taagttctgtccaag

SEQ ID NO: 4219 - RNA, 20 nt, synthetic construct
  misc_feature 1..20: note = Description of Artificial Sequence: Synthetic Antisense oligonucleotide
  modified_base 3: mod_base = OTHER; note = 5-methyl
  modified_base 7..8: mod_base = OTHER; note = 5-methyl
  modified_base 12..14: mod_base = OTHER; note = 5-methyl
  modified_base 20: mod_base = OTHER; note = bicyclic nucleic acid (BNA)
  source 1..20: mol_type = other RNA
ttctgtccaagcccggttga

SEQ ID NO: 4220 - RNA, 19 nt, synthetic construct
  misc_feature 1..19: note = Description of Artificial Sequence: Synthetic Antisense oligonucleotide
  modified_base 3: mod_base = OTHER; note = 5-methyl
  modified_base 7..8: mod_base = OTHER; note = 5-methyl
  modified_base 12..14: mod_base = OTHER; note = 5-methyl
  modified_base 19: mod_base = OTHER; note = bicyclic nucleic acid (BNA)
  source 1..19: mol_type = other RNA
ttctgtccaagcccggttg

SEQ ID NO: 4221 - DNA, 18 bp, synthetic construct
  misc_feature 1..18: note = Description of Artificial Sequence: Synthetic Antisense oligonucleotide
  misc_feature 1..18: note = Original Sequence: uucuguccaagcccggut
  modified_base 3: mod_base = OTHER; note = 5-methyl
  modified_base 7..8: mod_base = OTHER; note = 5-methyl
  modified_base 12..14: mod_base = OTHER; note = 5-methyl
  modified_base 18: mod_base = OTHER; note = bicyclic nucleic acid (BNA)
  source 1..18: mol_type = other DNA
  modified_base 1: mod_base = OTHER; note = Uracil
  modified_base 2: mod_base = OTHER; note = Uracil
  modified_base 4: mod_base = OTHER; note = Uracil
  modified_base 6: mod_base = OTHER; note = Uracil
  modified_base 17: mod_base = OTHER; note = Uracil
ttctgtccaagcccggtt

SEQ ID NO: 4222 - DNA, 17 bp, synthetic construct
  misc_feature 1..17: note = Description of Artificial Sequence: Synthetic Antisense oligonucleotide
  misc_feature 1..17: note = Original Sequence: uucuguccaagcccggt
  modified_base 3: mod_base = OTHER; note = 5-methyl
  modified_base 7..8: mod_base = OTHER; note = 5-methyl
  modified_base 12..14: mod_base = OTHER; note = 5-methyl
  modified_base 17: mod_base = OTHER; note = bicyclic nucleic acid (BNA)
  source 1..17: mol_type = other DNA
  modified_base 1: mod_base = OTHER; note = Uracil
  modified_base 2: mod_base = OTHER; note = Uracil
  modified_base 4: mod_base = OTHER; note = Uracil
  modified_base 6: mod_base = OTHER; note = Uracil
ttctgtccaagcccggt

SEQ ID NO: 4223 - RNA, 16 nt, synthetic construct
  misc_feature 1..16: note = Description of Artificial Sequence: Synthetic Antisense oligonucleotide
  modified_base 3: mod_base = OTHER; note = 5-methyl
  modified_base 7..8: mod_base = OTHER; note = 5-methyl
  modified_base 12..14: mod_base = OTHER; note = 5-methyl
  modified_base 16: mod_base = OTHER; note = bicyclic nucleic acid (BNA)
  source 1..16: mol_type = other RNA
ttctgtccaagcccgg

SEQ ID NO: 4224 - RNA, 15 nt, synthetic construct
  misc_feature 1..15: note = Description of Artificial Sequence: Synthetic Antisense oligonucleotide
  modified_base 3: mod_base = OTHER; note = 5-methyl
  modified_base 7..8: mod_base = OTHER; note = 5-methyl
  modified_base 12..14: mod_base = OTHER; note = 5-methyl
  modified_base 15: mod_base = OTHER; note = bicyclic nucleic acid (BNA)
  source 1..15: mol_type = other RNA
ttctgtccaagcccg

SEQ ID NO: 4225 - RNA, 14 nt, synthetic construct
  misc_feature 1..14: note = Description of Artificial Sequence: Synthetic Antisense oligonucleotide
  modified_base 3: mod_base = OTHER; note = 5-methyl
  modified_base 7..8: mod_base = OTHER; note = 5-methyl
  modified_base 12..14: mod_base = OTHER; note = 5-methyl
  modified_base 14: mod_base = OTHER; note = bicyclic nucleic acid (BNA)
  source 1..14: mol_type = other RNA
ttctgtccaagccc

SEQ ID NO: 4226 - RNA, 13 nt, synthetic construct
  misc_feature 1..13: note = Description of Artificial Sequence: Synthetic Antisense oligonucleotide
  modified_base 3: mod_base = OTHER; note = 5-methyl
  modified_base 7..8: mod_base = OTHER; note = 5-methyl
  modified_base 12..13: mod_base = OTHER; note = 5-methyl
  modified_base 13: mod_base = OTHER; note = bicyclic nucleic acid (BNA)
  source 1..13: mol_type = other RNA
ttctgtccaagcc

SEQ ID NO: 4227 - RNA, 12 nt, synthetic construct
  misc_feature 1..12: note = Description of Artificial Sequence: Synthetic Antisense oligonucleotide
  modified_base 3: mod_base = OTHER; note = 5-methyl
  modified_base 7..8: mod_base = OTHER; note = 5-methyl
  modified_base 12: mod_base = OTHER; note = 5-methyl
  modified_base 12: mod_base = OTHER; note = bicyclic nucleic acid (BNA)
  source 1..12: mol_type = other RNA
ttctgtccaagc

SEQ ID NO: 4228 - RNA, 11 nt, synthetic construct
  misc_feature 1..11: note = Description of Artificial Sequence: Synthetic Antisense oligonucleotide
  modified_base 3: mod_base = OTHER; note = 5-methyl
  modified_base 7..8: mod_base = OTHER; note = 5-methyl
  modified_base 11: mod_base = OTHER; note = bicyclic nucleic acid (BNA)
  source 1..11: mol_type = other RNA
ttctgtccaag

SEQ ID NO: 4229 - RNA, 10 nt, synthetic construct
  misc_feature 1..10: note = Description of Artificial Sequence: Synthetic Antisense oligonucleotide
  modified_base 3: mod_base = OTHER; note = 5-methyl
  modified_base 7..8: mod_base = OTHER; note = 5-methyl
  modified_base 10: mod_base = OTHER; note = bicyclic nucleic acid (BNA)
  source 1..10: mol_type = other RNA
ttctgtccaa

SEQ ID NO: 4230-4231 - skipped (2 entries)

SEQ ID NO: 4232 - RNA, 19 nt, synthetic construct
  misc_feature 1..19: note = Description of Artificial Sequence: Synthetic Antisense oligonucleotide
  modified_base 2: mod_base = OTHER; note = 5-methyl
  modified_base 6..7: mod_base = OTHER; note = 5-methyl
  modified_base 11..13: mod_base = OTHER; note = 5-methyl
  modified_base 19: mod_base = OTHER; note = bicyclic nucleic acid (BNA)
  source 1..19: mol_type = other RNA
tctgtccaagcccggttga

SEQ ID NO: 4233 - RNA, 18 nt, synthetic construct
  misc_feature 1..18: note = Description of Artificial Sequence: Synthetic Antisense oligonucleotide
  modified_base 2: mod_base = OTHER; note = 5-methyl
  modified_base 6..7: mod_base = OTHER; note = 5-methyl
  modified_base 11..13: mod_base = OTHER; note = 5-methyl
  modified_base 18: mod_base = OTHER; note = bicyclic nucleic acid (BNA)
  source 1..18: mol_type = other RNA
tctgtccaagcccggttg

SEQ ID NO: 4234 - DNA, 17 bp, synthetic construct
  misc_feature 1..17: note = Description of Artificial Sequence: Synthetic Antisense oligonucleotide
  misc_feature 1..17: note = Original Sequence: ucuguccaagcccggut
  modified_base 2: mod_base = OTHER; note = 5-methyl
  modified_base 6..7: mod_base = OTHER; note = 5-methyl
  modified_base 11..13: mod_base = OTHER; note = 5-methyl
  modified_base 17: mod_base = OTHER; note = bicyclic nucleic acid (BNA)
  source 1..17: mol_type = other DNA
  modified_base 1: mod_base = OTHER; note = Uracil
  modified_base 3: mod_base = OTHER; note = Uracil
  modified_base 5: mod_base = OTHER; note = Uracil
  modified_base 16: mod_base = OTHER; note = Uracil
tctgtccaagcccggtt

SEQ ID NO: 4235 - DNA, 16 bp, synthetic construct
  misc_feature 1..16: note = Description of Artificial Sequence: Synthetic Antisense oligonucleotide
  misc_feature 1..16: note = Original Sequence: ucuguccaagcccggt
  modified_base 2: mod_base = OTHER; note = 5-methyl
  modified_base 6..7: mod_base = OTHER; note = 5-methyl
  modified_base 11..13: mod_base = OTHER; note = 5-methyl
  modified_base 16: mod_base = OTHER; note = bicyclic nucleic acid (BNA)
  source 1..16: mol_type = other DNA
  modified_base 1: mod_base = OTHER; note = Uracil
  modified_base 3: mod_base = OTHER; note = Uracil
  modified_base 5: mod_base = OTHER; note = Uracil
tctgtccaagcccggt

SEQ ID NO: 4236 - RNA, 15 nt, synthetic construct
  misc_feature 1..15: note = Description of Artificial Sequence: Synthetic Antisense oligonucleotide
  modified_base 2: mod_base = OTHER; note = 5-methyl
  modified_base 6..7: mod_base = OTHER; note = 5-methyl
  modified_base 11..13: mod_base = OTHER; note = 5-methyl
  modified_base 15: mod_base = OTHER; note = bicyclic nucleic acid (BNA)
  source 1..15: mol_type = other RNA
tctgtccaagcccgg

SEQ ID NO: 4237 - RNA, 14 nt, synthetic construct
  misc_feature 1..14: note = Description of Artificial Sequence: Synthetic Antisense oligonucleotide
  modified_base 2: mod_base = OTHER; note = 5-methyl
  modified_base 6..7: mod_base = OTHER; note = 5-methyl
  modified_base 11..13: mod_base = OTHER; note = 5-methyl
  modified_base 14: mod_base = OTHER; note = bicyclic nucleic acid (BNA)
  source 1..14: mol_type = other RNA
tctgtccaagcccg

SEQ ID NO: 4238 - RNA, 13 nt, synthetic construct
  misc_feature 1..13: note = Description of Artificial Sequence: Synthetic Antisense oligonucleotide
  modified_base 2: mod_base = OTHER; note = 5-methyl
  modified_base 6..7: mod_base = OTHER; note = 5-methyl
  modified_base 11..13: mod_base = OTHER; note = 5-methyl
  modified_base 13: mod_base = OTHER; note = bicyclic nucleic acid (BNA)
  source 1..13: mol_type = other RNA
tctgtccaagccc

SEQ ID NO: 4239 - RNA, 12 nt, synthetic construct
  misc_feature 1..12: note = Description of Artificial Sequence: Synthetic Antisense oligonucleotide
  modified_base 2: mod_base = OTHER; note = 5-methyl
  modified_base 6..7: mod_base = OTHER; note = 5-methyl
  modified_base 11..12: mod_base = OTHER; note = 5-methyl
  modified_base 12: mod_base = OTHER; note = bicyclic nucleic acid (BNA)
  source 1..12: mol_type = other RNA
tctgtccaagcc

SEQ ID NO: 4240 - RNA, 11 nt, synthetic construct
  misc_feature 1..11: note = Description of Artificial Sequence: Synthetic Antisense oligonucleotide
  modified_base 2: mod_base = OTHER; note = 5-methyl
  modified_base 6..7: mod_base = OTHER; note = 5-methyl
  modified_base 11: mod_base = OTHER; note = 5-methyl
  modified_base 11: mod_base = OTHER; note = bicyclic nucleic acid (BNA)
  source 1..11: mol_type = other RNA
tctgtccaagc

SEQ ID NO: 4241 - RNA, 10 nt, synthetic construct
  misc_feature 1..10: note = Description of Artificial Sequence: Synthetic Antisense oligonucleotide
  modified_base 2: mod_base = OTHER; note = 5-methyl
  modified_base 6..7: mod_base = OTHER; note = 5-methyl
  modified_base 10: mod_base = OTHER; note = bicyclic nucleic acid (BNA)
  source 1..10: mol_type = other RNA
tctgtccaag

SEQ ID NO: 4242-4243 - skipped (2 entries)

SEQ ID NO: 4244 - RNA, 17 nt, synthetic construct
  misc_feature 1..17: note = Description of Artificial Sequence: Synthetic Antisense oligonucleotide
  modified_base 1: mod_base = OTHER; note = 5-methyl
  modified_base 5..6: mod_base = OTHER; note = 5-methyl
  modified_base 10..12: mod_base = OTHER; note = 5-methyl
  modified_base 17: mod_base = OTHER; note = bicyclic nucleic acid (BNA)
  source 1..17: mol_type = other RNA
ctgtccaagcccggttg

SEQ ID NO: 4245 - DNA, 16 bp, synthetic construct
  misc_feature 1..16: note = Description of Artificial Sequence: Synthetic Antisense oligonucleotide
  misc_feature 1..16: note = Original Sequence: cuguccaagcccggut
  modified_base 1: mod_base = OTHER; note = 5-methyl
  modified_base 5..6: mod_base = OTHER; note = 5-methyl
  modified_base 10..12: mod_base = OTHER; note = 5-methyl
  modified_base 16: mod_base = OTHER; note = bicyclic nucleic acid (BNA)
  source 1..16: mol_type = other DNA
  modified_base 2: mod_base = OTHER; note = Uracil
  modified_base 4: mod_base = OTHER; note = Uracil
  modified_base 15: mod_base = OTHER; note = Uracil
ctgtccaagcccggtt

SEQ ID NO: 4246 - DNA, 15 bp, synthetic construct
  misc_feature 1..15: note = Description of Artificial Sequence: Synthetic Antisense oligonucleotide
  misc_feature 1..15: note = Original Sequence: cuguccaagcccggt
  modified_base 1: mod_base = OTHER; note = 5-methyl
  modified_base 5..6: mod_base = OTHER; note = 5-methyl
  modified_base 10..12: mod_base = OTHER; note = 5-methyl
  modified_base 15: mod_base = OTHER; note = bicyclic nucleic acid (BNA)
  source 1..15: mol_type = other DNA
  modified_base 2: mod_base = OTHER; note = Uracil
  modified_base 4: mod_base = OTHER; note = Uracil
ctgtccaagcccggt

SEQ ID NO: 4247 - RNA, 14 nt, synthetic construct
  misc_feature 1..14: note = Description of Artificial Sequence: Synthetic Antisense oligonucleotide
  modified_base 1: mod_base = OTHER; note = 5-methyl
  modified_base 5..6: mod_base = OTHER; note = 5-methyl
  modified_base 10..12: mod_base = OTHER; note = 5-methyl
  modified_base 14: mod_base = OTHER; note = bicyclic nucleic acid (BNA)
  source 1..14: mol_type = other RNA
ctgtccaagcccgg

SEQ ID NO: 4248 - RNA, 13 nt, synthetic construct
  misc_feature 1..13: note = Description of Artificial Sequence: Synthetic Antisense oligonucleotide
  modified_base 1: mod_base = OTHER; note = 5-methyl
  modified_base 5..6: mod_base = OTHER; note = 5-methyl
  modified_base 10..12: mod_base = OTHER; note = 5-methyl
  modified_base 13: mod_base = OTHER; note = bicyclic nucleic acid (BNA)
  source 1..13: mol_type = other RNA
ctgtccaagcccg

SEQ ID NO: 4249 - RNA, 12 nt, synthetic construct
  misc_feature 1..12: note = Description of Artificial Sequence: Synthetic Antisense oligonucleotide
  modified_base 1: mod_base = OTHER; note = 5-methyl
  modified_base 5..6: mod_base = OTHER; note = 5-methyl
  modified_base 10..12: mod_base = OTHER; note = 5-methyl
  modified_base 12: mod_base = OTHER; note = bicyclic nucleic acid (BNA)
  source 1..12: mol_type = other RNA
ctgtccaagccc

SEQ ID NO: 4250 - RNA, 11 nt, synthetic construct
  misc_feature 1..11: note = Description of Artificial Sequence: Synthetic Antisense oligonucleotide
  modified_base 1: mod_base = OTHER; note = 5-methyl
  modified_base 5..6: mod_base = OTHER; note = 5-methyl
  modified_base 10..11: mod_base = OTHER; note = 5-methyl
  modified_base 11: mod_base = OTHER; note = bicyclic nucleic acid (BNA)
  source 1..11: mol_type = other RNA
ctgtccaagcc

SEQ ID NO: 4251 - RNA, 10 nt, synthetic construct
  misc_feature 1..10: note = Description of Artificial Sequence: Synthetic Antisense oligonucleotide
  modified_base 1: mod_base = OTHER; note = 5-methyl
  modified_base 5..6: mod_base = OTHER; note = 5-methyl
  modified_base 10: mod_base = OTHER; note = 5-methyl
  modified_base 10: mod_base = OTHER; note = bicyclic nucleic acid (BNA)
  source 1..10: mol_type = other RNA
ctgtccaagc

SEQ ID NO: 4252-4253 - skipped (2 entries)

SEQ ID NO: 4254 - RNA, 20 nt, synthetic construct
  misc_feature 1..20: note = Description of Artificial Sequence: Synthetic Antisense oligonucleotide
  modified_base 4: mod_base = OTHER; note = 5-methyl
  modified_base 8..9: mod_base = OTHER; note = 5-methyl
  modified_base 13..15: mod_base = OTHER; note = 5-methyl
  modified_base 20: mod_base = OTHER; note = bicyclic nucleic acid (BNA)
  source 1..20: mol_type = other RNA
gttctgtccaagcccggttg

SEQ ID NO: 4255 - DNA, 19 bp, synthetic construct
  misc_feature 1..19: note = Description of Artificial Sequence: Synthetic Antisense oligonucleotide
  misc_feature 1..19: note = Original Sequence: guucuguccaagcccggut
  modified_base 4: mod_base = OTHER; note = 5-methyl
  modified_base 8..9: mod_base = OTHER; note = 5-methyl
  modified_base 13..15: mod_base = OTHER; note = 5-methyl
  modified_base 19: mod_base = OTHER; note = bicyclic nucleic acid (BNA)
  source 1..19: mol_type = other DNA
  modified_base 2: mod_base = OTHER; note = Uracil
  modified_base 3: mod_base = OTHER; note = Uracil
  modified_base 5: mod_base = OTHER; note = Uracil
  modified_base 7: mod_base = OTHER; note = Uracil
  modified_base 18: mod_base = OTHER; note = Uracil
gttctgtccaagcccggtt

SEQ ID NO: 4256 - DNA, 18 bp, synthetic construct
  misc_feature 1..18: note = Description of Artificial Sequence: Synthetic Antisense oligonucleotide
  misc_feature 1..18: note = Original Sequence: guucuguccaagcccggt
  modified_base 4: mod_base = OTHER; note = 5-methyl
  modified_base 8..9: mod_base = OTHER; note = 5-methyl
  modified_base 13..15: mod_base = OTHER; note = 5-methyl
  modified_base 18: mod_base = OTHER; note = bicyclic nucleic acid (BNA)
  source 1..18: mol_type = other DNA
  modified_base 2: mod_base = OTHER; note = Uracil
  modified_base 3: mod_base = OTHER; note = Uracil
  modified_base 5: mod_base = OTHER; note = Uracil
  modified_base 7: mod_base = OTHER; note = Uracil
gttctgtccaagcccggt

SEQ ID NO: 4257 - RNA, 17 nt, synthetic construct
  misc_feature 1..17: note = Description of Artificial Sequence: Synthetic Antisense oligonucleotide
  modified_base 4: mod_base = OTHER; note = 5-methyl
  modified_base 8..9: mod_base = OTHER; note = 5-methyl
  modified_base 13..15: mod_base = OTHER; note = 5-methyl
  modified_base 17: mod_base = OTHER; note = bicyclic nucleic acid (BNA)
  source 1..17: mol_type = other RNA
gttctgtccaagcccgg

SEQ ID NO: 4258 - RNA, 16 nt, synthetic construct
  misc_feature 1..16: note = Description of Artificial Sequence: Synthetic Antisense oligonucleotide
  modified_base 4: mod_base = OTHER; note = 5-methyl
  modified_base 8..9: mod_base = OTHER; note = 5-methyl
  modified_base 13..15: mod_base = OTHER; note = 5-methyl
  modified_base 16: mod_base = OTHER; note = bicyclic nucleic acid (BNA)
  source 1..16: mol_type = other RNA
gttctgtccaagcccg

SEQ ID NO: 4259 - RNA, 15 nt, synthetic construct
  misc_feature 1..15: note = Description of Artificial Sequence: Synthetic Antisense oligonucleotide
  modified_base 4: mod_base = OTHER; note = 5-methyl
  modified_base 8..9: mod_base = OTHER; note = 5-methyl
  modified_base 13..15: mod_base = OTHER; note = 5-methyl
  modified_base 15: mod_base = OTHER; note = bicyclic nucleic acid (BNA)
  source 1..15: mol_type = other RNA
gttctgtccaagccc

SEQ ID NO: 4260 - RNA, 14 nt, synthetic construct
  misc_feature 1..14: note = Description of Artificial Sequence: Synthetic Antisense oligonucleotide
  modified_base 4: mod_base = OTHER; note = 5-methyl
  modified_base 8..9: mod_base = OTHER; note = 5-methyl
  modified_base 13..14: mod_base = OTHER; note = 5-methyl
  modified_base 14: mod_base = OTHER; note = bicyclic nucleic acid (BNA)
  source 1..14: mol_type = other RNA
gttctgtccaagcc

SEQ ID NO: 4261 - RNA, 13 nt, synthetic construct
  misc_feature 1..13: note = Description of Artificial Sequence: Synthetic Antisense oligonucleotide
  modified_base 4: mod_base = OTHER; note = 5-methyl
  modified_base 8..9: mod_base = OTHER; note = 5-methyl
  modified_base 13: mod_base = OTHER; note = 5-methyl
  modified_base 13: mod_base = OTHER; note = bicyclic nucleic acid (BNA)
  source 1..13: mol_type = other RNA
gttctgtccaagc

SEQ ID NO: 4262 - RNA, 12 nt, synthetic construct
  misc_feature 1..12: note = Description of Artificial Sequence: Synthetic Antisense oligonucleotide
  modified_base 4: mod_base = OTHER; note = 5-methyl
  modified_base 8..9: mod_base = OTHER; note = 5-methyl
  modified_base 12: mod_base = OTHER; note = bicyclic nucleic acid (BNA)
  source 1..12: mol_type = other RNA
gttctgtccaag

SEQ ID NO: 4263 - RNA, 11 nt, synthetic construct
  misc_feature 1..11: note = Description of Artificial Sequence: Synthetic Antisense oligonucleotide
  modified_base 4: mod_base = OTHER; note = 5-methyl
  modified_base 8..9: mod_base = OTHER; note = 5-methyl
  modified_base 11: mod_base = OTHER; note = bicyclic nucleic acid (BNA)
  source 1..11: mol_type = other RNA
gttctgtccaa

SEQ ID NO: 4264 - RNA, 10 nt, synthetic construct
  misc_feature 1..10: note = Description of Artificial Sequence: Synthetic Antisense oligonucleotide
  modified_base 4: mod_base = OTHER; note = 5-methyl
  modified_base 8..9: mod_base = OTHER; note = 5-methyl
  modified_base 10: mod_base = OTHER; note = bicyclic nucleic acid (BNA)
  source 1..10: mol_type = other RNA
gttctgtcca

SEQ ID NO: 4265-4266 - skipped (2 entries)

SEQ ID NO: 4267 - DNA, 20 bp, synthetic construct
  misc_feature 1..20: note = Description of Artificial Sequence: Synthetic Antisense oligonucleotide
  misc_feature 1..20: note = Original Sequence: aguucuguccaagcccggut
  modified_base 5: mod_base = OTHER; note = 5-methyl
  modified_base 9..10: mod_base = OTHER; note = 5-methyl
  modified_base 14..16: mod_base = OTHER; note = 5-methyl
  modified_base 20: mod_base = OTHER; note = bicyclic nucleic acid (BNA)
  source 1..20: mol_type = other DNA
  modified_base 3: mod_base = OTHER; note = Uracil
  modified_base 4: mod_base = OTHER; note = Uracil
  modified_base 6: mod_base = OTHER; note = Uracil
  modified_base 8: mod_base = OTHER; note = Uracil
  modified_base 19: mod_base = OTHER; note = Uracil
agttctgtccaagcccggtt

SEQ ID NO: 4268 - DNA, 19 bp, synthetic construct
  misc_feature 1..19: note = Description of Artificial Sequence: Synthetic Antisense oligonucleotide
  misc_feature 1..19: note = Original Sequence: aguucuguccaagcccggt
  modified_base 5: mod_base = OTHER; note = 5-methyl
  modified_base 9..10: mod_base = OTHER; note = 5-methyl
  modified_base 14..16: mod_base = OTHER; note = 5-methyl
  modified_base 19: mod_base = OTHER; note = bicyclic nucleic acid (BNA)
  source 1..19: mol_type = other DNA
  modified_base 3: mod_base = OTHER; note = Uracil
  modified_base 4: mod_base = OTHER; note = Uracil
  modified_base 6: mod_base = OTHER; note = Uracil
  modified_base 8: mod_base = OTHER; note = Uracil
agttctgtccaagcccggt

SEQ ID NO: 4269 - RNA, 18 nt, synthetic construct
  misc_feature 1..18: note = Description of Artificial Sequence: Synthetic Antisense oligonucleotide
  modified_base 5: mod_base = OTHER; note = 5-methyl
  modified_base 9..10: mod_base = OTHER; note = 5-methyl
  modified_base 14..16: mod_base = OTHER; note = 5-methyl
  modified_base 18: mod_base = OTHER; note = bicyclic nucleic acid (BNA)
  source 1..18: mol_type = other RNA
agttctgtccaagcccgg

SEQ ID NO: 4270 - RNA, 17 nt, synthetic construct
  misc_feature 1..17: note = Description of Artificial Sequence: Synthetic Antisense oligonucleotide
  modified_base 5: mod_base = OTHER; note = 5-methyl
  modified_base 9..10: mod_base = OTHER; note = 5-methyl
  modified_base 14..16: mod_base = OTHER; note = 5-methyl
  modified_base 17: mod_base = OTHER; note = bicyclic nucleic acid (BNA)
  source 1..17: mol_type = other RNA
agttctgtccaagcccg

SEQ ID NO: 4271 - RNA, 16 nt, synthetic construct
  misc_feature 1..16: note = Description of Artificial Sequence: Synthetic Antisense oligonucleotide
  modified_base 5: mod_base = OTHER; note = 5-methyl
  modified_base 9..10: mod_base = OTHER; note = 5-methyl
  modified_base 14..16: mod_base = OTHER; note = 5-methyl
  modified_base 16: mod_base = OTHER; note = bicyclic nucleic acid (BNA)
  source 1..16: mol_type = other RNA
agttctgtccaagccc

SEQ ID NO: 4272 - RNA, 15 nt, synthetic construct
  misc_feature 1..15: note = Description of Artificial Sequence: Synthetic Antisense oligonucleotide
  modified_base 5: mod_base = OTHER; note = 5-methyl
  modified_base 9..10: mod_base = OTHER; note = 5-methyl
  modified_base 14..15: mod_base = OTHER; note = 5-methyl
  modified_base 15: mod_base = OTHER; note = bicyclic nucleic acid (BNA)
  source 1..15: mol_type = other RNA
agttctgtccaagcc

SEQ ID NO: 4273 - RNA, 14 nt, synthetic construct
  misc_feature 1..14: note = Description of Artificial Sequence: Synthetic Antisense oligonucleotide
  modified_base 5: mod_base = OTHER; note = 5-methyl
  modified_base 9..10: mod_base = OTHER; note = 5-methyl
  modified_base 14: mod_base = OTHER; note = 5-methyl
  modified_base 14: mod_base = OTHER; note = bicyclic nucleic acid (BNA)
  source 1..14: mol_type = other RNA
agttctgtccaagc

SEQ ID NO: 4274 - RNA, 13 nt, synthetic construct
  misc_feature 1..13: note = Description of Artificial Sequence: Synthetic Antisense oligonucleotide
  modified_base 5: mod_base = OTHER; note = 5-methyl
  modified_base 9..10: mod_base = OTHER; note = 5-methyl
  modified_base 13: mod_base = OTHER; note = bicyclic nucleic acid (BNA)
  source 1..13: mol_type = other RNA
agttctgtccaag

SEQ ID NO: 4275 - RNA, 12 nt, synthetic construct
  misc_feature 1..12: note = Description of Artificial Sequence: Synthetic Antisense oligonucleotide
  modified_base 5: mod_base = OTHER; note = 5-methyl
  modified_base 9..10: mod_base = OTHER; note = 5-methyl
  modified_base 12: mod_base = OTHER; note = bicyclic nucleic acid (BNA)
  source 1..12: mol_type = other RNA
agttctgtccaa

SEQ ID NO: 4276 - RNA, 11 nt, synthetic construct
  misc_feature 1..11: note = Description of Artificial Sequence: Synthetic Antisense oligonucleotide
  modified_base 5: mod_base = OTHER; note = 5-methyl
  modified_base 9..10: mod_base = OTHER; note = 5-methyl
  modified_base 11: mod_base = OTHER; note = bicyclic nucleic acid (BNA)
  source 1..11: mol_type = other RNA
agttctgtcca

SEQ ID NO: 4277 - RNA, 10 nt, synthetic construct
  misc_feature 1..10: note = Description of Artificial Sequence: Synthetic Antisense oligonucleotide
  modified_base 5: mod_base = OTHER; note = 5-methyl
  modified_base 9..10: mod_base = OTHER; note = 5-methyl
  modified_base 10: mod_base = OTHER; note = bicyclic nucleic acid (BNA)
  source 1..10: mol_type = other RNA
agttctgtcc

SEQ ID NO: 4278-4279 - skipped (2 entries)

SEQ ID NO: 4280 - DNA, 20 bp, synthetic construct
  misc_feature 1..20: note = Description of Artificial Sequence: Synthetic Antisense oligonucleotide
  misc_feature 1..20: note = Original Sequence: aaguucuguccaagcccggt
  modified_base 6: mod_base = OTHER; note = 5-methyl
  modified_base 10..11: mod_base = OTHER; note = 5-methyl
  modified_base 15..17: mod_base = OTHER; note = 5-methyl
  modified_base 20: mod_base = OTHER; note = bicyclic nucleic acid (BNA)
  source 1..20: mol_type = other DNA
  modified_base 4: mod_base = OTHER; note = Uracil
  modified_base 5: mod_base = OTHER; note = Uracil
  modified_base 7: mod_base = OTHER; note = Uracil
  modified_base 9: mod_base = OTHER; note = Uracil
aagttctgtccaagcccggt

SEQ ID NO: 4281 - RNA, 19 nt, synthetic construct
  misc_feature 1..19: note = Description of Artificial Sequence: Synthetic Antisense oligonucleotide
  modified_base 6: mod_base = OTHER; note = 5-methyl
  modified_base 10..11: mod_base = OTHER; note = 5-methyl
  modified_base 15..17: mod_base = OTHER; note = 5-methyl
  modified_base 19: mod_base = OTHER; note = bicyclic nucleic acid (BNA)
  source 1..19: mol_type = other RNA
aagttctgtccaagcccgg

SEQ ID NO: 4282 - RNA, 18 nt, synthetic construct
  misc_feature 1..18: note = Description of Artificial Sequence: Synthetic Antisense oligonucleotide
  modified_base 6: mod_base = OTHER; note = 5-methyl
  modified_base 10..11: mod_base = OTHER; note = 5-methyl
  modified_base 15..17: mod_base = OTHER; note = 5-methyl
  modified_base 18: mod_base = OTHER; note = bicyclic nucleic acid (BNA)
  source 1..18: mol_type = other RNA
aagttctgtccaagcccg

SEQ ID NO: 4283 - RNA, 17 nt, synthetic construct
  misc_feature 1..17: note = Description of Artificial Sequence: Synthetic Antisense oligonucleotide
  modified_base 6: mod_base = OTHER; note = 5-methyl
  modified_base 10..11: mod_base = OTHER; note = 5-methyl
  modified_base 15..17: mod_base = OTHER; note = 5-methyl
  modified_base 17: mod_base = OTHER; note = bicyclic nucleic acid (BNA)
  source 1..17: mol_type = other RNA
aagttctgtccaagccc

SEQ ID NO: 4284 - RNA, 16 nt, synthetic construct
  misc_feature 1..16: note = Description of Artificial Sequence: Synthetic Antisense oligonucleotide
  modified_base 6: mod_base = OTHER; note = 5-methyl
  modified_base 10..11: mod_base = OTHER; note = 5-methyl
  modified_base 15..16: mod_base = OTHER; note = 5-methyl
  modified_base 16: mod_base = OTHER; note = bicyclic nucleic acid (BNA)
  source 1..16: mol_type = other RNA
aagttctgtccaagcc

SEQ ID NO: 4285 - RNA, 15 nt, synthetic construct
  misc_feature 1..15: note = Description of Artificial Sequence: Synthetic Antisense oligonucleotide
  modified_base 6: mod_base = OTHER; note = 5-methyl
  modified_base 10..11: mod_base = OTHER; note = 5-methyl
  modified_base 15: mod_base = OTHER; note = 5-methyl
  modified_base 15: mod_base = OTHER; note = bicyclic nucleic acid (BNA)
  source 1..15: mol_type = other RNA
aagttctgtccaagc

SEQ ID NO: 4286 - RNA, 14 nt, synthetic construct
  misc_feature 1..14: note = Description of Artificial Sequence: Synthetic Antisense oligonucleotide
  modified_base 6: mod_base = OTHER; note = 5-methyl
  modified_base 10..11: mod_base = OTHER; note = 5-methyl
  modified_base 14: mod_base = OTHER; note = bicyclic nucleic acid (BNA)
  source 1..14: mol_type = other RNA
aagttctgtccaag

SEQ ID NO: 4287 - RNA, 13 nt, synthetic construct
  misc_feature 1..13: note = Description of Artificial Sequence: Synthetic Antisense oligonucleotide
  modified_base 6: mod_base = OTHER; note = 5-methyl
  modified_base 10..11: mod_base = OTHER; note = 5-methyl
  modified_base 13: mod_base = OTHER; note = bicyclic nucleic acid (BNA)
  source 1..13: mol_type = other RNA
aagttctgtccaa

SEQ ID NO: 4288 - RNA, 12 nt, synthetic construct
  misc_feature 1..12: note = Description of Artificial Sequence: Synthetic Antisense oligonucleotide
  modified_base 6: mod_base = OTHER; note = 5-methyl
  modified_base 10..11: mod_base = OTHER; note = 5-methyl
  modified_base 12: mod_base = OTHER; note = bicyclic nucleic acid (BNA)
  source 1..12: mol_type = other RNA
aagttctgtcca

SEQ ID NO: 4289 - RNA, 11 nt, synthetic construct
  misc_feature 1..11: note = Description of Artificial Sequence: Synthetic Antisense oligonucleotide
  modified_base 6: mod_base = OTHER; note = 5-methyl
  modified_base 10..11: mod_base = OTHER; note = 5-methyl
  modified_base 11: mod_base = OTHER; note = bicyclic nucleic acid (BNA)
  source 1..11: mol_type = other RNA
aagttctgtcc

SEQ ID NO: 4290 - RNA, 10 nt, synthetic construct
  misc_feature 1..10: note = Description of Artificial Sequence: Synthetic Antisense oligonucleotide
  modified_base 6: mod_base = OTHER; note = 5-methyl
  modified_base 10: mod_base = OTHER; note = 5-methyl
  modified_base 10: mod_base = OTHER; note = bicyclic nucleic acid (BNA)
  source 1..10: mol_type = other RNA
aagttctgtc

SEQ ID NO: 4291-4292 - skipped (2 entries)

SEQ ID NO: 4293 - RNA, 20 nt, synthetic construct
  misc_feature 1..20: note = Description of Artificial Sequence: Synthetic Antisense oligonucleotide
  modified_base 7: mod_base = OTHER; note = 5-methyl
  modified_base 11..12: mod_base = OTHER; note = 5-methyl
  modified_base 16..18: mod_base = OTHER; note = 5-methyl
  modified_base 20: mod_base = OTHER; note = bicyclic nucleic acid (BNA)
  source 1..20: mol_type = other RNA
taagttctgtccaagcccgg

SEQ ID NO: 4294 - RNA, 19 nt, synthetic construct
  misc_feature 1..19: note = Description of Artificial Sequence: Synthetic Antisense oligonucleotide
  modified_base 7: mod_base = OTHER; note = 5-methyl
  modified_base 11..12: mod_base = OTHER; note = 5-methyl
  modified_base 16..18: mod_base = OTHER; note = 5-methyl
  modified_base 19: mod_base = OTHER; note = bicyclic nucleic acid (BNA)
  source 1..19: mol_type = other RNA
taagttctgtccaagcccg

SEQ ID NO: 4295 - RNA, 18 nt, synthetic construct
  misc_feature 1..18: note = Description of Artificial Sequence: Synthetic Antisense oligonucleotide
  modified_base 7: mod_base = OTHER; note = 5-methyl
  modified_base 11..12: mod_base = OTHER; note = 5-methyl
  modified_base 16..18: mod_base = OTHER; note = 5-methyl
  modified_base 18: mod_base = OTHER; note = bicyclic nucleic acid (BNA)
  source 1..18: mol_type = other RNA
taagttctgtccaagccc

SEQ ID NO: 4296 - RNA, 17 nt, synthetic construct
  misc_feature 1..17: note = Description of Artificial Sequence: Synthetic Antisense oligonucleotide
  modified_base 7: mod_base = OTHER; note = 5-methyl
  modified_base 11..12: mod_base = OTHER; note = 5-methyl
  modified_base 16..17: mod_base = OTHER; note = 5-methyl
  modified_base 17: mod_base = OTHER; note = bicyclic nucleic acid (BNA)
  source 1..17: mol_type = other RNA
taagttctgtccaagcc

SEQ ID NO: 4297 - RNA, 16 nt, synthetic construct
  misc_feature 1..16: note = Description of Artificial Sequence: Synthetic Antisense oligonucleotide
  modified_base 7: mod_base = OTHER; note = 5-methyl
  modified_base 11..12: mod_base = OTHER; note = 5-methyl
  modified_base 16: mod_base = OTHER; note = 5-methyl
  modified_base 16: mod_base = OTHER; note = bicyclic nucleic acid (BNA)
  source 1..16: mol_type = other RNA
taagttctgtccaagc

SEQ ID NO: 4298 - RNA, 14 nt, synthetic construct
  misc_feature 1..14: note = Description of Artificial Sequence: Synthetic Antisense oligonucleotide
  modified_base 7: mod_base = OTHER; note = 5-methyl
  modified_base 11..12: mod_base = OTHER; note = 5-methyl
  modified_base 14: mod_base = OTHER; note = bicyclic nucleic acid (BNA)
  source 1..14: mol_type = other RNA
taagttctgtccaa

SEQ ID NO: 4299 - RNA, 13 nt, synthetic construct
  misc_feature 1..13: note = Description of Artificial Sequence: Synthetic Antisense oligonucleotide
  modified_base 7: mod_base = OTHER; note = 5-methyl
  modified_base 11..12: mod_base = OTHER; note = 5-methyl
  modified_base 13: mod_base = OTHER; note = bicyclic nucleic acid (BNA)
  source 1..13: mol_type = other RNA
taagttctgtcca

SEQ ID NO: 4300 - RNA, 12 nt, synthetic construct
  misc_feature 1..12: note = Description of Artificial Sequence: Synthetic Antisense oligonucleotide
  modified_base 7: mod_base = OTHER; note = 5-methyl
  modified_base 11..12: mod_base = OTHER; note = 5-methyl
  modified_base 12: mod_base = OTHER; note = bicyclic nucleic acid (BNA)
  source 1..12: mol_type = other RNA
taagttctgtcc

SEQ ID NO: 4301 - RNA, 11 nt, synthetic construct
  misc_feature 1..11: note = Description of Artificial Sequence: Synthetic Antisense oligonucleotide
  modified_base 7: mod_base = OTHER; note = 5-methyl
  modified_base 11: mod_base = OTHER; note = 5-methyl
  modified_base 11: mod_base = OTHER; note = bicyclic nucleic acid (BNA)
  source 1..11: mol_type = other RNA
taagttctgtc

SEQ ID NO: 4302 - DNA, 10 bp, synthetic construct
  misc_feature 1..10: note = Description of Artificial Sequence: Synthetic Antisense oligonucleotide
  misc_feature 1..10: note = Original Sequence: uaaguucugt
  modified_base 7: mod_base = OTHER; note = 5-methyl
  modified_base 10: mod_base = OTHER; note = bicyclic nucleic acid (BNA)
  source 1..10: mol_type = other DNA
  modified_base 1: mod_base = OTHER; note = Uracil
  modified_base 5: mod_base = OTHER; note = Uracil
  modified_base 6: mod_base = OTHER; note = Uracil
  modified_base 8: mod_base = OTHER; note = Uracil
taagttctgt

SEQ ID NO: 4303-4304 - skipped (2 entries)

SEQ ID NO: 4305 - RNA, 20 nt, synthetic construct
  misc_feature 1..20: note = Description of Artificial Sequence: Synthetic Antisense oligonucleotide
  modified_base 8: mod_base = OTHER; note = 5-methyl
  modified_base 12..13: mod_base = OTHER; note = 5-methyl
  modified_base 17..19: mod_base = OTHER; note = 5-methyl
  modified_base 20: mod_base = OTHER; note = bicyclic nucleic acid (BNA)
  source 1..20: mol_type = other RNA
gtaagttctgtccaagcccg

SEQ ID NO: 4306 - RNA, 19 nt, synthetic construct
  misc_feature 1..19: note = Description of Artificial Sequence: Synthetic Antisense oligonucleotide
  modified_base 8: mod_base = OTHER; note = 5-methyl
  modified_base 12..13: mod_base = OTHER; note = 5-methyl
  modified_base 17..19: mod_base = OTHER; note = 5-methyl
  modified_base 19: mod_base = OTHER; note = bicyclic nucleic acid (BNA)
  source 1..19: mol_type = other RNA
gtaagttctgtccaagccc

SEQ ID NO: 4307 - RNA, 17 nt, synthetic construct
  misc_feature 1..17: note = Description of Artificial Sequence: Synthetic Antisense oligonucleotide
  modified_base 8: mod_base = OTHER; note = 5-methyl
  modified_base 12..13: mod_base = OTHER; note = 5-methyl
  modified_base 17: mod_base = OTHER; note = 5-methyl
  modified_base 17: mod_base = OTHER; note = bicyclic nucleic acid (BNA)
  source 1..17: mol_type = other RNA
gtaagttctgtccaagc

SEQ ID NO: 4308 - RNA, 16 nt, synthetic construct
  misc_feature 1..16: note = Description of Artificial Sequence: Synthetic Antisense oligonucleotide
  modified_base 8: mod_base = OTHER; note = 5-methyl
  modified_base 12..13: mod_base = OTHER; note = 5-methyl
  modified_base 16: mod_base = OTHER; note = bicyclic nucleic acid (BNA)
  source 1..16: mol_type = other RNA
gtaagttctgtccaag

SEQ ID NO: 4309 - RNA, 15 nt, synthetic construct
  misc_feature 1..15: note = Description of Artificial Sequence: Synthetic Antisense oligonucleotide
  modified_base 8: mod_base = OTHER; note = 5-methyl
  modified_base 12..13: mod_base = OTHER; note = 5-methyl
  modified_base 15: mod_base = OTHER; note = bicyclic nucleic acid (BNA)
  source 1..15: mol_type = other RNA
gtaagttctgtccaa

SEQ ID NO: 4310 - RNA, 14 nt, synthetic construct
  misc_feature 1..14: note = Description of Artificial Sequence: Synthetic Antisense oligonucleotide
  modified_base 8: mod_base = OTHER; note = 5-methyl
  modified_base 12..13: mod_base = OTHER; note = 5-methyl
  modified_base 14: mod_base = OTHER; note = bicyclic nucleic acid (BNA)
  source 1..14: mol_type = other RNA
gtaagttctgtcca

SEQ ID NO: 4311 - RNA, 13 nt, synthetic construct
  misc_feature 1..13: note = Description of Artificial Sequence: Synthetic Antisense oligonucleotide
  modified_base 8: mod_base = OTHER; note = 5-methyl
  modified_base 12..13: mod_base = OTHER; note = 5-methyl
  modified_base 13: mod_base = OTHER; note = bicyclic nucleic acid (BNA)
  source 1..13: mol_type = other RNA
gtaagttctgtcc

SEQ ID NO: 4312 - RNA, 12 nt, synthetic construct
  misc_feature 1..12: note = Description of Artificial Sequence: Synthetic Antisense oligonucleotide
  modified_base 8: mod_base = OTHER; note = 5-methyl
  modified_base 12: mod_base = OTHER; note = 5-methyl
  modified_base 12: mod_base = OTHER; note = bicyclic nucleic acid (BNA)
  source 1..12: mol_type = other RNA
gtaagttctgtc

SEQ ID NO: 4313 - DNA, 11 bp, synthetic construct
  misc_feature 1..11: note = Description of Artificial Sequence: Synthetic Antisense oligonucleotide
  misc_feature 1..11: note = Original Sequence: guaaguucugt
  modified_base 8: mod_base = OTHER; note = 5-methyl
  modified_base 11: mod_base = OTHER; note = bicyclic nucleic acid (BNA)
  source 1..11: mol_type = other DNA
  modified_base 2: mod_base = OTHER; note = Uracil
  modified_base 6: mod_base = OTHER; note = Uracil
  modified_base 7: mod_base = OTHER; note = Uracil
  modified_base 9: mod_base = OTHER; note = Uracil
gtaagttctgt

SEQ ID NO: 4314 - RNA, 10 nt, synthetic construct
  misc_feature 1..10: note = Description of Artificial Sequence: Synthetic Antisense oligonucleotide
  modified_base 8: mod_base = OTHER; note = 5-methyl
  modified_base 10: mod_base = OTHER; note = bicyclic nucleic acid (BNA)
  source 1..10: mol_type = other RNA
gtaagttctg

SEQ ID NO: 4315-4316 - skipped (2 entries)

SEQ ID NO: 4317 - RNA, 20 nt, synthetic construct
  misc_feature 1..20: note = Description of Artificial Sequence: Synthetic Antisense oligonucleotide
  modified_base 9: mod_base = OTHER; note = 5-methyl
  modified_base 13..14: mod_base = OTHER; note = 5-methyl
  modified_base 18..20: mod_base = OTHER; note = 5-methyl
  modified_base 20: mod_base = OTHER; note = bicyclic nucleic acid (BNA)
  source 1..20: mol_type = other RNA
ggtaagttctgtccaagccc

SEQ ID NO: 4318 - RNA, 19 nt, synthetic construct
  misc_feature 1..19: note = Description of Artificial Sequence: Synthetic Antisense oligonucleotide
  modified_base 9: mod_base = OTHER; note = 5-methyl
  modified_base 13..14: mod_base = OTHER; note = 5-methyl
  modified_base 18..19: mod_base = OTHER; note = 5-methyl
  modified_base 19: mod_base = OTHER; note = bicyclic nucleic acid (BNA)
  source 1..19: mol_type = other RNA
ggtaagttctgtccaagcc

SEQ ID NO: 4319 - RNA, 17 nt, synthetic construct
  misc_feature 1..17: note = Description of Artificial Sequence: Synthetic Antisense oligonucleotide
  modified_base 9: mod_base = OTHER; note = 5-methyl
  modified_base 13..14: mod_base = OTHER; note = 5-methyl
  modified_base 17: mod_base = OTHER; note = bicyclic nucleic acid (BNA)
  source 1..17: mol_type = other RNA
ggtaagttctgtccaag

SEQ ID NO: 4320 - RNA, 16 nt, synthetic construct
  misc_feature 1..16: note = Description of Artificial Sequence: Synthetic Antisense oligonucleotide
  modified_base 9: mod_base = OTHER; note = 5-methyl
  modified_base 13..14: mod_base = OTHER; note = 5-methyl
  modified_base 16: mod_base = OTHER; note = bicyclic nucleic acid (BNA)
  source 1..16: mol_type = other RNA
ggtaagttctgtccaa

SEQ ID NO: 4321 - RNA, 15 nt, synthetic construct
  misc_feature 1..15: note = Description of Artificial Sequence: Synthetic Antisense oligonucleotide
  modified_base 9: mod_base = OTHER; note = 5-methyl
  modified_base 13..14: mod_base = OTHER; note = 5-methyl
  modified_base 15: mod_base = OTHER; note = bicyclic nucleic acid (BNA)
  source 1..15: mol_type = other RNA
ggtaagttctgtcca

SEQ ID NO: 4322 - RNA, 14 nt, synthetic construct
  misc_feature 1..14: note = Description of Artificial Sequence: Synthetic Antisense oligonucleotide
  modified_base 9: mod_base = OTHER; note = 5-methyl
  modified_base 13..14: mod_base = OTHER; note = 5-methyl
  modified_base 14: mod_base = OTHER; note = bicyclic nucleic acid (BNA)
  source 1..14: mol_type = other RNA
ggtaagttctgtcc

SEQ ID NO: 4323 - RNA, 13 nt, synthetic construct
  misc_feature 1..13: note = Description of Artificial Sequence: Synthetic Antisense oligonucleotide
  modified_base 9: mod_base = OTHER; note = 5-methyl
  modified_base 13: mod_base = OTHER; note = 5-methyl
  modified_base 13: mod_base = OTHER; note = bicyclic nucleic acid (BNA)
  source 1..13: mol_type = other RNA
ggtaagttctgtc

SEQ ID NO: 4324 - DNA, 12 bp, synthetic construct
  misc_feature 1..12: note = Description of Artificial Sequence: Synthetic Antisense oligonucleotide
  misc_feature 1..12: note = Original Sequence: gguaaguucugt
  modified_base 9: mod_base = OTHER; note = 5-methyl
  modified_base 12: mod_base = OTHER; note = bicyclic nucleic acid (BNA)
  source 1..12: mol_type = other DNA
  modified_base 3: mod_base = OTHER; note = Uracil
  modified_base 7: mod_base = OTHER; note = Uracil
  modified_base 8: mod_base = OTHER; note = Uracil
  modified_base 10: mod_base = OTHER; note = Uracil
ggtaagttctgt

SEQ ID NO: 4325 - RNA, 11 nt, synthetic construct
  misc_feature 1..11: note = Description of Artificial Sequence: Synthetic Antisense oligonucleotide
  modified_base 9: mod_base = OTHER; note = 5-methyl
  modified_base 11: mod_base = OTHER; note = bicyclic nucleic acid (BNA)
  source 1..11: mol_type = other RNA
ggtaagttctg

SEQ ID NO: 4326 - DNA, 10 bp, synthetic construct
  misc_feature 1..10: note = Description of Artificial Sequence: Synthetic Antisense oligonucleotide
  misc_feature 1..10: note = Original Sequence: gguaaguuct
  modified_base 9: mod_base = OTHER; note = 5-methyl
  modified_base 10: mod_base = OTHER; note = bicyclic nucleic acid (BNA)
  source 1..10: mol_type = other DNA
  modified_base 3: mod_base = OTHER; note = Uracil
  modified_base 7: mod_base = OTHER; note = Uracil
  modified_base 8: mod_base = OTHER; note = Uracil
ggtaagttct

SEQ ID NO: 4327 - skipped

SEQ ID NO: 4328 - RNA, 20 nt, synthetic construct
  misc_feature 1..20: note = Description of Artificial Sequence: Synthetic Antisense oligonucleotide
  modified_base 1: mod_base = OTHER; note = 5-methyl
  modified_base 10: mod_base = OTHER; note = 5-methyl
  modified_base 14..15: mod_base = OTHER; note = 5-methyl
  modified_base 19..20: mod_base = OTHER; note = 5-methyl
  modified_base 20: mod_base = OTHER; note = bicyclic nucleic acid (BNA)
  source 1..20: mol_type = other RNA
cggtaagttctgtccaagcc

SEQ ID NO: 4329 - RNA, 19 nt, synthetic construct
  misc_feature 1..19: note = Description of Artificial Sequence: Synthetic Antisense oligonucleotide
  modified_base 1: mod_base = OTHER; note = 5-methyl
  modified_base 10: mod_base = OTHER; note = 5-methyl
  modified_base 14..15: mod_base = OTHER; note = 5-methyl
  modified_base 19: mod_base = OTHER; note = 5-methyl
  modified_base 19: mod_base = OTHER; note = bicyclic nucleic acid (BNA)
  source 1..19: mol_type = other RNA
cggtaagttctgtccaagc

SEQ ID NO: 4330 - RNA, 18 nt, synthetic construct
  misc_feature 1..18: note = Description of Artificial Sequence: Synthetic Antisense oligonucleotide
  modified_base 1: mod_base = OTHER; note = 5-methyl
  modified_base 10: mod_base = OTHER; note = 5-methyl
  modified_base 14..15: mod_base = OTHER; note = 5-methyl
  modified_base 18: mod_base = OTHER; note = bicyclic nucleic acid (BNA)
  source 1..18: mol_type = other RNA
cggtaagttctgtccaag

SEQ ID NO: 4331 - RNA, 17 nt, synthetic construct
  misc_feature 1..17: note = Description of Artificial Sequence: Synthetic Antisense oligonucleotide
  modified_base 1: mod_base = OTHER; note = 5-methyl
  modified_base 10: mod_base = OTHER; note = 5-methyl
  modified_base 14..15: mod_base = OTHER; note = 5-methyl
  modified_base 17: mod_base = OTHER; note = bicyclic nucleic acid (BNA)
  source 1..17: mol_type = other RNA
cggtaagttctgtccaa

SEQ ID NO: 4332 - RNA, 16 nt, synthetic construct
  misc_feature 1..16: note = Description of Artificial Sequence: Synthetic Antisense oligonucleotide
  modified_base 1: mod_base = OTHER; note = 5-methyl
  modified_base 10: mod_base = OTHER; note = 5-methyl
  modified_base 14..15: mod_base = OTHER; note = 5-methyl
  modified_base 16: mod_base = OTHER; note = bicyclic nucleic acid (BNA)
  source 1..16: mol_type = other RNA
cggtaagttctgtcca

SEQ ID NO: 4333 - RNA, 15 nt, synthetic construct
  misc_feature 1..15: note = Description of Artificial Sequence: Synthetic Antisense oligonucleotide
  modified_base 1: mod_base = OTHER; note = 5-methyl
  modified_base 10: mod_base = OTHER; note = 5-methyl
  modified_base 14..15: mod_base = OTHER; note = 5-methyl
  modified_base 15: mod_base = OTHER; note = bicyclic nucleic acid (BNA)
  source 1..15: mol_type = other RNA
cggtaagttctgtcc

SEQ ID NO: 4334 - RNA, 14 nt, synthetic construct
  misc_feature 1..14: note = Description of Artificial Sequence: Synthetic Antisense oligonucleotide
  modified_base 1: mod_base = OTHER; note = 5-methyl
  modified_base 10: mod_base = OTHER; note = 5-methyl
  modified_base 14: mod_base = OTHER; note = 5-methyl
  modified_base 14: mod_base = OTHER; note = bicyclic nucleic acid (BNA)
  source 1..14: mol_type = other RNA
cggtaagttctgtc

SEQ ID NO: 4335 - DNA, 13 bp, synthetic construct
  misc_feature 1..13: note = Description of Artificial Sequence: Synthetic Antisense oligonucleotide
  misc_feature 1..13: note = Original Sequence: cgguaaguucugt
  modified_base 1: mod_base = OTHER; note = 5-methyl
  modified_base 10: mod_base = OTHER; note = 5-methyl
  modified_base 13: mod_base = OTHER; note = bicyclic nucleic acid (BNA)
  source 1..13: mol_type = other DNA
  modified_base 4: mod_base = OTHER; note = Uracil
  modified_base 8: mod_base = OTHER; note = Uracil
  modified_base 9: mod_base = OTHER; note = Uracil
  modified_base 11: mod_base = OTHER; note = Uracil
cggtaagttctgt

SEQ ID NO: 4336 - RNA, 12 nt, synthetic construct
  misc_feature 1..12: note = Description of Artificial Sequence: Synthetic Antisense oligonucleotide
  modified_base 1: mod_base = OTHER; note = 5-methyl
  modified_base 10: mod_base = OTHER; note = 5-methyl
  modified_base 12: mod_base = OTHER; note = bicyclic nucleic acid (BNA)
  source 1..12: mol_type = other RNA
cggtaagttctg

SEQ ID NO: 4337 - DNA, 11 bp, synthetic construct
  misc_feature 1..11: note = Description of Artificial Sequence: Synthetic Antisense oligonucleotide
  misc_feature 1..11: note = Original Sequence: cgguaaguuct
  modified_base 1: mod_base = OTHER; note = 5-methyl
  modified_base 10: mod_base = OTHER; note = 5-methyl
  modified_base 11: mod_base = OTHER; note = bicyclic nucleic acid (BNA)
  source 1..11: mol_type = other DNA
  modified_base 4: mod_base = OTHER; note = Uracil
  modified_base 8: mod_base = OTHER; note = Uracil
  modified_base 9: mod_base = OTHER; note = Uracil
cggtaagttct

SEQ ID NO: 4338 - RNA, 10 nt, synthetic construct
  misc_feature 1..10: note = Description of Artificial Sequence: Synthetic Antisense oligonucleotide
  modified_base 1: mod_base = OTHER; note = 5-methyl
  modified_base 10: mod_base = OTHER; note = 5-methyl
  modified_base 10: mod_base = OTHER; note = bicyclic nucleic acid (BNA)
  source 1..10: mol_type = other RNA
cggtaagttc

SEQ ID NO: 4339-4340 - skipped (2 entries)

SEQ ID NO: 4341 - RNA, 20 nt, synthetic construct
  misc_feature 1..20: note = Description of Artificial Sequence: Synthetic Antisense oligonucleotide
  modified_base 2: mod_base = OTHER; note = 5-methyl
  modified_base 11: mod_base = OTHER; note = 5-methyl
  modified_base 15..16: mod_base = OTHER; note = 5-methyl
  modified_base 20: mod_base = OTHER; note = 5-methyl
  modified_base 20: mod_base = OTHER; note = bicyclic nucleic acid (BNA)
  source 1..20: mol_type = other RNA
tcggtaagttctgtccaagc

SEQ ID NO: 4342 - RNA, 19 nt, synthetic construct
  misc_feature 1..19: note = Description of Artificial Sequence: Synthetic Antisense oligonucleotide
  modified_base 2: mod_base = OTHER; note = 5-methyl
  modified_base 11: mod_base = OTHER; note = 5-methyl
  modified_base 15..16: mod_base = OTHER; note = 5-methyl
  modified_base 19: mod_base = OTHER; note = bicyclic nucleic acid (BNA)
  source 1..19: mol_type = other RNA
tcggtaagttctgtccaag

SEQ ID NO: 4343 - RNA, 18 nt, synthetic construct
  misc_feature 1..18: note = Description of Artificial Sequence: Synthetic Antisense oligonucleotide
  modified_base 2: mod_base = OTHER; note = 5-methyl
  modified_base 11: mod_base = OTHER; note = 5-methyl
  modified_base 15..16: mod_base = OTHER; note = 5-methyl
  modified_base 18: mod_base = OTHER; note = bicyclic nucleic acid (BNA)
  source 1..18: mol_type = other RNA
tcggtaagttctgtccaa

SEQ ID NO: 4344 - RNA, 17 nt, synthetic construct
  misc_feature 1..17: note = Description of Artificial Sequence: Synthetic Antisense oligonucleotide
  modified_base 2: mod_base = OTHER; note = 5-methyl
  modified_base 11: mod_base = OTHER; note = 5-methyl
  modified_base 15..16: mod_base = OTHER; note = 5-methyl
  modified_base 17: mod_base = OTHER; note = bicyclic nucleic acid (BNA)
  source 1..17: mol_type = other RNA
tcggtaagttctgtcca

SEQ ID NO: 4345 - RNA, 16 nt, synthetic construct
  misc_feature 1..16: note = Description of Artificial Sequence: Synthetic Antisense oligonucleotide
  modified_base 2: mod_base = OTHER; note = 5-methyl
  modified_base 11: mod_base = OTHER; note = 5-methyl
  modified_base 15..16: mod_base = OTHER; note = 5-methyl
  modified_base 16: mod_base = OTHER; note = bicyclic nucleic acid (BNA)
  source 1..16: mol_type = other RNA
tcggtaagttctgtcc

SEQ ID NO: 4346 - RNA, 15 nt, synthetic construct
  misc_feature 1..15: note = Description of Artificial Sequence: Synthetic Antisense oligonucleotide
  modified_base 2: mod_base = OTHER; note = 5-methyl
  modified_base 11: mod_base = OTHER; note = 5-methyl
  modified_base 15: mod_base = OTHER; note = 5-methyl
  modified_base 15: mod_base = OTHER; note = bicyclic nucleic acid (BNA)
  source 1..15: mol_type = other RNA
tcggtaagttctgtc

SEQ ID NO: 4347 - DNA, 14 bp, synthetic construct
  misc_feature 1..14: note = Description of Artificial Sequence: Synthetic Antisense oligonucleotide
  misc_feature 1..14: note = Original Sequence: ucgguaaguucugt
  modified_base 2: mod_base = OTHER; note = 5-methyl
  modified_base 11: mod_base = OTHER; note = 5-methyl
  modified_base 14: mod_base = OTHER; note = bicyclic nucleic acid (BNA)
  source 1..14: mol_type = other DNA
  modified_base 1: mod_base = OTHER; note = Uracil
  modified_base 5: mod_base = OTHER; note = Uracil
  modified_base 9: mod_base = OTHER; note = Uracil
  modified_base 10: mod_base = OTHER; note = Uracil
  modified_base 12: mod_base = OTHER; note = Uracil
tcggtaagttctgt

SEQ ID NO: 4348 - RNA, 13 nt, synthetic construct
  misc_feature 1..13: note = Description of Artificial Sequence: Synthetic Antisense oligonucleotide
  modified_base 2: mod_base = OTHER; note = 5-methyl
  modified_base 11: mod_base = OTHER; note = 5-methyl
  modified_base 13: mod_base = OTHER; note = bicyclic nucleic acid (BNA)
  source 1..13: mol_type = other RNA
tcggtaagttctg

SEQ ID NO: 4349 - DNA, 12 bp, synthetic construct
  misc_feature 1..12: note = Description of Artificial Sequence: Synthetic Antisense oligonucleotide
  misc_feature 1..12: note = Original Sequence: ucgguaaguuct
  modified_base 2: mod_base = OTHER; note = 5-methyl
  modified_base 11: mod_base = OTHER; note = 5-methyl
  modified_base 12: mod_base = OTHER; note = bicyclic nucleic acid (BNA)
  source 1..12: mol_type = other DNA
  modified_base 1: mod_base = OTHER; note = Uracil
  modified_base 5: mod_base = OTHER; note = Uracil
  modified_base 9: mod_base = OTHER; note = Uracil
  modified_base 10: mod_base = OTHER; note = Uracil
tcggtaagttct

SEQ ID NO: 4350 - RNA, 11 nt, synthetic construct
  misc_feature 1..11: note = Description of Artificial Sequence: Synthetic Antisense oligonucleotide
  modified_base 2: mod_base = OTHER; note = 5-methyl
  modified_base 11: mod_base = OTHER; note = 5-methyl
  modified_base 11: mod_base = OTHER; note = bicyclic nucleic acid (BNA)
  source 1..11: mol_type = other RNA
tcggtaagttc

SEQ ID NO: 4351 - DNA, 10 bp, synthetic construct
  misc_feature 1..10: note = Description of Artificial Sequence: Synthetic Antisense oligonucleotide
  misc_feature 1..10: note = Original Sequence: ucgguaagut
  modified_base 2: mod_base = OTHER; note = 5-methyl
  modified_base 10: mod_base = OTHER; note = bicyclic nucleic acid (BNA)
  source 1..10: mol_type = other DNA
  modified_base 1: mod_base = OTHER; note = Uracil
  modified_base 5: mod_base = OTHER; note = Uracil
  modified_base 9: mod_base = OTHER; note = Uracil
tcggtaagtt

SEQ ID NO: 4352 - skipped

SEQ ID NO: 4353 - RNA, 20 nt, synthetic construct
  misc_feature 1..20: note = Description of Artificial Sequence: Synthetic Antisense oligonucleotide
  modified_base 3: mod_base = OTHER; note = 5-methyl
  modified_base 12: mod_base = OTHER; note = 5-methyl
  modified_base 16..17: mod_base = OTHER; note = 5-methyl
  modified_base 20: mod_base = OTHER; note = bicyclic nucleic acid (BNA)
  source 1..20: mol_type = other RNA
gtcggtaagttctgtccaag

SEQ ID NO: 4354 - RNA, 19 nt, synthetic construct
  misc_feature 1..19: note = Description of Artificial Sequence: Synthetic Antisense oligonucleotide
  modified_base 3: mod_base = OTHER; note = 5-methyl
  modified_base 12: mod_base = OTHER; note = 5-methyl
  modified_base 16..17: mod_base = OTHER; note = 5-methyl
  modified_base 19: mod_base = OTHER; note = bicyclic nucleic acid (BNA)
  source 1..19: mol_type = other RNA
gtcggtaagttctgtccaa

SEQ ID NO: 4355 - RNA, 18 nt, synthetic construct
  misc_feature 1..18: note = Description of Artificial Sequence: Synthetic Antisense oligonucleotide
  modified_base 3: mod_base = OTHER; note = 5-methyl
  modified_base 12: mod_base = OTHER; note = 5-methyl
  modified_base 16..17: mod_base = OTHER; note = 5-methyl
  modified_base 18: mod_base = OTHER; note = bicyclic nucleic acid (BNA)
  source 1..18: mol_type = other RNA
gtcggtaagttctgtcca

SEQ ID NO: 4356 - RNA, 17 nt, synthetic construct
  misc_feature 1..17: note = Description of Artificial Sequence: Synthetic Antisense oligonucleotide
  modified_base 3: mod_base = OTHER; note = 5-methyl
  modified_base 12: mod_base = OTHER; note = 5-methyl
  modified_base 16..17: mod_base = OTHER; note = 5-methyl
  modified_base 17: mod_base = OTHER; note = bicyclic nucleic acid (BNA)
  source 1..17: mol_type = other RNA
gtcggtaagttctgtcc

SEQ ID NO: 4357 - RNA, 16 nt, synthetic construct
  misc_feature 1..16: note = Description of Artificial Sequence: Synthetic Antisense oligonucleotide
  modified_base 3: mod_base = OTHER; note = 5-methyl
  modified_base 12: mod_base = OTHER; note = 5-methyl
  modified_base 16: mod_base = OTHER; note = 5-methyl
  modified_base 16: mod_base = OTHER; note = bicyclic nucleic acid (BNA)
  source 1..16: mol_type = other RNA
gtcggtaagttctgtc

SEQ ID NO: 4358 - DNA, 15 bp, synthetic construct
  misc_feature 1..15: note = Description of Artificial Sequence: Synthetic Antisense oligonucleotide
  misc_feature 1..15: note = Original Sequence: gucgguaaguucugt
  modified_base 3: mod_base = OTHER; note = 5-methyl
  modified_base 12: mod_base = OTHER; note = 5-methyl
  modified_base 15: mod_base = OTHER; note = bicyclic nucleic acid (BNA)
  source 1..15: mol_type = other DNA
  modified_base 2: mod_base = OTHER; note = Uracil
  modified_base 6: mod_base = OTHER; note = Uracil
  modified_base 10: mod_base = OTHER; note = Uracil
  modified_base 11: mod_base = OTHER; note = Uracil
  modified_base 13: mod_base = OTHER; note = Uracil
gtcggtaagttctgt

SEQ ID NO: 4359 - RNA, 14 nt, synthetic construct
  misc_feature 1..14: note = Description of Artificial Sequence: Synthetic Antisense oligonucleotide
  modified_base 3: mod_base = OTHER; note = 5-methyl
  modified_base 12: mod_base = OTHER; note = 5-methyl
  modified_base 14: mod_base = OTHER; note = bicyclic nucleic acid (BNA)
  source 1..14: mol_type = other RNA
gtcggtaagttctg

SEQ ID NO: 4360 - DNA, 13 bp, synthetic construct
  misc_feature 1..13: note = Description of Artificial Sequence: Synthetic Antisense oligonucleotide
  misc_feature 1..13: note = Original Sequence: gucgguaaguuct
  modified_base 3: mod_base = OTHER; note = 5-methyl
  modified_base 12: mod_base = OTHER; note = 5-methyl
  modified_base 13: mod_base = OTHER; note = bicyclic nucleic acid (BNA)
  source 1..13: mol_type = other DNA
  modified_base 2: mod_base = OTHER; note = Uracil
  modified_base 6: mod_base = OTHER; note = Uracil
  modified_base 10: mod_base = OTHER; note = Uracil
  modified_base 11: mod_base = OTHER; note = Uracil
gtcggtaagttct

SEQ ID NO: 4361 - RNA, 12 nt, synthetic construct
  misc_feature 1..12: note = Description of Artificial Sequence: Synthetic Antisense oligonucleotide
  modified_base 3: mod_base = OTHER; note = 5-methyl
  modified_base 12: mod_base = OTHER; note = 5-methyl
  modified_base 12: mod_base = OTHER; note = bicyclic nucleic acid (BNA)
  source 1..12: mol_type = other RNA
gtcggtaagttc

SEQ ID NO: 4362 - DNA, 11 bp, synthetic construct
  misc_feature 1..11: note = Description of Artificial Sequence: Synthetic Antisense oligonucleotide
  misc_feature 1..11: note = Original Sequence: gucgguaagut
  modified_base 3: mod_base = OTHER; note = 5-methyl
  modified_base 11: mod_base = OTHER; note = bicyclic nucleic acid (BNA)
  source 1..11: mol_type = other DNA
  modified_base 2: mod_base = OTHER; note = Uracil
  modified_base 6: mod_base = OTHER; note = Uracil
  modified_base 10: mod_base = OTHER; note = Uracil
gtcggtaagtt

SEQ ID NO: 4363 - DNA, 10 bp, synthetic construct
  misc_feature 1..10: note = Description of Artificial Sequence: Synthetic Antisense oligonucleotide
  misc_feature 1..10: note = Original Sequence: gucgguaagt
  modified_base 3: mod_base = OTHER; note = 5-methyl
  modified_base 10: mod_base = OTHER; note = bicyclic nucleic acid (BNA)
  source 1..10: mol_type = other DNA
  modified_base 2: mod_base = OTHER; note = Uracil
  modified_base 6: mod_base = OTHER; note = Uracil
gtcggtaagt

SEQ ID NO: 4364 - RNA, 20 nt, synthetic construct
  misc_feature 1..20: note = Description of Artificial Sequence: Synthetic Antisense oligonucleotide
  modified_base 4: mod_base = OTHER; note = 5-methyl
  modified_base 13: mod_base = OTHER; note = 5-methyl
  modified_base 17..18: mod_base = OTHER; note = 5-methyl
  modified_base 20: mod_base = OTHER; note = bicyclic nucleic acid (BNA)
  source 1..20: mol_type = other RNA
agtcggtaagttctgtccaa

SEQ ID NO: 4365 - RNA, 19 nt, synthetic construct
  misc_feature 1..19: note = Description of Artificial Sequence: Synthetic Antisense oligonucleotide
  modified_base 4: mod_base = OTHER; note = 5-methyl
  modified_base 13: mod_base = OTHER; note = 5-methyl
  modified_base 17..18: mod_base = OTHER; note = 5-methyl
  modified_base 19: mod_base = OTHER; note = bicyclic nucleic acid (BNA)
  source 1..19: mol_type = other RNA
agtcggtaagttctgtcca

SEQ ID NO: 4366 - RNA, 17 nt, synthetic construct
  misc_feature 1..17: note = Description of Artificial Sequence: Synthetic Antisense oligonucleotide
  modified_base 4: mod_base = OTHER; note = 5-methyl
  modified_base 13: mod_base = OTHER; note = 5-methyl
  modified_base 17: mod_base = OTHER; note = 5-methyl
  modified_base 17: mod_base = OTHER; note = bicyclic nucleic acid (BNA)
  source 1..17: mol_type = other RNA
agtcggtaagttctgtc

SEQ ID NO: 4367 - DNA, 16 bp, synthetic construct
  misc_feature 1..16: note = Description of Artificial Sequence: Synthetic Antisense oligonucleotide
  misc_feature 1..16: note = Original Sequence: agucgguaaguucugt
  modified_base 4: mod_base = OTHER; note = 5-methyl
  modified_base 13: mod_base = OTHER; note = 5-methyl
  modified_base 16: mod_base = OTHER; note = bicyclic nucleic acid (BNA)
  source 1..16: mol_type = other DNA
  modified_base 3: mod_base = OTHER; note = Uracil
  modified_base 7: mod_base = OTHER; note = Uracil
  modified_base 11: mod_base = OTHER; note = Uracil
  modified_base 12: mod_base = OTHER; note = Uracil
  modified_base 14: mod_base = OTHER; note = Uracil
agtcggtaagttctgt

SEQ ID NO: 4368 - RNA, 15 nt, synthetic construct
  misc_feature 1..15: note = Description of Artificial Sequence: Synthetic Antisense oligonucleotide
  modified_base 4: mod_base = OTHER; note = 5-methyl
  modified_base 13: mod_base = OTHER; note = 5-methyl
  modified_base 15: mod_base = OTHER; note = bicyclic nucleic acid (BNA)
  source 1..15: mol_type = other RNA
agtcggtaagttctg

SEQ ID NO: 4369 - DNA, 14 bp, synthetic construct
  misc_feature 1..14: note = Description of Artificial Sequence: Synthetic Antisense oligonucleotide
  misc_feature 1..14: note = Original Sequence: agucgguaaguuct
  modified_base 4: mod_base = OTHER; note = 5-methyl
  modified_base 13: mod_base = OTHER; note = 5-methyl
  modified_base 14: mod_base = OTHER; note = bicyclic nucleic acid (BNA)
  source 1..14: mol_type = other DNA
  modified_base 3: mod_base = OTHER; note = Uracil
  modified_base 7: mod_base = OTHER; note = Uracil
  modified_base 11: mod_base = OTHER; note = Uracil
  modified_base 12: mod_base = OTHER; note = Uracil
agtcggtaagttct

SEQ ID NO: 4370 - RNA, 13 nt, synthetic construct
  misc_feature 1..13: note = Description of Artificial Sequence: Synthetic Antisense oligonucleotide
  modified_base 4: mod_base = OTHER; note = 5-methyl
  modified_base 13: mod_base = OTHER; note = 5-methyl
  modified_base 13: mod_base = OTHER; note = bicyclic nucleic acid (BNA)
  source 1..13: mol_type = other RNA
agtcggtaagttc

SEQ ID NO: 4371 - DNA, 12 bp, synthetic construct
  misc_feature 1..12: note = Description of Artificial Sequence: Synthetic Antisense oligonucleotide
  misc_feature 1..12: note = Original Sequence: agucgguaagut
  modified_base 4: mod_base = OTHER; note = 5-methyl
  modified_base 12: mod_base = OTHER; note = bicyclic nucleic acid (BNA)
  source 1..12: mol_type = other DNA
  modified_base 3: mod_base = OTHER; note = Uracil
  modified_base 7: mod_base = OTHER; note = Uracil
  modified_base 11: mod_base = OTHER; note = Uracil
agtcggtaagtt

SEQ ID NO: 4372 - DNA, 11 bp, synthetic construct
  misc_feature 1..11: note = Description of Artificial Sequence: Synthetic Antisense oligonucleotide
  misc_feature 1..11: note = Original Sequence: agucgguaagt
  modified_base 4: mod_base = OTHER; note = 5-methyl
  modified_base 11: mod_base = OTHER; note = bicyclic nucleic acid (BNA)
  source 1..11: mol_type = other DNA
  modified_base 3: mod_base = OTHER; note = Uracil
  modified_base 7: mod_base = OTHER; note = Uracil
agtcggtaagt

SEQ ID NO: 4373 - RNA, 20 nt, synthetic construct
  misc_feature 1..20: note = Description of Artificial Sequence: Synthetic Antisense oligonucleotide
  modified_base 1: mod_base = OTHER; note = 5-methyl
  modified_base 5: mod_base = OTHER; note = 5-methyl
  modified_base 14: mod_base = OTHER; note = 5-methyl
  modified_base 18..19: mod_base = OTHER; note = 5-methyl
  modified_base 20: mod_base = OTHER; note = bicyclic nucleic acid (BNA)
  source 1..20: mol_type = other RNA
cagtcggtaagttctgtcca

SEQ ID NO: 4374 - RNA, 19 nt, synthetic construct
  misc_feature 1..19: note = Description of Artificial Sequence: Synthetic Antisense oligonucleotide
  modified_base 1: mod_base = OTHER; note = 5-methyl
  modified_base 5: mod_base = OTHER; note = 5-methyl
  modified_base 14: mod_base = OTHER; note = 5-methyl
  modified_base 18..19: mod_base = OTHER; note = 5-methyl
  modified_base 19: mod_base = OTHER; note = bicyclic nucleic acid (BNA)
  source 1..19: mol_type = other RNA
cagtcggtaagttctgtcc

SEQ ID NO: 4375 - RNA, 18 nt, synthetic construct
  misc_feature 1..18: note = Description of Artificial Sequence: Synthetic Antisense oligonucleotide
  modified_base 1: mod_base = OTHER; note = 5-methyl
  modified_base 5: mod_base = OTHER; note = 5-methyl
  modified_base 14: mod_base = OTHER; note = 5-methyl
  modified_base 18: mod_base = OTHER; note = 5-methyl
  modified_base 18: mod_base = OTHER; note = bicyclic nucleic acid (BNA)
  source 1..18: mol_type = other RNA
cagtcggtaagttctgtc

SEQ ID NO: 4376 - DNA, 17 bp, synthetic construct
  misc_feature 1..17: note = Description of Artificial Sequence: Synthetic Antisense oligonucleotide
  misc_feature 1..17: note = Original Sequence: cagucgguaaguucugt
  modified_base 1: mod_base = OTHER; note = 5-methyl
  modified_base 5: mod_base = OTHER; note = 5-methyl
  modified_base 14: mod_base = OTHER; note = 5-methyl
  modified_base 17: mod_base = OTHER; note = bicyclic nucleic acid (BNA)
  source 1..17: mol_type = other DNA
  modified_base 4: mod_base = OTHER; note = Uracil
  modified_base 8: mod_base = OTHER; note = Uracil
  modified_base 12: mod_base = OTHER; note = Uracil
  modified_base 13: mod_base = OTHER; note = Uracil
  modified_base 15: mod_base = OTHER; note = Uracil
cagtcggtaagttctgt

SEQ ID NO: 4377 - RNA, 16 nt, synthetic construct
  misc_feature 1..16: note = Description of Artificial Sequence: Synthetic Antisense oligonucleotide
  modified_base 1: mod_base = OTHER; note = 5-methyl
  modified_base 5: mod_base = OTHER; note = 5-methyl
  modified_base 14: mod_base = OTHER; note = 5-methyl
  modified_base 16: mod_base = OTHER; note = bicyclic nucleic acid (BNA)
  source 1..16: mol_type = other RNA
cagtcggtaagttctg

SEQ ID NO: 4378 - DNA, 15 bp, synthetic construct
  misc_feature 1..15: note = Description of Artificial Sequence: Synthetic Antisense oligonucleotide
  misc_feature 1..15: note = Original Sequence: cagucgguaaguuct
  modified_base 1: mod_base = OTHER; note = 5-methyl
  modified_base 5: mod_base = OTHER; note = 5-methyl
  modified_base 14: mod_base = OTHER; note = 5-methyl
  modified_base 15: mod_base = OTHER; note = bicyclic nucleic acid (BNA)
  source 1..15: mol_type = other DNA
  modified_base 4: mod_base = OTHER; note = Uracil
  modified_base 8: mod_base = OTHER; note = Uracil
  modified_base 12: mod_base = OTHER; note = Uracil
  modified_base 13: mod_base = OTHER; note = Uracil
cagtcggtaagttct

SEQ ID NO: 4379 - RNA, 14 nt, synthetic construct
  misc_feature 1..14: note = Description of Artificial Sequence: Synthetic Antisense oligonucleotide
  modified_base 1: mod_base = OTHER; note = 5-methyl
  modified_base 5: mod_base = OTHER; note = 5-methyl
  modified_base 14: mod_base = OTHER; note = 5-methyl
  modified_base 14: mod_base = OTHER; note = bicyclic nucleic acid (BNA)
  source 1..14: mol_type = other RNA
cagtcggtaagttc

SEQ ID NO: 4380 - DNA, 13 bp, synthetic construct
  misc_feature 1..13: note = Description of Artificial Sequence: Synthetic Antisense oligonucleotide
  misc_feature 1..13: note = Original Sequence: cagucgguaagut
  modified_base 1: mod_base = OTHER; note = 5-methyl
  modified_base 5: mod_base = OTHER; note = 5-methyl
  modified_base 13: mod_base = OTHER; note = bicyclic nucleic acid (BNA)
  source 1..13: mol_type = other DNA
  modified_base 4: mod_base = OTHER; note = Uracil
  modified_base 8: mod_base = OTHER; note = Uracil
  modified_base 12: mod_base = OTHER; note = Uracil
cagtcggtaagtt

SEQ ID NO: 4381 - DNA, 12 bp, synthetic construct
  misc_feature 1..12: note = Description of Artificial Sequence: Synthetic Antisense oligonucleotide
  misc_feature 1..12: note = Original Sequence: cagucgguaagt
  modified_base 1: mod_base = OTHER; note = 5-methyl
  modified_base 5: mod_base = OTHER; note = 5-methyl
  modified_base 12: mod_base = OTHER; note = bicyclic nucleic acid (BNA)
  source 1..12: mol_type = other DNA
  modified_base 4: mod_base = OTHER; note = Uracil
  modified_base 8: mod_base = OTHER; note = Uracil
cagtcggtaagt

SEQ ID NO: 4382 - RNA, 20 nt, synthetic construct
  misc_feature 1..20: note = Description of Artificial Sequence: Synthetic Antisense oligonucleotide
  modified_base 1..2: mod_base = OTHER; note = 5-methyl
  modified_base 6: mod_base = OTHER; note = 5-methyl
  modified_base 15: mod_base = OTHER; note = 5-methyl
  modified_base 19..20: mod_base = OTHER; note = 5-methyl
  modified_base 20: mod_base = OTHER; note = bicyclic nucleic acid (BNA)
  source 1..20: mol_type = other RNA
ccagtcggtaagttctgtcc

SEQ ID NO: 4383 - RNA, 19 nt, synthetic construct
  misc_feature 1..19: note = Description of Artificial Sequence: Synthetic Antisense oligonucleotide
  modified_base 1..2: mod_base = OTHER; note = 5-methyl
  modified_base 6: mod_base = OTHER; note = 5-methyl
  modified_base 15: mod_base = OTHER; note = 5-methyl
  modified_base 19: mod_base = OTHER; note = 5-methyl
  modified_base 19: mod_base = OTHER; note = bicyclic nucleic acid (BNA)
  source 1..19: mol_type = other RNA
ccagtcggtaagttctgtc

SEQ ID NO: 4384 - DNA, 18 bp, synthetic construct
  misc_feature 1..18: note = Description of Artificial Sequence: Synthetic Antisense oligonucleotide
  misc_feature 1..18: note = Original Sequence: ccagucgguaaguucugt
  modified_base 1..2: mod_base = OTHER; note = 5-methyl
  modified_base 6: mod_base = OTHER; note = 5-methyl
  modified_base 15: mod_base = OTHER; note = 5-methyl
  modified_base 18: mod_base = OTHER; note = bicyclic nucleic acid (BNA)
  source 1..18: mol_type = other DNA
  modified_base 5: mod_base = OTHER; note = Uracil
  modified_base 9: mod_base = OTHER; note = Uracil
  modified_base 13: mod_base = OTHER; note = Uracil
  modified_base 14: mod_base = OTHER; note = Uracil
  modified_base 16: mod_base = OTHER; note = Uracil
ccagtcggtaagttctgt

SEQ ID NO: 4385 - RNA, 17 nt, synthetic construct
  misc_feature 1..17: note = Description of Artificial Sequence: Synthetic Antisense oligonucleotide
  modified_base 1..2: mod_base = OTHER; note = 5-methyl
  modified_base 6: mod_base = OTHER; note = 5-methyl
  modified_base 15: mod_base = OTHER; note = 5-methyl
  modified_base 17: mod_base = OTHER; note = bicyclic nucleic acid (BNA)
  source 1..17: mol_type = other RNA
ccagtcggtaagttctg

SEQ ID NO: 4386 - DNA, 16 bp, synthetic construct
  misc_feature 1..16: note = Description of Artificial Sequence: Synthetic Antisense oligonucleotide
  misc_feature 1..16: note = Original Sequence: ccagucgguaaguuct
  modified_base 1..2: mod_base = OTHER; note = 5-methyl
  modified_base 6: mod_base = OTHER; note = 5-methyl
  modified_base 15: mod_base = OTHER; note = 5-methyl
  modified_base 16: mod_base = OTHER; note = bicyclic nucleic acid (BNA)
  source 1..16: mol_type = other DNA
  modified_base 5: mod_base = OTHER; note = Uracil
  modified_base 9: mod_base = OTHER; note = Uracil
  modified_base 13: mod_base = OTHER; note = Uracil
  modified_base 14: mod_base = OTHER; note = Uracil
ccagtcggtaagttct

SEQ ID NO: 4387 - RNA, 15 nt, synthetic construct
  misc_feature 1..15: note = Description of Artificial Sequence: Synthetic Antisense oligonucleotide
  modified_base 1..2: mod_base = OTHER; note = 5-methyl
  modified_base 6: mod_base = OTHER; note = 5-methyl
  modified_base 15: mod_base = OTHER; note = 5-methyl
  modified_base 15: mod_base = OTHER; note = bicyclic nucleic acid (BNA)
  source 1..15: mol_type = other RNA
ccagtcggtaagttc

SEQ ID NO: 4388 - DNA, 14 bp, synthetic construct
  misc_feature 1..14: note = Description of Artificial Sequence: Synthetic Antisense oligonucleotide
  misc_feature 1..14: note = Original Sequence: ccagucgguaagut
  modified_base 1..2: mod_base = OTHER; note = 5-methyl
  modified_base 6: mod_base = OTHER; note = 5-methyl
  modified_base 14: mod_base = OTHER; note = bicyclic nucleic acid (BNA)
  source 1..14: mol_type = other DNA
  modified_base 5: mod_base = OTHER; note = Uracil
  modified_base 9: mod_base = OTHER; note = Uracil
  modified_base 13: mod_base = OTHER; note = Uracil
ccagtcggtaagtt

SEQ ID NO: 4389 - DNA, 13 bp, synthetic construct
  misc_feature 1..13: note = Description of Artificial Sequence: Synthetic Antisense oligonucleotide
  misc_feature 1..13: note = Original Sequence: ccagucgguaagt
  modified_base 1..2: mod_base = OTHER; note = 5-methyl
  modified_base 6: mod_base = OTHER; note = 5-methyl
  modified_base 13: mod_base = OTHER; note = bicyclic nucleic acid (BNA)
  source 1..13: mol_type = other DNA
  modified_base 5: mod_base = OTHER; note = Uracil
  modified_base 9: mod_base = OTHER; note = Uracil
ccagtcggtaagt

SEQ ID NO: 4390 - RNA, 20 nt, synthetic construct
  misc_feature 1..20: note = Description of Artificial Sequence: Synthetic Antisense oligonucleotide
  modified_base 2..3: mod_base = OTHER; note = 5-methyl
  modified_base 7: mod_base = OTHER; note = 5-methyl
  modified_base 16: mod_base = OTHER; note = 5-methyl
  modified_base 20: mod_base = OTHER; note = 5-methyl
  modified_base 20: mod_base = OTHER; note = bicyclic nucleic acid (BNA)
  source 1..20: mol_type = other RNA
gccagtcggtaagttctgtc

SEQ ID NO: 4391 - DNA, 19 bp, synthetic construct
  misc_feature 1..19: note = Description of Artificial Sequence: Synthetic Antisense oligonucleotide
  misc_feature 1..19: note = Original Sequence: gccagucgguaaguucugt
  modified_base 2..3: mod_base = OTHER; note = 5-methyl
  modified_base 7: mod_base = OTHER; note = 5-methyl
  modified_base 16: mod_base = OTHER; note = 5-methyl
  modified_base 19: mod_base = OTHER; note = bicyclic nucleic acid (BNA)
  source 1..19: mol_type = other DNA
  modified_base 6: mod_base = OTHER; note = Uracil
  modified_base 10: mod_base = OTHER; note = Uracil
  modified_base 14: mod_base = OTHER; note = Uracil
  modified_base 15: mod_base = OTHER; note = Uracil
  modified_base 17: mod_base = OTHER; note = Uracil
gccagtcggtaagttctgt

SEQ ID NO: 4392 - RNA, 18 nt, synthetic construct
  misc_feature 1..18: note = Description of Artificial Sequence: Synthetic Antisense oligonucleotide
  modified_base 2..3: mod_base = OTHER; note = 5-methyl
  modified_base 7: mod_base = OTHER; note = 5-methyl
  modified_base 16: mod_base = OTHER; note = 5-methyl
  modified_base 18: mod_base = OTHER; note = bicyclic nucleic acid (BNA)
  source 1..18: mol_type = other RNA
gccagtcggtaagttctg

SEQ ID NO: 4393 - DNA, 17 bp, synthetic construct
  misc_feature 1..17: note = Description of Artificial Sequence: Synthetic Antisense oligonucleotide
  misc_feature 1..17: note = Original Sequence: gccagucgguaaguuct
  modified_base 2..3: mod_base = OTHER; note = 5-methyl
  modified_base 7: mod_base = OTHER; note = 5-methyl
  modified_base 16: mod_base = OTHER; note = 5-methyl
  modified_base 17: mod_base = OTHER; note = bicyclic nucleic acid (BNA)
  source 1..17: mol_type = other DNA
  modified_base 6: mod_base = OTHER; note = Uracil
  modified_base 10: mod_base = OTHER; note = Uracil
  modified_base 14: mod_base = OTHER; note = Uracil
  modified_base 15: mod_base = OTHER; note = Uracil
gccagtcggtaagttct

SEQ ID NO: 4394 - RNA, 16 nt, synthetic construct
  misc_feature 1..16: note = Description of Artificial Sequence: Synthetic Antisense oligonucleotide
  modified_base 2..3: mod_base = OTHER; note = 5-methyl
  modified_base 7: mod_base = OTHER; note = 5-methyl
  modified_base 16: mod_base = OTHER; note = 5-methyl
  modified_base 16: mod_base = OTHER; note = bicyclic nucleic acid (BNA)
  source 1..16: mol_type = other RNA
gccagtcggtaagttc

SEQ ID NO: 4395 - DNA, 15 bp, synthetic construct
  misc_feature 1..15: note = Description of Artificial Sequence: Synthetic Antisense oligonucleotide
  misc_feature 1..15: note = Original Sequence: gccagucgguaagut
  modified_base 2..3: mod_base = OTHER; note = 5-methyl
  modified_base 7: mod_base = OTHER; note = 5-methyl
  modified_base 15: mod_base = OTHER; note = bicyclic nucleic acid (BNA)
  source 1..15: mol_type = other DNA
  modified_base 6: mod_base = OTHER; note = Uracil
  modified_base 10: mod_base = OTHER; note = Uracil
  modified_base 14: mod_base = OTHER; note = Uracil
gccagtcggtaagtt

SEQ ID NO: 4396 - DNA, 14 bp, synthetic construct
  misc_feature 1..14: note = Description of Artificial Sequence: Synthetic Antisense oligonucleotide
  misc_feature 1..14: note = Original Sequence: gccagucgguaagt
  modified_base 2..3: mod_base = OTHER; note = 5-methyl
  modified_base 7: mod_base = OTHER; note = 5-methyl
  modified_base 14: mod_base = OTHER; note = bicyclic nucleic acid (BNA)
  source 1..14: mol_type = other DNA
  modified_base 6: mod_base = OTHER; note = Uracil
  modified_base 10: mod_base = OTHER; note = Uracil
gccagtcggtaagt

SEQ ID NO: 4397 - DNA, 20 bp, synthetic construct
  misc_feature 1..20: note = Description of Artificial Sequence: Synthetic Antisense oligonucleotide
  misc_feature 1..20: note = Original Sequence: ucaaggaagauggcauuuct
  modified_base 2: mod_base = OTHER; note = 5-methyl
  modified_base 14: mod_base = OTHER; note = 5-methyl
  modified_base 19: mod_base = OTHER; note = 5-methyl
  modified_base 20: mod_base = OTHER; note = bicyclic nucleic acid (BNA)
  source 1..20: mol_type = other DNA
  modified_base 1: mod_base = OTHER; note = Uracil
  modified_base 11: mod_base = OTHER; note = Uracil
  modified_base 16: mod_base = OTHER; note = Uracil
  modified_base 17: mod_base = OTHER; note = Uracil
  modified_base 18: mod_base = OTHER; note = Uracil
tcaaggaagatggcatttct

SEQ ID NO: 4398 - RNA, 22 nt, synthetic construct
  misc_feature 1..22: note = Description of Artificial Sequence: Synthetic Antisense oligonucleotide
  modified_base 2: mod_base = OTHER; note = 5-methyl
  modified_base 14: mod_base = OTHER; note = 5-methyl
  modified_base 19: mod_base = OTHER; note = 5-methyl
  modified_base 22: mod_base = OTHER; note = bicyclic nucleic acid (BNA)
  source 1..22: mol_type = other RNA
tcaaggaagatggcatttctag

SEQ ID NO: 4399 - DNA, 16 bp, synthetic construct
  misc_feature 1..16: note = Description of Artificial Sequence: Synthetic Antisense oligonucleotide
  misc_feature 1..16: note = Original Sequence: ucaaggaagauggcat
  modified_base 2: mod_base = OTHER; note = 5-methyl
  modified_base 14: mod_base = OTHER; note = 5-methyl
  modified_base 16: mod_base = OTHER; note = bicyclic nucleic acid (BNA)
  source 1..16: mol_type = other DNA
  modified_base 1: mod_base = OTHER; note = Uracil
  modified_base 11: mod_base = OTHER; note = Uracil
tcaaggaagatggcat

SEQ ID NO: 4400 - DNA, 15 bp, synthetic construct
  misc_feature 1..15: note = Description of Artificial Sequence: Synthetic Antisense oligonucleotide
  misc_feature 1..15: note = Original Sequence: gaagauggcauuuct
  modified_base 9: mod_base = OTHER; note = 5-methyl
  modified_base 14: mod_base = OTHER; note = 5-methyl
  modified_base 15: mod_base = OTHER; note = bicyclic nucleic acid (BNA)
  source 1..15: mol_type = other DNA
  modified_base 6: mod_base = OTHER; note = Uracil
  modified_base 11: mod_base = OTHER; note = Uracil
  modified_base 12: mod_base = OTHER; note = Uracil
  modified_base 13: mod_base = OTHER; note = Uracil
gaagatggcatttct

SEQ ID NO: 4401 - RNA, 21 nt, synthetic construct
  misc_feature 1..21: note = Description of Artificial Sequence: Synthetic Antisense oligonucleotide
  modified_base 2: mod_base = OTHER; note = 5-methyl
  modified_base 14: mod_base = OTHER; note = 5-methyl
  modified_base 19: mod_base = OTHER; note = 5-methyl
  modified_base 21: mod_base = OTHER; note = bicyclic nucleic acid (BNA)
  source 1..21: mol_type = other RNA
tcaaggaagatggcatttcta

SEQ ID NO: 4402 - RNA, 19 nt, synthetic construct
  misc_feature 1..19: note = Description of Artificial Sequence: Synthetic Antisense oligonucleotide
  modified_base 2: mod_base = OTHER; note = 5-methyl
  modified_base 14: mod_base = OTHER; note = 5-methyl
  modified_base 19: mod_base = OTHER; note = 5-methyl
  modified_base 19: mod_base = OTHER; note = bicyclic nucleic acid (BNA)
  source 1..19: mol_type = other RNA
tcaaggaagatggcatttc

SEQ ID NO: 4403 - DNA, 18 bp, synthetic construct
  misc_feature 1..18: note = Description of Artificial Sequence: Synthetic Antisense oligonucleotide
  misc_feature 1..18: note = Original Sequence: ucaaggaagauggcauut
  modified_base 2: mod_base = OTHER; note = 5-methyl
  modified_base 14: mod_base = OTHER; note = 5-methyl
  modified_base 18: mod_base = OTHER; note = bicyclic nucleic acid (BNA)
  source 1..18: mol_type = other DNA
  modified_base 1: mod_base = OTHER; note = Uracil
  modified_base 11: mod_base = OTHER; note = Uracil
  modified_base 16: mod_base = OTHER; note = Uracil
  modified_base 17: mod_base = OTHER; note = Uracil
tcaaggaagatggcattt

SEQ ID NO: 4404 - DNA, 17 bp, synthetic construct
  misc_feature 1..17: note = Description of Artificial Sequence: Synthetic Antisense oligonucleotide
  misc_feature 1..17: note = Original Sequence: ucaaggaagauggcaut
  modified_base 2: mod_base = OTHER; note = 5-methyl
  modified_base 14: mod_base = OTHER; note = 5-methyl
  modified_base 17: mod_base = OTHER; note = bicyclic nucleic acid (BNA)
  source 1..17: mol_type = other DNA
  modified_base 1: mod_base = OTHER; note = Uracil
  modified_base 11: mod_base = OTHER; note = Uracil
  modified_base 16: mod_base = OTHER; note = Uracil
tcaaggaagatggcatt

SEQ ID NO: 4405 - RNA, 15 nt, synthetic construct
  misc_feature 1..15: note = Description of Artificial Sequence: Synthetic Antisense oligonucleotide
  modified_base 2: mod_base = OTHER; note = 5-methyl
  modified_base 14: mod_base = OTHER; note = 5-methyl
  modified_base 15: mod_base = OTHER; note = bicyclic nucleic acid (BNA)
  source 1..15: mol_type = other RNA
tcaaggaagatggca

SEQ ID NO: 4406 - RNA, 14 nt, synthetic construct
  misc_feature 1..14: note = Description of Artificial Sequence: Synthetic Antisense oligonucleotide
  modified_base 2: mod_base = OTHER; note = 5-methyl
  modified_base 14: mod_base = OTHER; note = 5-methyl
  modified_base 14: mod_base = OTHER; note = bicyclic nucleic acid (BNA)
  source 1..14: mol_type = other RNA
tcaaggaagatggc

SEQ ID NO: 4407 - RNA, 13 nt, synthetic construct
  misc_feature 1..13: note = Description of Artificial Sequence: Synthetic Antisense oligonucleotide
  modified_base 2: mod_base = OTHER; note = 5-methyl
  modified_base 13: mod_base = OTHER; note = bicyclic nucleic acid (BNA)
  source 1..13: mol_type = other RNA
tcaaggaagatgg

SEQ ID NO: 4408 - RNA, 12 nt, synthetic construct
  misc_feature 1..12: note = Description of Artificial Sequence: Synthetic Antisense oligonucleotide
  modified_base 2: mod_base = OTHER; note = 5-methyl
  modified_base 12: mod_base = OTHER; note = bicyclic nucleic acid (BNA)
  source 1..12: mol_type = other RNA
tcaaggaagatg

SEQ ID NO: 4409 - DNA, 11 bp, synthetic construct
  misc_feature 1..11: note = Description of Artificial Sequence: Synthetic Antisense oligonucleotide
  misc_feature 1..11: note = Original Sequence: ucaaggaagat
  modified_base 2: mod_base = OTHER; note = 5-methyl
  modified_base 11: mod_base = OTHER; note = bicyclic nucleic acid (BNA)
  source 1..11: mol_type = other DNA
  modified_base 1: mod_base = OTHER; note = Uracil
tcaaggaagat

SEQ ID NO: 4410 - RNA, 10 nt, synthetic construct
  misc_feature 1..10: note = Description of Artificial Sequence: Synthetic Antisense oligonucleotide
  modified_base 2: mod_base = OTHER; note = 5-methyl
  modified_base 10: mod_base = OTHER; note = bicyclic nucleic acid (BNA)
  source 1..10: mol_type = other RNA
tcaaggaaga

SEQ ID NO: 4411 - skipped

SEQ ID NO: 4412 - RNA, 21 nt, synthetic construct
  misc_feature 1..21: note = Description of Artificial Sequence: Synthetic Antisense oligonucleotide
  modified_base 1: mod_base = OTHER; note = 5-methyl
  modified_base 13: mod_base = OTHER; note = 5-methyl
  modified_base 18: mod_base = OTHER; note = 5-methyl
  modified_base 21: mod_base = OTHER; note = bicyclic nucleic acid (BNA)
  source 1..21: mol_type = other RNA
caaggaagatggcatttctag

SEQ ID NO: 4413 - RNA, 20 nt, synthetic construct
  misc_feature 1..20: note = Description of Artificial Sequence: Synthetic Antisense oligonucleotide
  modified_base 1: mod_base = OTHER; note = 5-methyl
  modified_base 13: mod_base = OTHER; note = 5-methyl
  modified_base 18: mod_base = OTHER; note = 5-methyl
  modified_base 20: mod_base = OTHER; note = bicyclic nucleic acid (BNA)
  source 1..20: mol_type = other RNA
caaggaagatggcatttcta

SEQ ID NO: 4414 - DNA, 19 bp, synthetic construct
  misc_feature 1..19: note = Description of Artificial Sequence: Synthetic Antisense oligonucleotide
  misc_feature 1..19: note = Original Sequence: caaggaagauggcauuuct
  modified_base 1: mod_base = OTHER; note = 5-methyl
  modified_base 13: mod_base = OTHER; note = 5-methyl
  modified_base 18: mod_base = OTHER; note = 5-methyl
  modified_base 19: mod_base = OTHER; note = bicyclic nucleic acid (BNA)
  source 1..19: mol_type = other DNA
  modified_base 10: mod_base = OTHER; note = Uracil
  modified_base 15: mod_base = OTHER; note = Uracil
  modified_base 16: mod_base = OTHER; note = Uracil
  modified_base 17: mod_base = OTHER; note = Uracil
caaggaagatggcatttct

SEQ ID NO: 4415 - RNA, 18 nt, synthetic construct
  misc_feature 1..18: note = Description of Artificial Sequence: Synthetic Antisense oligonucleotide
  modified_base 1: mod_base = OTHER; note = 5-methyl
  modified_base 13: mod_base = OTHER; note = 5-methyl
  modified_base 18: mod_base = OTHER; note = 5-methyl
  modified_base 18: mod_base = OTHER; note = bicyclic nucleic acid (BNA)
  source 1..18: mol_type = other RNA
caaggaagatggcatttc

SEQ ID NO: 4416 - DNA, 17 bp, synthetic construct
  misc_feature 1..17: note = Description of Artificial Sequence: Synthetic Antisense oligonucleotide
  misc_feature 1..17: note = Original Sequence: caaggaagauggcauut
  modified_base 1: mod_base = OTHER; note = 5-methyl
  modified_base 13: mod_base = OTHER; note = 5-methyl
  modified_base 17: mod_base = OTHER; note = bicyclic nucleic acid (BNA)
  source 1..17: mol_type = other DNA
  modified_base 10: mod_base = OTHER; note = Uracil
  modified_base 15: mod_base = OTHER; note = Uracil
  modified_base 16: mod_base = OTHER; note = Uracil
caaggaagatggcattt

SEQ ID NO: 4417 - DNA, 16 bp, synthetic construct
  misc_feature 1..16: note = Description of Artificial Sequence: Synthetic Antisense oligonucleotide
  misc_feature 1..16: note = Original Sequence: caaggaagauggcaut
  modified_base 1: mod_base = OTHER; note = 5-methyl
  modified_base 13: mod_base = OTHER; note = 5-methyl
  modified_base 16: mod_base = OTHER; note = bicyclic nucleic acid (BNA)
  source 1..16: mol_type = other DNA
  modified_base 10: mod_base = OTHER; note = Uracil
  modified_base 15: mod_base = OTHER; note = Uracil
caaggaagatggcatt

SEQ ID NO: 4418 - DNA, 15 bp, synthetic construct
  misc_feature 1..15: note = Description of Artificial Sequence: Synthetic Antisense oligonucleotide
  misc_feature 1..15: note = Original Sequence: caaggaagauggcat
  modified_base 1: mod_base = OTHER; note = 5-methyl
  modified_base 13: mod_base = OTHER; note = 5-methyl
  modified_base 15: mod_base = OTHER; note = bicyclic nucleic acid (BNA)
  source 1..15: mol_type = other DNA
  modified_base 10: mod_base = OTHER; note = Uracil
caaggaagatggcat

SEQ ID NO: 4419 - RNA, 14 nt, synthetic construct
  misc_feature 1..14: note = Description of Artificial Sequence: Synthetic Antisense oligonucleotide
  modified_base 1: mod_base = OTHER; note = 5-methyl
  modified_base 13: mod_base = OTHER; note = 5-methyl
  modified_base 14: mod_base = OTHER; note = bicyclic nucleic acid (BNA)
  source 1..14: mol_type = other RNA
caaggaagatggca

SEQ ID NO: 4420 - RNA, 13 nt, synthetic construct
  misc_feature 1..13: note = Description of Artificial Sequence: Synthetic Antisense oligonucleotide
  modified_base 1: mod_base = OTHER; note = 5-methyl
  modified_base 13: mod_base = OTHER; note = 5-methyl
  modified_base 13: mod_base = OTHER; note = bicyclic nucleic acid (BNA)
  source 1..13: mol_type = other RNA
caaggaagatggc

SEQ ID NO: 4421 - RNA, 12 nt, synthetic construct
  misc_feature 1..12: note = Description of Artificial Sequence: Synthetic Antisense oligonucleotide
  modified_base 1: mod_base = OTHER; note = 5-methyl
  modified_base 12: mod_base = OTHER; note = bicyclic nucleic acid (BNA)
  source 1..12: mol_type = other RNA
caaggaagatgg

SEQ ID NO: 4422 - RNA, 11 nt, synthetic construct
  misc_feature 1..11: note = Description of Artificial Sequence: Synthetic Antisense oligonucleotide
  modified_base 1: mod_base = OTHER; note = 5-methyl
  modified_base 11: mod_base = OTHER; note = bicyclic nucleic acid (BNA)
  source 1..11: mol_type = other RNA
caaggaagatg

SEQ ID NO: 4423 - DNA, 10 bp, synthetic construct
  misc_feature 1..10: note = Description of Artificial Sequence: Synthetic Antisense oligonucleotide
  modified_base 1: mod_base = OTHER; note = 5-methyl
  modified_base 10: mod_base = OTHER; note = bicyclic nucleic acid (BNA)
  source 1..10: mol_type = other DNA
caaggaagat

SEQ ID NO: 4424-4425 - skipped (2 entries)

SEQ ID NO: 4426 - RNA, 20 nt, synthetic construct
  misc_feature 1..20: note = Description of Artificial Sequence: Synthetic Antisense oligonucleotide
  modified_base 12: mod_base = OTHER; note = 5-methyl
  modified_base 17: mod_base = OTHER; note = 5-methyl
  modified_base 20: mod_base = OTHER; note = bicyclic nucleic acid (BNA)
  source 1..20: mol_type = other RNA
aaggaagatggcatttctag

SEQ ID NO: 4427 - RNA, 19 nt, synthetic construct
  misc_feature 1..19: note = Description of Artificial Sequence: Synthetic Antisense oligonucleotide
  modified_base 12: mod_base = OTHER; note = 5-methyl
  modified_base 17: mod_base = OTHER; note = 5-methyl
  modified_base 19: mod_base = OTHER; note = bicyclic nucleic acid (BNA)
  source 1..19: mol_type = other RNA
aaggaagatggcatttcta

SEQ ID NO: 4428 - DNA, 18 bp, synthetic construct
  misc_feature 1..18: note = Description of Artificial Sequence: Synthetic Antisense oligonucleotide
  misc_feature 1..18: note = Original Sequence: aaggaagauggcauuuct
  modified_base 12: mod_base = OTHER; note = 5-methyl
  modified_base 17: mod_base = OTHER; note = 5-methyl
  modified_base 18: mod_base = OTHER; note = bicyclic nucleic acid (BNA)
  source 1..18: mol_type = other DNA
  modified_base 9: mod_base = OTHER; note = Uracil
  modified_base 14: mod_base = OTHER; note = Uracil
  modified_base 15: mod_base = OTHER; note = Uracil
  modified_base 16: mod_base = OTHER; note = Uracil
aaggaagatggcatttct

SEQ ID NO: 4429 - RNA, 17 nt, synthetic construct
  misc_feature 1..17: note = Description of Artificial Sequence: Synthetic Antisense oligonucleotide
  modified_base 12: mod_base = OTHER; note = 5-methyl
  modified_base 17: mod_base = OTHER; note = 5-methyl
  modified_base 17: mod_base = OTHER; note = bicyclic nucleic acid (BNA)
  source 1..17: mol_type = other RNA
aaggaagatggcatttc

SEQ ID NO: 4430 - DNA, 16 bp, synthetic construct
  misc_feature 1..16: note = Description of Artificial Sequence: Synthetic Antisense oligonucleotide
  misc_feature 1..16: note = Original Sequence: aaggaagauggcauut
  modified_base 12: mod_base = OTHER; note = 5-methyl
  modified_base 16: mod_base = OTHER; note = bicyclic nucleic acid (BNA)
  source 1..16: mol_type = other DNA
  modified_base 9: mod_base = OTHER; note = Uracil
  modified_base 14: mod_base = OTHER; note = Uracil
  modified_base 15: mod_base = OTHER; note = Uracil
aaggaagatggcattt

SEQ ID NO: 4431 - DNA, 15 bp, synthetic construct
  misc_feature 1..15: note = Description of Artificial Sequence: Synthetic Antisense oligonucleotide
  misc_feature 1..15: note = Original Sequence: aaggaagauggcaut
  modified_base 12: mod_base = OTHER; note = 5-methyl
  modified_base 15: mod_base = OTHER; note = bicyclic nucleic acid (BNA)
  source 1..15: mol_type = other DNA
  modified_base 9: mod_base = OTHER; note = Uracil
  modified_base 14: mod_base = OTHER; note = Uracil
aaggaagatggcatt

SEQ ID NO: 4432 - DNA, 14 bp, synthetic construct
  misc_feature 1..14: note = Description of Artificial Sequence: Synthetic Antisense oligonucleotide
  misc_feature 1..14: note = Original Sequence: aaggaagauggcat
  modified_base 12: mod_base = OTHER; note = 5-methyl
  modified_base 14: mod_base = OTHER; note = bicyclic nucleic acid (BNA)
  source 1..14: mol_type = other DNA
  modified_base 9: mod_base = OTHER; note = Uracil
aaggaagatggcat

SEQ ID NO: 4433 - RNA, 13 nt, synthetic construct
  misc_feature 1..13: note = Description of Artificial Sequence: Synthetic Antisense oligonucleotide
  modified_base 12: mod_base = OTHER; note = 5-methyl
  modified_base 13: mod_base = OTHER; note = bicyclic nucleic acid (BNA)
  source 1..13: mol_type = other RNA
aaggaagatggca

SEQ ID NO: 4434 - RNA, 12 nt, synthetic construct
  misc_feature 1..12: note = Description of Artificial Sequence: Synthetic Antisense oligonucleotide
  modified_base 12: mod_base = OTHER; note = 5-methyl
  modified_base 12: mod_base = OTHER; note = bicyclic nucleic acid (BNA)
  source 1..12: mol_type = other RNA
aaggaagatggc

SEQ ID NO: 4435 - RNA, 19 nt, synthetic construct
  misc_feature 1..19: note = Description of Artificial Sequence: Synthetic Antisense oligonucleotide
  modified_base 11: mod_base = OTHER; note = 5-methyl
  modified_base 16: mod_base = OTHER; note = 5-methyl
  modified_base 19: mod_base = OTHER; note = bicyclic nucleic acid (BNA)
  source 1..19: mol_type = other RNA
aggaagatggcatttctag

SEQ ID NO: 4436 - RNA, 18 nt, synthetic construct
  misc_feature 1..18: note = Description of Artificial Sequence: Synthetic Antisense oligonucleotide
  modified_base 11: mod_base = OTHER; note = 5-methyl
  modified_base 16: mod_base = OTHER; note = 5-methyl
  modified_base 18: mod_base = OTHER; note = bicyclic nucleic acid (BNA)
  source 1..18: mol_type = other RNA
aggaagatggcatttcta

SEQ ID NO: 4437 - DNA, 17 bp, synthetic construct
  misc_feature 1..17: note = Description of Artificial Sequence: Synthetic Antisense oligonucleotide
  misc_feature 1..17: note = Original Sequence: aggaagauggcauuuct
  modified_base 11: mod_base = OTHER; note = 5-methyl
  modified_base 16: mod_base = OTHER; note = 5-methyl
  modified_base 17: mod_base = OTHER; note = bicyclic nucleic acid (BNA)
  source 1..17: mol_type = other DNA
  modified_base 8: mod_base = OTHER; note = Uracil
  modified_base 13: mod_base = OTHER; note = Uracil
  modified_base 14: mod_base = OTHER; note = Uracil
  modified_base 15: mod_base = OTHER; note = Uracil
aggaagatggcatttct

SEQ ID NO: 4438 - RNA, 16 nt, synthetic construct
  misc_feature 1..16: note = Description of Artificial Sequence: Synthetic Antisense oligonucleotide
  modified_base 11: mod_base = OTHER; note = 5-methyl
  modified_base 16: mod_base = OTHER; note = 5-methyl
  modified_base 16: mod_base = OTHER; note = bicyclic nucleic acid (BNA)
  source 1..16: mol_type = other RNA
aggaagatggcatttc

SEQ ID NO: 4439 - DNA, 15 bp, synthetic construct
  misc_feature 1..15: note = Description of Artificial Sequence: Synthetic Antisense oligonucleotide
  misc_feature 1..15: note = Original Sequence: aggaagauggcauut
  modified_base 11: mod_base = OTHER; note = 5-methyl
  modified_base 15: mod_base = OTHER; note = bicyclic nucleic acid (BNA)
  source 1..15: mol_type = other DNA
  modified_base 8: mod_base = OTHER; note = Uracil
  modified_base 13: mod_base = OTHER; note = Uracil
  modified_base 14: mod_base = OTHER; note = Uracil
aggaagatggcattt

SEQ ID NO: 4440 - DNA, 14 bp, synthetic construct
  misc_feature 1..14: note = Description of Artificial Sequence: Synthetic Antisense oligonucleotide
  misc_feature 1..14: note = Original Sequence: aggaagauggcaut
  modified_base 11: mod_base = OTHER; note = 5-methyl
  modified_base 14: mod_base = OTHER; note = bicyclic nucleic acid (BNA)
  source 1..14: mol_type = other DNA
  modified_base 8: mod_base = OTHER; note = Uracil
  modified_base 13: mod_base = OTHER; note = Uracil
aggaagatggcatt

SEQ ID NO: 4441 - DNA, 13 bp, synthetic construct
  misc_feature 1..13: note = Description of Artificial Sequence: Synthetic Antisense oligonucleotide
  misc_feature 1..13: note = Original Sequence: aggaagauggcat
  modified_base 11: mod_base = OTHER; note = 5-methyl
  modified_base 13: mod_base = OTHER; note = bicyclic nucleic acid (BNA)
  source 1..13: mol_type = other DNA
  modified_base 8: mod_base = OTHER; note = Uracil
aggaagatggcat

SEQ ID NO: 4442 - RNA, 12 nt, synthetic construct
  misc_feature 1..12: note = Description of Artificial Sequence: Synthetic Antisense oligonucleotide
  modified_base 11: mod_base = OTHER; note = 5-methyl
  modified_base 12: mod_base = OTHER; note = bicyclic nucleic acid (BNA)
  source 1..12: mol_type = other RNA
aggaagatggca

SEQ ID NO: 4443 - RNA, 18 nt, synthetic construct
  misc_feature 1..18: note = Description of Artificial Sequence: Synthetic Antisense oligonucleotide
  modified_base 10: mod_base = OTHER; note = 5-methyl
  modified_base 15: mod_base = OTHER; note = 5-methyl
  modified_base 18: mod_base = OTHER; note = bicyclic nucleic acid (BNA)
  source 1..18: mol_type = other RNA
ggaagatggcatttctag

SEQ ID NO: 4444 - RNA, 17 nt, synthetic construct
  misc_feature 1..17: note = Description of Artificial Sequence: Synthetic Antisense oligonucleotide
  modified_base 10: mod_base = OTHER; note = 5-methyl
  modified_base 15: mod_base = OTHER; note = 5-methyl
  modified_base 17: mod_base = OTHER; note = bicyclic nucleic acid (BNA)
  source 1..17: mol_type = other RNA
ggaagatggcatttcta

SEQ ID NO: 4445 - DNA, 16 bp, synthetic construct
  misc_feature 1..16: note = Description of Artificial Sequence: Synthetic Antisense oligonucleotide
  misc_feature 1..16: note = Original Sequence: ggaagauggcauuuct
  modified_base 10: mod_base = OTHER; note = 5-methyl
  modified_base 15: mod_base = OTHER; note = 5-methyl
  modified_base 16: mod_base = OTHER; note = bicyclic nucleic acid (BNA)
  source 1..16: mol_type = other DNA
  modified_base 7: mod_base = OTHER; note = Uracil
  modified_base 12: mod_base = OTHER; note = Uracil
  modified_base 13: mod_base = OTHER; note = Uracil
  modified_base 14: mod_base = OTHER; note = Uracil
ggaagatggcatttct

SEQ ID NO: 4446 - RNA, 15 nt, synthetic construct
  misc_feature 1..15: note = Description of Artificial Sequence: Synthetic Antisense oligonucleotide
  modified_base 10: mod_base = OTHER; note = 5-methyl
  modified_base 15: mod_base = OTHER; note = 5-methyl
  modified_base 15: mod_base = OTHER; note = bicyclic nucleic acid (BNA)
  source 1..15: mol_type = other RNA
ggaagatggcatttc

SEQ ID NO: 4447 - DNA, 14 bp, synthetic construct
  misc_feature 1..14: note = Description of Artificial Sequence: Synthetic Antisense oligonucleotide
  misc_feature 1..14: note = Original Sequence: ggaagauggcauut
  modified_base 10: mod_base = OTHER; note = 5-methyl
  modified_base 14: mod_base = OTHER; note = bicyclic nucleic acid (BNA)
  source 1..14: mol_type = other DNA
  modified_base 7: mod_base = OTHER; note = Uracil
  modified_base 12: mod_base = OTHER; note = Uracil
  modified_base 13: mod_base = OTHER; note = Uracil
ggaagatggcattt

SEQ ID NO: 4448 - DNA, 13 bp, synthetic construct
  misc_feature 1..13: note = Description of Artificial Sequence: Synthetic Antisense oligonucleotide
  misc_feature 1..13: note = Original Sequence: ggaagauggcaut
  modified_base 10: mod_base = OTHER; note = 5-methyl
  modified_base 13: mod_base = OTHER; note = bicyclic nucleic acid (BNA)
  source 1..13: mol_type = other DNA
  modified_base 7: mod_base = OTHER; note = Uracil
  modified_base 12: mod_base = OTHER; note = Uracil
ggaagatggcatt

SEQ ID NO: 4449 - DNA, 12 bp, synthetic construct
  misc_feature 1..12: note = Description of Artificial Sequence: Synthetic Antisense oligonucleotide
  misc_feature 1..12: note = Original Sequence: ggaagauggcat
  modified_base 10: mod_base = OTHER; note = 5-methyl
  modified_base 12: mod_base = OTHER; note = bicyclic nucleic acid (BNA)
  source 1..12: mol_type = other DNA
  modified_base 7: mod_base = OTHER; note = Uracil
ggaagatggcat

SEQ ID NO: 4450 - RNA, 11 nt, synthetic construct
  misc_feature 1..11: note = Description of Artificial Sequence: Synthetic Antisense oligonucleotide
  modified_base 10: mod_base = OTHER; note = 5-methyl
  modified_base 11: mod_base = OTHER; note = bicyclic nucleic acid (BNA)
  source 1..11: mol_type = other RNA
ggaagatggca

SEQ ID NO: 4451 - RNA, 10 nt, synthetic construct
  misc_feature 1..10: note = Description of Artificial Sequence: Synthetic Antisense oligonucleotide
  modified_base 10: mod_base = OTHER; note = 5-methyl
  modified_base 10: mod_base = OTHER; note = bicyclic nucleic acid (BNA)
  source 1..10: mol_type = other RNA
ggaagatggc

SEQ ID NO: 4452 - RNA, 17 nt, synthetic construct
  misc_feature 1..17: note = Description of Artificial Sequence: Synthetic Antisense oligonucleotide
  modified_base 9: mod_base = OTHER; note = 5-methyl
  modified_base 14: mod_base = OTHER; note = 5-methyl
  modified_base 17: mod_base = OTHER; note = bicyclic nucleic acid (BNA)
  source 1..17: mol_type = other RNA
gaagatggcatttctag

SEQ ID NO: 4453 - RNA, 16 nt, synthetic construct
  misc_feature 1..16: note = Description of Artificial Sequence: Synthetic Antisense oligonucleotide
  modified_base 9: mod_base = OTHER; note = 5-methyl
  modified_base 14: mod_base = OTHER; note = 5-methyl
  modified_base 16: mod_base = OTHER; note = bicyclic nucleic acid (BNA)
  source 1..16: mol_type = other RNA
gaagatggcatttcta

SEQ ID NO: 4454 - RNA, 14 nt, synthetic construct
  misc_feature 1..14: note = Description of Artificial Sequence: Synthetic Antisense oligonucleotide
  modified_base 9: mod_base = OTHER; note = 5-methyl
  modified_base 14: mod_base = OTHER; note = 5-methyl
  modified_base 14: mod_base = OTHER; note = bicyclic nucleic acid (BNA)
  source 1..14: mol_type = other RNA
gaagatggcatttc

SEQ ID NO: 4455 - DNA, 13 bp, synthetic construct
  misc_feature 1..13: note = Description of Artificial Sequence: Synthetic Antisense oligonucleotide
  misc_feature 1..13: note = Original Sequence: gaagauggcauut
  modified_base 9: mod_base = OTHER; note = 5-methyl
  modified_base 13: mod_base = OTHER; note = bicyclic nucleic acid (BNA)
  source 1..13: mol_type = other DNA
  modified_base 6: mod_base = OTHER; note = Uracil
  modified_base 11: mod_base = OTHER; note = Uracil
  modified_base 12: mod_base = OTHER; note = Uracil
gaagatggcattt

SEQ ID NO: 4456 - DNA, 12 bp, synthetic construct
  misc_feature 1..12: note = Description of Artificial Sequence: Synthetic Antisense oligonucleotide
  misc_feature 1..12: note = Original Sequence: gaagauggcaut
  modified_base 9: mod_base = OTHER; note = 5-methyl
  modified_base 12: mod_base = OTHER; note = bicyclic nucleic acid (BNA)
  source 1..12: mol_type = other DNA
  modified_base 6: mod_base = OTHER; note = Uracil
  modified_base 11: mod_base = OTHER; note = Uracil
gaagatggcatt

SEQ ID NO: 4457 - DNA, 11 bp, synthetic construct
  misc_feature 1..11: note = Description of Artificial Sequence: Synthetic Antisense oligonucleotide
  misc_feature 1..11: note = Original Sequence: gaagauggcat
  modified_base 9: mod_base = OTHER; note = 5-methyl
  modified_base 11: mod_base = OTHER; note = bicyclic nucleic acid (BNA)
  source 1..11: mol_type = other DNA
  modified_base 6: mod_base = OTHER; note = Uracil
gaagatggcat

SEQ ID NO: 4458 - RNA, 10 nt, synthetic construct
  misc_feature 1..10: note = Description of Artificial Sequence: Synthetic Antisense oligonucleotide
  modified_base 9: mod_base = OTHER; note = 5-methyl
  modified_base 10: mod_base = OTHER; note = bicyclic nucleic acid (BNA)
  source 1..10: mol_type = other RNA
gaagatggca

SEQ ID NO: 4459 - skipped

SEQ ID NO: 4460 - RNA, 16 nt, synthetic construct
  misc_feature 1..16: note = Description of Artificial Sequence: Synthetic Antisense oligonucleotide
  modified_base 8: mod_base = OTHER; note = 5-methyl
  modified_base 13: mod_base = OTHER; note = 5-methyl
  modified_base 16: mod_base = OTHER; note = bicyclic nucleic acid (BNA)
  source 1..16: mol_type = other RNA
aagatggcatttctag

SEQ ID NO: 4461 - RNA, 15 nt, synthetic construct
  misc_feature 1..15: note = Description of Artificial Sequence: Synthetic Antisense oligonucleotide
  modified_base 8: mod_base = OTHER; note = 5-methyl
  modified_base 13: mod_base = OTHER; note = 5-methyl
  modified_base 15: mod_base = OTHER; note = bicyclic nucleic acid (BNA)
  source 1..15: mol_type = other RNA
aagatggcatttcta

SEQ ID NO: 4462 - DNA, 14 bp, synthetic construct
  misc_feature 1..14: note = Description of Artificial Sequence: Synthetic Antisense oligonucleotide
  misc_feature 1..14: note = Original Sequence: aagauggcauuuct
  modified_base 8: mod_base = OTHER; note = 5-methyl
  modified_base 13: mod_base = OTHER; note = 5-methyl
  modified_base 14: mod_base = OTHER; note = bicyclic nucleic acid (BNA)
  source 1..14: mol_type = other DNA
  modified_base 5: mod_base = OTHER; note = Uracil
  modified_base 10: mod_base = OTHER; note = Uracil
  modified_base 11: mod_base = OTHER; note = Uracil
  modified_base 12: mod_base = OTHER; note = Uracil
aagatggcatttct

SEQ ID NO: 4463 - RNA, 13 nt, synthetic construct
  misc_feature 1..13: note = Description of Artificial Sequence: Synthetic Antisense oligonucleotide
  modified_base 8: mod_base = OTHER; note = 5-methyl
  modified_base 13: mod_base = OTHER; note = 5-methyl
  modified_base 13: mod_base = OTHER; note = bicyclic nucleic acid (BNA)
  source 1..13: mol_type = other RNA
aagatggcatttc

SEQ ID NO: 4464 - DNA, 12 bp, synthetic construct
  misc_feature 1..12: note = Description of Artificial Sequence: Synthetic Antisense oligonucleotide
  misc_feature 1..12: note = Original Sequence: aagauggcauut
  modified_base 8: mod_base = OTHER; note = 5-methyl
  modified_base 12: mod_base = OTHER; note = bicyclic nucleic acid (BNA)
  source 1..12: mol_type = other DNA
  modified_base 5: mod_base = OTHER; note = Uracil
  modified_base 10: mod_base = OTHER; note = Uracil
  modified_base 11: mod_base = OTHER; note = Uracil
aagatggcattt

SEQ ID NO: 4465 - DNA, 11 bp, synthetic construct
  misc_feature 1..11: note = Description of Artificial Sequence: Synthetic Antisense oligonucleotide
  misc_feature 1..11: note = Original Sequence: aagauggcaut
  modified_base 8: mod_base = OTHER; note = 5-methyl
  modified_base 11: mod_base = OTHER; note = bicyclic nucleic acid (BNA)
  source 1..11: mol_type = other DNA
  modified_base 5: mod_base = OTHER; note = Uracil
  modified_base 10: mod_base = OTHER; note = Uracil
aagatggcatt

SEQ ID NO: 4466 - DNA, 10 bp, synthetic construct
  misc_feature 1..10: note = Description of Artificial Sequence: Synthetic Antisense oligonucleotide
  misc_feature 1..10: note = Original Sequence: aagauggcat
  modified_base 8: mod_base = OTHER; note = 5-methyl
  modified_base 10: mod_base = OTHER; note = bicyclic nucleic acid (BNA)
  source 1..10: mol_type = other DNA
  modified_base 5: mod_base = OTHER; note = Uracil
aagatggcat

SEQ ID NO: 4467-4468 - skipped (2 entries)

SEQ ID NO: 4469 - RNA, 15 nt, synthetic construct
  misc_feature 1..15: note = Description of Artificial Sequence: Synthetic Antisense oligonucleotide
  modified_base 7: mod_base = OTHER; note = 5-methyl
  modified_base 12: mod_base = OTHER; note = 5-methyl
  modified_base 15: mod_base = OTHER; note = bicyclic nucleic acid (BNA)
  source 1..15: mol_type = other RNA
agatggcatttctag

SEQ ID NO: 4470 - RNA, 14 nt, synthetic construct
  misc_feature 1..14: note = Description of Artificial Sequence: Synthetic Antisense oligonucleotide
  modified_base 7: mod_base = OTHER; note = 5-methyl
  modified_base 12: mod_base = OTHER; note = 5-methyl
  modified_base 14: mod_base = OTHER; note = bicyclic nucleic acid (BNA)
  source 1..14: mol_type = other RNA
agatggcatttcta

SEQ ID NO: 4471 - DNA, 13 bp, synthetic construct
  misc_feature 1..13: note = Description of Artificial Sequence: Synthetic Antisense oligonucleotide
  misc_feature 1..13: note = Original Sequence: agauggcauuuct
  modified_base 7: mod_base = OTHER; note = 5-methyl
  modified_base 12: mod_base = OTHER; note = 5-methyl
  modified_base 13: mod_base = OTHER; note = bicyclic nucleic acid (BNA)
  source 1..13: mol_type = other DNA
  modified_base 4: mod_base = OTHER; note = Uracil
  modified_base 9: mod_base = OTHER; note = Uracil
  modified_base 10: mod_base = OTHER; note = Uracil
  modified_base 11: mod_base = OTHER; note = Uracil
agatggcatttct

SEQ ID NO: 4472 - RNA, 12 nt, synthetic construct
  misc_feature 1..12: note = Description of Artificial Sequence: Synthetic Antisense oligonucleotide
  modified_base 7: mod_base = OTHER; note = 5-methyl
  modified_base 12: mod_base = OTHER; note = 5-methyl
  modified_base 12: mod_base = OTHER; note = bicyclic nucleic acid (BNA)
  source 1..12: mol_type = other RNA
agatggcatttc

SEQ ID NO: 4473 - DNA, 11 bp, synthetic construct
  misc_feature 1..11: note = Description of Artificial Sequence: Synthetic Antisense oligonucleotide
  misc_feature 1..11: note = Original Sequence: agauggcauut
  modified_base 7: mod_base = OTHER; note = 5-methyl
  modified_base 11: mod_base = OTHER; note = bicyclic nucleic acid (BNA)
  source 1..11: mol_type = other DNA
  modified_base 4: mod_base = OTHER; note = Uracil
  modified_base 9: mod_base = OTHER; note = Uracil
  modified_base 10: mod_base = OTHER; note = Uracil
agatggcattt

SEQ ID NO: 4474 - DNA, 10 bp, synthetic construct
  misc_feature 1..10: note = Description of Artificial Sequence: Synthetic Antisense oligonucleotide
  misc_feature 1..10: note = Original Sequence: agauggcaut
  modified_base 7: mod_base = OTHER; note = 5-methyl
  modified_base 10: mod_base = OTHER; note = bicyclic nucleic acid (BNA)
  source 1..10: mol_type = other DNA
  modified_base 4: mod_base = OTHER; note = Uracil
  modified_base 9: mod_base = OTHER; note = Uracil
agatggcatt

SEQ ID NO: 4475-4476 - skipped (2 entries)

SEQ ID NO: 4477 - RNA, 30 nt, synthetic construct; identical to SEQ ID NO: 287
  misc_feature 1..30: note = Description of Artificial Sequence: Synthetic Antisense oligonucleotide
  modified_base 1: mod_base = OTHER; note = 5-methyl
  modified_base 3..4: mod_base = OTHER; note = 5-methyl
  modified_base 7: mod_base = OTHER; note = 5-methyl
  modified_base 10: mod_base = OTHER; note = 5-methyl
  modified_base 22: mod_base = OTHER; note = 5-methyl
  modified_base 27: mod_base = OTHER; note = 5-methyl
  modified_base 30: mod_base = OTHER; note = bicyclic nucleic acid (BNA)
  source 1..30: mol_type = other RNA

SEQ ID NO: 4478 - RNA, 29 nt, synthetic construct
  misc_feature 1..29: note = Description of Artificial Sequence: Synthetic Antisense oligonucleotide
  modified_base 1: mod_base = OTHER; note = 5-methyl
  modified_base 3..4: mod_base = OTHER; note = 5-methyl
  modified_base 7: mod_base = OTHER; note = 5-methyl
  modified_base 10: mod_base = OTHER; note = 5-methyl
  modified_base 22: mod_base = OTHER; note = 5-methyl
  modified_base 27: mod_base = OTHER; note = 5-methyl
  modified_base 29: mod_base = OTHER; note = bicyclic nucleic acid (BNA)
  source 1..29: mol_type = other RNA
ctccaacatcaaggaagatggcatttcta

SEQ ID NO: 4479 - DNA, 28 bp, synthetic construct
  misc_feature 1..28: note = Description of Artificial Sequence: Synthetic Antisense oligonucleotide
  misc_feature 1..28: note = Original Sequence: cuccaacaucaaggaagauggcauuuct
  modified_base 1: mod_base = OTHER; note = 5-methyl
  modified_base 3..4: mod_base = OTHER; note = 5-methyl
  modified_base 7: mod_base = OTHER; note = 5-methyl
  modified_base 10: mod_base = OTHER; note = 5-methyl
  modified_base 22: mod_base = OTHER; note = 5-methyl
  modified_base 27: mod_base = OTHER; note = 5-methyl
  modified_base 28: mod_base = OTHER; note = bicyclic nucleic acid (BNA)
  source 1..28: mol_type = other DNA
  modified_base 2: mod_base = OTHER; note = Uracil
  modified_base 9: mod_base = OTHER; note = Uracil
  modified_base 19: mod_base = OTHER; note = Uracil
  modified_base 24: mod_base = OTHER; note = Uracil
  modified_base 25: mod_base = OTHER; note = Uracil
  modified_base 26: mod_base = OTHER; note = Uracil
ctccaacatcaaggaagatggcatttct

SEQ ID NO: 4480 - RNA, 27 nt, synthetic construct
  misc_feature 1..27: note = Description of Artificial Sequence: Synthetic Antisense oligonucleotide
  modified_base 1: mod_base = OTHER; note = 5-methyl
  modified_base 3..4: mod_base = OTHER; note = 5-methyl
  modified_base 7: mod_base = OTHER; note = 5-methyl
  modified_base 10: mod_base = OTHER; note = 5-methyl
  modified_base 22: mod_base = OTHER; note = 5-methyl
  modified_base 27: mod_base = OTHER; note = 5-methyl
  modified_base 27: mod_base = OTHER; note = bicyclic nucleic acid (BNA)
  source 1..27: mol_type = other RNA
ctccaacatcaaggaagatggcatttc

SEQ ID NO: 4481 - DNA, 26 bp, synthetic construct
  misc_feature 1..26: note = Description of Artificial Sequence: Synthetic Antisense oligonucleotide
  misc_feature 1..26: note = Original Sequence: cuccaacaucaaggaagauggcauut
  modified_base 1: mod_base = OTHER; note = 5-methyl
  modified_base 3..4: mod_base = OTHER; note = 5-methyl
  modified_base 7: mod_base = OTHER; note = 5-methyl
  modified_base 10: mod_base = OTHER; note = 5-methyl
  modified_base 22: mod_base = OTHER; note = 5-methyl
  modified_base 26: mod_base = OTHER; note = bicyclic nucleic acid (BNA)
  source 1..26: mol_type = other DNA
  modified_base 2: mod_base = OTHER; note = Uracil
  modified_base 9: mod_base = OTHER; note = Uracil
  modified_base 19: mod_base = OTHER; note = Uracil
  modified_base 24: mod_base = OTHER; note = Uracil
  modified_base 25: mod_base = OTHER; note = Uracil
ctccaacatcaaggaagatggcattt

SEQ ID NO: 4482 - DNA, 25 bp, synthetic construct
  misc_feature 1..25: note = Description of Artificial Sequence: Synthetic Antisense oligonucleotide
  misc_feature 1..25: note = Original Sequence: cuccaacaucaaggaagauggcaut
  modified_base 1: mod_base = OTHER; note = 5-methyl
  modified_base 3..4: mod_base = OTHER; note = 5-methyl
  modified_base 7: mod_base = OTHER; note = 5-methyl
  modified_base 10: mod_base = OTHER; note = 5-methyl
  modified_base 22: mod_base = OTHER; note = 5-methyl
  modified_base 25: mod_base = OTHER; note = bicyclic nucleic acid (BNA)
  source 1..25: mol_type = other DNA
  modified_base 2: mod_base = OTHER; note = Uracil
  modified_base 9: mod_base = OTHER; note = Uracil
  modified_base 19: mod_base = OTHER; note = Uracil
  modified_base 24: mod_base = OTHER; note = Uracil
ctccaacatcaaggaagatggcatt

SEQ ID NO: 4483 - DNA, 24 bp, synthetic construct
  misc_feature 1..24: note = Description of Artificial Sequence: Synthetic Antisense oligonucleotide
  misc_feature 1..24: note = Original Sequence: cuccaacaucaaggaagauggcat
  modified_base 1: mod_base = OTHER; note = 5-methyl
  modified_base 3..4: mod_base = OTHER; note = 5-methyl
  modified_base 7: mod_base = OTHER; note = 5-methyl
  modified_base 10: mod_base = OTHER; note = 5-methyl
  modified_base 22: mod_base = OTHER; note = 5-methyl
  modified_base 24: mod_base = OTHER; note = bicyclic nucleic acid (BNA)
  source 1..24: mol_type = other DNA
  modified_base 2: mod_base = OTHER; note = Uracil
  modified_base 9: mod_base = OTHER; note = Uracil
  modified_base 19: mod_base = OTHER; note = Uracil
ctccaacatcaaggaagatggcat

SEQ ID NO: 4484 - RNA, 23 nt, synthetic construct
  misc_feature 1..23: note = Description of Artificial Sequence: Synthetic Antisense oligonucleotide
  modified_base 1: mod_base = OTHER; note = 5-methyl
  modified_base 3..4: mod_base = OTHER; note = 5-methyl
  modified_base 7: mod_base = OTHER; note = 5-methyl
  modified_base 10: mod_base = OTHER; note = 5-methyl
  modified_base 22: mod_base = OTHER; note = 5-methyl
  modified_base 23: mod_base = OTHER; note = bicyclic nucleic acid (BNA)
  source 1..23: mol_type = other RNA
ctccaacatcaaggaagatggca

SEQ ID NO: 4485 - RNA, 22 nt, synthetic construct
  misc_feature 1..22: note = Description of Artificial Sequence: Synthetic Antisense oligonucleotide
  modified_base 1: mod_base = OTHER; note = 5-methyl
  modified_base 3..4: mod_base = OTHER; note = 5-methyl
  modified_base 7: mod_base = OTHER; note = 5-methyl
  modified_base 10: mod_base = OTHER; note = 5-methyl
  modified_base 22: mod_base = OTHER; note = 5-methyl
  modified_base 22: mod_base = OTHER; note = bicyclic nucleic acid (BNA)
  source 1..22: mol_type = other RNA
ctccaacatcaaggaagatggc

SEQ ID NO: 4486 - RNA, 21 nt, synthetic construct
  misc_feature 1..21: note = Description of Artificial Sequence: Synthetic Antisense oligonucleotide
  modified_base 1: mod_base = OTHER; note = 5-methyl
  modified_base 3..4: mod_base = OTHER; note = 5-methyl
  modified_base 7: mod_base = OTHER; note = 5-methyl
  modified_base 10: mod_base = OTHER; note = 5-methyl
  modified_base 21: mod_base = OTHER; note = bicyclic nucleic acid (BNA)
  source 1..21: mol_type = other RNA
ctccaacatcaaggaagatgg

SEQ ID NO: 4487 - RNA, 20 nt, synthetic construct
  misc_feature 1..20: note = Description of Artificial Sequence: Synthetic Antisense oligonucleotide
  modified_base 1: mod_base = OTHER; note = 5-methyl
  modified_base 3..4: mod_base = OTHER; note = 5-methyl
  modified_base 7: mod_base = OTHER; note = 5-methyl
  modified_base 10: mod_base = OTHER; note = 5-methyl
  modified_base 20: mod_base = OTHER; note = bicyclic nucleic acid (BNA)
  source 1..20: mol_type = other RNA
ctccaacatcaaggaagatg

SEQ ID NO: 4488 - DNA, 19 bp, synthetic construct
  misc_feature 1..19: note = Description of Artificial Sequence: Synthetic Antisense oligonucleotide
  misc_feature 1..19: note = Original Sequence: cuccaacaucaaggaagat
  modified_base 1: mod_base = OTHER; note = 5-methyl
  modified_base 3..4: mod_base = OTHER; note = 5-methyl
  modified_base 7: mod_base = OTHER; note = 5-methyl
  modified_base 10: mod_base = OTHER; note = 5-methyl
  modified_base 19: mod_base = OTHER; note = bicyclic nucleic acid (BNA)
  source 1..19: mol_type = other DNA
  modified_base 2: mod_base = OTHER; note = Uracil
  modified_base 9: mod_base = OTHER; note = Uracil
ctccaacatcaaggaagat

SEQ ID NO: 4489 - RNA, 18 nt, synthetic construct
  misc_feature 1..18: note = Description of Artificial Sequence: Synthetic Antisense oligonucleotide
  modified_base 1: mod_base = OTHER; note = 5-methyl
  modified_base 3..4: mod_base = OTHER; note = 5-methyl
  modified_base 7: mod_base = OTHER; note = 5-methyl
  modified_base 10: mod_base = OTHER; note = 5-methyl
  modified_base 18: mod_base = OTHER; note = bicyclic nucleic acid (BNA)
  source 1..18: mol_type = other RNA
ctccaacatcaaggaaga

SEQ ID NO: 4490 - RNA, 17 nt, synthetic construct
  misc_feature 1..17: note = Description of Artificial Sequence: Synthetic Antisense oligonucleotide
  modified_base 1: mod_base = OTHER; note = 5-methyl
  modified_base 3..4: mod_base = OTHER; note = 5-methyl
  modified_base 7: mod_base = OTHER; note = 5-methyl
  modified_base 10: mod_base = OTHER; note = 5-methyl
  modified_base 17: mod_base = OTHER; note = bicyclic nucleic acid (BNA)
  source 1..17: mol_type = other RNA
ctccaacatcaaggaag

SEQ ID NO: 4491 - RNA, 29 nt, synthetic construct
  misc_feature 1..29: note = Description of Artificial Sequence: Synthetic Antisense oligonucleotide
  modified_base 2..3: mod_base = OTHER; note = 5-methyl
  modified_base 6: mod_base = OTHER; note = 5-methyl
  modified_base 9: mod_base = OTHER; note = 5-methyl
  modified_base 21: mod_base = OTHER; note = 5-methyl
  modified_base 26: mod_base = OTHER; note = 5-methyl
  modified_base 29: mod_base = OTHER; note = bicyclic nucleic acid (BNA)
  source 1..29: mol_type = other RNA
tccaacatcaaggaagatggcatttctag

SEQ ID NO: 4492 - RNA, 28 nt, synthetic construct
  misc_feature 1..28: note = Description of Artificial Sequence: Synthetic Antisense oligonucleotide
  modified_base 2..3: mod_base = OTHER; note = 5-methyl
  modified_base 6: mod_base = OTHER; note = 5-methyl
  modified_base 9: mod_base = OTHER; note = 5-methyl
  modified_base 21: mod_base = OTHER; note = 5-methyl
  modified_base 26: mod_base = OTHER; note = 5-methyl
  modified_base 28: mod_base = OTHER; note = bicyclic nucleic acid (BNA)
  source 1..28: mol_type = other RNA
tccaacatcaaggaagatggcatttcta

SEQ ID NO: 4493 - DNA, 27 bp, synthetic construct
  misc_feature 1..27: note = Description of Artificial Sequence: Synthetic Antisense oligonucleotide
  misc_feature 1..27: note = Original Sequence: uccaacaucaaggaagauggcauuuct
  modified_base 2..3: mod_base = OTHER; note = 5-methyl
  modified_base 6: mod_base = OTHER; note = 5-methyl
  modified_base 9: mod_base = OTHER; note = 5-methyl
  modified_base 21: mod_base = OTHER; note = 5-methyl
  modified_base 26: mod_base = OTHER; note = 5-methyl
  modified_base 27: mod_base = OTHER; note = bicyclic nucleic acid (BNA)
  source 1..27: mol_type = other DNA
  modified_base 1: mod_base = OTHER; note = Uracil
  modified_base 8: mod_base = OTHER; note = Uracil
  modified_base 18: mod_base = OTHER; note = Uracil
  modified_base 23: mod_base = OTHER; note = Uracil
  modified_base 24: mod_base = OTHER; note = Uracil
  modified_base 25: mod_base = OTHER; note = Uracil
tccaacatcaaggaagatggcatttct

SEQ ID NO: 4494 - RNA, 26 nt, synthetic construct
  misc_feature 1..26: note = Description of Artificial Sequence: Synthetic Antisense oligonucleotide
  modified_base 2..3: mod_base = OTHER; note = 5-methyl
  modified_base 6: mod_base = OTHER; note = 5-methyl
  modified_base 9: mod_base = OTHER; note = 5-methyl
  modified_base 21: mod_base = OTHER; note = 5-methyl
  modified_base 26: mod_base = OTHER; note = 5-methyl
  modified_base 26: mod_base = OTHER; note = bicyclic nucleic acid (BNA)
  source 1..26: mol_type = other RNA
tccaacatcaaggaagatggcatttc

SEQ ID NO: 4495 - DNA, 25 bp, synthetic construct
  misc_feature 1..25: note = Description of Artificial Sequence: Synthetic Antisense oligonucleotide
  misc_feature 1..25: note = Original Sequence: uccaacaucaaggaagauggcauut
  modified_base 2..3: mod_base = OTHER; note = 5-methyl
  modified_base 6: mod_base = OTHER; note = 5-methyl
  modified_base 9: mod_base = OTHER; note = 5-methyl
  modified_base 21: mod_base = OTHER; note = 5-methyl
  modified_base 25: mod_base = OTHER; note = bicyclic nucleic acid (BNA)
  source 1..25: mol_type = other DNA
  modified_base 1: mod_base = OTHER; note = Uracil
  modified_base 8: mod_base = OTHER; note = Uracil
  modified_base 18: mod_base = OTHER; note = Uracil
  modified_base 23: mod_base = OTHER; note = Uracil
  modified_base 24: mod_base = OTHER; note = Uracil
tccaacatcaaggaagatggcattt

SEQ ID NO: 4496 - DNA, 24 bp, synthetic construct
  misc_feature 1..24: note = Description of Artificial Sequence: Synthetic Antisense oligonucleotide
  misc_feature 1..24: note = Original Sequence: uccaacaucaaggaagauggcaut
  modified_base 2..3: mod_base = OTHER; note = 5-methyl
  modified_base 6: mod_base = OTHER; note = 5-methyl
  modified_base 9: mod_base = OTHER; note = 5-methyl
  modified_base 21: mod_base = OTHER; note = 5-methyl
  modified_base 24: mod_base = OTHER; note = bicyclic nucleic acid (BNA)
  source 1..24: mol_type = other DNA
  modified_base 1: mod_base = OTHER; note = Uracil
  modified_base 8: mod_base = OTHER; note = Uracil
  modified_base 18: mod_base = OTHER; note = Uracil
  modified_base 23: mod_base = OTHER; note = Uracil
tccaacatcaaggaagatggcatt

SEQ ID NO: 4497 - DNA, 23 bp, synthetic construct
  misc_feature 1..23: note = Description of Artificial Sequence: Synthetic Antisense oligonucleotide
  misc_feature 1..23: note = Original Sequence: uccaacaucaaggaagauggcat
  modified_base 2..3: mod_base = OTHER; note = 5-methyl
  modified_base 6: mod_base = OTHER; note = 5-methyl
  modified_base 9: mod_base = OTHER; note = 5-methyl
  modified_base 21: mod_base = OTHER; note = 5-methyl
  modified_base 23: mod_base = OTHER; note = bicyclic nucleic acid (BNA)
  source 1..23: mol_type = other DNA
  modified_base 1: mod_base = OTHER; note = Uracil
  modified_base 8: mod_base = OTHER; note = Uracil
  modified_base 18: mod_base = OTHER; note = Uracil
tccaacatcaaggaagatggcat

SEQ ID NO: 4498 - RNA, 22 nt, synthetic construct
  misc_feature 1..22: note = Description of Artificial Sequence: Synthetic Antisense oligonucleotide
  modified_base 2..3: mod_base = OTHER; note = 5-methyl
  modified_base 6: mod_base = OTHER; note = 5-methyl
  modified_base 9: mod_base = OTHER; note = 5-methyl
  modified_base 21: mod_base = OTHER; note = 5-methyl
  modified_base 22: mod_base = OTHER; note = bicyclic nucleic acid (BNA)
  source 1..22: mol_type = other RNA
tccaacatcaaggaagatggca

SEQ ID NO: 4499 - RNA, 21 nt, synthetic construct
  misc_feature 1..21: note = Description of Artificial Sequence: Synthetic Antisense oligonucleotide
  modified_base 2..3: mod_base = OTHER; note = 5-methyl
  modified_base 6: mod_base = OTHER; note = 5-methyl
  modified_base 9: mod_base = OTHER; note = 5-methyl
  modified_base 21: mod_base = OTHER; note = 5-methyl
  modified_base 21: mod_base = OTHER; note = bicyclic nucleic acid (BNA)
  source 1..21: mol_type = other RNA
tccaacatcaaggaagatggc

SEQ ID NO: 4500 - RNA, 20 nt, synthetic construct
  misc_feature 1..20: note = Description of Artificial Sequence: Synthetic Antisense oligonucleotide
  modified_base 2..3: mod_base = OTHER; note = 5-methyl
  modified_base 6: mod_base = OTHER; note = 5-methyl
  modified_base 9: mod_base = OTHER; note = 5-methyl
  modified_base 20: mod_base = OTHER; note = bicyclic nucleic acid (BNA)
  source 1..20: mol_type = other RNA
tccaacatcaaggaagatgg

SEQ ID NO: 4501 - RNA, 19 nt, synthetic construct
  misc_feature 1..19: note = Description of Artificial Sequence: Synthetic Antisense oligonucleotide
  modified_base 2..3: mod_base = OTHER; note = 5-methyl
  modified_base 6: mod_base = OTHER; note = 5-methyl
  modified_base 9: mod_base = OTHER; note = 5-methyl
  modified_base 19: mod_base = OTHER; note = bicyclic nucleic acid (BNA)
  source 1..19: mol_type = other RNA
tccaacatcaaggaagatg

SEQ ID NO: 4502 - DNA, 18 bp, synthetic construct
  misc_feature 1..18: note = Description of Artificial Sequence: Synthetic Antisense oligonucleotide
  misc_feature 1..18: note = Original Sequence: uccaacaucaaggaagat
  modified_base 2..3: mod_base = OTHER; note = 5-methyl
  modified_base 6: mod_base = OTHER; note = 5-methyl
  modified_base 9: mod_base = OTHER; note = 5-methyl
  modified_base 18: mod_base = OTHER; note = bicyclic nucleic acid (BNA)
  source 1..18: mol_type = other DNA
  modified_base 1: mod_base = OTHER; note = Uracil
  modified_base 8: mod_base = OTHER; note = Uracil
tccaacatcaaggaagat

SEQ ID NO: 4503 - RNA, 17 nt, synthetic construct
  misc_feature 1..17: note = Description of Artificial Sequence: Synthetic Antisense oligonucleotide
  modified_base 2..3: mod_base = OTHER; note = 5-methyl
  modified_base 6: mod_base = OTHER; note = 5-methyl
  modified_base 9: mod_base = OTHER; note = 5-methyl
  modified_base 17: mod_base = OTHER; note = bicyclic nucleic acid (BNA)
  source 1..17: mol_type = other RNA
tccaacatcaaggaaga

SEQ ID NO: 4504 - RNA, 16 nt, synthetic construct
  misc_feature 1..16: note = Description of Artificial Sequence: Synthetic Antisense oligonucleotide
  modified_base 2..3: mod_base = OTHER; note = 5-methyl
  modified_base 6: mod_base = OTHER; note = 5-methyl
  modified_base 9: mod_base = OTHER; note = 5-methyl
  modified_base 16: mod_base = OTHER; note = bicyclic nucleic acid (BNA)
  source 1..16: mol_type = other RNA
tccaacatcaaggaag

SEQ ID NO: 4505 - RNA, 28 nt, synthetic construct
  misc_feature 1..28: note = Description of Artificial Sequence: Synthetic Antisense oligonucleotide
  modified_base 1..2: mod_base = OTHER; note = 5-methyl
  modified_base 5: mod_base = OTHER; note = 5-methyl
  modified_base 8: mod_base = OTHER; note = 5-methyl
  modified_base 20: mod_base = OTHER; note = 5-methyl
  modified_base 25: mod_base = OTHER; note = 5-methyl
  modified_base 28: mod_base = OTHER; note = bicyclic nucleic acid (BNA)
  source 1..28: mol_type = other RNA
ccaacatcaaggaagatggcatttctag

SEQ ID NO: 4506 - RNA, 27 nt, synthetic construct
  misc_feature 1..27: note = Description of Artificial Sequence: Synthetic Antisense oligonucleotide
  modified_base 1..2: mod_base = OTHER; note = 5-methyl
  modified_base 5: mod_base = OTHER; note = 5-methyl
  modified_base 8: mod_base = OTHER; note = 5-methyl
  modified_base 20: mod_base = OTHER; note = 5-methyl
  modified_base 25: mod_base = OTHER; note = 5-methyl
  modified_base 27: mod_base = OTHER; note = bicyclic nucleic acid (BNA)
  source 1..27: mol_type = other RNA
ccaacatcaaggaagatggcatttcta

SEQ ID NO: 4507 - DNA, 26 bp, synthetic construct
  misc_feature 1..26: note = Description of Artificial Sequence: Synthetic Antisense oligonucleotide
  misc_feature 1..26: note = Original Sequence: ccaacaucaaggaagauggcauuuct
  modified_base 1..2: mod_base = OTHER; note = 5-methyl
  modified_base 5: mod_base = OTHER; note = 5-methyl
  modified_base 8: mod_base = OTHER; note = 5-methyl
  modified_base 20: mod_base = OTHER; note = 5-methyl
  modified_base 25: mod_base = OTHER; note = 5-methyl
  modified_base 26: mod_base = OTHER; note = bicyclic nucleic acid (BNA)
  source 1..26: mol_type = other DNA
  modified_base 7: mod_base = OTHER; note = Uracil
  modified_base 17: mod_base = OTHER; note = Uracil
  modified_base 22: mod_base = OTHER; note = Uracil
  modified_base 23: mod_base = OTHER; note = Uracil
  modified_base 24: mod_base = OTHER; note = Uracil
ccaacatcaaggaagatggcatttct

SEQ ID NO: 4508 - RNA, 25 nt, synthetic construct
  misc_feature 1..25: note = Description of Artificial Sequence: Synthetic Antisense oligonucleotide
  modified_base 1..2: mod_base = OTHER; note = 5-methyl
  modified_base 5: mod_base = OTHER; note = 5-methyl
  modified_base 8: mod_base = OTHER; note = 5-methyl
  modified_base 20: mod_base = OTHER; note = 5-methyl
  modified_base 25: mod_base = OTHER; note = 5-methyl
  modified_base 25: mod_base = OTHER; note = bicyclic nucleic acid (BNA)
  source 1..25: mol_type = other RNA
ccaacatcaaggaagatggcatttc

SEQ ID NO: 4509 - DNA, 24 bp, synthetic construct
  misc_feature 1..24: note = Description of Artificial Sequence: Synthetic Antisense oligonucleotide
  misc_feature 1..24: note = Original Sequence: ccaacaucaaggaagauggcauut
  modified_base 1..2: mod_base = OTHER; note = 5-methyl
  modified_base 5: mod_base = OTHER; note = 5-methyl
  modified_base 8: mod_base = OTHER; note = 5-methyl
  modified_base 20: mod_base = OTHER; note = 5-methyl
  modified_base 24: mod_base = OTHER; note = bicyclic nucleic acid (BNA)
  source 1..24: mol_type = other DNA
  modified_base 7: mod_base = OTHER; note = Uracil
  modified_base 17: mod_base = OTHER; note = Uracil
  modified_base 22: mod_base = OTHER; note = Uracil
  modified_base 23: mod_base = OTHER; note = Uracil
ccaacatcaaggaagatggcattt

SEQ ID NO: 4510 - DNA, 23 bp, synthetic construct
  misc_feature 1..23: note = Description of Artificial Sequence: Synthetic Antisense oligonucleotide
  misc_feature 1..23: note = Original Sequence: ccaacaucaaggaagauggcaut
  modified_base 1..2: mod_base = OTHER; note = 5-methyl
  modified_base 5: mod_base = OTHER; note = 5-methyl
  modified_base 8: mod_base = OTHER; note = 5-methyl
  modified_base 20: mod_base = OTHER; note = 5-methyl
  modified_base 23: mod_base = OTHER; note = bicyclic nucleic acid (BNA)
  source 1..23: mol_type = other DNA
  modified_base 7: mod_base = OTHER; note = Uracil
  modified_base 17: mod_base = OTHER; note = Uracil
  modified_base 22: mod_base = OTHER; note = Uracil
ccaacatcaaggaagatggcatt

SEQ ID NO: 4511 - DNA, 22 bp, synthetic construct
  misc_feature 1..22: note = Description of Artificial Sequence: Synthetic Antisense oligonucleotide
  misc_feature 1..22: note = Original Sequence: ccaacaucaaggaagauggcat
  modified_base 1..2: mod_base = OTHER; note = 5-methyl
  modified_base 5: mod_base = OTHER; note = 5-methyl
  modified_base 8: mod_base = OTHER; note = 5-methyl
  modified_base 20: mod_base = OTHER; note = 5-methyl
  modified_base 22: mod_base = OTHER; note = bicyclic nucleic acid (BNA)
  source 1..22: mol_type = other DNA
  modified_base 7: mod_base = OTHER; note = Uracil
  modified_base 17: mod_base = OTHER; note = Uracil
ccaacatcaaggaagatggcat

SEQ ID NO: 4512 - RNA, 21 nt, synthetic construct
  misc_feature 1..21: note = Description of Artificial Sequence: Synthetic Antisense oligonucleotide
  modified_base 1..2: mod_base = OTHER; note = 5-methyl
  modified_base 5: mod_base = OTHER; note = 5-methyl
  modified_base 8: mod_base = OTHER; note = 5-methyl
  modified_base 20: mod_base = OTHER; note = 5-methyl
  modified_base 21: mod_base = OTHER; note = bicyclic nucleic acid (BNA)
  source 1..21: mol_type = other RNA
ccaacatcaaggaagatggca

SEQ ID NO: 4513 - RNA, 20 nt, synthetic construct
  misc_feature 1..20: note = Description of Artificial Sequence: Synthetic Antisense oligonucleotide
  modified_base 1..2: mod_base = OTHER; note = 5-methyl
  modified_base 5: mod_base = OTHER; note = 5-methyl
  modified_base 8: mod_base = OTHER; note = 5-methyl
  modified_base 20: mod_base = OTHER; note = 5-methyl
  modified_base 20: mod_base = OTHER; note = bicyclic nucleic acid (BNA)
  source 1..20: mol_type = other RNA
ccaacatcaaggaagatggc

SEQ ID NO: 4514 - RNA, 19 nt, synthetic construct
  misc_feature 1..19: note = Description of Artificial Sequence: Synthetic Antisense oligonucleotide
  modified_base 1..2: mod_base = OTHER; note = 5-methyl
  modified_base 5: mod_base = OTHER; note = 5-methyl
  modified_base 8: mod_base = OTHER; note = 5-methyl
  modified_base 19: mod_base = OTHER; note = bicyclic nucleic acid (BNA)
  source 1..19: mol_type = other RNA
ccaacatcaaggaagatgg

SEQ ID NO: 4515 - RNA, 18 nt, synthetic construct
  misc_feature 1..18: note = Description of Artificial Sequence: Synthetic Antisense oligonucleotide
  modified_base 1..2: mod_base = OTHER; note = 5-methyl
  modified_base 5: mod_base = OTHER; note = 5-methyl
  modified_base 8: mod_base = OTHER; note = 5-methyl
  modified_base 18: mod_base = OTHER; note = bicyclic nucleic acid (BNA)
  source 1..18: mol_type = other RNA
ccaacatcaaggaagatg

SEQ ID NO: 4516 - DNA, 17 bp, synthetic construct
  misc_feature 1..17: note = Description of Artificial Sequence: Synthetic Antisense oligonucleotide
  misc_feature 1..17: note = Original Sequence: ccaacaucaaggaagat
  modified_base 1..2: mod_base = OTHER; note = 5-methyl
  modified_base 5: mod_base = OTHER; note = 5-methyl
  modified_base 8: mod_base = OTHER; note = 5-methyl
  modified_base 17: mod_base = OTHER; note = bicyclic nucleic acid (BNA)
  source 1..17: mol_type = other DNA
  modified_base 7: mod_base = OTHER; note = Uracil
ccaacatcaaggaagat

SEQ ID NO: 4517 - RNA, 16 nt, synthetic construct
  misc_feature 1..16: note = Description of Artificial Sequence: Synthetic Antisense oligonucleotide
  modified_base 1..2: mod_base = OTHER; note = 5-methyl
  modified_base 5: mod_base = OTHER; note = 5-methyl
  modified_base 8: mod_base = OTHER; note = 5-methyl
  modified_base 16: mod_base = OTHER; note = bicyclic nucleic acid (BNA)
  source 1..16: mol_type = other RNA
ccaacatcaaggaaga

SEQ ID NO: 4518 - RNA, 15 nt, synthetic construct
  misc_feature 1..15: note = Description of Artificial Sequence: Synthetic Antisense oligonucleotide
  modified_base 1..2: mod_base = OTHER; note = 5-methyl
  modified_base 5: mod_base = OTHER; note = 5-methyl
  modified_base 8: mod_base = OTHER; note = 5-methyl
  modified_base 15: mod_base = OTHER; note = bicyclic nucleic acid (BNA)
  source 1..15: mol_type = other RNA
ccaacatcaaggaag

SEQ ID NO: 4519 - RNA, 27 nt, synthetic construct
  misc_feature 1..27: note = Description of Artificial Sequence: Synthetic Antisense oligonucleotide
  modified_base 1: mod_base = OTHER; note = 5-methyl
  modified_base 4: mod_base = OTHER; note = 5-methyl
  modified_base 7: mod_base = OTHER; note = 5-methyl
  modified_base 19: mod_base = OTHER; note = 5-methyl
  modified_base 24: mod_base = OTHER; note = 5-methyl
  modified_base 27: mod_base = OTHER; note = bicyclic nucleic acid (BNA)
  source 1..27: mol_type = other RNA
caacatcaaggaagatggcatttctag

SEQ ID NO: 4520 - RNA, 26 nt, synthetic construct
  misc_feature 1..26: note = Description of Artificial Sequence: Synthetic Antisense oligonucleotide
  modified_base 1: mod_base = OTHER; note = 5-methyl
  modified_base 4: mod_base = OTHER; note = 5-methyl
  modified_base 7: mod_base = OTHER; note = 5-methyl
  modified_base 19: mod_base = OTHER; note = 5-methyl
  modified_base 24: mod_base = OTHER; note = 5-methyl
  modified_base 26: mod_base = OTHER; note = bicyclic nucleic acid (BNA)
  source 1..26: mol_type = other RNA
caacatcaaggaagatggcatttcta

SEQ ID NO: 4521 - DNA, 25 bp, synthetic construct
  misc_feature 1..25: note = Description of Artificial Sequence: Synthetic Antisense oligonucleotide
  misc_feature 1..25: note = Original Sequence: caacaucaaggaagauggcauuuct
  modified_base 1: mod_base = OTHER; note = 5-methyl
  modified_base 4: mod_base = OTHER; note = 5-methyl
  modified_base 7: mod_base = OTHER; note = 5-methyl
  modified_base 19: mod_base = OTHER; note = 5-methyl
  modified_base 24: mod_base = OTHER; note = 5-methyl
  modified_base 25: mod_base = OTHER; note = bicyclic nucleic acid (BNA)
  source 1..25: mol_type = other DNA
  modified_base 6: mod_base = OTHER; note = Uracil
  modified_base 16: mod_base = OTHER; note = Uracil
  modified_base 21: mod_base = OTHER; note = Uracil
  modified_base 22: mod_base = OTHER; note = Uracil
  modified_base 23: mod_base = OTHER; note = Uracil
caacatcaaggaagatggcatttct

SEQ ID NO: 4522 - RNA, 24 nt, synthetic construct
  misc_feature 1..24: note = Description of Artificial Sequence: Synthetic Antisense oligonucleotide
  modified_base 1: mod_base = OTHER; note = 5-methyl
  modified_base 4: mod_base = OTHER; note = 5-methyl
  modified_base 7: mod_base = OTHER; note = 5-methyl
  modified_base 19: mod_base = OTHER; note = 5-methyl
  modified_base 24: mod_base = OTHER; note = 5-methyl
  modified_base 24: mod_base = OTHER; note = bicyclic nucleic acid (BNA)
  source 1..24: mol_type = other RNA
caacatcaaggaagatggcatttc

SEQ ID NO: 4523 - DNA, 23 bp, synthetic construct
  misc_feature 1..23: note = Description of Artificial Sequence: Synthetic Antisense oligonucleotide
  misc_feature 1..23: note = Original Sequence: caacaucaaggaagauggcauut
  modified_base 1: mod_base = OTHER; note = 5-methyl
  modified_base 4: mod_base = OTHER; note = 5-methyl
  modified_base 7: mod_base = OTHER; note = 5-methyl
  modified_base 19: mod_base = OTHER; note = 5-methyl
  modified_base 23: mod_base = OTHER; note = bicyclic nucleic acid (BNA)
  source 1..23: mol_type = other DNA
  modified_base 6: mod_base = OTHER; note = Uracil
  modified_base 16: mod_base = OTHER; note = Uracil
  modified_base 21: mod_base = OTHER; note = Uracil
  modified_base 22: mod_base = OTHER; note = Uracil
caacatcaaggaagatggcattt

SEQ ID NO: 4524 - DNA, 22 bp, synthetic construct
  misc_feature 1..22: note = Description of Artificial Sequence: Synthetic Antisense oligonucleotide
  misc_feature 1..22: note = Original Sequence: caacaucaaggaagauggcaut
  modified_base 1: mod_base = OTHER; note = 5-methyl
  modified_base 4: mod_base = OTHER; note = 5-methyl
  modified_base 7: mod_base = OTHER; note = 5-methyl
  modified_base 19: mod_base = OTHER; note = 5-methyl
  modified_base 22: mod_base = OTHER; note = bicyclic nucleic acid (BNA)
  source 1..22: mol_type = other DNA
  modified_base 6: mod_base = OTHER; note = Uracil
  modified_base 16: mod_base = OTHER; note = Uracil
  modified_base 21: mod_base = OTHER; note = Uracil
caacatcaaggaagatggcatt

SEQ ID NO: 4525 - DNA, 21 bp, synthetic construct
  misc_feature 1..21: note = Description of Artificial Sequence: Synthetic Antisense oligonucleotide
  misc_feature 1..21: note = Original Sequence: caacaucaaggaagauggcat
  modified_base 1: mod_base = OTHER; note = 5-methyl
  modified_base 4: mod_base = OTHER; note = 5-methyl
  modified_base 7: mod_base = OTHER; note = 5-methyl
  modified_base 19: mod_base = OTHER; note = 5-methyl
  modified_base 21: mod_base = OTHER; note = bicyclic nucleic acid (BNA)
  source 1..21: mol_type = other DNA
  modified_base 6: mod_base = OTHER; note = Uracil
  modified_base 16: mod_base = OTHER; note = Uracil
caacatcaaggaagatggcat

SEQ ID NO: 4526 - RNA, 20 nt, synthetic construct
  misc_feature 1..20: note = Description of Artificial Sequence: Synthetic Antisense oligonucleotide
  modified_base 1: mod_base = OTHER; note = 5-methyl
  modified_base 4: mod_base = OTHER; note = 5-methyl
  modified_base 7: mod_base = OTHER; note = 5-methyl
  modified_base 19: mod_base = OTHER; note = 5-methyl
  modified_base 20: mod_base = OTHER; note = bicyclic nucleic acid (BNA)
  source 1..20: mol_type = other RNA
caacatcaaggaagatggca

SEQ ID NO: 4527 - RNA, 19 nt, synthetic construct
  misc_feature 1..19: note = Description of Artificial Sequence: Synthetic Antisense oligonucleotide
  modified_base 1: mod_base = OTHER; note = 5-methyl
  modified_base 4: mod_base = OTHER; note = 5-methyl
  modified_base 7: mod_base = OTHER; note = 5-methyl
  modified_base 19: mod_base = OTHER; note = 5-methyl
  modified_base 19: mod_base = OTHER; note = bicyclic nucleic acid (BNA)
  source 1..19: mol_type = other RNA
caacatcaaggaagatggc

SEQ ID NO: 4528 - RNA, 18 nt, synthetic construct
  misc_feature 1..18: note = Description of Artificial Sequence: Synthetic Antisense oligonucleotide
  modified_base 1: mod_base = OTHER; note = 5-methyl
  modified_base 4: mod_base = OTHER; note = 5-methyl
  modified_base 7: mod_base = OTHER; note = 5-methyl
  modified_base 18: mod_base = OTHER; note = bicyclic nucleic acid (BNA)
  source 1..18: mol_type = other RNA
caacatcaaggaagatgg

SEQ ID NO: 4529 - RNA, 17 nt, synthetic construct
  misc_feature 1..17: note = Description of Artificial Sequence: Synthetic Antisense oligonucleotide
  modified_base 1: mod_base = OTHER; note = 5-methyl
  modified_base 4: mod_base = OTHER; note = 5-methyl
  modified_base 7: mod_base = OTHER; note = 5-methyl
  modified_base 17: mod_base = OTHER; note = bicyclic nucleic acid (BNA)
  source 1..17: mol_type = other RNA
caacatcaaggaagatg

SEQ ID NO: 4530 - DNA, 16 bp, synthetic construct
  misc_feature 1..16: note = Description of Artificial Sequence: Synthetic Antisense oligonucleotide
  misc_feature 1..16: note = Original Sequence: caacaucaaggaagat
  modified_base 1: mod_base = OTHER; note = 5-methyl
  modified_base 4: mod_base = OTHER; note = 5-methyl
  modified_base 7: mod_base = OTHER; note = 5-methyl
  modified_base 16: mod_base = OTHER; note = bicyclic nucleic acid (BNA)
  source 1..16: mol_type = other DNA
  modified_base 6: mod_base = OTHER; note = Uracil
caacatcaaggaagat

SEQ ID NO: 4531 - RNA, 15 nt, synthetic construct
  misc_feature 1..15: note = Description of Artificial Sequence: Synthetic Antisense oligonucleotide
  modified_base 1: mod_base = OTHER; note = 5-methyl
  modified_base 4: mod_base = OTHER; note = 5-methyl
  modified_base 7: mod_base = OTHER; note = 5-methyl
  modified_base 15: mod_base = OTHER; note = bicyclic nucleic acid (BNA)
  source 1..15: mol_type = other RNA
caacatcaaggaaga

SEQ ID NO: 4532 - RNA, 14 nt, synthetic construct
  misc_feature 1..14: note = Description of Artificial Sequence: Synthetic Antisense oligonucleotide
  modified_base 1: mod_base = OTHER; note = 5-methyl
  modified_base 4: mod_base = OTHER; note = 5-methyl
  modified_base 7: mod_base = OTHER; note = 5-methyl
  modified_base 14: mod_base = OTHER; note = bicyclic nucleic acid (BNA)
  source 1..14: mol_type = other RNA
caacatcaaggaag

SEQ ID NO: 4533 - RNA, 26 nt, synthetic construct
  misc_feature 1..26: note = Description of Artificial Sequence: Synthetic Antisense oligonucleotide
  modified_base 3: mod_base = OTHER; note = 5-methyl
  modified_base 6: mod_base = OTHER; note = 5-methyl
  modified_base 18: mod_base = OTHER; note = 5-methyl
  modified_base 23: mod_base = OTHER; note = 5-methyl
  modified_base 26: mod_base = OTHER; note = bicyclic nucleic acid (BNA)
  source 1..26: mol_type = other RNA
aacatcaaggaagatggcatttctag

SEQ ID NO: 4534 - RNA, 25 nt, synthetic construct
  misc_feature 1..25: note = Description of Artificial Sequence: Synthetic Antisense oligonucleotide
  modified_base 3: mod_base = OTHER; note = 5-methyl
  modified_base 6: mod_base = OTHER; note = 5-methyl
  modified_base 18: mod_base = OTHER; note = 5-methyl
  modified_base 23: mod_base = OTHER; note = 5-methyl
  modified_base 25: mod_base = OTHER; note = bicyclic nucleic acid (BNA)
  source 1..25: mol_type = other RNA
aacatcaaggaagatggcatttcta

SEQ ID NO: 4535 - DNA, 24 bp, synthetic construct
  misc_feature 1..24: note = Description of Artificial Sequence: Synthetic Antisense oligonucleotide
  misc_feature 1..24: note = Original Sequence: aacaucaaggaagauggcauuuct
  modified_base 3: mod_base = OTHER; note = 5-methyl
  modified_base 6: mod_base = OTHER; note = 5-methyl
  modified_base 18: mod_base = OTHER; note = 5-methyl
  modified_base 23: mod_base = OTHER; note = 5-methyl
  modified_base 24: mod_base = OTHER; note = bicyclic nucleic acid (BNA)
  source 1..24: mol_type = other DNA
  modified_base 5: mod_base = OTHER; note = Uracil
  modified_base 15: mod_base = OTHER; note = Uracil
  modified_base 20: mod_base = OTHER; note = Uracil
  modified_base 21: mod_base = OTHER; note = Uracil
  modified_base 22: mod_base = OTHER; note = Uracil
aacatcaaggaagatggcatttct

SEQ ID NO: 4536 - RNA, 23 nt, synthetic construct
  misc_feature 1..23: note = Description of Artificial Sequence: Synthetic Antisense oligonucleotide
  modified_base 3: mod_base = OTHER; note = 5-methyl
  modified_base 6: mod_base = OTHER; note = 5-methyl
  modified_base 18: mod_base = OTHER; note = 5-methyl
  modified_base 23: mod_base = OTHER; note = 5-methyl
  modified_base 23: mod_base = OTHER; note = bicyclic nucleic acid (BNA)
  source 1..23: mol_type = other RNA
aacatcaaggaagatggcatttc

SEQ ID NO: 4537 - DNA, 22 bp, synthetic construct
  misc_feature 1..22: note = Description of Artificial Sequence: Synthetic Antisense oligonucleotide
  misc_feature 1..22: note = Original Sequence: aacaucaaggaagauggcauut
  modified_base 3: mod_base = OTHER; note = 5-methyl
  modified_base 6: mod_base = OTHER; note = 5-methyl
  modified_base 18: mod_base = OTHER; note = 5-methyl
  modified_base 22: mod_base = OTHER; note = bicyclic nucleic acid (BNA)
  source 1..22: mol_type = other DNA
  modified_base 5: mod_base = OTHER; note = Uracil
  modified_base 15: mod_base = OTHER; note = Uracil
  modified_base 20: mod_base = OTHER; note = Uracil
  modified_base 21: mod_base = OTHER; note = Uracil
aacatcaaggaagatggcattt

SEQ ID NO: 4538 - DNA, 21 bp, synthetic construct
  misc_feature 1..21: note = Description of Artificial Sequence: Synthetic Antisense oligonucleotide
  misc_feature 1..21: note = Original Sequence: aacaucaaggaagauggcaut
  modified_base 3: mod_base = OTHER; note = 5-methyl
  modified_base 6: mod_base = OTHER; note = 5-methyl
  modified_base 18: mod_base = OTHER; note = 5-methyl
  modified_base 21: mod_base = OTHER; note = bicyclic nucleic acid (BNA)
  source 1..21: mol_type = other DNA
  modified_base 5: mod_base = OTHER; note = Uracil
  modified_base 15: mod_base = OTHER; note = Uracil
  modified_base 20: mod_base = OTHER; note = Uracil
aacatcaaggaagatggcatt

SEQ ID NO: 4539 - DNA, 20 bp, synthetic construct
  misc_feature 1..20: note = Description of Artificial Sequence: Synthetic Antisense oligonucleotide
  misc_feature 1..20: note = Original Sequence: aacaucaaggaagauggcat
  modified_base 3: mod_base = OTHER; note = 5-methyl
  modified_base 6: mod_base = OTHER; note = 5-methyl
  modified_base 18: mod_base = OTHER; note = 5-methyl
  modified_base 20: mod_base = OTHER; note = bicyclic nucleic acid (BNA)
  source 1..20: mol_type = other DNA
  modified_base 5: mod_base = OTHER; note = Uracil
  modified_base 15: mod_base = OTHER; note = Uracil
aacatcaaggaagatggcat

SEQ ID NO: 4540 - RNA, 19 nt, synthetic construct
  misc_feature 1..19: note = Description of Artificial Sequence: Synthetic Antisense oligonucleotide
  modified_base 3: mod_base = OTHER; note = 5-methyl
  modified_base 6: mod_base = OTHER; note = 5-methyl
  modified_base 18: mod_base = OTHER; note = 5-methyl
  modified_base 19: mod_base = OTHER; note = bicyclic nucleic acid (BNA)
  source 1..19: mol_type = other RNA
aacatcaaggaagatggca

SEQ ID NO: 4541 - RNA, 18 nt, synthetic construct
  misc_feature 1..18: note = Description of Artificial Sequence: Synthetic Antisense oligonucleotide
  modified_base 3: mod_base = OTHER; note = 5-methyl
  modified_base 6: mod_base = OTHER; note = 5-methyl
  modified_base 18: mod_base = OTHER; note = 5-methyl
  modified_base 18: mod_base = OTHER; note = bicyclic nucleic acid (BNA)
  source 1..18: mol_type = other RNA
aacatcaaggaagatggc

SEQ ID NO: 4542 - RNA, 17 nt, synthetic construct
  misc_feature 1..17: note = Description of Artificial Sequence: Synthetic Antisense oligonucleotide
  modified_base 3: mod_base = OTHER; note = 5-methyl
  modified_base 6: mod_base = OTHER; note = 5-methyl
  modified_base 17: mod_base = OTHER; note = bicyclic nucleic acid (BNA)
  source 1..17: mol_type = other RNA
aacatcaaggaagatgg

SEQ ID NO: 4543 - RNA, 16 nt, synthetic construct
  misc_feature 1..16: note = Description of Artificial Sequence: Synthetic Antisense oligonucleotide
  modified_base 3: mod_base = OTHER; note = 5-methyl
  modified_base 6: mod_base = OTHER; note = 5-methyl
  modified_base 16: mod_base = OTHER; note = bicyclic nucleic acid (BNA)
  source 1..16: mol_type = other RNA
aacatcaaggaagatg

SEQ ID NO: 4544 - DNA, 15 bp, synthetic construct
  misc_feature 1..15: note = Description of Artificial Sequence: Synthetic Antisense oligonucleotide
  misc_feature 1..15: note = Original Sequence: aacaucaaggaagat
  modified_base 3: mod_base = OTHER; note = 5-methyl
  modified_base 6: mod_base = OTHER; note = 5-methyl
  modified_base 15: mod_base = OTHER; note = bicyclic nucleic acid (BNA)
  source 1..15: mol_type = other DNA
  modified_base 5: mod_base = OTHER; note = Uracil
aacatcaaggaagat

SEQ ID NO: 4545 - RNA, 14 nt, synthetic construct
  misc_feature 1..14: note = Description of Artificial Sequence: Synthetic Antisense oligonucleotide
  modified_base 3: mod_base = OTHER; note = 5-methyl
  modified_base 6: mod_base = OTHER; note = 5-methyl
  modified_base 14: mod_base = OTHER; note = bicyclic nucleic acid (BNA)
  source 1..14: mol_type = other RNA
aacatcaaggaaga

SEQ ID NO: 4546 - RNA, 13 nt, synthetic construct
  misc_feature 1..13: note = Description of Artificial Sequence: Synthetic Antisense oligonucleotide
  modified_base 3: mod_base = OTHER; note = 5-methyl
  modified_base 6: mod_base = OTHER; note = 5-methyl
  modified_base 13: mod_base = OTHER; note = bicyclic nucleic acid (BNA)
  source 1..13: mol_type = other RNA
aacatcaaggaag

SEQ ID NO: 4547 - RNA, 25 nt, synthetic construct
  misc_feature 1..25: note = Description of Artificial Sequence: Synthetic Antisense oligonucleotide
  modified_base 2: mod_base = OTHER; note = 5-methyl
  modified_base 5: mod_base = OTHER; note = 5-methyl
  modified_base 17: mod_base = OTHER; note = 5-methyl
  modified_base 22: mod_base = OTHER; note = 5-methyl
  modified_base 25: mod_base = OTHER; note = bicyclic nucleic acid (BNA)
  source 1..25: mol_type = other RNA
acatcaaggaagatggcatttctag

SEQ ID NO: 4548 - RNA, 24 nt, synthetic construct
  misc_feature 1..24: note = Description of Artificial Sequence: Synthetic Antisense oligonucleotide
  modified_base 2: mod_base = OTHER; note = 5-methyl
  modified_base 5: mod_base = OTHER; note = 5-methyl
  modified_base 17: mod_base = OTHER; note = 5-methyl
  modified_base 22: mod_base = OTHER; note = 5-methyl
  modified_base 24: mod_base = OTHER; note = bicyclic nucleic acid (BNA)
  source 1..24: mol_type = other RNA
acatcaaggaagatggcatttcta

SEQ ID NO: 4549 - DNA, 23 bp, synthetic construct
  misc_feature 1..23: note = Description of Artificial Sequence: Synthetic Antisense oligonucleotide
  misc_feature 1..23: note = Original Sequence: acaucaaggaagauggcauuuct
  modified_base 2: mod_base = OTHER; note = 5-methyl
  modified_base 5: mod_base = OTHER; note = 5-methyl
  modified_base 17: mod_base = OTHER; note = 5-methyl
  modified_base 22: mod_base = OTHER; note = 5-methyl
  modified_base 23: mod_base = OTHER; note = bicyclic nucleic acid (BNA)
  source 1..23: mol_type = other DNA
  modified_base 4: mod_base = OTHER; note = Uracil
  modified_base 14: mod_base = OTHER; note = Uracil
  modified_base 19: mod_base = OTHER; note = Uracil
  modified_base 20: mod_base = OTHER; note = Uracil
  modified_base 21: mod_base = OTHER; note = Uracil
acatcaaggaagatggcatttct

SEQ ID NO: 4550 - RNA, 22 nt, synthetic construct
  misc_feature 1..22: note = Description of Artificial Sequence: Synthetic Antisense oligonucleotide
  modified_base 2: mod_base = OTHER; note = 5-methyl
  modified_base 5: mod_base = OTHER; note = 5-methyl
  modified_base 17: mod_base = OTHER; note = 5-methyl
  modified_base 22: mod_base = OTHER; note = 5-methyl
  modified_base 22: mod_base = OTHER; note = bicyclic nucleic acid (BNA)
  source 1..22: mol_type = other RNA
acatcaaggaagatggcatttc

SEQ ID NO: 4551 - DNA, 21 bp, synthetic construct
  misc_feature 1..21: note = Description of Artificial Sequence: Synthetic Antisense oligonucleotide
  misc_feature 1..21: note = Original Sequence: acaucaaggaagauggcauut
  modified_base 2: mod_base = OTHER; note = 5-methyl
  modified_base 5: mod_base = OTHER; note = 5-methyl
  modified_base 17: mod_base = OTHER; note = 5-methyl
  modified_base 21: mod_base = OTHER; note = bicyclic nucleic acid (BNA)
  source 1..21: mol_type = other DNA
  modified_base 4: mod_base = OTHER; note = Uracil
  modified_base 14: mod_base = OTHER; note = Uracil
  modified_base 19: mod_base = OTHER; note = Uracil
  modified_base 20: mod_base = OTHER; note = Uracil
acatcaaggaagatggcattt

SEQ ID NO: 4552 - DNA, 20 bp, synthetic construct
  misc_feature 1..20: note = Description of Artificial Sequence: Synthetic Antisense oligonucleotide
  misc_feature 1..20: note = Original Sequence: acaucaaggaagauggcaut
  modified_base 2: mod_base = OTHER; note = 5-methyl
  modified_base 5: mod_base = OTHER; note = 5-methyl
  modified_base 17: mod_base = OTHER; note = 5-methyl
  modified_base 20: mod_base = OTHER; note = bicyclic nucleic acid (BNA)
  source 1..20: mol_type = other DNA
  modified_base 4: mod_base = OTHER; note = Uracil
  modified_base 14: mod_base = OTHER; note = Uracil
  modified_base 19: mod_base = OTHER; note = Uracil
acatcaaggaagatggcatt

SEQ ID NO: 4553 - DNA, 19 bp, synthetic construct
  misc_feature 1..19: note = Description of Artificial Sequence: Synthetic Antisense oligonucleotide
  misc_feature 1..19: note = Original Sequence: acaucaaggaagauggcat
  modified_base 2: mod_base = OTHER; note = 5-methyl
  modified_base 5: mod_base = OTHER; note = 5-methyl
  modified_base 17: mod_base = OTHER; note = 5-methyl
  modified_base 19: mod_base = OTHER; note = bicyclic nucleic acid (BNA)
  source 1..19: mol_type = other DNA
  modified_base 4: mod_base = OTHER; note = Uracil
  modified_base 14: mod_base = OTHER; note = Uracil
acatcaaggaagatggcat

SEQ ID NO: 4554 - RNA, 18 nt, synthetic construct
  misc_feature 1..18: note = Description of Artificial Sequence: Synthetic Antisense oligonucleotide
  modified_base 2: mod_base = OTHER; note = 5-methyl
  modified_base 5: mod_base = OTHER; note = 5-methyl
  modified_base 17: mod_base = OTHER; note = 5-methyl
  modified_base 18: mod_base = OTHER; note = bicyclic nucleic acid (BNA)
  source 1..18: mol_type = other RNA
acatcaaggaagatggca

SEQ ID NO: 4555 - RNA, 17 nt, synthetic construct
  misc_feature 1..17: note = Description of Artificial Sequence: Synthetic Antisense oligonucleotide
  modified_base 2: mod_base = OTHER; note = 5-methyl
  modified_base 5: mod_base = OTHER; note = 5-methyl
  modified_base 17: mod_base = OTHER; note = 5-methyl
  modified_base 17: mod_base = OTHER; note = bicyclic nucleic acid (BNA)
  source 1..17: mol_type = other RNA
acatcaaggaagatggc

SEQ ID NO: 4556 - RNA, 16 nt, synthetic construct
  misc_feature 1..16: note = Description of Artificial Sequence: Synthetic Antisense oligonucleotide
  modified_base 2: mod_base = OTHER; note = 5-methyl
  modified_base 5: mod_base = OTHER; note = 5-methyl
  modified_base 16: mod_base = OTHER; note = bicyclic nucleic acid (BNA)
  source 1..16: mol_type = other RNA
acatcaaggaagatgg

SEQ ID NO: 4557 - RNA, 15 nt, synthetic construct
  misc_feature 1..15: note = Description of Artificial Sequence: Synthetic Antisense oligonucleotide
  modified_base 2: mod_base = OTHER; note = 5-methyl
  modified_base 5: mod_base = OTHER; note = 5-methyl
  modified_base 15: mod_base = OTHER; note = bicyclic nucleic acid (BNA)
  source 1..15: mol_type = other RNA
acatcaaggaagatg

SEQ ID NO: 4558 - DNA, 14 bp, synthetic construct
  misc_feature 1..14: note = Description of Artificial Sequence: Synthetic Antisense oligonucleotide
  misc_feature 1..14: note = Original Sequence: acaucaaggaagat
  modified_base 2: mod_base = OTHER; note = 5-methyl
  modified_base 5: mod_base = OTHER; note = 5-methyl
  modified_base 14: mod_base = OTHER; note = bicyclic nucleic acid (BNA)
  source 1..14: mol_type = other DNA
  modified_base 4: mod_base = OTHER; note = Uracil
acatcaaggaagat

SEQ ID NO: 4559 - RNA, 13 nt, synthetic construct
  misc_feature 1..13: note = Description of Artificial Sequence: Synthetic Antisense oligonucleotide
  modified_base 2: mod_base = OTHER; note = 5-methyl
  modified_base 5: mod_base = OTHER; note = 5-methyl
  modified_base 13: mod_base = OTHER; note = bicyclic nucleic acid (BNA)
  source 1..13: mol_type = other RNA
acatcaaggaaga

SEQ ID NO: 4560 - RNA, 12 nt, synthetic construct
  misc_feature 1..12: note = Description of Artificial Sequence: Synthetic Antisense oligonucleotide
  modified_base 2: mod_base = OTHER; note = 5-methyl
  modified_base 5: mod_base = OTHER; note = 5-methyl
  modified_base 12: mod_base = OTHER; note = bicyclic nucleic acid (BNA)
  source 1..12: mol_type = other RNA
acatcaaggaag

SEQ ID NO: 4561 - RNA, 24 nt, synthetic construct
  misc_feature 1..24: note = Description of Artificial Sequence: Synthetic Antisense oligonucleotide
  modified_base 1: mod_base = OTHER; note = 5-methyl
  modified_base 4: mod_base = OTHER; note = 5-methyl
  modified_base 16: mod_base = OTHER; note = 5-methyl
  modified_base 21: mod_base = OTHER; note = 5-methyl
  modified_base 24: mod_base = OTHER; note = bicyclic nucleic acid (BNA)
  source 1..24: mol_type = other RNA
catcaaggaagatggcatttctag

SEQ ID NO: 4562 - RNA, 23 nt, synthetic construct
  misc_feature 1..23: note = Description of Artificial Sequence: Synthetic Antisense oligonucleotide
  modified_base 1: mod_base = OTHER; note = 5-methyl
  modified_base 4: mod_base = OTHER; note = 5-methyl
  modified_base 16: mod_base = OTHER; note = 5-methyl
  modified_base 21: mod_base = OTHER; note = 5-methyl
  modified_base 23: mod_base = OTHER; note = bicyclic nucleic acid (BNA)
  source 1..23: mol_type = other RNA
catcaaggaagatggcatttcta

SEQ ID NO: 4563 - DNA, 22 bp, synthetic construct
  misc_feature 1..22: note = Description of Artificial Sequence: Synthetic Antisense oligonucleotide
  misc_feature 1..22: note = Original Sequence: caucaaggaagauggcauuuct
  modified_base 1: mod_base = OTHER; note = 5-methyl
  modified_base 4: mod_base = OTHER; note = 5-methyl
  modified_base 16: mod_base = OTHER; note = 5-methyl
  modified_base 21: mod_base = OTHER; note = 5-methyl
  modified_base 22: mod_base = OTHER; note = bicyclic nucleic acid (BNA)
  source 1..22: mol_type = other DNA
  modified_base 3: mod_base = OTHER; note = Uracil
  modified_base 13: mod_base = OTHER; note = Uracil
  modified_base 18: mod_base = OTHER; note = Uracil
  modified_base 19: mod_base = OTHER; note = Uracil
  modified_base 20: mod_base = OTHER; note = Uracil
catcaaggaagatggcatttct

SEQ ID NO: 4564 - RNA, 21 nt, synthetic construct
  misc_feature 1..21: note = Description of Artificial Sequence: Synthetic Antisense oligonucleotide
  modified_base 1: mod_base = OTHER; note = 5-methyl
  modified_base 4: mod_base = OTHER; note = 5-methyl
  modified_base 16: mod_base = OTHER; note = 5-methyl
  modified_base 21: mod_base = OTHER; note = 5-methyl
  modified_base 21: mod_base = OTHER; note = bicyclic nucleic acid (BNA)
  source 1..21: mol_type = other RNA
catcaaggaagatggcatttc

SEQ ID NO: 4565 - DNA, 20 bp, synthetic construct
  misc_feature 1..20: note = Description of Artificial Sequence: Synthetic Antisense oligonucleotide
  misc_feature 1..20: note = Original Sequence: caucaaggaagauggcauut
  modified_base 1: mod_base = OTHER; note = 5-methyl
  modified_base 4: mod_base = OTHER; note = 5-methyl
  modified_base 16: mod_base = OTHER; note = 5-methyl
  modified_base 20: mod_base = OTHER; note = bicyclic nucleic acid (BNA)
  source 1..20: mol_type = other DNA
  modified_base 3: mod_base = OTHER; note = Uracil
  modified_base 13: mod_base = OTHER; note = Uracil
  modified_base 18: mod_base = OTHER; note = Uracil
  modified_base 19: mod_base = OTHER; note = Uracil
catcaaggaagatggcattt

SEQ ID NO: 4566 - DNA, 19 bp, synthetic construct
  misc_feature 1..19: note = Description of Artificial Sequence: Synthetic Antisense oligonucleotide
  misc_feature 1..19: note = Original Sequence: caucaaggaagauggcaut
  modified_base 1: mod_base = OTHER; note = 5-methyl
  modified_base 4: mod_base = OTHER; note = 5-methyl
  modified_base 16: mod_base = OTHER; note = 5-methyl
  modified_base 19: mod_base = OTHER; note = bicyclic nucleic acid (BNA)
  source 1..19: mol_type = other DNA
  modified_base 3: mod_base = OTHER; note = Uracil
  modified_base 13: mod_base = OTHER; note = Uracil
  modified_base 18: mod_base = OTHER; note = Uracil
catcaaggaagatggcatt

SEQ ID NO: 4567 - DNA, 18 bp, synthetic construct
  misc_feature 1..18: note = Description of Artificial Sequence: Synthetic Antisense oligonucleotide
  misc_feature 1..18: note = Original Sequence: caucaaggaagauggcat
  modified_base 1: mod_base = OTHER; note = 5-methyl
  modified_base 4: mod_base = OTHER; note = 5-methyl
  modified_base 16: mod_base = OTHER; note = 5-methyl
  modified_base 18: mod_base = OTHER; note = bicyclic nucleic acid (BNA)
  source 1..18: mol_type = other DNA
  modified_base 3: mod_base = OTHER; note = Uracil
  modified_base 13: mod_base = OTHER; note = Uracil
catcaaggaagatggcat

SEQ ID NO: 4568 - RNA, 17 nt, synthetic construct
  misc_feature 1..17: note = Description of Artificial Sequence: Synthetic Antisense oligonucleotide
  modified_base 1: mod_base = OTHER; note = 5-methyl
  modified_base 4: mod_base = OTHER; note = 5-methyl
  modified_base 16: mod_base = OTHER; note = 5-methyl
  modified_base 17: mod_base = OTHER; note = bicyclic nucleic acid (BNA)
  source 1..17: mol_type = other RNA
catcaaggaagatggca

SEQ ID NO: 4569 - RNA, 16 nt, synthetic construct
  misc_feature 1..16: note = Description of Artificial Sequence: Synthetic Antisense oligonucleotide
  modified_base 1: mod_base = OTHER; note = 5-methyl
  modified_base 4: mod_base = OTHER; note = 5-methyl
  modified_base 16: mod_base = OTHER; note = 5-methyl
  modified_base 16: mod_base = OTHER; note = bicyclic nucleic acid (BNA)
  source 1..16: mol_type = other RNA
catcaaggaagatggc

SEQ ID NO: 4570 - RNA, 15 nt, synthetic construct
  misc_feature 1..15: note = Description of Artificial Sequence: Synthetic Antisense oligonucleotide
  modified_base 1: mod_base = OTHER; note = 5-methyl
  modified_base 4: mod_base = OTHER; note = 5-methyl
  modified_base 15: mod_base = OTHER; note = bicyclic nucleic acid (BNA)
  source 1..15: mol_type = other RNA
catcaaggaagatgg

SEQ ID NO: 4571 - RNA, 14 nt, synthetic construct
  misc_feature 1..14: note = Description of Artificial Sequence: Synthetic Antisense oligonucleotide
  modified_base 1: mod_base = OTHER; note = 5-methyl
  modified_base 4: mod_base = OTHER; note = 5-methyl
  modified_base 14: mod_base = OTHER; note = bicyclic nucleic acid (BNA)
  source 1..14: mol_type = other RNA
catcaaggaagatg

SEQ ID NO: 4572 - DNA, 13 bp, synthetic construct
  misc_feature 1..13: note = Description of Artificial Sequence: Synthetic Antisense oligonucleotide
  misc_feature 1..13: note = Original Sequence: caucaaggaagat
  modified_base 1: mod_base = OTHER; note = 5-methyl
  modified_base 4: mod_base = OTHER; note = 5-methyl
  modified_base 13: mod_base = OTHER; note = bicyclic nucleic acid (BNA)
  source 1..13: mol_type = other DNA
  modified_base 3: mod_base = OTHER; note = Uracil
catcaaggaagat

SEQ ID NO: 4573 - RNA, 12 nt, synthetic construct
  misc_feature 1..12: note = Description of Artificial Sequence: Synthetic Antisense oligonucleotide
  modified_base 1: mod_base = OTHER; note = 5-methyl
  modified_base 4: mod_base = OTHER; note = 5-methyl
  modified_base 12: mod_base = OTHER; note = bicyclic nucleic acid (BNA)
  source 1..12: mol_type = other RNA
catcaaggaaga

SEQ ID NO: 4574 - RNA, 11 nt, synthetic construct
  misc_feature 1..11: note = Description of Artificial Sequence: Synthetic Antisense oligonucleotide
  modified_base 1: mod_base = OTHER; note = 5-methyl
  modified_base 4: mod_base = OTHER; note = 5-methyl
  modified_base 11: mod_base = OTHER; note = bicyclic nucleic acid (BNA)
  source 1..11: mol_type = other RNA
catcaaggaag

SEQ ID NO: 4575 - RNA, 23 nt, synthetic construct
  misc_feature 1..23: note = Description of Artificial Sequence: Synthetic Antisense oligonucleotide
  modified_base 3: mod_base = OTHER; note = 5-methyl
  modified_base 15: mod_base = OTHER; note = 5-methyl
  modified_base 20: mod_base = OTHER; note = 5-methyl
  modified_base 23: mod_base = OTHER; note = bicyclic nucleic acid (BNA)
  source 1..23: mol_type = other RNA
atcaaggaagatggcatttctag

SEQ ID NO: 4576 - RNA, 22 nt, synthetic construct
  misc_feature 1..22: note = Description of Artificial Sequence: Synthetic Antisense oligonucleotide
  modified_base 3: mod_base = OTHER; note = 5-methyl
  modified_base 15: mod_base = OTHER; note = 5-methyl
  modified_base 20: mod_base = OTHER; note = 5-methyl
  modified_base 22: mod_base = OTHER; note = bicyclic nucleic acid (BNA)
  source 1..22: mol_type = other RNA
atcaaggaagatggcatttcta

SEQ ID NO: 4577 - DNA, 21 bp, synthetic construct
  misc_feature 1..21: note = Description of Artificial Sequence: Synthetic Antisense oligonucleotide
  misc_feature 1..21: note = Original Sequence: aucaaggaagauggcauuuct
  modified_base 3: mod_base = OTHER; note = 5-methyl
  modified_base 15: mod_base = OTHER; note = 5-methyl
  modified_base 20: mod_base = OTHER; note = 5-methyl
  modified_base 21: mod_base = OTHER; note = bicyclic nucleic acid (BNA)
  source 1..21: mol_type = other DNA
  modified_base 2: mod_base = OTHER; note = Uracil
  modified_base 12: mod_base = OTHER; note = Uracil
  modified_base 17: mod_base = OTHER; note = Uracil
  modified_base 18: mod_base = OTHER; note = Uracil
  modified_base 19: mod_base = OTHER; note = Uracil
atcaaggaagatggcatttct

SEQ ID NO: 4578 - RNA, 20 nt, synthetic construct
  misc_feature 1..20: note = Description of Artificial Sequence: Synthetic Antisense oligonucleotide
  modified_base 3: mod_base = OTHER; note = 5-methyl
  modified_base 15: mod_base = OTHER; note = 5-methyl
  modified_base 20: mod_base = OTHER; note = 5-methyl
  modified_base 20: mod_base = OTHER; note = bicyclic nucleic acid (BNA)
  source 1..20: mol_type = other RNA
atcaaggaagatggcatttc

SEQ ID NO: 4579 - DNA, 19 bp, synthetic construct
  misc_feature 1..19: note = Description of Artificial Sequence: Synthetic Antisense oligonucleotide
  misc_feature 1..19: note = Original Sequence: aucaaggaagauggcauut
  modified_base 3: mod_base = OTHER; note = 5-methyl
  modified_base 15: mod_base = OTHER; note = 5-methyl
  modified_base 19: mod_base = OTHER; note = bicyclic nucleic acid (BNA)
  source 1..19: mol_type = other DNA
  modified_base 2: mod_base = OTHER; note = Uracil
  modified_base 12: mod_base = OTHER; note = Uracil
  modified_base 17: mod_base = OTHER; note = Uracil
  modified_base 18: mod_base = OTHER; note = Uracil
atcaaggaagatggcattt

SEQ ID NO: 4580 - DNA, 18 bp, synthetic construct
  misc_feature 1..18: note = Description of Artificial Sequence: Synthetic Antisense oligonucleotide
  misc_feature 1..18: note = Original Sequence: aucaaggaagauggcaut
  modified_base 3: mod_base = OTHER; note = 5-methyl
  modified_base 15: mod_base = OTHER; note = 5-methyl
  modified_base 18: mod_base = OTHER; note = bicyclic nucleic acid (BNA)
  source 1..18: mol_type = other DNA
  modified_base 2: mod_base = OTHER; note = Uracil
  modified_base 12: mod_base = OTHER; note = Uracil
  modified_base 17: mod_base = OTHER; note = Uracil
atcaaggaagatggcatt

SEQ ID NO: 4581 - DNA, 17 bp, synthetic construct
  misc_feature 1..17: note = Description of Artificial Sequence: Synthetic Antisense oligonucleotide
  misc_feature 1..17: note = Original Sequence: aucaaggaagauggcat
  modified_base 3: mod_base = OTHER; note = 5-methyl
  modified_base 15: mod_base = OTHER; note = 5-methyl
  modified_base 17: mod_base = OTHER; note = bicyclic nucleic acid (BNA)
  source 1..17: mol_type = other DNA
  modified_base 2: mod_base = OTHER; note = Uracil
  modified_base 12: mod_base = OTHER; note = Uracil
atcaaggaagatggcat

SEQ ID NO: 4582 - RNA, 16 nt, synthetic construct
  misc_feature 1..16: note = Description of Artificial Sequence: Synthetic Antisense oligonucleotide
  modified_base 3: mod_base = OTHER; note = 5-methyl
  modified_base 15: mod_base = OTHER; note = 5-methyl
  modified_base 16: mod_base = OTHER; note = bicyclic nucleic acid (BNA)
  source 1..16: mol_type = other RNA
atcaaggaagatggca

SEQ ID NO: 4583 - RNA, 15 nt, synthetic construct
  misc_feature 1..15: note = Description of Artificial Sequence: Synthetic Antisense oligonucleotide
  modified_base 3: mod_base = OTHER; note = 5-methyl
  modified_base 15: mod_base = OTHER; note = 5-methyl
  modified_base 15: mod_base = OTHER; note = bicyclic nucleic acid (BNA)
  source 1..15: mol_type = other RNA
atcaaggaagatggc

SEQ ID NO: 4584 - RNA, 14 nt, synthetic construct
  misc_feature 1..14: note = Description of Artificial Sequence: Synthetic Antisense oligonucleotide
  modified_base 3: mod_base = OTHER; note = 5-methyl
  modified_base 14: mod_base = OTHER; note = bicyclic nucleic acid (BNA)
  source 1..14: mol_type = other RNA
atcaaggaagatgg

SEQ ID NO: 4585 - RNA, 13 nt, synthetic construct
  misc_feature 1..13: note = Description of Artificial Sequence: Synthetic Antisense oligonucleotide
  modified_base 3: mod_base = OTHER; note = 5-methyl
  modified_base 13: mod_base = OTHER; note = bicyclic nucleic acid (BNA)
  source 1..13: mol_type = other RNA
atcaaggaagatg

SEQ ID NO: 4586 - DNA, 12 bp, synthetic construct
  misc_feature 1..12: note = Description of Artificial Sequence: Synthetic Antisense oligonucleotide
  misc_feature 1..12: note = Original Sequence: aucaaggaagat
  modified_base 3: mod_base = OTHER; note = 5-methyl
  modified_base 12: mod_base = OTHER; note = bicyclic nucleic acid (BNA)
  source 1..12: mol_type = other DNA
  modified_base 2: mod_base = OTHER; note = Uracil
atcaaggaagat

SEQ ID NO: 4587 - RNA, 11 nt, synthetic construct
  misc_feature 1..11: note = Description of Artificial Sequence: Synthetic Antisense oligonucleotide
  modified_base 3: mod_base = OTHER; note = 5-methyl
  modified_base 11: mod_base = OTHER; note = bicyclic nucleic acid (BNA)
  source 1..11: mol_type = other RNA
atcaaggaaga

SEQ ID NO: 4588 - RNA, 10 nt, synthetic construct
  misc_feature 1..10: note = Description of Artificial Sequence: Synthetic Antisense oligonucleotide
  modified_base 3: mod_base = OTHER; note = 5-methyl
  modified_base 10: mod_base = OTHER; note = bicyclic nucleic acid (BNA)
  source 1..10: mol_type = other RNA
atcaaggaag

SEQ ID NO: 4589 - RNA, 18 nt, synthetic construct
  misc_feature 1..18: note = Description of Artificial Sequence: Synthetic Antisense oligonucleotide
  modified_base 1: mod_base = OTHER; note = bicyclic nucleic acid (BNA)
  modified_base 18: mod_base = OTHER; note = bicyclic nucleic acid (BNA)
  modified_base 9: mod_base = OTHER; note = 5-methyl
  modified_base 13..14: mod_base = OTHER; note = 5-methyl
  modified_base 18: mod_base = OTHER; note = 5-methyl
  source 1..18: mol_type = other RNA
ggtaagttctgtccaagc

SEQ ID NO: 4590 - RNA, 18 nt, synthetic construct
  misc_feature 1..18: note = Description of Artificial Sequence: Synthetic Antisense oligonucleotide
  modified_base 1: mod_base = OTHER; note = bicyclic nucleic acid (BNA)
  modified_base 18: mod_base = OTHER; note = bicyclic nucleic acid (BNA)
  modified_base 8: mod_base = OTHER; note = 5-methyl
  modified_base 12..13: mod_base = OTHER; note = 5-methyl
  modified_base 17..18: mod_base = OTHER; note = 5-methyl
  source 1..18: mol_type = other RNA
gtaagttctgtccaagcc

SEQ ID NO: 4591 - RNA, 18 nt, synthetic construct
  misc_feature 1..18: note = Description of Artificial Sequence: Synthetic Antisense oligonucleotide
  modified_base 1: mod_base = OTHER; note = bicyclic nucleic acid (BNA)
  modified_base 18: mod_base = OTHER; note = bicyclic nucleic acid (BNA)
  modified_base 4: mod_base = OTHER; note = 5-methyl
  modified_base 13: mod_base = OTHER; note = 5-methyl
  modified_base 17..18: mod_base = OTHER; note = 5-methyl
  source 1..18: mol_type = other RNA
agtcggtaagttctgtcc

SEQ ID NO: 4592 - RNA, 18 nt, synthetic construct
  misc_feature 1..18: note = Description of Artificial Sequence: Synthetic Antisense oligonucleotide
  modified_base 1: mod_base = OTHER; note = 5-methyl
  modified_base 5..6: mod_base = OTHER; note = 5-methyl
  modified_base 10..12: mod_base = OTHER; note = 5-methyl
  modified_base 1: mod_base = OTHER; note = bicyclic nucleic acid (BNA)
  modified_base 18: mod_base = OTHER; note = bicyclic nucleic acid (BNA)
  source 1..18: mol_type = other RNA
ctgtccaagcccggttga

SEQ ID NO: 4593 - DNA, 15 bp, synthetic construct
  misc_feature 1..15: note = Description of Artificial Sequence: Synthetic Antisense oligonucleotide
  misc_feature 1..15: note = Original Sequence: taaguucuguccaag
  modified_base 1: mod_base = OTHER; note = bicyclic nucleic acid (BNA)
  modified_base 15: mod_base = OTHER; note = bicyclic nucleic acid (BNA)
  modified_base 7: mod_base = OTHER; note = 5-methyl
  modified_base 11..12: mod_base = OTHER; note = 5-methyl
  source 1..15: mol_type = other DNA
  modified_base 5: mod_base = OTHER; note = Uracil
  modified_base 6: mod_base = OTHER; note = Uracil
  modified_base 8: mod_base = OTHER; note = Uracil
  modified_base 10: mod_base = OTHER; note = Uracil
taagttctgtccaag

SEQ ID NO: 4594 - DNA, 20 bp, synthetic construct
  misc_feature 1..20: note = Description of Artificial Sequence: Synthetic Antisense oligonucleotide
  misc_feature 1..20: note = Original Sequence: tucuguccaagcccgguuga
  modified_base 1: mod_base = OTHER; note = bicyclic nucleic acid (BNA)
  modified_base 20: mod_base = OTHER; note = bicyclic nucleic acid (BNA)
  modified_base 3: mod_base = OTHER; note = 5-methyl
  modified_base 7..8: mod_base = OTHER; note = 5-methyl
  modified_base 12..14: mod_base = OTHER; note = 5-methyl
  source 1..20: mol_type = other DNA
  modified_base 2: mod_base = OTHER; note = Uracil
  modified_base 4: mod_base = OTHER; note = Uracil
  modified_base 6: mod_base = OTHER; note = Uracil
  modified_base 17: mod_base = OTHER; note = Uracil
  modified_base 18: mod_base = OTHER; note = Uracil
ttctgtccaagcccggttga

SEQ ID NO: 4595 - DNA, 19 bp, synthetic construct
  misc_feature 1..19: note = Description of Artificial Sequence: Synthetic Antisense oligonucleotide
  misc_feature 1..19: note = Original Sequence: tucuguccaagcccgguug
  modified_base 1: mod_base = OTHER; note = bicyclic nucleic acid (BNA)
  modified_base 19: mod_base = OTHER; note = bicyclic nucleic acid (BNA)
  modified_base 3: mod_base = OTHER; note = 5-methyl
  modified_base 7..8: mod_base = OTHER; note = 5-methyl
  modified_base 12..14: mod_base = OTHER; note = 5-methyl
  source 1..19: mol_type = other DNA
  modified_base 2: mod_base = OTHER; note = Uracil
  modified_base 4: mod_base = OTHER; note = Uracil
  modified_base 6: mod_base = OTHER; note = Uracil
  modified_base 17: mod_base = OTHER; note = Uracil
  modified_base 18: mod_base = OTHER; note = Uracil
ttctgtccaagcccggttg

SEQ ID NO: 4596 - DNA, 18 bp, synthetic construct
  misc_feature 1..18: note = Description of Artificial Sequence: Synthetic Antisense oligonucleotide
  misc_feature 1..18: note = Original Sequence: tucuguccaagcccggut
  modified_base 1: mod_base = OTHER; note = bicyclic nucleic acid (BNA)
  modified_base 18: mod_base = OTHER; note = bicyclic nucleic acid (BNA)
  modified_base 3: mod_base = OTHER; note = 5-methyl
  modified_base 7..8: mod_base = OTHER; note = 5-methyl
  modified_base 12..14: mod_base = OTHER; note = 5-methyl
  source 1..18: mol_type = other DNA
  modified_base 2: mod_base = OTHER; note = Uracil
  modified_base 4: mod_base = OTHER; note = Uracil
  modified_base 6: mod_base = OTHER; note = Uracil
  modified_base 17: mod_base = OTHER; note = Uracil
ttctgtccaagcccggtt

SEQ ID NO: 4597 - DNA, 17 bp, synthetic construct
  misc_feature 1..17: note = Description of Artificial Sequence: Synthetic Antisense oligonucleotide
  misc_feature 1..17: note = Original Sequence: tucuguccaagcccggt
  modified_base 1: mod_base = OTHER; note = bicyclic nucleic acid (BNA)
  modified_base 17: mod_base = OTHER; note = bicyclic nucleic acid (BNA)
  modified_base 3: mod_base = OTHER; note = 5-methyl
  modified_base 7..8: mod_base = OTHER; note = 5-methyl
  modified_base 12..14: mod_base = OTHER; note = 5-methyl
  source 1..17: mol_type = other DNA
  modified_base 2: mod_base = OTHER; note = Uracil
  modified_base 4: mod_base = OTHER; note = Uracil
  modified_base 6: mod_base = OTHER; note = Uracil
ttctgtccaagcccggt

SEQ ID NO: 4598 - DNA, 16 bp, synthetic construct
  misc_feature 1..16: note = Description of Artificial Sequence: Synthetic Antisense oligonucleotide
  misc_feature 1..16: note = Original Sequence: tucuguccaagcccgg
  modified_base 1: mod_base = OTHER; note = bicyclic nucleic acid (BNA)
  modified_base 16: mod_base = OTHER; note = bicyclic nucleic acid (BNA)
  modified_base 3: mod_base = OTHER; note = 5-methyl
  modified_base 7..8: mod_base = OTHER; note = 5-methyl
  modified_base 12..14: mod_base = OTHER; note = 5-methyl
  source 1..16: mol_type = other DNA
  modified_base 2: mod_base = OTHER; note = Uracil
  modified_base 4: mod_base = OTHER; note = Uracil
  modified_base 6: mod_base = OTHER; note = Uracil
ttctgtccaagcccgg

SEQ ID NO: 4599 - DNA, 15 bp, synthetic construct
  misc_feature 1..15: note = Description of Artificial Sequence: Synthetic Antisense oligonucleotide
  misc_feature 1..15: note = Original Sequence: tucuguccaagcccg
  modified_base 1: mod_base = OTHER; note = bicyclic nucleic acid (BNA)
  modified_base 15: mod_base = OTHER; note = bicyclic nucleic acid (BNA)
  modified_base 3: mod_base = OTHER; note = 5-methyl
  modified_base 7..8: mod_base = OTHER; note = 5-methyl
  modified_base 12..14: mod_base = OTHER; note = 5-methyl
  source 1..15: mol_type = other DNA
  modified_base 2: mod_base = OTHER; note = Uracil
  modified_base 4: mod_base = OTHER; note = Uracil
  modified_base 6: mod_base = OTHER; note = Uracil
ttctgtccaagcccg

SEQ ID NO: 4600 - DNA, 14 bp, synthetic construct
  misc_feature 1..14: note = Description of Artificial Sequence: Synthetic Antisense oligonucleotide
  misc_feature 1..14: note = Original Sequence: tucuguccaagccc
  modified_base 1: mod_base = OTHER; note = bicyclic nucleic acid (BNA)
  modified_base 14: mod_base = OTHER; note = bicyclic nucleic acid (BNA)
  modified_base 3: mod_base = OTHER; note = 5-methyl
  modified_base 7..8: mod_base = OTHER; note = 5-methyl
  modified_base 12..14: mod_base = OTHER; note = 5-methyl
  source 1..14: mol_type = other DNA
  modified_base 2: mod_base = OTHER; note = Uracil
  modified_base 4: mod_base = OTHER; note = Uracil
  modified_base 6: mod_base = OTHER; note = Uracil
ttctgtccaagccc

SEQ ID NO: 4601 - DNA, 13 bp, synthetic construct
  misc_feature 1..13: note = Description of Artificial Sequence: Synthetic Antisense oligonucleotide
  misc_feature 1..13: note = Original Sequence: tucuguccaagcc
  modified_base 1: mod_base = OTHER; note = bicyclic nucleic acid (BNA)
  modified_base 13: mod_base = OTHER; note = bicyclic nucleic acid (BNA)
  modified_base 3: mod_base = OTHER; note = 5-methyl
  modified_base 7..8: mod_base = OTHER; note = 5-methyl
  modified_base 12..13: mod_base = OTHER; note = 5-methyl
  source 1..13: mol_type = other DNA
  modified_base 2: mod_base = OTHER; note = Uracil
  modified_base 4: mod_base = OTHER; note = Uracil
  modified_base 6: mod_base = OTHER; note = Uracil
ttctgtccaagcc

SEQ ID NO: 4602 - DNA, 12 bp, synthetic construct
  misc_feature 1..12: note = Description of Artificial Sequence: Synthetic Antisense oligonucleotide
  misc_feature 1..12: note = Original Sequence: tucuguccaagc
  modified_base 1: mod_base = OTHER; note = bicyclic nucleic acid (BNA)
  modified_base 12: mod_base = OTHER; note = bicyclic nucleic acid (BNA)
  modified_base 3: mod_base = OTHER; note = 5-methyl
  modified_base 7..8: mod_base = OTHER; note = 5-methyl
  modified_base 12: mod_base = OTHER; note = 5-methyl
  source 1..12: mol_type = other DNA
  modified_base 2: mod_base = OTHER; note = Uracil
  modified_base 4: mod_base = OTHER; note = Uracil
  modified_base 6: mod_base = OTHER; note = Uracil
ttctgtccaagc

SEQ ID NO: 4603 - DNA, 11 bp, synthetic construct
  misc_feature 1..11: note = Description of Artificial Sequence: Synthetic Antisense oligonucleotide
  misc_feature 1..11: note = Original Sequence: tucuguccaag
  modified_base 1: mod_base = OTHER; note = bicyclic nucleic acid (BNA)
  modified_base 11: mod_base = OTHER; note = bicyclic nucleic acid (BNA)
  modified_base 3: mod_base = OTHER; note = 5-methyl
  modified_base 7..8: mod_base = OTHER; note = 5-methyl
  source 1..11: mol_type = other DNA
  modified_base 2: mod_base = OTHER; note = Uracil
  modified_base 4: mod_base = OTHER; note = Uracil
  modified_base 6: mod_base = OTHER; note = Uracil
ttctgtccaag

SEQ ID NO: 4604 - DNA, 10 bp, synthetic construct
  misc_feature 1..10: note = Description of Artificial Sequence: Synthetic Antisense oligonucleotide
  misc_feature 1..10: note = Original Sequence: tucuguccaa
  modified_base 1: mod_base = OTHER; note = bicyclic nucleic acid (BNA)
  modified_base 10: mod_base = OTHER; note = bicyclic nucleic acid (BNA)
  modified_base 3: mod_base = OTHER; note = 5-methyl
  modified_base 7..8: mod_base = OTHER; note = 5-methyl
  source 1..10: mol_type = other DNA
  modified_base 2: mod_base = OTHER; note = Uracil
  modified_base 4: mod_base = OTHER; note = Uracil
  modified_base 6: mod_base = OTHER; note = Uracil
ttctgtccaa

SEQ ID NO: 4605-4606 - skipped (2 entries)

SEQ ID NO: 4607 - DNA, 19 bp, synthetic construct
  misc_feature 1..19: note = Description of Artificial Sequence: Synthetic Antisense oligonucleotide
  misc_feature 1..19: note = Original Sequence: tcuguccaagcccgguuga
  modified_base 1: mod_base = OTHER; note = bicyclic nucleic acid (BNA)
  modified_base 19: mod_base = OTHER; note = bicyclic nucleic acid (BNA)
  modified_base 2: mod_base = OTHER; note = 5-methyl
  modified_base 6..7: mod_base = OTHER; note = 5-methyl
  modified_base 11..13: mod_base = OTHER; note = 5-methyl
  source 1..19: mol_type = other DNA
  modified_base 3: mod_base = OTHER; note = Uracil
  modified_base 5: mod_base = OTHER; note = Uracil
  modified_base 16: mod_base = OTHER; note = Uracil
  modified_base 17: mod_base = OTHER; note = Uracil
tctgtccaagcccggttga

SEQ ID NO: 4608 - DNA, 18 bp, synthetic construct
  misc_feature 1..18: note = Description of Artificial Sequence: Synthetic Antisense oligonucleotide
  misc_feature 1..18: note = Original Sequence: tcuguccaagcccgguug
  modified_base 1: mod_base = OTHER; note = bicyclic nucleic acid (BNA)
  modified_base 18: mod_base = OTHER; note = bicyclic nucleic acid (BNA)
  modified_base 2: mod_base = OTHER; note = 5-methyl
  modified_base 6..7: mod_base = OTHER; note = 5-methyl
  modified_base 11..13: mod_base = OTHER; note = 5-methyl
  source 1..18: mol_type = other DNA
  modified_base 3: mod_base = OTHER; note = Uracil
  modified_base 5: mod_base = OTHER; note = Uracil
  modified_base 16: mod_base = OTHER; note = Uracil
  modified_base 17: mod_base = OTHER; note = Uracil
tctgtccaagcccggttg

SEQ ID NO: 4609 - DNA, 17 bp, synthetic construct
  misc_feature 1..17: note = Description of Artificial Sequence: Synthetic Antisense oligonucleotide
  misc_feature 1..17: note = Original Sequence: tcuguccaagcccggut
  modified_base 1: mod_base = OTHER; note = bicyclic nucleic acid (BNA)
  modified_base 17: mod_base = OTHER; note = bicyclic nucleic acid (BNA)
  modified_base 2: mod_base = OTHER; note = 5-methyl
  modified_base 6..7: mod_base = OTHER; note = 5-methyl
  modified_base 11..13: mod_base = OTHER; note = 5-methyl
  source 1..17: mol_type = other DNA
  modified_base 3: mod_base = OTHER; note = Uracil
  modified_base 5: mod_base = OTHER; note = Uracil
  modified_base 16: mod_base = OTHER; note = Uracil
tctgtccaagcccggtt

SEQ ID NO: 4610 - DNA, 16 bp, synthetic construct
  misc_feature 1..16: note = Description of Artificial Sequence: Synthetic Antisense oligonucleotide
  misc_feature 1..16: note = Original Sequence: tcuguccaagcccggt
  modified_base 1: mod_base = OTHER; note = bicyclic nucleic acid (BNA)
  modified_base 16: mod_base = OTHER; note = bicyclic nucleic acid (BNA)
  modified_base 2: mod_base = OTHER; note = 5-methyl
  modified_base 6..7: mod_base = OTHER; note = 5-methyl
  modified_base 11..13: mod_base = OTHER; note = 5-methyl
  source 1..16: mol_type = other DNA
  modified_base 3: mod_base = OTHER; note = Uracil
  modified_base 5: mod_base = OTHER; note = Uracil
tctgtccaagcccggt

SEQ ID NO: 4611 - DNA, 15 bp, synthetic construct
  misc_feature 1..15: note = Description of Artificial Sequence: Synthetic Antisense oligonucleotide
  misc_feature 1..15: note = Original Sequence: tcuguccaagcccgg
  modified_base 1: mod_base = OTHER; note = bicyclic nucleic acid (BNA)
  modified_base 15: mod_base = OTHER; note = bicyclic nucleic acid (BNA)
  modified_base 2: mod_base = OTHER; note = 5-methyl
  modified_base 6..7: mod_base = OTHER; note = 5-methyl
  modified_base 11..13: mod_base = OTHER; note = 5-methyl
  source 1..15: mol_type = other DNA
  modified_base 3: mod_base = OTHER; note = Uracil
  modified_base 5: mod_base = OTHER; note = Uracil
tctgtccaagcccgg

SEQ ID NO: 4612 - DNA, 14 bp, synthetic construct
  misc_feature 1..14: note = Description of Artificial Sequence: Synthetic Antisense oligonucleotide
  misc_feature 1..14: note = Original Sequence: tcuguccaagcccg
  modified_base 1: mod_base = OTHER; note = bicyclic nucleic acid (BNA)
  modified_base 14: mod_base = OTHER; note = bicyclic nucleic acid (BNA)
  modified_base 2: mod_base = OTHER; note = 5-methyl
  modified_base 6..7: mod_base = OTHER; note = 5-methyl
  modified_base 11..13: mod_base = OTHER; note = 5-methyl
  source 1..14: mol_type = other DNA
  modified_base 3: mod_base = OTHER; note = Uracil
  modified_base 5: mod_base = OTHER; note = Uracil
tctgtccaagcccg

SEQ ID NO: 4613 - DNA, 13 bp, synthetic construct
  misc_feature 1..13: note = Description of Artificial Sequence: Synthetic Antisense oligonucleotide
  misc_feature 1..13: note = Original Sequence: tcuguccaagccc
  modified_base 1: mod_base = OTHER; note = bicyclic nucleic acid (BNA)
  modified_base 13: mod_base = OTHER; note = bicyclic nucleic acid (BNA)
  modified_base 2: mod_base = OTHER; note = 5-methyl
  modified_base 6..7: mod_base = OTHER; note = 5-methyl
  modified_base 11..13: mod_base = OTHER; note = 5-methyl
  source 1..13: mol_type = other DNA
  modified_base 3: mod_base = OTHER; note = Uracil
  modified_base 5: mod_base = OTHER; note = Uracil
tctgtccaagccc

SEQ ID NO: 4614 - DNA, 12 bp, synthetic construct
  misc_feature 1..12: note = Description of Artificial Sequence: Synthetic Antisense oligonucleotide
  misc_feature 1..12: note = Original Sequence: tcuguccaagcc
  modified_base 1: mod_base = OTHER; note = bicyclic nucleic acid (BNA)
  modified_base 12: mod_base = OTHER; note = bicyclic nucleic acid (BNA)
  modified_base 2: mod_base = OTHER; note = 5-methyl
  modified_base 6..7: mod_base = OTHER; note = 5-methyl
  modified_base 11..12: mod_base = OTHER; note = 5-methyl
  source 1..12: mol_type = other DNA
  modified_base 3: mod_base = OTHER; note = Uracil
  modified_base 5: mod_base = OTHER; note = Uracil
tctgtccaagcc

SEQ ID NO: 4615 - DNA, 11 bp, synthetic construct
  misc_feature 1..11: note = Description of Artificial Sequence: Synthetic Antisense oligonucleotide
  misc_feature 1..11: note = Original Sequence: tcuguccaagc
  modified_base 1: mod_base = OTHER; note = bicyclic nucleic acid (BNA)
  modified_base 11: mod_base = OTHER; note = bicyclic nucleic acid (BNA)
  modified_base 2: mod_base = OTHER; note = 5-methyl
  modified_base 6..7: mod_base = OTHER; note = 5-methyl
  modified_base 11: mod_base = OTHER; note = 5-methyl
  source 1..11: mol_type = other DNA
  modified_base 3: mod_base = OTHER; note = Uracil
  modified_base 5: mod_base = OTHER; note = Uracil
tctgtccaagc

SEQ ID NO: 4616 - DNA, 10 bp, synthetic construct
  misc_feature 1..10: note = Description of Artificial Sequence: Synthetic Antisense oligonucleotide
  misc_feature 1..10: note = Original Sequence: tcuguccaag
  modified_base 1: mod_base = OTHER; note = bicyclic nucleic acid (BNA)
  modified_base 10: mod_base = OTHER; note = bicyclic nucleic acid (BNA)
  modified_base 2: mod_base = OTHER; note = 5-methyl
  modified_base 6..7: mod_base = OTHER; note = 5-methyl
  source 1..10: mol_type = other DNA
  modified_base 3: mod_base = OTHER; note = Uracil
  modified_base 5: mod_base = OTHER; note = Uracil
tctgtccaag

SEQ ID NO: 4617-4618 - skipped (2 entries)

SEQ ID NO: 4619 - RNA, 17 nt, synthetic construct
  misc_feature 1..17: note = Description of Artificial Sequence: Synthetic Antisense oligonucleotide
  modified_base 1: mod_base = OTHER; note = 5-methyl
  modified_base 5..6: mod_base = OTHER; note = 5-methyl
  modified_base 10..12: mod_base = OTHER; note = 5-methyl
  modified_base 1: mod_base = OTHER; note = bicyclic nucleic acid (BNA)
  modified_base 17: mod_base = OTHER; note = bicyclic nucleic acid (BNA)
  source 1..17: mol_type = other RNA
ctgtccaagcccggttg

SEQ ID NO: 4620 - DNA, 16 bp, synthetic construct
  misc_feature 1..16: note = Description of Artificial Sequence: Synthetic Antisense oligonucleotide
  misc_feature 1..16: note = Original Sequence: cuguccaagcccggut
  modified_base 1: mod_base = OTHER; note = 5-methyl
  modified_base 5..6: mod_base = OTHER; note = 5-methyl
  modified_base 10..12: mod_base = OTHER; note = 5-methyl
  modified_base 1: mod_base = OTHER; note = bicyclic nucleic acid (BNA)
  modified_base 16: mod_base = OTHER; note = bicyclic nucleic acid (BNA)
  source 1..16: mol_type = other DNA
  modified_base 2: mod_base = OTHER; note = Uracil
  modified_base 4: mod_base = OTHER; note = Uracil
  modified_base 15: mod_base = OTHER; note = Uracil
ctgtccaagcccggtt

SEQ ID NO: 4621 - DNA, 15 bp, synthetic construct
  misc_feature 1..15: note = Description of Artificial Sequence: Synthetic Antisense oligonucleotide
  misc_feature 1..15: note = Original Sequence: cuguccaagcccggt
  modified_base 1: mod_base = OTHER; note = 5-methyl
  modified_base 5..6: mod_base = OTHER; note = 5-methyl
  modified_base 10..12: mod_base = OTHER; note = 5-methyl
  modified_base 1: mod_base = OTHER; note = bicyclic nucleic acid (BNA)
  modified_base 15: mod_base = OTHER; note = bicyclic nucleic acid (BNA)
  source 1..15: mol_type = other DNA
  modified_base 2: mod_base = OTHER; note = Uracil
  modified_base 4: mod_base = OTHER; note = Uracil
ctgtccaagcccggt

SEQ ID NO: 4622 - RNA, 14 nt, synthetic construct
  misc_feature 1..14: note = Description of Artificial Sequence: Synthetic Antisense oligonucleotide
  modified_base 1: mod_base = OTHER; note = 5-methyl
  modified_base 5..6: mod_base = OTHER; note = 5-methyl
  modified_base 10..12: mod_base = OTHER; note = 5-methyl
  modified_base 1: mod_base = OTHER; note = bicyclic nucleic acid (BNA)
  modified_base 14: mod_base = OTHER; note = bicyclic nucleic acid (BNA)
  source 1..14: mol_type = other RNA
ctgtccaagcccgg

SEQ ID NO: 4623 - RNA, 13 nt, synthetic construct
  misc_feature 1..13: note = Description of Artificial Sequence: Synthetic Antisense oligonucleotide
  modified_base 1: mod_base = OTHER; note = 5-methyl
  modified_base 5..6: mod_base = OTHER; note = 5-methyl
  modified_base 10..12: mod_base = OTHER; note = 5-methyl
  modified_base 1: mod_base = OTHER; note = bicyclic nucleic acid (BNA)
  modified_base 13: mod_base = OTHER; note = bicyclic nucleic acid (BNA)
  source 1..13: mol_type = other RNA
ctgtccaagcccg

SEQ ID NO: 4624 - RNA, 12 nt, synthetic construct
  misc_feature 1..12: note = Description of Artificial Sequence: Synthetic Antisense oligonucleotide
  modified_base 1: mod_base = OTHER; note = 5-methyl
  modified_base 5..6: mod_base = OTHER; note = 5-methyl
  modified_base 10..12: mod_base = OTHER; note = 5-methyl
  modified_base 1: mod_base = OTHER; note = bicyclic nucleic acid (BNA)
  modified_base 12: mod_base = OTHER; note = bicyclic nucleic acid (BNA)
  source 1..12: mol_type = other RNA
ctgtccaagccc

SEQ ID NO: 4625 - RNA, 11 nt, synthetic construct
  misc_feature 1..11: note = Description of Artificial Sequence: Synthetic Antisense oligonucleotide
  modified_base 1: mod_base = OTHER; note = 5-methyl
  modified_base 5..6: mod_base = OTHER; note = 5-methyl
  modified_base 10..11: mod_base = OTHER; note = 5-methyl
  modified_base 1: mod_base = OTHER; note = bicyclic nucleic acid (BNA)
  modified_base 11: mod_base = OTHER; note = bicyclic nucleic acid (BNA)
  source 1..11: mol_type = other RNA
ctgtccaagcc

SEQ ID NO: 4626 - RNA, 10 nt, synthetic construct
  misc_feature 1..10: note = Description of Artificial Sequence: Synthetic Antisense oligonucleotide
  modified_base 1: mod_base = OTHER; note = 5-methyl
  modified_base 5..6: mod_base = OTHER; note = 5-methyl
  modified_base 10: mod_base = OTHER; note = 5-methyl
  modified_base 1: mod_base = OTHER; note = bicyclic nucleic acid (BNA)
  modified_base 10: mod_base = OTHER; note = bicyclic nucleic acid (BNA)
  source 1..10: mol_type = other RNA
ctgtccaagc

SEQ ID NO: 4627-4628 - skipped (2 entries)

SEQ ID NO: 4629 - RNA, 20 nt, synthetic construct
  misc_feature 1..20: note = Description of Artificial Sequence: Synthetic Antisense oligonucleotide
  modified_base 1: mod_base = OTHER; note = bicyclic nucleic acid (BNA)
  modified_base 20: mod_base = OTHER; note = bicyclic nucleic acid (BNA)
  modified_base 4: mod_base = OTHER; note = 5-methyl
  modified_base 8..9: mod_base = OTHER; note = 5-methyl
  modified_base 13..15: mod_base = OTHER; note = 5-methyl
  source 1..20: mol_type = other RNA
gttctgtccaagcccggttg

SEQ ID NO: 4630 - DNA, 19 bp, synthetic construct
  misc_feature 1..19: note = Description of Artificial Sequence: Synthetic Antisense oligonucleotide
  misc_feature 1..19: note = Original Sequence: guucuguccaagcccggut
  modified_base 1: mod_base = OTHER; note = bicyclic nucleic acid (BNA)
  modified_base 19: mod_base = OTHER; note = bicyclic nucleic acid (BNA)
  modified_base 4: mod_base = OTHER; note = 5-methyl
  modified_base 8..9: mod_base = OTHER; note = 5-methyl
  modified_base 13..15: mod_base = OTHER; note = 5-methyl
  source 1..19: mol_type = other DNA
  modified_base 2: mod_base = OTHER; note = Uracil
  modified_base 3: mod_base = OTHER; note = Uracil
  modified_base 5: mod_base = OTHER; note = Uracil
  modified_base 7: mod_base = OTHER; note = Uracil
  modified_base 18: mod_base = OTHER; note = Uracil
gttctgtccaagcccggtt

SEQ ID NO: 4631 - DNA, 18 bp, synthetic construct
  misc_feature 1..18: note = Description of Artificial Sequence: Synthetic Antisense oligonucleotide
  misc_feature 1..18: note = Original Sequence: guucuguccaagcccggt
  modified_base 1: mod_base = OTHER; note = bicyclic nucleic acid (BNA)
  modified_base 18: mod_base = OTHER; note = bicyclic nucleic acid (BNA)
  modified_base 4: mod_base = OTHER; note = 5-methyl
  modified_base 8..9: mod_base = OTHER; note = 5-methyl
  modified_base 13..15: mod_base = OTHER; note = 5-methyl
  source 1..18: mol_type = other DNA
  modified_base 2: mod_base = OTHER; note = Uracil
  modified_base 3: mod_base = OTHER; note = Uracil
  modified_base 5: mod_base = OTHER; note = Uracil
  modified_base 7: mod_base = OTHER; note = Uracil
gttctgtccaagcccggt

SEQ ID NO: 4632 - RNA, 17 nt, synthetic construct
  misc_feature 1..17: note = Description of Artificial Sequence: Synthetic Antisense oligonucleotide
  modified_base 1: mod_base = OTHER; note = bicyclic nucleic acid (BNA)
  modified_base 17: mod_base = OTHER; note = bicyclic nucleic acid (BNA)
  modified_base 4: mod_base = OTHER; note = 5-methyl
  modified_base 8..9: mod_base = OTHER; note = 5-methyl
  modified_base 13..15: mod_base = OTHER; note = 5-methyl
  source 1..17: mol_type = other RNA
gttctgtccaagcccgg

SEQ ID NO: 4633 - RNA, 16 nt, synthetic construct
  misc_feature 1..16: note = Description of Artificial Sequence: Synthetic Antisense oligonucleotide
  modified_base 1: mod_base = OTHER; note = bicyclic nucleic acid (BNA)
  modified_base 16: mod_base = OTHER; note = bicyclic nucleic acid (BNA)
  modified_base 4: mod_base = OTHER; note = 5-methyl
  modified_base 8..9: mod_base = OTHER; note = 5-methyl
  modified_base 13..15: mod_base = OTHER; note = 5-methyl
  source 1..16: mol_type = other RNA
gttctgtccaagcccg

SEQ ID NO: 4634 - RNA, 15 nt, synthetic construct
  misc_feature 1..15: note = Description of Artificial Sequence: Synthetic Antisense oligonucleotide
  modified_base 1: mod_base = OTHER; note = bicyclic nucleic acid (BNA)
  modified_base 15: mod_base = OTHER; note = bicyclic nucleic acid (BNA)
  modified_base 4: mod_base = OTHER; note = 5-methyl
  modified_base 8..9: mod_base = OTHER; note = 5-methyl
  modified_base 13..15: mod_base = OTHER; note = 5-methyl
  source 1..15: mol_type = other RNA
gttctgtccaagccc

SEQ ID NO: 4635 - RNA, 14 nt, synthetic construct
  misc_feature 1..14: note = Description of Artificial Sequence: Synthetic Antisense oligonucleotide
  modified_base 1: mod_base = OTHER; note = bicyclic nucleic acid (BNA)
  modified_base 14: mod_base = OTHER; note = bicyclic nucleic acid (BNA)
  modified_base 4: mod_base = OTHER; note = 5-methyl
  modified_base 8..9: mod_base = OTHER; note = 5-methyl
  modified_base 13..14: mod_base = OTHER; note = 5-methyl
  source 1..14: mol_type = other RNA
gttctgtccaagcc

SEQ ID NO: 4636 - RNA, 13 nt, synthetic construct
  misc_feature 1..13: note = Description of Artificial Sequence: Synthetic Antisense oligonucleotide
  modified_base 1: mod_base = OTHER; note = bicyclic nucleic acid (BNA)
  modified_base 13: mod_base = OTHER; note = bicyclic nucleic acid (BNA)
  modified_base 4: mod_base = OTHER; note = 5-methyl
  modified_base 8..9: mod_base = OTHER; note = 5-methyl
  modified_base 13: mod_base = OTHER; note = 5-methyl
  source 1..13: mol_type = other RNA
gttctgtccaagc

SEQ ID NO: 4637 - RNA, 12 nt, synthetic construct
  misc_feature 1..12: note = Description of Artificial Sequence: Synthetic Antisense oligonucleotide
  modified_base 1: mod_base = OTHER; note = bicyclic nucleic acid (BNA)
  modified_base 12: mod_base = OTHER; note = bicyclic nucleic acid (BNA)
  modified_base 4: mod_base = OTHER; note = 5-methyl
  modified_base 8..9: mod_base = OTHER; note = 5-methyl
  source 1..12: mol_type = other RNA
gttctgtccaag

SEQ ID NO: 4638 - RNA, 11 nt, synthetic construct
  misc_feature 1..11: note = Description of Artificial Sequence: Synthetic Antisense oligonucleotide
  modified_base 1: mod_base = OTHER; note = bicyclic nucleic acid (BNA)
  modified_base 11: mod_base = OTHER; note = bicyclic nucleic acid (BNA)
  modified_base 4: mod_base = OTHER; note = 5-methyl
  modified_base 8..9: mod_base = OTHER; note = 5-methyl
  source 1..11: mol_type = other RNA
gttctgtccaa

SEQ ID NO: 4639 - RNA, 10 nt, synthetic construct
  misc_feature 1..10: note = Description of Artificial Sequence: Synthetic Antisense oligonucleotide
  modified_base 1: mod_base = OTHER; note = bicyclic nucleic acid (BNA)
  modified_base 10: mod_base = OTHER; note = bicyclic nucleic acid (BNA)
  modified_base 4: mod_base = OTHER; note = 5-methyl
  modified_base 8..9: mod_base = OTHER; note = 5-methyl
  source 1..10: mol_type = other RNA
gttctgtcca

SEQ ID NO: 4640-4641 - skipped (2 entries)

SEQ ID NO: 4642 - DNA, 20 bp, synthetic construct
  misc_feature 1..20: note = Description of Artificial Sequence: Synthetic Antisense oligonucleotide
  misc_feature 1..20: note = Original Sequence: aguucuguccaagcccggut
  modified_base 1: mod_base = OTHER; note = bicyclic nucleic acid (BNA)
  modified_base 20: mod_base = OTHER; note = bicyclic nucleic acid (BNA)
  modified_base 5: mod_base = OTHER; note = 5-methyl
  modified_base 9..10: mod_base = OTHER; note = 5-methyl
  modified_base 14..16: mod_base = OTHER; note = 5-methyl
  source 1..20: mol_type = other DNA
  modified_base 3: mod_base = OTHER; note = Uracil
  modified_base 4: mod_base = OTHER; note = Uracil
  modified_base 6: mod_base = OTHER; note = Uracil
  modified_base 8: mod_base = OTHER; note = Uracil
  modified_base 19: mod_base = OTHER; note = Uracil
agttctgtccaagcccggtt

SEQ ID NO: 4643 - DNA, 19 bp, synthetic construct
  misc_feature 1..19: note = Description of Artificial Sequence: Synthetic Antisense oligonucleotide
  misc_feature 1..19: note = Original Sequence: aguucuguccaagcccggt
  modified_base 1: mod_base = OTHER; note = bicyclic nucleic acid (BNA)
  modified_base 19: mod_base = OTHER; note = bicyclic nucleic acid (BNA)
  modified_base 5: mod_base = OTHER; note = 5-methyl
  modified_base 9..10: mod_base = OTHER; note = 5-methyl
  modified_base 14..16: mod_base = OTHER; note = 5-methyl
  source 1..19: mol_type = other DNA
  modified_base 3: mod_base = OTHER; note = Uracil
  modified_base 4: mod_base = OTHER; note = Uracil
  modified_base 6: mod_base = OTHER; note = Uracil
  modified_base 8: mod_base = OTHER; note = Uracil
agttctgtccaagcccggt

SEQ ID NO: 4644 - RNA, 18 nt, synthetic construct
  misc_feature 1..18: note = Description of Artificial Sequence: Synthetic Antisense oligonucleotide
  modified_base 1: mod_base = OTHER; note = bicyclic nucleic acid (BNA)
  modified_base 18: mod_base = OTHER; note = bicyclic nucleic acid (BNA)
  modified_base 5: mod_base = OTHER; note = 5-methyl
  modified_base 9..10: mod_base = OTHER; note = 5-methyl
  modified_base 14..16: mod_base = OTHER; note = 5-methyl
  source 1..18: mol_type = other RNA
agttctgtccaagcccgg

SEQ ID NO: 4645 - RNA, 17 nt, synthetic construct
  misc_feature 1..17: note = Description of Artificial Sequence: Synthetic Antisense oligonucleotide
  modified_base 1: mod_base = OTHER; note = bicyclic nucleic acid (BNA)
  modified_base 17: mod_base = OTHER; note = bicyclic nucleic acid (BNA)
  modified_base 5: mod_base = OTHER; note = 5-methyl
  modified_base 9..10: mod_base = OTHER; note = 5-methyl
  modified_base 14..16: mod_base = OTHER; note = 5-methyl
  source 1..17: mol_type = other RNA
agttctgtccaagcccg

SEQ ID NO: 4646 - RNA, 16 nt, synthetic construct
  misc_feature 1..16: note = Description of Artificial Sequence: Synthetic Antisense oligonucleotide
  modified_base 1: mod_base = OTHER; note = bicyclic nucleic acid (BNA)
  modified_base 16: mod_base = OTHER; note = bicyclic nucleic acid (BNA)
  modified_base 5: mod_base = OTHER; note = 5-methyl
  modified_base 9..10: mod_base = OTHER; note = 5-methyl
  modified_base 14..16: mod_base = OTHER; note = 5-methyl
  source 1..16: mol_type = other RNA
agttctgtccaagccc

SEQ ID NO: 4647 - RNA, 15 nt, synthetic construct
  misc_feature 1..15: note = Description of Artificial Sequence: Synthetic Antisense oligonucleotide
  modified_base 1: mod_base = OTHER; note = bicyclic nucleic acid (BNA)
  modified_base 15: mod_base = OTHER; note = bicyclic nucleic acid (BNA)
  modified_base 5: mod_base = OTHER; note = 5-methyl
  modified_base 9..10: mod_base = OTHER; note = 5-methyl
  modified_base 14..15: mod_base = OTHER; note = 5-methyl
  source 1..15: mol_type = other RNA
agttctgtccaagcc

SEQ ID NO: 4648 - RNA, 14 nt, synthetic construct
  misc_feature 1..14: note = Description of Artificial Sequence: Synthetic Antisense oligonucleotide
  modified_base 1: mod_base = OTHER; note = bicyclic nucleic acid (BNA)
  modified_base 14: mod_base = OTHER; note = bicyclic nucleic acid (BNA)
  modified_base 5: mod_base = OTHER; note = 5-methyl
  modified_base 9..10: mod_base = OTHER; note = 5-methyl
  modified_base 14: mod_base = OTHER; note = 5-methyl
  source 1..14: mol_type = other RNA
agttctgtccaagc

SEQ ID NO: 4649 - RNA, 13 nt, synthetic construct
  misc_feature 1..13: note = Description of Artificial Sequence: Synthetic Antisense oligonucleotide
  modified_base 1: mod_base = OTHER; note = bicyclic nucleic acid (BNA)
  modified_base 13: mod_base = OTHER; note = bicyclic nucleic acid (BNA)
  modified_base 5: mod_base = OTHER; note = 5-methyl
  modified_base 9..10: mod_base = OTHER; note = 5-methyl
  source 1..13: mol_type = other RNA
agttctgtccaag

SEQ ID NO: 4650 - RNA, 12 nt, synthetic construct
  misc_feature 1..12: note = Description of Artificial Sequence: Synthetic Antisense oligonucleotide
  modified_base 1: mod_base = OTHER; note = bicyclic nucleic acid (BNA)
  modified_base 12: mod_base = OTHER; note = bicyclic nucleic acid (BNA)
  modified_base 5: mod_base = OTHER; note = 5-methyl
  modified_base 9..10: mod_base = OTHER; note = 5-methyl
  source 1..12: mol_type = other RNA
agttctgtccaa

SEQ ID NO: 4651 - RNA, 11 nt, synthetic construct
  misc_feature 1..11: note = Description of Artificial Sequence: Synthetic Antisense oligonucleotide
  modified_base 1: mod_base = OTHER; note = bicyclic nucleic acid (BNA)
  modified_base 11: mod_base = OTHER; note = bicyclic nucleic acid (BNA)
  modified_base 5: mod_base = OTHER; note = 5-methyl
  modified_base 9..10: mod_base = OTHER; note = 5-methyl
  source 1..11: mol_type = other RNA
agttctgtcca

SEQ ID NO: 4652 - RNA, 10 nt, synthetic construct
  misc_feature 1..10: note = Description of Artificial Sequence: Synthetic Antisense oligonucleotide
  modified_base 1: mod_base = OTHER; note = bicyclic nucleic acid (BNA)
  modified_base 10: mod_base = OTHER; note = bicyclic nucleic acid (BNA)
  modified_base 5: mod_base = OTHER; note = 5-methyl
  modified_base 9..10: mod_base = OTHER; note = 5-methyl
  source 1..10: mol_type = other RNA
agttctgtcc

SEQ ID NO: 4653-4654 - skipped (2 entries)

SEQ ID NO: 4655 - DNA, 20 bp, synthetic construct
  misc_feature 1..20: note = Description of Artificial Sequence: Synthetic Antisense oligonucleotide
  misc_feature 1..20: note = Original Sequence: aaguucuguccaagcccggt
  modified_base 1: mod_base = OTHER; note = bicyclic nucleic acid (BNA)
  modified_base 20: mod_base = OTHER; note = bicyclic nucleic acid (BNA)
  modified_base 6: mod_base = OTHER; note = 5-methyl
  modified_base 10..11: mod_base = OTHER; note = 5-methyl
  modified_base 15..17: mod_base = OTHER; note = 5-methyl
  source 1..20: mol_type = other DNA
  modified_base 4: mod_base = OTHER; note = Uracil
  modified_base 5: mod_base = OTHER; note = Uracil
  modified_base 7: mod_base = OTHER; note = Uracil
  modified_base 9: mod_base = OTHER; note = Uracil
aagttctgtccaagcccggt

SEQ ID NO: 4656 - RNA, 19 nt, synthetic construct
  misc_feature 1..19: note = Description of Artificial Sequence: Synthetic Antisense oligonucleotide
  modified_base 1: mod_base = OTHER; note = bicyclic nucleic acid (BNA)
  modified_base 19: mod_base = OTHER; note = bicyclic nucleic acid (BNA)
  modified_base 6: mod_base = OTHER; note = 5-methyl
  modified_base 10..11: mod_base = OTHER; note = 5-methyl
  modified_base 15..17: mod_base = OTHER; note = 5-methyl
  source 1..19: mol_type = other RNA
aagttctgtccaagcccgg

SEQ ID NO: 4657 - RNA, 18 nt, synthetic construct
  misc_feature 1..18: note = Description of Artificial Sequence: Synthetic Antisense oligonucleotide
  modified_base 1: mod_base = OTHER; note = bicyclic nucleic acid (BNA)
  modified_base 18: mod_base = OTHER; note = bicyclic nucleic acid (BNA)
  modified_base 6: mod_base = OTHER; note = 5-methyl
  modified_base 10..11: mod_base = OTHER; note = 5-methyl
  modified_base 15..17: mod_base = OTHER; note = 5-methyl
  source 1..18: mol_type = other RNA
aagttctgtccaagcccg

SEQ ID NO: 4658 - RNA, 17 nt, synthetic construct
  misc_feature 1..17: note = Description of Artificial Sequence: Synthetic Antisense oligonucleotide
  modified_base 1: mod_base = OTHER; note = bicyclic nucleic acid (BNA)
  modified_base 17: mod_base = OTHER; note = bicyclic nucleic acid (BNA)
  modified_base 6: mod_base = OTHER; note = 5-methyl
  modified_base 10..11: mod_base = OTHER; note = 5-methyl
  modified_base 15..17: mod_base = OTHER; note = 5-methyl
  source 1..17: mol_type = other RNA
aagttctgtccaagccc

SEQ ID NO: 4659 - RNA, 16 nt, synthetic construct
  misc_feature 1..16: note = Description of Artificial Sequence: Synthetic Antisense oligonucleotide
  modified_base 1: mod_base = OTHER; note = bicyclic nucleic acid (BNA)
  modified_base 16: mod_base = OTHER; note = bicyclic nucleic acid (BNA)
  modified_base 6: mod_base = OTHER; note = 5-methyl
  modified_base 10..11: mod_base = OTHER; note = 5-methyl
  modified_base 15..16: mod_base = OTHER; note = 5-methyl
  source 1..16: mol_type = other RNA
aagttctgtccaagcc

SEQ ID NO: 4660 - RNA, 15 nt, synthetic construct
  misc_feature 1..15: note = Description of Artificial Sequence: Synthetic Antisense oligonucleotide
  modified_base 1: mod_base = OTHER; note = bicyclic nucleic acid (BNA)
  modified_base 15: mod_base = OTHER; note = bicyclic nucleic acid (BNA)
  modified_base 6: mod_base = OTHER; note = 5-methyl
  modified_base 10..11: mod_base = OTHER; note = 5-methyl
  modified_base 15: mod_base = OTHER; note = 5-methyl
  source 1..15: mol_type = other RNA
aagttctgtccaagc

SEQ ID NO: 4661 - RNA, 14 nt, synthetic construct
  misc_feature 1..14: note = Description of Artificial Sequence: Synthetic Antisense oligonucleotide
  modified_base 1: mod_base = OTHER; note = bicyclic nucleic acid (BNA)
  modified_base 14: mod_base = OTHER; note = bicyclic nucleic acid (BNA)
  modified_base 6: mod_base = OTHER; note = 5-methyl
  modified_base 10..11: mod_base = OTHER; note = 5-methyl
  source 1..14: mol_type = other RNA
aagttctgtccaag

SEQ ID NO: 4662 - RNA, 13 nt, synthetic construct
  misc_feature 1..13: note = Description of Artificial Sequence: Synthetic Antisense oligonucleotide
  modified_base 1: mod_base = OTHER; note = bicyclic nucleic acid (BNA)
  modified_base 13: mod_base = OTHER; note = bicyclic nucleic acid (BNA)
  modified_base 6: mod_base = OTHER; note = 5-methyl
  modified_base 10..11: mod_base = OTHER; note = 5-methyl
  source 1..13: mol_type = other RNA
aagttctgtccaa

SEQ ID NO: 4663 - RNA, 12 nt, synthetic construct
  misc_feature 1..12: note = Description of Artificial Sequence: Synthetic Antisense oligonucleotide
  modified_base 1: mod_base = OTHER; note = bicyclic nucleic acid (BNA)
  modified_base 12: mod_base = OTHER; note = bicyclic nucleic acid (BNA)
  modified_base 6: mod_base = OTHER; note = 5-methyl
  modified_base 10..11: mod_base = OTHER; note = 5-methyl
  source 1..12: mol_type = other RNA
aagttctgtcca

SEQ ID NO: 4664 - RNA, 11 nt, synthetic construct
  misc_feature 1..11: note = Description of Artificial Sequence: Synthetic Antisense oligonucleotide
  modified_base 1: mod_base = OTHER; note = bicyclic nucleic acid (BNA)
  modified_base 11: mod_base = OTHER; note = bicyclic nucleic acid (BNA)
  modified_base 6: mod_base = OTHER; note = 5-methyl
  modified_base 10..11: mod_base = OTHER; note = 5-methyl
  source 1..11: mol_type = other RNA
aagttctgtcc

SEQ ID NO: 4665 - RNA, 10 nt, synthetic construct
  misc_feature 1..10: note = Description of Artificial Sequence: Synthetic Antisense oligonucleotide
  modified_base 1: mod_base = OTHER; note = bicyclic nucleic acid (BNA)
  modified_base 10: mod_base = OTHER; note = bicyclic nucleic acid (BNA)
  modified_base 6: mod_base = OTHER; note = 5-methyl
  modified_base 10: mod_base = OTHER; note = 5-methyl
  source 1..10: mol_type = other RNA
aagttctgtc

SEQ ID NO: 4666-4667 - skipped (2 entries)

SEQ ID NO: 4668 - DNA, 20 bp, synthetic construct
  misc_feature 1..20: note = Description of Artificial Sequence: Synthetic Antisense oligonucleotide
  misc_feature 1..20: note = Original Sequence: taaguucuguccaagcccgg
  modified_base 1: mod_base = OTHER; note = bicyclic nucleic acid (BNA)
  modified_base 20: mod_base = OTHER; note = bicyclic nucleic acid (BNA)
  modified_base 7: mod_base = OTHER; note = 5-methyl
  modified_base 11..12: mod_base = OTHER; note = 5-methyl
  modified_base 16..18: mod_base = OTHER; note = 5-methyl
  source 1..20: mol_type = other DNA
  modified_base 5: mod_base = OTHER; note = Uracil
  modified_base 6: mod_base = OTHER; note = Uracil
  modified_base 8: mod_base = OTHER; note = Uracil
  modified_base 10: mod_base = OTHER; note = Uracil
taagttctgtccaagcccgg

SEQ ID NO: 4669 - DNA, 19 bp, synthetic construct
  misc_feature 1..19: note = Description of Artificial Sequence: Synthetic Antisense oligonucleotide
  misc_feature 1..19: note = Original Sequence: taaguucuguccaagcccg
  modified_base 1: mod_base = OTHER; note = bicyclic nucleic acid (BNA)
  modified_base 19: mod_base = OTHER; note = bicyclic nucleic acid (BNA)
  modified_base 7: mod_base = OTHER; note = 5-methyl
  modified_base 11..12: mod_base = OTHER; note = 5-methyl
  modified_base 16..18: mod_base = OTHER; note = 5-methyl
  source 1..19: mol_type = other DNA
  modified_base 5: mod_base = OTHER; note = Uracil
  modified_base 6: mod_base = OTHER; note = Uracil
  modified_base 8: mod_base = OTHER; note = Uracil
  modified_base 10: mod_base = OTHER; note = Uracil
taagttctgtccaagcccg

SEQ ID NO: 4670 - DNA, 18 bp, synthetic construct
  misc_feature 1..18: note = Description of Artificial Sequence: Synthetic Antisense oligonucleotide
  misc_feature 1..18: note = Original Sequence: taaguucuguccaagccc
  modified_base 1: mod_base = OTHER; note = bicyclic nucleic acid (BNA)
  modified_base 18: mod_base = OTHER; note = bicyclic nucleic acid (BNA)
  modified_base 7: mod_base = OTHER; note = 5-methyl
  modified_base 11..12: mod_base = OTHER; note = 5-methyl
  modified_base 16..18: mod_base = OTHER; note = 5-methyl
  source 1..18: mol_type = other DNA
  modified_base 5: mod_base = OTHER; note = Uracil
  modified_base 6: mod_base = OTHER; note = Uracil
  modified_base 8: mod_base = OTHER; note = Uracil
  modified_base 10: mod_base = OTHER; note = Uracil
taagttctgtccaagccc

SEQ ID NO: 4671 - DNA, 17 bp, synthetic construct
  misc_feature 1..17: note = Description of Artificial Sequence: Synthetic Antisense oligonucleotide
  misc_feature 1..17: note = Original Sequence: taaguucuguccaagcc
  modified_base 1: mod_base = OTHER; note = bicyclic nucleic acid (BNA)
  modified_base 17: mod_base = OTHER; note = bicyclic nucleic acid (BNA)
  modified_base 7: mod_base = OTHER; note = 5-methyl
  modified_base 11..12: mod_base = OTHER; note = 5-methyl
  modified_base 16..17: mod_base = OTHER; note = 5-methyl
  source 1..17: mol_type = other DNA
  modified_base 5: mod_base = OTHER; note = Uracil
  modified_base 6: mod_base = OTHER; note = Uracil
  modified_base 8: mod_base = OTHER; note = Uracil
  modified_base 10: mod_base = OTHER; note = Uracil
taagttctgtccaagcc

SEQ ID NO: 4672 - DNA, 16 bp, synthetic construct
  misc_feature 1..16: note = Description of Artificial Sequence: Synthetic Antisense oligonucleotide
  misc_feature 1..16: note = Original Sequence: taaguucuguccaagc
  modified_base 1: mod_base = OTHER; note = bicyclic nucleic acid (BNA)
  modified_base 16: mod_base = OTHER; note = bicyclic nucleic acid (BNA)
  modified_base 7: mod_base = OTHER; note = 5-methyl
  modified_base 11..12: mod_base = OTHER; note = 5-methyl
  modified_base 16: mod_base = OTHER; note = 5-methyl
  source 1..16: mol_type = other DNA
  modified_base 5: mod_base = OTHER; note = Uracil
  modified_base 6: mod_base = OTHER; note = Uracil
  modified_base 8: mod_base = OTHER; note = Uracil
  modified_base 10: mod_base = OTHER; note = Uracil
taagttctgtccaagc

SEQ ID NO: 4673 - DNA, 14 bp, synthetic construct
  misc_feature 1..14: note = Description of Artificial Sequence: Synthetic Antisense oligonucleotide
  misc_feature 1..14: note = Original Sequence: taaguucuguccaa
  modified_base 1: mod_base = OTHER; note = bicyclic nucleic acid (BNA)
  modified_base 14: mod_base = OTHER; note = bicyclic nucleic acid (BNA)
  modified_base 7: mod_base = OTHER; note = 5-methyl
  modified_base 11..12: mod_base = OTHER; note = 5-methyl
  source 1..14: mol_type = other DNA
  modified_base 5: mod_base = OTHER; note = Uracil
  modified_base 6: mod_base = OTHER; note = Uracil
  modified_base 8: mod_base = OTHER; note = Uracil
  modified_base 10: mod_base = OTHER; note = Uracil
taagttctgtccaa

SEQ ID NO: 4674 - DNA, 13 bp, synthetic construct
  misc_feature 1..13: note = Description of Artificial Sequence: Synthetic Antisense oligonucleotide
  misc_feature 1..13: note = Original Sequence: taaguucugucca
  modified_base 1: mod_base = OTHER; note = bicyclic nucleic acid (BNA)
  modified_base 13: mod_base = OTHER; note = bicyclic nucleic acid (BNA)
  modified_base 7: mod_base = OTHER; note = 5-methyl
  modified_base 11..12: mod_base = OTHER; note = 5-methyl
  source 1..13: mol_type = other DNA
  modified_base 5: mod_base = OTHER; note = Uracil
  modified_base 6: mod_base = OTHER; note = Uracil
  modified_base 8: mod_base = OTHER; note = Uracil
  modified_base 10: mod_base = OTHER; note = Uracil
taagttctgtcca

SEQ ID NO: 4675 - DNA, 12 bp, synthetic construct
  misc_feature 1..12: note = Description of Artificial Sequence: Synthetic Antisense oligonucleotide
  misc_feature 1..12: note = Original Sequence: taaguucugucc
  modified_base 1: mod_base = OTHER; note = bicyclic nucleic acid (BNA)
  modified_base 12: mod_base = OTHER; note = bicyclic nucleic acid (BNA)
  modified_base 7: mod_base = OTHER; note = 5-methyl
  modified_base 11..12: mod_base = OTHER; note = 5-methyl
  source 1..12: mol_type = other DNA
  modified_base 5: mod_base = OTHER; note = Uracil
  modified_base 6: mod_base = OTHER; note = Uracil
  modified_base 8: mod_base = OTHER; note = Uracil
  modified_base 10: mod_base = OTHER; note = Uracil
taagttctgtcc

SEQ ID NO: 4676 - DNA, 11 bp, synthetic construct
  misc_feature 1..11: note = Description of Artificial Sequence: Synthetic Antisense oligonucleotide
  misc_feature 1..11: note = Original Sequence: taaguucuguc
  modified_base 1: mod_base = OTHER; note = bicyclic nucleic acid (BNA)
  modified_base 11: mod_base = OTHER; note = bicyclic nucleic acid (BNA)
  modified_base 7: mod_base = OTHER; note = 5-methyl
  modified_base 11: mod_base = OTHER; note = 5-methyl
  source 1..11: mol_type = other DNA
  modified_base 5: mod_base = OTHER; note = Uracil
  modified_base 6: mod_base = OTHER; note = Uracil
  modified_base 8: mod_base = OTHER; note = Uracil
  modified_base 10: mod_base = OTHER; note = Uracil
taagttctgtc

SEQ ID NO: 4677 - DNA, 10 bp, synthetic construct
  misc_feature 1..10: note = Description of Artificial Sequence: Synthetic Antisense oligonucleotide
  misc_feature 1..10: note = Original Sequence: taaguucugt
  modified_base 1: mod_base = OTHER; note = bicyclic nucleic acid (BNA)
  modified_base 10: mod_base = OTHER; note = bicyclic nucleic acid (BNA)
  modified_base 7: mod_base = OTHER; note = 5-methyl
  source 1..10: mol_type = other DNA
  modified_base 5: mod_base = OTHER; note = Uracil
  modified_base 6: mod_base = OTHER; note = Uracil
  modified_base 8: mod_base = OTHER; note = Uracil
taagttctgt

SEQ ID NO: 4678-4679 - skipped (2 entries)

SEQ ID NO: 4680 - RNA, 20 nt, synthetic construct
  misc_feature 1..20: note = Description of Artificial Sequence: Synthetic Antisense oligonucleotide
  modified_base 1: mod_base = OTHER; note = bicyclic nucleic acid (BNA)
  modified_base 20: mod_base = OTHER; note = bicyclic nucleic acid (BNA)
  modified_base 8: mod_base = OTHER; note = 5-methyl
  modified_base 12..13: mod_base = OTHER; note = 5-methyl
  modified_base 17..19: mod_base = OTHER; note = 5-methyl
  source 1..20: mol_type = other RNA
gtaagttctgtccaagcccg

SEQ ID NO: 4681 - RNA, 19 nt, synthetic construct
  misc_feature 1..19: note = Description of Artificial Sequence: Synthetic Antisense oligonucleotide
  modified_base 1: mod_base = OTHER; note = bicyclic nucleic acid (BNA)
  modified_base 19: mod_base = OTHER; note = bicyclic nucleic acid (BNA)
  modified_base 8: mod_base = OTHER; note = 5-methyl
  modified_base 12..13: mod_base = OTHER; note = 5-methyl
  modified_base 17..19: mod_base = OTHER; note = 5-methyl
  source 1..19: mol_type = other RNA
gtaagttctgtccaagccc

SEQ ID NO: 4682 - RNA, 17 nt, synthetic construct
  misc_feature 1..17: note = Description of Artificial Sequence: Synthetic Antisense oligonucleotide
  modified_base 1: mod_base = OTHER; note = bicyclic nucleic acid (BNA)
  modified_base 17: mod_base = OTHER; note = bicyclic nucleic acid (BNA)
  modified_base 8: mod_base = OTHER; note = 5-methyl
  modified_base 12..13: mod_base = OTHER; note = 5-methyl
  modified_base 17: mod_base = OTHER; note = 5-methyl
  source 1..17: mol_type = other RNA
gtaagttctgtccaagc

SEQ ID NO: 4683 - RNA, 16 nt, synthetic construct
  misc_feature 1..16: note = Description of Artificial Sequence: Synthetic Antisense oligonucleotide
  modified_base 1: mod_base = OTHER; note = bicyclic nucleic acid (BNA)
  modified_base 16: mod_base = OTHER; note = bicyclic nucleic acid (BNA)
  modified_base 8: mod_base = OTHER; note = 5-methyl
  modified_base 12..13: mod_base = OTHER; note = 5-methyl
  source 1..16: mol_type = other RNA
gtaagttctgtccaag

SEQ ID NO: 4684 - RNA, 15 nt, synthetic construct
  misc_feature 1..15: note = Description of Artificial Sequence: Synthetic Antisense oligonucleotide
  modified_base 1: mod_base = OTHER; note = bicyclic nucleic acid (BNA)
  modified_base 15: mod_base = OTHER; note = bicyclic nucleic acid (BNA)
  modified_base 8: mod_base = OTHER; note = 5-methyl
  modified_base 12..13: mod_base = OTHER; note = 5-methyl
  source 1..15: mol_type = other RNA
gtaagttctgtccaa

SEQ ID NO: 4685 - RNA, 14 nt, synthetic construct
  misc_feature 1..14: note = Description of Artificial Sequence: Synthetic Antisense oligonucleotide
  modified_base 1: mod_base = OTHER; note = bicyclic nucleic acid (BNA)
  modified_base 14: mod_base = OTHER; note = bicyclic nucleic acid (BNA)
  modified_base 8: mod_base = OTHER; note = 5-methyl
  modified_base 12..13: mod_base = OTHER; note = 5-methyl
  source 1..14: mol_type = other RNA
gtaagttctgtcca

SEQ ID NO: 4686 - RNA, 13 nt, synthetic construct
  misc_feature 1..13: note = Description of Artificial Sequence: Synthetic Antisense oligonucleotide
  modified_base 1: mod_base = OTHER; note = bicyclic nucleic acid (BNA)
  modified_base 13: mod_base = OTHER; note = bicyclic nucleic acid (BNA)
  modified_base 8: mod_base = OTHER; note = 5-methyl
  modified_base 12..13: mod_base = OTHER; note = 5-methyl
  source 1..13: mol_type = other RNA
gtaagttctgtcc

SEQ ID NO: 4687 - RNA, 12 nt, synthetic construct
  misc_feature 1..12: note = Description of Artificial Sequence: Synthetic Antisense oligonucleotide
  modified_base 1: mod_base = OTHER; note = bicyclic nucleic acid (BNA)
  modified_base 12: mod_base = OTHER; note = bicyclic nucleic acid (BNA)
  modified_base 8: mod_base = OTHER; note = 5-methyl
  modified_base 12: mod_base = OTHER; note = 5-methyl
  source 1..12: mol_type = other RNA
gtaagttctgtc

SEQ ID NO: 4688 - DNA, 11 bp, synthetic construct
  misc_feature 1..11: note = Description of Artificial Sequence: Synthetic Antisense oligonucleotide
  misc_feature 1..11: note = Original Sequence: guaaguucugt
  modified_base 1: mod_base = OTHER; note = bicyclic nucleic acid (BNA)
  modified_base 11: mod_base = OTHER; note = bicyclic nucleic acid (BNA)
  modified_base 8: mod_base = OTHER; note = 5-methyl
  source 1..11: mol_type = other DNA
  modified_base 2: mod_base = OTHER; note = Uracil
  modified_base 6: mod_base = OTHER; note = Uracil
  modified_base 7: mod_base = OTHER; note = Uracil
  modified_base 9: mod_base = OTHER; note = Uracil
gtaagttctgt

SEQ ID NO: 4689 - RNA, 10 nt, synthetic construct
  misc_feature 1..10: note = Description of Artificial Sequence: Synthetic Antisense oligonucleotide
  modified_base 1: mod_base = OTHER; note = bicyclic nucleic acid (BNA)
  modified_base 10: mod_base = OTHER; note = bicyclic nucleic acid (BNA)
  modified_base 8: mod_base = OTHER; note = 5-methyl
  source 1..10: mol_type = other RNA
gtaagttctg

SEQ ID NO: 4690-4691 - skipped (2 entries)

SEQ ID NO: 4692 - RNA, 20 nt, synthetic construct
  misc_feature 1..20: note = Description of Artificial Sequence: Synthetic Antisense oligonucleotide
  modified_base 1: mod_base = OTHER; note = bicyclic nucleic acid (BNA)
  modified_base 20: mod_base = OTHER; note = bicyclic nucleic acid (BNA)
  modified_base 9: mod_base = OTHER; note = 5-methyl
  modified_base 13..14: mod_base = OTHER; note = 5-methyl
  modified_base 18..20: mod_base = OTHER; note = 5-methyl
  source 1..20: mol_type = other RNA
ggtaagttctgtccaagccc

SEQ ID NO: 4693 - RNA, 19 nt, synthetic construct
  misc_feature 1..19: note = Description of Artificial Sequence: Synthetic Antisense oligonucleotide
  modified_base 1: mod_base = OTHER; note = bicyclic nucleic acid (BNA)
  modified_base 19: mod_base = OTHER; note = bicyclic nucleic acid (BNA)
  modified_base 9: mod_base = OTHER; note = 5-methyl
  modified_base 13..14: mod_base = OTHER; note = 5-methyl
  modified_base 18..19: mod_base = OTHER; note = 5-methyl
  source 1..19: mol_type = other RNA
ggtaagttctgtccaagcc

SEQ ID NO: 4694 - RNA, 17 nt, synthetic construct
  misc_feature 1..17: note = Description of Artificial Sequence: Synthetic Antisense oligonucleotide
  modified_base 1: mod_base = OTHER; note = bicyclic nucleic acid (BNA)
  modified_base 17: mod_base = OTHER; note = bicyclic nucleic acid (BNA)
  modified_base 9: mod_base = OTHER; note = 5-methyl
  modified_base 13..14: mod_base = OTHER; note = 5-methyl
  source 1..17: mol_type = other RNA
ggtaagttctgtccaag

SEQ ID NO: 4695 - RNA, 16 nt, synthetic construct
  misc_feature 1..16: note = Description of Artificial Sequence: Synthetic Antisense oligonucleotide
  modified_base 1: mod_base = OTHER; note = bicyclic nucleic acid (BNA)
  modified_base 16: mod_base = OTHER; note = bicyclic nucleic acid (BNA)
  modified_base 9: mod_base = OTHER; note = 5-methyl
  modified_base 13..14: mod_base = OTHER; note = 5-methyl
  source 1..16: mol_type = other RNA
ggtaagttctgtccaa

SEQ ID NO: 4696 - RNA, 15 nt, synthetic construct
  misc_feature 1..15: note = Description of Artificial Sequence: Synthetic Antisense oligonucleotide
  modified_base 1: mod_base = OTHER; note = bicyclic nucleic acid (BNA)
  modified_base 15: mod_base = OTHER; note = bicyclic nucleic acid (BNA)
  modified_base 9: mod_base = OTHER; note = 5-methyl
  modified_base 13..14: mod_base = OTHER; note = 5-methyl
  source 1..15: mol_type = other RNA
ggtaagttctgtcca

SEQ ID NO: 4697 - RNA, 14 nt, synthetic construct
  misc_feature 1..14: note = Description of Artificial Sequence: Synthetic Antisense oligonucleotide
  modified_base 1: mod_base = OTHER; note = bicyclic nucleic acid (BNA)
  modified_base 14: mod_base = OTHER; note = bicyclic nucleic acid (BNA)
  modified_base 9: mod_base = OTHER; note = 5-methyl
  modified_base 13..14: mod_base = OTHER; note = 5-methyl
  source 1..14: mol_type = other RNA
ggtaagttctgtcc

SEQ ID NO: 4698 - RNA, 13 nt, synthetic construct
  misc_feature 1..13: note = Description of Artificial Sequence: Synthetic Antisense oligonucleotide
  modified_base 1: mod_base = OTHER; note = bicyclic nucleic acid (BNA)
  modified_base 13: mod_base = OTHER; note = bicyclic nucleic acid (BNA)
  modified_base 9: mod_base = OTHER; note = 5-methyl
  modified_base 13: mod_base = OTHER; note = 5-methyl
  source 1..13: mol_type = other RNA
ggtaagttctgtc

SEQ ID NO: 4699 - DNA, 12 bp, synthetic construct
  misc_feature 1..12: note = Description of Artificial Sequence: Synthetic Antisense oligonucleotide
  misc_feature 1..12: note = Original Sequence: gguaaguucugt
  modified_base 1: mod_base = OTHER; note = bicyclic nucleic acid (BNA)
  modified_base 12: mod_base = OTHER; note = bicyclic nucleic acid (BNA)
  modified_base 9: mod_base = OTHER; note = 5-methyl
  source 1..12: mol_type = other DNA
  modified_base 3: mod_base = OTHER; note = Uracil
  modified_base 7: mod_base = OTHER; note = Uracil
  modified_base 8: mod_base = OTHER; note = Uracil
  modified_base 10: mod_base = OTHER; note = Uracil
ggtaagttctgt

SEQ ID NO: 4700 - RNA, 11 nt, synthetic construct
  misc_feature 1..11: note = Description of Artificial Sequence: Synthetic Antisense oligonucleotide
  modified_base 1: mod_base = OTHER; note = bicyclic nucleic acid (BNA)
  modified_base 11: mod_base = OTHER; note = bicyclic nucleic acid (BNA)
  modified_base 9: mod_base = OTHER; note = 5-methyl
  source 1..11: mol_type = other RNA
ggtaagttctg

SEQ ID NO: 4701 - DNA, 10 bp, synthetic construct
  misc_feature 1..10: note = Description of Artificial Sequence: Synthetic Antisense oligonucleotide
  misc_feature 1..10: note = Original Sequence: gguaaguuct
  modified_base 1: mod_base = OTHER; note = bicyclic nucleic acid (BNA)
  modified_base 10: mod_base = OTHER; note = bicyclic nucleic acid (BNA)
  modified_base 9: mod_base = OTHER; note = 5-methyl
  source 1..10: mol_type = other DNA
  modified_base 3: mod_base = OTHER; note = Uracil
  modified_base 7: mod_base = OTHER; note = Uracil
  modified_base 8: mod_base = OTHER; note = Uracil
ggtaagttct

SEQ ID NO: 4702 - skipped

SEQ ID NO: 4703 - RNA, 20 nt, synthetic construct
  misc_feature 1..20: note = Description of Artificial Sequence: Synthetic Antisense oligonucleotide
  modified_base 1: mod_base = OTHER; note = 5-methyl
  modified_base 10: mod_base = OTHER; note = 5-methyl
  modified_base 14..15: mod_base = OTHER; note = 5-methyl
  modified_base 19..20: mod_base = OTHER; note = 5-methyl
  modified_base 1: mod_base = OTHER; note = bicyclic nucleic acid (BNA)
  modified_base 20: mod_base = OTHER; note = bicyclic nucleic acid (BNA)
  source 1..20: mol_type = other RNA
cggtaagttctgtccaagcc

SEQ ID NO: 4704 - RNA, 19 nt, synthetic construct
  misc_feature 1..19: note = Description of Artificial Sequence: Synthetic Antisense oligonucleotide
  modified_base 1: mod_base = OTHER; note = 5-methyl
  modified_base 10: mod_base = OTHER; note = 5-methyl
  modified_base 14..15: mod_base = OTHER; note = 5-methyl
  modified_base 19: mod_base = OTHER; note = 5-methyl
  modified_base 1: mod_base = OTHER; note = bicyclic nucleic acid (BNA)
  modified_base 19: mod_base = OTHER; note = bicyclic nucleic acid (BNA)
  source 1..19: mol_type = other RNA
cggtaagttctgtccaagc

SEQ ID NO: 4705 - RNA, 18 nt, synthetic construct
  misc_feature 1..18: note = Description of Artificial Sequence: Synthetic Antisense oligonucleotide
  modified_base 1: mod_base = OTHER; note = 5-methyl
  modified_base 10: mod_base = OTHER; note = 5-methyl
  modified_base 14..15: mod_base = OTHER; note = 5-methyl
  modified_base 1: mod_base = OTHER; note = bicyclic nucleic acid (BNA)
  modified_base 18: mod_base = OTHER; note = bicyclic nucleic acid (BNA)
  source 1..18: mol_type = other RNA
cggtaagttctgtccaag

SEQ ID NO: 4706 - RNA, 17 nt, synthetic construct
  misc_feature 1..17: note = Description of Artificial Sequence: Synthetic Antisense oligonucleotide
  modified_base 1: mod_base = OTHER; note = 5-methyl
  modified_base 10: mod_base = OTHER; note = 5-methyl
  modified_base 14..15: mod_base = OTHER; note = 5-methyl
  modified_base 1: mod_base = OTHER; note = bicyclic nucleic acid (BNA)
  modified_base 17: mod_base = OTHER; note = bicyclic nucleic acid (BNA)
  source 1..17: mol_type = other RNA
cggtaagttctgtccaa

SEQ ID NO: 4707 - RNA, 16 nt, synthetic construct
  misc_feature 1..16: note = Description of Artificial Sequence: Synthetic Antisense oligonucleotide
  modified_base 1: mod_base = OTHER; note = 5-methyl
  modified_base 10: mod_base = OTHER; note = 5-methyl
  modified_base 14..15: mod_base = OTHER; note = 5-methyl
  modified_base 1: mod_base = OTHER; note = bicyclic nucleic acid (BNA)
  modified_base 16: mod_base = OTHER; note = bicyclic nucleic acid (BNA)
  source 1..16: mol_type = other RNA
cggtaagttctgtcca

SEQ ID NO: 4708 - RNA, 15 nt, synthetic construct
  misc_feature 1..15: note = Description of Artificial Sequence: Synthetic Antisense oligonucleotide
  modified_base 1: mod_base = OTHER; note = 5-methyl
  modified_base 10: mod_base = OTHER; note = 5-methyl
  modified_base 14..15: mod_base = OTHER; note = 5-methyl
  modified_base 1: mod_base = OTHER; note = bicyclic nucleic acid (BNA)
  modified_base 15: mod_base = OTHER; note = bicyclic nucleic acid (BNA)
  source 1..15: mol_type = other RNA
cggtaagttctgtcc

SEQ ID NO: 4709 - RNA, 14 nt, synthetic construct
  misc_feature 1..14: note = Description of Artificial Sequence: Synthetic Antisense oligonucleotide
  modified_base 1: mod_base = OTHER; note = 5-methyl
  modified_base 10: mod_base = OTHER; note = 5-methyl
  modified_base 14: mod_base = OTHER; note = 5-methyl
  modified_base 1: mod_base = OTHER; note = bicyclic nucleic acid (BNA)
  modified_base 14: mod_base = OTHER; note = bicyclic nucleic acid (BNA)
  source 1..14: mol_type = other RNA
cggtaagttctgtc

SEQ ID NO: 4710 - DNA, 13 bp, synthetic construct
  misc_feature 1..13: note = Description of Artificial Sequence: Synthetic Antisense oligonucleotide
  misc_feature 1..13: note = Original Sequence: cgguaaguucugt
  modified_base 1: mod_base = OTHER; note = 5-methyl
  modified_base 10: mod_base = OTHER; note = 5-methyl
  modified_base 1: mod_base = OTHER; note = bicyclic nucleic acid (BNA)
  modified_base 13: mod_base = OTHER; note = bicyclic nucleic acid (BNA)
  source 1..13: mol_type = other DNA
  modified_base 4: mod_base = OTHER; note = Uracil
  modified_base 8: mod_base = OTHER; note = Uracil
  modified_base 9: mod_base = OTHER; note = Uracil
  modified_base 11: mod_base = OTHER; note = Uracil
cggtaagttctgt

SEQ ID NO: 4711 - RNA, 12 nt, synthetic construct
  misc_feature 1..12: note = Description of Artificial Sequence: Synthetic Antisense oligonucleotide
  modified_base 1: mod_base = OTHER; note = 5-methyl
  modified_base 10: mod_base = OTHER; note = 5-methyl
  modified_base 1: mod_base = OTHER; note = bicyclic nucleic acid (BNA)
  modified_base 12: mod_base = OTHER; note = bicyclic nucleic acid (BNA)
  source 1..12: mol_type = other RNA
cggtaagttctg

SEQ ID NO: 4712 - DNA, 11 bp, synthetic construct
  misc_feature 1..11: note = Description of Artificial Sequence: Synthetic Antisense oligonucleotide
  misc_feature 1..11: note = Original Sequence: cgguaaguuct
  modified_base 1: mod_base = OTHER; note = 5-methyl
  modified_base 10: mod_base = OTHER; note = 5-methyl
  modified_base 1: mod_base = OTHER; note = bicyclic nucleic acid (BNA)
  modified_base 11: mod_base = OTHER; note = bicyclic nucleic acid (BNA)
  source 1..11: mol_type = other DNA
  modified_base 4: mod_base = OTHER; note = Uracil
  modified_base 8: mod_base = OTHER; note = Uracil
  modified_base 9: mod_base = OTHER; note = Uracil
cggtaagttct

SEQ ID NO: 4713 - RNA, 10 nt, synthetic construct
  misc_feature 1..10: note = Description of Artificial Sequence: Synthetic Antisense oligonucleotide
  modified_base 1: mod_base = OTHER; note = 5-methyl
  modified_base 10: mod_base = OTHER; note = 5-methyl
  modified_base 1: mod_base = OTHER; note = bicyclic nucleic acid (BNA)
  modified_base 10: mod_base = OTHER; note = bicyclic nucleic acid (BNA)
  source 1..10: mol_type = other RNA
cggtaagttc

SEQ ID NO: 4714-4715 - skipped (2 entries)

SEQ ID NO: 4716 - DNA, 20 bp, synthetic construct
  misc_feature 1..20: note = Description of Artificial Sequence: Synthetic Antisense oligonucleotide
  misc_feature 1..20: note = Original Sequence: tcgguaaguucuguccaagc
  modified_base 1: mod_base = OTHER; note = bicyclic nucleic acid (BNA)
  modified_base 20: mod_base = OTHER; note = bicyclic nucleic acid (BNA)
  modified_base 2: mod_base = OTHER; note = 5-methyl
  modified_base 11: mod_base = OTHER; note = 5-methyl
  modified_base 15..16: mod_base = OTHER; note = 5-methyl
  modified_base 20: mod_base = OTHER; note = 5-methyl
  source 1..20: mol_type = other DNA
  modified_base 5: mod_base = OTHER; note = Uracil
  modified_base 9: mod_base = OTHER; note = Uracil
  modified_base 10: mod_base = OTHER; note = Uracil
  modified_base 12: mod_base = OTHER; note = Uracil
  modified_base 14: mod_base = OTHER; note = Uracil
tcggtaagttctgtccaagc

SEQ ID NO: 4717 - DNA, 19 bp, synthetic construct
  misc_feature 1..19: note = Description of Artificial Sequence: Synthetic Antisense oligonucleotide
  misc_feature 1..19: note = Original Sequence: tcgguaaguucuguccaag
  modified_base 1: mod_base = OTHER; note = bicyclic nucleic acid (BNA)
  modified_base 19: mod_base = OTHER; note = bicyclic nucleic acid (BNA)
  modified_base 2: mod_base = OTHER; note = 5-methyl
  modified_base 11: mod_base = OTHER; note = 5-methyl
  modified_base 15..16: mod_base = OTHER; note = 5-methyl
  source 1..19: mol_type = other DNA
  modified_base 5: mod_base = OTHER; note = Uracil
  modified_base 9: mod_base = OTHER; note = Uracil
  modified_base 10: mod_base = OTHER; note = Uracil
  modified_base 12: mod_base = OTHER; note = Uracil
  modified_base 14: mod_base = OTHER; note = Uracil
tcggtaagttctgtccaag

SEQ ID NO: 4718 - DNA, 18 bp, synthetic construct
  misc_feature 1..18: note = Description of Artificial Sequence: Synthetic Antisense oligonucleotide
  misc_feature 1..18: note = Original Sequence: tcgguaaguucuguccaa
  modified_base 1: mod_base = OTHER; note = bicyclic nucleic acid (BNA)
  modified_base 18: mod_base = OTHER; note = bicyclic nucleic acid (BNA)
  modified_base 2: mod_base = OTHER; note = 5-methyl
  modified_base 11: mod_base = OTHER; note = 5-methyl
  modified_base 15..16: mod_base = OTHER; note = 5-methyl
  source 1..18: mol_type = other DNA
  modified_base 5: mod_base = OTHER; note = Uracil
  modified_base 9: mod_base = OTHER; note = Uracil
  modified_base 10: mod_base = OTHER; note = Uracil
  modified_base 12: mod_base = OTHER; note = Uracil
  modified_base 14: mod_base = OTHER; note = Uracil
tcggtaagttctgtccaa

SEQ ID NO: 4719 - DNA, 17 bp, synthetic construct
  misc_feature 1..17: note = Description of Artificial Sequence: Synthetic Antisense oligonucleotide
  misc_feature 1..17: note = Original Sequence: tcgguaaguucugucca
  modified_base 1: mod_base = OTHER; note = bicyclic nucleic acid (BNA)
  modified_base 17: mod_base = OTHER; note = bicyclic nucleic acid (BNA)
  modified_base 2: mod_base = OTHER; note = 5-methyl
  modified_base 11: mod_base = OTHER; note = 5-methyl
  modified_base 15..16: mod_base = OTHER; note = 5-methyl
  source 1..17: mol_type = other DNA
  modified_base 5: mod_base = OTHER; note = Uracil
  modified_base 9: mod_base = OTHER; note = Uracil
  modified_base 10: mod_base = OTHER; note = Uracil
  modified_base 12: mod_base = OTHER; note = Uracil
  modified_base 14: mod_base = OTHER; note = Uracil
tcggtaagttctgtcca

SEQ ID NO: 4720 - DNA, 16 bp, synthetic construct
  misc_feature 1..16: note = Description of Artificial Sequence: Synthetic Antisense oligonucleotide
  misc_feature 1..16: note = Original Sequence: tcgguaaguucugucc
  modified_base 1: mod_base = OTHER; note = bicyclic nucleic acid (BNA)
  modified_base 16: mod_base = OTHER; note = bicyclic nucleic acid (BNA)
  modified_base 2: mod_base = OTHER; note = 5-methyl
  modified_base 11: mod_base = OTHER; note = 5-methyl
  modified_base 15..16: mod_base = OTHER; note = 5-methyl
  source 1..16: mol_type = other DNA
  modified_base 5: mod_base = OTHER; note = Uracil
  modified_base 9: mod_base = OTHER; note = Uracil
  modified_base 10: mod_base = OTHER; note = Uracil
  modified_base 12: mod_base = OTHER; note = Uracil
  modified_base 14: mod_base = OTHER; note = Uracil
tcggtaagttctgtcc

SEQ ID NO: 4721 - DNA, 15 bp, synthetic construct
  misc_feature 1..15: note = Description of Artificial Sequence: Synthetic Antisense oligonucleotide
  misc_feature 1..15: note = Original Sequence: tcgguaaguucuguc
  modified_base 1: mod_base = OTHER; note = bicyclic nucleic acid (BNA)
  modified_base 15: mod_base = OTHER; note = bicyclic nucleic acid (BNA)
  modified_base 2: mod_base = OTHER; note = 5-methyl
  modified_base 11: mod_base = OTHER; note = 5-methyl
  modified_base 15: mod_base = OTHER; note = 5-methyl
  source 1..15: mol_type = other DNA
  modified_base 5: mod_base = OTHER; note = Uracil
  modified_base 9: mod_base = OTHER; note = Uracil
  modified_base 10: mod_base = OTHER; note = Uracil
  modified_base 12: mod_base = OTHER; note = Uracil
  modified_base 14: mod_base = OTHER; note = Uracil
tcggtaagttctgtc

SEQ ID NO: 4722 - DNA, 14 bp, synthetic construct
  misc_feature 1..14: note = Description of Artificial Sequence: Synthetic Antisense oligonucleotide
  misc_feature 1..14: note = Original Sequence: tcgguaaguucugt
  modified_base 1: mod_base = OTHER; note = bicyclic nucleic acid (BNA)
  modified_base 14: mod_base = OTHER; note = bicyclic nucleic acid (BNA)
  modified_base 2: mod_base = OTHER; note = 5-methyl
  modified_base 11: mod_base = OTHER; note = 5-methyl
  source 1..14: mol_type = other DNA
  modified_base 5: mod_base = OTHER; note = Uracil
  modified_base 9: mod_base = OTHER; note = Uracil
  modified_base 10: mod_base = OTHER; note = Uracil
  modified_base 12: mod_base = OTHER; note = Uracil
tcggtaagttctgt

SEQ ID NO: 4723 - DNA, 13 bp, synthetic construct
  misc_feature 1..13: note = Description of Artificial Sequence: Synthetic Antisense oligonucleotide
  misc_feature 1..13: note = Original Sequence: tcgguaaguucug
  modified_base 1: mod_base = OTHER; note = bicyclic nucleic acid (BNA)
  modified_base 13: mod_base = OTHER; note = bicyclic nucleic acid (BNA)
  modified_base 2: mod_base = OTHER; note = 5-methyl
  modified_base 11: mod_base = OTHER; note = 5-methyl
  source 1..13: mol_type = other DNA
  modified_base 5: mod_base = OTHER; note = Uracil
  modified_base 9: mod_base = OTHER; note = Uracil
  modified_base 10: mod_base = OTHER; note = Uracil
  modified_base 12: mod_base = OTHER; note = Uracil
tcggtaagttctg

SEQ ID NO: 4724 - DNA, 12 bp, synthetic construct
  misc_feature 1..12: note = Description of Artificial Sequence: Synthetic Antisense oligonucleotide
  misc_feature 1..12: note = Original Sequence: tcgguaaguuct
  modified_base 1: mod_base = OTHER; note = bicyclic nucleic acid (BNA)
  modified_base 12: mod_base = OTHER; note = bicyclic nucleic acid (BNA)
  modified_base 2: mod_base = OTHER; note = 5-methyl
  modified_base 11: mod_base = OTHER; note = 5-methyl
  source 1..12: mol_type = other DNA
  modified_base 5: mod_base = OTHER; note = Uracil
  modified_base 9: mod_base = OTHER; note = Uracil
  modified_base 10: mod_base = OTHER; note = Uracil
tcggtaagttct

SEQ ID NO: 4725 - DNA, 11 bp, synthetic construct
  misc_feature 1..11: note = Description of Artificial Sequence: Synthetic Antisense oligonucleotide
  misc_feature 1..11: note = Original Sequence: tcgguaaguuc
  modified_base 1: mod_base = OTHER; note = bicyclic nucleic acid (BNA)
  modified_base 11: mod_base = OTHER; note = bicyclic nucleic acid (BNA)
  modified_base 2: mod_base = OTHER; note = 5-methyl
  modified_base 11: mod_base = OTHER; note = 5-methyl
  source 1..11: mol_type = other DNA
  modified_base 5: mod_base = OTHER; note = Uracil
  modified_base 9: mod_base = OTHER; note = Uracil
  modified_base 10: mod_base = OTHER; note = Uracil
tcggtaagttc

SEQ ID NO: 4726 - DNA, 10 bp, synthetic construct
  misc_feature 1..10: note = Description of Artificial Sequence: Synthetic Antisense oligonucleotide
  misc_feature 1..10: note = Original Sequence: tcgguaagut
  modified_base 1: mod_base = OTHER; note = bicyclic nucleic acid (BNA)
  modified_base 10: mod_base = OTHER; note = bicyclic nucleic acid (BNA)
  modified_base 2: mod_base = OTHER; note = 5-methyl
  source 1..10: mol_type = other DNA
  modified_base 5: mod_base = OTHER; note = Uracil
  modified_base 9: mod_base = OTHER; note = Uracil
tcggtaagtt

SEQ ID NO: 4727 - skipped

SEQ ID NO: 4728 - RNA, 20 nt, synthetic construct
  misc_feature 1..20: note = Description of Artificial Sequence: Synthetic Antisense oligonucleotide
  modified_base 1: mod_base = OTHER; note = bicyclic nucleic acid (BNA)
  modified_base 20: mod_base = OTHER; note = bicyclic nucleic acid (BNA)
  modified_base 3: mod_base = OTHER; note = 5-methyl
  modified_base 12: mod_base = OTHER; note = 5-methyl
  modified_base 16..17: mod_base = OTHER; note = 5-methyl
  source 1..20: mol_type = other RNA
gtcggtaagttctgtccaag

SEQ ID NO: 4729 - RNA, 19 nt, synthetic construct
  misc_feature 1..19: note = Description of Artificial Sequence: Synthetic Antisense oligonucleotide
  modified_base 1: mod_base = OTHER; note = bicyclic nucleic acid (BNA)
  modified_base 19: mod_base = OTHER; note = bicyclic nucleic acid (BNA)
  modified_base 3: mod_base = OTHER; note = 5-methyl
  modified_base 12: mod_base = OTHER; note = 5-methyl
  modified_base 16..17: mod_base = OTHER; note = 5-methyl
  source 1..19: mol_type = other RNA
gtcggtaagttctgtccaa

SEQ ID NO: 4730 - RNA, 18 nt, synthetic construct
  misc_feature 1..18: note = Description of Artificial Sequence: Synthetic Antisense oligonucleotide
  modified_base 1: mod_base = OTHER; note = bicyclic nucleic acid (BNA)
  modified_base 18: mod_base = OTHER; note = bicyclic nucleic acid (BNA)
  modified_base 3: mod_base = OTHER; note = 5-methyl
  modified_base 12: mod_base = OTHER; note = 5-methyl
  modified_base 16..17: mod_base = OTHER; note = 5-methyl
  source 1..18: mol_type = other RNA
gtcggtaagttctgtcca

SEQ ID NO: 4731 - RNA, 17 nt, synthetic construct
  misc_feature 1..17: note = Description of Artificial Sequence: Synthetic Antisense oligonucleotide
  modified_base 1: mod_base = OTHER; note = bicyclic nucleic acid (BNA)
  modified_base 17: mod_base = OTHER; note = bicyclic nucleic acid (BNA)
  modified_base 3: mod_base = OTHER; note = 5-methyl
  modified_base 12: mod_base = OTHER; note = 5-methyl
  modified_base 16..17: mod_base = OTHER; note = 5-methyl
  source 1..17: mol_type = other RNA
gtcggtaagttctgtcc

SEQ ID NO: 4732 - RNA, 16 nt, synthetic construct
  misc_feature 1..16: note = Description of Artificial Sequence: Synthetic Antisense oligonucleotide
  modified_base 1: mod_base = OTHER; note = bicyclic nucleic acid (BNA)
  modified_base 16: mod_base = OTHER; note = bicyclic nucleic acid (BNA)
  modified_base 3: mod_base = OTHER; note = 5-methyl
  modified_base 12: mod_base = OTHER; note = 5-methyl
  modified_base 16: mod_base = OTHER; note = 5-methyl
  source 1..16: mol_type = other RNA
gtcggtaagttctgtc

SEQ ID NO: 4733 - DNA, 15 bp, synthetic construct
  misc_feature 1..15: note = Description of Artificial Sequence: Synthetic Antisense oligonucleotide
  misc_feature 1..15: note = Original Sequence: gucgguaaguucugt
  modified_base 1: mod_base = OTHER; note = bicyclic nucleic acid (BNA)
  modified_base 15: mod_base = OTHER; note = bicyclic nucleic acid (BNA)
  modified_base 3: mod_base = OTHER; note = 5-methyl
  modified_base 12: mod_base = OTHER; note = 5-methyl
  source 1..15: mol_type = other DNA
  modified_base 2: mod_base = OTHER; note = Uracil
  modified_base 6: mod_base = OTHER; note = Uracil
  modified_base 10: mod_base = OTHER; note = Uracil
  modified_base 11: mod_base = OTHER; note = Uracil
  modified_base 13: mod_base = OTHER; note = Uracil
gtcggtaagttctgt

SEQ ID NO: 4734 - RNA, 14 nt, synthetic construct
  misc_feature 1..14: note = Description of Artificial Sequence: Synthetic Antisense oligonucleotide
  modified_base 1: mod_base = OTHER; note = bicyclic nucleic acid (BNA)
  modified_base 14: mod_base = OTHER; note = bicyclic nucleic acid (BNA)
  modified_base 3: mod_base = OTHER; note = 5-methyl
  modified_base 12: mod_base = OTHER; note = 5-methyl
  source 1..14: mol_type = other RNA
gtcggtaagttctg

SEQ ID NO: 4735 - DNA, 13 bp, synthetic construct
  misc_feature 1..13: note = Description of Artificial Sequence: Synthetic Antisense oligonucleotide
  misc_feature 1..13: note = Original Sequence: gucgguaaguuct
  modified_base 1: mod_base = OTHER; note = bicyclic nucleic acid (BNA)
  modified_base 13: mod_base = OTHER; note = bicyclic nucleic acid (BNA)
  modified_base 3: mod_base = OTHER; note = 5-methyl
  modified_base 12: mod_base = OTHER; note = 5-methyl
  source 1..13: mol_type = other DNA
  modified_base 2: mod_base = OTHER; note = Uracil
  modified_base 6: mod_base = OTHER; note = Uracil
  modified_base 10: mod_base = OTHER; note = Uracil
  modified_base 11: mod_base = OTHER; note = Uracil
gtcggtaagttct

SEQ ID NO: 4736 - RNA, 12 nt, synthetic construct
  misc_feature 1..12: note = Description of Artificial Sequence: Synthetic Antisense oligonucleotide
  modified_base 1: mod_base = OTHER; note = bicyclic nucleic acid (BNA)
  modified_base 12: mod_base = OTHER; note = bicyclic nucleic acid (BNA)
  modified_base 3: mod_base = OTHER; note = 5-methyl
  modified_base 12: mod_base = OTHER; note = 5-methyl
  source 1..12: mol_type = other RNA
gtcggtaagttc

SEQ ID NO: 4737 - DNA, 11 bp, synthetic construct
  misc_feature 1..11: note = Description of Artificial Sequence: Synthetic Antisense oligonucleotide
  misc_feature 1..11: note = Original Sequence: gucgguaagut
  modified_base 1: mod_base = OTHER; note = bicyclic nucleic acid (BNA)
  modified_base 11: mod_base = OTHER; note = bicyclic nucleic acid (BNA)
  modified_base 3: mod_base = OTHER; note = 5-methyl
  source 1..11: mol_type = other DNA
  modified_base 2: mod_base = OTHER; note = Uracil
  modified_base 6: mod_base = OTHER; note = Uracil
  modified_base 10: mod_base = OTHER; note = Uracil
gtcggtaagtt

SEQ ID NO: 4738 - DNA, 10 bp, synthetic construct
  misc_feature 1..10: note = Description of Artificial Sequence: Synthetic Antisense oligonucleotide
  misc_feature 1..10: note = Original Sequence: gucgguaagt
  modified_base 1: mod_base = OTHER; note = bicyclic nucleic acid (BNA)
  modified_base 10: mod_base = OTHER; note = bicyclic nucleic acid (BNA)
  modified_base 3: mod_base = OTHER; note = 5-methyl
  source 1..10: mol_type = other DNA
  modified_base 2: mod_base = OTHER; note = Uracil
  modified_base 6: mod_base = OTHER; note = Uracil
gtcggtaagt

SEQ ID NO: 4739 - RNA, 20 nt, synthetic construct
  misc_feature 1..20: note = Description of Artificial Sequence: Synthetic Antisense oligonucleotide
  modified_base 1: mod_base = OTHER; note = bicyclic nucleic acid (BNA)
  modified_base 20: mod_base = OTHER; note = bicyclic nucleic acid (BNA)
  modified_base 4: mod_base = OTHER; note = 5-methyl
  modified_base 13: mod_base = OTHER; note = 5-methyl
  modified_base 17..18: mod_base = OTHER; note = 5-methyl
  source 1..20: mol_type = other RNA
agtcggtaagttctgtccaa

SEQ ID NO: 4740 - RNA, 19 nt, synthetic construct
  misc_feature 1..19: note = Description of Artificial Sequence: Synthetic Antisense oligonucleotide
  modified_base 1: mod_base = OTHER; note = bicyclic nucleic acid (BNA)
  modified_base 19: mod_base = OTHER; note = bicyclic nucleic acid (BNA)
  modified_base 4: mod_base = OTHER; note = 5-methyl
  modified_base 13: mod_base = OTHER; note = 5-methyl
  modified_base 17..18: mod_base = OTHER; note = 5-methyl
  source 1..19: mol_type = other RNA
agtcggtaagttctgtcca

SEQ ID NO: 4741 - RNA, 17 nt, synthetic construct
  misc_feature 1..17: note = Description of Artificial Sequence: Synthetic Antisense oligonucleotide
  modified_base 1: mod_base = OTHER; note = bicyclic nucleic acid (BNA)
  modified_base 17: mod_base = OTHER; note = bicyclic nucleic acid (BNA)
  modified_base 4: mod_base = OTHER; note = 5-methyl
  modified_base 13: mod_base = OTHER; note = 5-methyl
  modified_base 17: mod_base = OTHER; note = 5-methyl
  source 1..17: mol_type = other RNA
agtcggtaagttctgtc

SEQ ID NO: 4742 - DNA, 16 bp, synthetic construct
  misc_feature 1..16: note = Description of Artificial Sequence: Synthetic Antisense oligonucleotide
  misc_feature 1..16: note = Original Sequence: agucgguaaguucugt
  modified_base 1: mod_base = OTHER; note = bicyclic nucleic acid (BNA)
  modified_base 16: mod_base = OTHER; note = bicyclic nucleic acid (BNA)
  modified_base 4: mod_base = OTHER; note = 5-methyl
  modified_base 13: mod_base = OTHER; note = 5-methyl
  source 1..16: mol_type = other DNA
  modified_base 3: mod_base = OTHER; note = Uracil
  modified_base 7: mod_base = OTHER; note = Uracil
  modified_base 11: mod_base = OTHER; note = Uracil
  modified_base 12: mod_base = OTHER; note = Uracil
  modified_base 14: mod_base = OTHER; note = Uracil
agtcggtaagttctgt

SEQ ID NO: 4743 - RNA, 15 nt, synthetic construct
  misc_feature 1..15: note = Description of Artificial Sequence: Synthetic Antisense oligonucleotide
  modified_base 1: mod_base = OTHER; note = bicyclic nucleic acid (BNA)
  modified_base 15: mod_base = OTHER; note = bicyclic nucleic acid (BNA)
  modified_base 4: mod_base = OTHER; note = 5-methyl
  modified_base 13: mod_base = OTHER; note = 5-methyl
  source 1..15: mol_type = other RNA
agtcggtaagttctg

SEQ ID NO: 4744 - DNA, 14 bp, synthetic construct
  misc_feature 1..14: note = Description of Artificial Sequence: Synthetic Antisense oligonucleotide
  misc_feature 1..14: note = Original Sequence: agucgguaaguuct
  modified_base 1: mod_base = OTHER; note = bicyclic nucleic acid (BNA)
  modified_base 14: mod_base = OTHER; note = bicyclic nucleic acid (BNA)
  modified_base 4: mod_base = OTHER; note = 5-methyl
  modified_base 13: mod_base = OTHER; note = 5-methyl
  source 1..14: mol_type = other DNA
  modified_base 3: mod_base = OTHER; note = Uracil
  modified_base 7: mod_base = OTHER; note = Uracil
  modified_base 11: mod_base = OTHER; note = Uracil
  modified_base 12: mod_base = OTHER; note = Uracil
agtcggtaagttct

SEQ ID NO: 4745 - RNA, 13 nt, synthetic construct
  misc_feature 1..13: note = Description of Artificial Sequence: Synthetic Antisense oligonucleotide
  modified_base 1: mod_base = OTHER; note = bicyclic nucleic acid (BNA)
  modified_base 13: mod_base = OTHER; note = bicyclic nucleic acid (BNA)
  modified_base 4: mod_base = OTHER; note = 5-methyl
  modified_base 13: mod_base = OTHER; note = 5-methyl
  source 1..13: mol_type = other RNA
agtcggtaagttc

SEQ ID NO: 4746 - DNA, 12 bp, synthetic construct
  misc_feature 1..12: note = Description of Artificial Sequence: Synthetic Antisense oligonucleotide
  misc_feature 1..12: note = Original Sequence: agucgguaagut
  modified_base 1: mod_base = OTHER; note = bicyclic nucleic acid (BNA)
  modified_base 12: mod_base = OTHER; note = bicyclic nucleic acid (BNA)
  modified_base 4: mod_base = OTHER; note = 5-methyl
  source 1..12: mol_type = other DNA
  modified_base 3: mod_base = OTHER; note = Uracil
  modified_base 7: mod_base = OTHER; note = Uracil
  modified_base 11: mod_base = OTHER; note = Uracil
agtcggtaagtt

SEQ ID NO: 4747 - DNA, 11 bp, synthetic construct
  misc_feature 1..11: note = Description of Artificial Sequence: Synthetic Antisense oligonucleotide
  misc_feature 1..11: note = Original Sequence: agucgguaagt
  modified_base 1: mod_base = OTHER; note = bicyclic nucleic acid (BNA)
  modified_base 11: mod_base = OTHER; note = bicyclic nucleic acid (BNA)
  modified_base 4: mod_base = OTHER; note = 5-methyl
  source 1..11: mol_type = other DNA
  modified_base 3: mod_base = OTHER; note = Uracil
  modified_base 7: mod_base = OTHER; note = Uracil
agtcggtaagt

SEQ ID NO: 4748 - RNA, 20 nt, synthetic construct
  misc_feature 1..20: note = Description of Artificial Sequence: Synthetic Antisense oligonucleotide
  modified_base 1: mod_base = OTHER; note = 5-methyl
  modified_base 5: mod_base = OTHER; note = 5-methyl
  modified_base 14: mod_base = OTHER; note = 5-methyl
  modified_base 18..19: mod_base = OTHER; note = 5-methyl
  modified_base 1: mod_base = OTHER; note = bicyclic nucleic acid (BNA)
  modified_base 20: mod_base = OTHER; note = bicyclic nucleic acid (BNA)
  source 1..20: mol_type = other RNA
cagtcggtaagttctgtcca

SEQ ID NO: 4749 - RNA, 19 nt, synthetic construct
  misc_feature 1..19: note = Description of Artificial Sequence: Synthetic Antisense oligonucleotide
  modified_base 1: mod_base = OTHER; note = 5-methyl
  modified_base 5: mod_base = OTHER; note = 5-methyl
  modified_base 14: mod_base = OTHER; note = 5-methyl
  modified_base 18..19: mod_base = OTHER; note = 5-methyl
  modified_base 1: mod_base = OTHER; note = bicyclic nucleic acid (BNA)
  modified_base 19: mod_base = OTHER; note = bicyclic nucleic acid (BNA)
  source 1..19: mol_type = other RNA
cagtcggtaagttctgtcc

SEQ ID NO: 4750 - RNA, 18 nt, synthetic construct
  misc_feature 1..18: note = Description of Artificial Sequence: Synthetic Antisense oligonucleotide
  modified_base 1: mod_base = OTHER; note = 5-methyl
  modified_base 5: mod_base = OTHER; note = 5-methyl
  modified_base 14: mod_base = OTHER; note = 5-methyl
  modified_base 18: mod_base = OTHER; note = 5-methyl
  modified_base 1: mod_base = OTHER; note = bicyclic nucleic acid (BNA)
  modified_base 18: mod_base = OTHER; note = bicyclic nucleic acid (BNA)
  source 1..18: mol_type = other RNA
cagtcggtaagttctgtc

SEQ ID NO: 4751 - DNA, 17 bp, synthetic construct
  misc_feature 1..17: note = Description of Artificial Sequence: Synthetic Antisense oligonucleotide
  misc_feature 1..17: note = Original Sequence: cagucgguaaguucugt
  modified_base 1: mod_base = OTHER; note = 5-methyl
  modified_base 5: mod_base = OTHER; note = 5-methyl
  modified_base 14: mod_base = OTHER; note = 5-methyl
  modified_base 1: mod_base = OTHER; note = bicyclic nucleic acid (BNA)
  modified_base 17: mod_base = OTHER; note = bicyclic nucleic acid (BNA)
  source 1..17: mol_type = other DNA
  modified_base 4: mod_base = OTHER; note = Uracil
  modified_base 8: mod_base = OTHER; note = Uracil
  modified_base 12: mod_base = OTHER; note = Uracil
  modified_base 13: mod_base = OTHER; note = Uracil
  modified_base 15: mod_base = OTHER; note = Uracil
cagtcggtaagttctgt

SEQ ID NO: 4752 - RNA, 16 nt, synthetic construct
  misc_feature 1..16: note = Description of Artificial Sequence: Synthetic Antisense oligonucleotide
  modified_base 1: mod_base = OTHER; note = 5-methyl
  modified_base 5: mod_base = OTHER; note = 5-methyl
  modified_base 14: mod_base = OTHER; note = 5-methyl
  modified_base 1: mod_base = OTHER; note = bicyclic nucleic acid (BNA)
  modified_base 16: mod_base = OTHER; note = bicyclic nucleic acid (BNA)
  source 1..16: mol_type = other RNA
cagtcggtaagttctg

SEQ ID NO: 4753 - DNA, 15 bp, synthetic construct
  misc_feature 1..15: note = Description of Artificial Sequence: Synthetic Antisense oligonucleotide
  misc_feature 1..15: note = Original Sequence: cagucgguaaguuct
  modified_base 1: mod_base = OTHER; note = 5-methyl
  modified_base 5: mod_base = OTHER; note = 5-methyl
  modified_base 14: mod_base = OTHER; note = 5-methyl
  modified_base 1: mod_base = OTHER; note = bicyclic nucleic acid (BNA)
  modified_base 15: mod_base = OTHER; note = bicyclic nucleic acid (BNA)
  source 1..15: mol_type = other DNA
  modified_base 4: mod_base = OTHER; note = Uracil
  modified_base 8: mod_base = OTHER; note = Uracil
  modified_base 12: mod_base = OTHER; note = Uracil
  modified_base 13: mod_base = OTHER; note = Uracil
cagtcggtaagttct

SEQ ID NO: 4754 - RNA, 14 nt, synthetic construct
  misc_feature 1..14: note = Description of Artificial Sequence: Synthetic Antisense oligonucleotide
  modified_base 1: mod_base = OTHER; note = 5-methyl
  modified_base 5: mod_base = OTHER; note = 5-methyl
  modified_base 14: mod_base = OTHER; note = 5-methyl
  modified_base 1: mod_base = OTHER; note = bicyclic nucleic acid (BNA)
  modified_base 14: mod_base = OTHER; note = bicyclic nucleic acid (BNA)
  source 1..14: mol_type = other RNA
cagtcggtaagttc

SEQ ID NO: 4755 - DNA, 13 bp, synthetic construct
  misc_feature 1..13: note = Description of Artificial Sequence: Synthetic Antisense oligonucleotide
  misc_feature 1..13: note = Original Sequence: cagucgguaagut
  modified_base 1: mod_base = OTHER; note = 5-methyl
  modified_base 5: mod_base = OTHER; note = 5-methyl
  modified_base 1: mod_base = OTHER; note = bicyclic nucleic acid (BNA)
  modified_base 13: mod_base = OTHER; note = bicyclic nucleic acid (BNA)
  source 1..13: mol_type = other DNA
  modified_base 4: mod_base = OTHER; note = Uracil
  modified_base 8: mod_base = OTHER; note = Uracil
  modified_base 12: mod_base = OTHER; note = Uracil
cagtcggtaagtt

SEQ ID NO: 4756 - DNA, 12 bp, synthetic construct
  misc_feature 1..12: note = Description of Artificial Sequence: Synthetic Antisense oligonucleotide
  misc_feature 1..12: note = Original Sequence: cagucgguaagt
  modified_base 1: mod_base = OTHER; note = 5-methyl
  modified_base 5: mod_base = OTHER; note = 5-methyl
  modified_base 1: mod_base = OTHER; note = bicyclic nucleic acid (BNA)
  modified_base 12: mod_base = OTHER; note = bicyclic nucleic acid (BNA)
  source 1..12: mol_type = other DNA
  modified_base 4: mod_base = OTHER; note = Uracil
  modified_base 8: mod_base = OTHER; note = Uracil
cagtcggtaagt

SEQ ID NO: 4757 - RNA, 20 nt, synthetic construct
  misc_feature 1..20: note = Description of Artificial Sequence: Synthetic Antisense oligonucleotide
  modified_base 1..2: mod_base = OTHER; note = 5-methyl
  modified_base 6: mod_base = OTHER; note = 5-methyl
  modified_base 15: mod_base = OTHER; note = 5-methyl
  modified_base 19..20: mod_base = OTHER; note = 5-methyl
  modified_base 1: mod_base = OTHER; note = bicyclic nucleic acid (BNA)
  modified_base 20: mod_base = OTHER; note = bicyclic nucleic acid (BNA)
  source 1..20: mol_type = other RNA
ccagtcggtaagttctgtcc

SEQ ID NO: 4758 - RNA, 19 nt, synthetic construct
  misc_feature 1..19: note = Description of Artificial Sequence: Synthetic Antisense oligonucleotide
  modified_base 1..2: mod_base = OTHER; note = 5-methyl
  modified_base 6: mod_base = OTHER; note = 5-methyl
  modified_base 15: mod_base = OTHER; note = 5-methyl
  modified_base 19: mod_base = OTHER; note = 5-methyl
  modified_base 1: mod_base = OTHER; note = bicyclic nucleic acid (BNA)
  modified_base 19: mod_base = OTHER; note = bicyclic nucleic acid (BNA)
  source 1..19: mol_type = other RNA
ccagtcggtaagttctgtc

SEQ ID NO: 4759 - DNA, 18 bp, synthetic construct
  misc_feature 1..18: note = Description of Artificial Sequence: Synthetic Antisense oligonucleotide
  misc_feature 1..18: note = Original Sequence: ccagucgguaaguucugt
  modified_base 1..2: mod_base = OTHER; note = 5-methyl
  modified_base 6: mod_base = OTHER; note = 5-methyl
  modified_base 15: mod_base = OTHER; note = 5-methyl
  modified_base 1: mod_base = OTHER; note = bicyclic nucleic acid (BNA)
  modified_base 18: mod_base = OTHER; note = bicyclic nucleic acid (BNA)
  source 1..18: mol_type = other DNA
  modified_base 5: mod_base = OTHER; note = Uracil
  modified_base 9: mod_base = OTHER; note = Uracil
  modified_base 13: mod_base = OTHER; note = Uracil
  modified_base 14: mod_base = OTHER; note = Uracil
  modified_base 16: mod_base = OTHER; note = Uracil
ccagtcggtaagttctgt

SEQ ID NO: 4760 - RNA, 17 nt, synthetic construct
  misc_feature 1..17: note = Description of Artificial Sequence: Synthetic Antisense oligonucleotide
  modified_base 1..2: mod_base = OTHER; note = 5-methyl
  modified_base 6: mod_base = OTHER; note = 5-methyl
  modified_base 15: mod_base = OTHER; note = 5-methyl
  modified_base 1: mod_base = OTHER; note = bicyclic nucleic acid (BNA)
  modified_base 17: mod_base = OTHER; note = bicyclic nucleic acid (BNA)
  source 1..17: mol_type = other RNA
ccagtcggtaagttctg

SEQ ID NO: 4761 - DNA, 16 bp, synthetic construct
  misc_feature 1..16: note = Description of Artificial Sequence: Synthetic Antisense oligonucleotide
  misc_feature 1..16: note = Original Sequence: ccagucgguaaguuct
  modified_base 1..2: mod_base = OTHER; note = 5-methyl
  modified_base 6: mod_base = OTHER; note = 5-methyl
  modified_base 15: mod_base = OTHER; note = 5-methyl
  modified_base 1: mod_base = OTHER; note = bicyclic nucleic acid (BNA)
  modified_base 16: mod_base = OTHER; note = bicyclic nucleic acid (BNA)
  source 1..16: mol_type = other DNA
  modified_base 5: mod_base = OTHER; note = Uracil
  modified_base 9: mod_base = OTHER; note = Uracil
  modified_base 13: mod_base = OTHER; note = Uracil
  modified_base 14: mod_base = OTHER; note = Uracil
ccagtcggtaagttct

SEQ ID NO: 4762 - RNA, 15 nt, synthetic construct
  misc_feature 1..15: note = Description of Artificial Sequence: Synthetic Antisense oligonucleotide
  modified_base 1..2: mod_base = OTHER; note = 5-methyl
  modified_base 6: mod_base = OTHER; note = 5-methyl
  modified_base 15: mod_base = OTHER; note = 5-methyl
  modified_base 1: mod_base = OTHER; note = bicyclic nucleic acid (BNA)
  modified_base 15: mod_base = OTHER; note = bicyclic nucleic acid (BNA)
  source 1..15: mol_type = other RNA
ccagtcggtaagttc

SEQ ID NO: 4763 - DNA, 14 bp, synthetic construct
  misc_feature 1..14: note = Description of Artificial Sequence: Synthetic Antisense oligonucleotide
  misc_feature 1..14: note = Original Sequence: ccagucgguaagut
  modified_base 1..2: mod_base = OTHER; note = 5-methyl
  modified_base 6: mod_base = OTHER; note = 5-methyl
  modified_base 1: mod_base = OTHER; note = bicyclic nucleic acid (BNA)
  modified_base 14: mod_base = OTHER; note = bicyclic nucleic acid (BNA)
  source 1..14: mol_type = other DNA
  modified_base 5: mod_base = OTHER; note = Uracil
  modified_base 9: mod_base = OTHER; note = Uracil
  modified_base 13: mod_base = OTHER; note = Uracil
ccagtcggtaagtt

SEQ ID NO: 4764 - DNA, 13 bp, synthetic construct
  misc_feature 1..13: note = Description of Artificial Sequence: Synthetic Antisense oligonucleotide
  misc_feature 1..13: note = Original Sequence: ccagucgguaagt
  modified_base 1..2: mod_base = OTHER; note = 5-methyl
  modified_base 6: mod_base = OTHER; note = 5-methyl
  modified_base 1: mod_base = OTHER; note = bicyclic nucleic acid (BNA)
  modified_base 13: mod_base = OTHER; note = bicyclic nucleic acid (BNA)
  source 1..13: mol_type = other DNA
  modified_base 5: mod_base = OTHER; note = Uracil
  modified_base 9: mod_base = OTHER; note = Uracil
ccagtcggtaagt

SEQ ID NO: 4765 - RNA, 20 nt, synthetic construct
  misc_feature 1..20: note = Description of Artificial Sequence: Synthetic Antisense oligonucleotide
  modified_base 1: mod_base = OTHER; note = bicyclic nucleic acid (BNA)
  modified_base 20: mod_base = OTHER; note = bicyclic nucleic acid (BNA)
  modified_base 2..3: mod_base = OTHER; note = 5-methyl
  modified_base 7: mod_base = OTHER; note = 5-methyl
  modified_base 16: mod_base = OTHER; note = 5-methyl
  modified_base 20: mod_base = OTHER; note = 5-methyl
  source 1..20: mol_type = other RNA
gccagtcggtaagttctgtc

SEQ ID NO: 4766 - DNA, 19 bp, synthetic construct
  misc_feature 1..19: note = Description of Artificial Sequence: Synthetic Antisense oligonucleotide
  misc_feature 1..19: note = Original Sequence: gccagucgguaaguucugt
  modified_base 1: mod_base = OTHER; note = bicyclic nucleic acid (BNA)
  modified_base 19: mod_base = OTHER; note = bicyclic nucleic acid (BNA)
  modified_base 2..3: mod_base = OTHER; note = 5-methyl
  modified_base 7: mod_base = OTHER; note = 5-methyl
  modified_base 16: mod_base = OTHER; note = 5-methyl
  source 1..19: mol_type = other DNA
  modified_base 6: mod_base = OTHER; note = Uracil
  modified_base 10: mod_base = OTHER; note = Uracil
  modified_base 14: mod_base = OTHER; note = Uracil
  modified_base 15: mod_base = OTHER; note = Uracil
  modified_base 17: mod_base = OTHER; note = Uracil
gccagtcggtaagttctgt

SEQ ID NO: 4767 - RNA, 18 nt, synthetic construct
  misc_feature 1..18: note = Description of Artificial Sequence: Synthetic Antisense oligonucleotide
  modified_base 1: mod_base = OTHER; note = bicyclic nucleic acid (BNA)
  modified_base 18: mod_base = OTHER; note = bicyclic nucleic acid (BNA)
  modified_base 2..3: mod_base = OTHER; note = 5-methyl
  modified_base 7: mod_base = OTHER; note = 5-methyl
  modified_base 16: mod_base = OTHER; note = 5-methyl
  source 1..18: mol_type = other RNA
gccagtcggtaagttctg

SEQ ID NO: 4768 - DNA, 17 bp, synthetic construct
  misc_feature 1..17: note = Description of Artificial Sequence: Synthetic Antisense oligonucleotide
  misc_feature 1..17: note = Original Sequence: gccagucgguaaguuct
  modified_base 1: mod_base = OTHER; note = bicyclic nucleic acid (BNA)
  modified_base 17: mod_base = OTHER; note = bicyclic nucleic acid (BNA)
  modified_base 2..3: mod_base = OTHER; note = 5-methyl
  modified_base 7: mod_base = OTHER; note = 5-methyl
  modified_base 16: mod_base = OTHER; note = 5-methyl
  source 1..17: mol_type = other DNA
  modified_base 6: mod_base = OTHER; note = Uracil
  modified_base 10: mod_base = OTHER; note = Uracil
  modified_base 14: mod_base = OTHER; note = Uracil
  modified_base 15: mod_base = OTHER; note = Uracil
gccagtcggtaagttct

SEQ ID NO: 4769 - RNA, 16 nt, synthetic construct
  misc_feature 1..16: note = Description of Artificial Sequence: Synthetic Antisense oligonucleotide
  modified_base 1: mod_base = OTHER; note = bicyclic nucleic acid (BNA)
  modified_base 16: mod_base = OTHER; note = bicyclic nucleic acid (BNA)
  modified_base 2..3: mod_base = OTHER; note = 5-methyl
  modified_base 7: mod_base = OTHER; note = 5-methyl
  modified_base 16: mod_base = OTHER; note = 5-methyl
  source 1..16: mol_type = other RNA
gccagtcggtaagttc

SEQ ID NO: 4770 - DNA, 15 bp, synthetic construct
  misc_feature 1..15: note = Description of Artificial Sequence: Synthetic Antisense oligonucleotide
  misc_feature 1..15: note = Original Sequence: gccagucgguaagut
  modified_base 1: mod_base = OTHER; note = bicyclic nucleic acid (BNA)
  modified_base 15: mod_base = OTHER; note = bicyclic nucleic acid (BNA)
  modified_base 2..3: mod_base = OTHER; note = 5-methyl
  modified_base 7: mod_base = OTHER; note = 5-methyl
  source 1..15: mol_type = other DNA
  modified_base 6: mod_base = OTHER; note = Uracil
  modified_base 10: mod_base = OTHER; note = Uracil
  modified_base 14: mod_base = OTHER; note = Uracil
gccagtcggtaagtt

SEQ ID NO: 4771 - DNA, 14 bp, synthetic construct
  misc_feature 1..14: note = Description of Artificial Sequence: Synthetic Antisense oligonucleotide
  misc_feature 1..14: note = Original Sequence: gccagucgguaagt
  modified_base 1: mod_base = OTHER; note = bicyclic nucleic acid (BNA)
  modified_base 14: mod_base = OTHER; note = bicyclic nucleic acid (BNA)
  modified_base 2..3: mod_base = OTHER; note = 5-methyl
  modified_base 7: mod_base = OTHER; note = 5-methyl
  source 1..14: mol_type = other DNA
  modified_base 6: mod_base = OTHER; note = Uracil
  modified_base 10: mod_base = OTHER; note = Uracil
gccagtcggtaagt

SEQ ID NO: 4772 - DNA, 20 bp, synthetic construct
  misc_feature 1..20: note = Description of Artificial Sequence: Synthetic Antisense oligonucleotide
  misc_feature 1..20: note = Original Sequence: tcaaggaagauggcauuuct
  modified_base 1: mod_base = OTHER; note = bicyclic nucleic acid (BNA)
  modified_base 20: mod_base = OTHER; note = bicyclic nucleic acid (BNA)
  modified_base 2: mod_base = OTHER; note = 5-methyl
  modified_base 14: mod_base = OTHER; note = 5-methyl
  modified_base 19: mod_base = OTHER; note = 5-methyl
  source 1..20: mol_type = other DNA
  modified_base 11: mod_base = OTHER; note = Uracil
  modified_base 16: mod_base = OTHER; note = Uracil
  modified_base 17: mod_base = OTHER; note = Uracil
  modified_base 18: mod_base = OTHER; note = Uracil
tcaaggaagatggcatttct

SEQ ID NO: 4773 - DNA, 22 bp, synthetic construct
  misc_feature 1..22: note = Description of Artificial Sequence: Synthetic Antisense oligonucleotide
  misc_feature 1..22: note = Original Sequence: tcaaggaagauggcauuucuag
  modified_base 1: mod_base = OTHER; note = bicyclic nucleic acid (BNA)
  modified_base 22: mod_base = OTHER; note = bicyclic nucleic acid (BNA)
  modified_base 2: mod_base = OTHER; note = 5-methyl
  modified_base 14: mod_base = OTHER; note = 5-methyl
  modified_base 19: mod_base = OTHER; note = 5-methyl
  source 1..22: mol_type = other DNA
  modified_base 11: mod_base = OTHER; note = Uracil
  modified_base 16: mod_base = OTHER; note = Uracil
  modified_base 17: mod_base = OTHER; note = Uracil
  modified_base 18: mod_base = OTHER; note = Uracil
  modified_base 20: mod_base = OTHER; note = Uracil
tcaaggaagatggcatttctag

SEQ ID NO: 4774 - DNA, 16 bp, synthetic construct
  misc_feature 1..16: note = Description of Artificial Sequence: Synthetic Antisense oligonucleotide
  misc_feature 1..16: note = Original Sequence: tcaaggaagauggcat
  modified_base 1: mod_base = OTHER; note = bicyclic nucleic acid (BNA)
  modified_base 16: mod_base = OTHER; note = bicyclic nucleic acid (BNA)
  modified_base 2: mod_base = OTHER; note = 5-methyl
  modified_base 14: mod_base = OTHER; note = 5-methyl
  source 1..16: mol_type = other DNA
  modified_base 11: mod_base = OTHER; note = Uracil
tcaaggaagatggcat

SEQ ID NO: 4775 - DNA, 15 bp, synthetic construct
  misc_feature 1..15: note = Description of Artificial Sequence: Synthetic Antisense oligonucleotide
  misc_feature 1..15: note = Original Sequence: gaagauggcauuuct
  modified_base 1: mod_base = OTHER; note = bicyclic nucleic acid (BNA)
  modified_base 15: mod_base = OTHER; note = bicyclic nucleic acid (BNA)
  modified_base 9: mod_base = OTHER; note = 5-methyl
  modified_base 14: mod_base = OTHER; note = 5-methyl
  source 1..15: mol_type = other DNA
  modified_base 6: mod_base = OTHER; note = Uracil
  modified_base 11: mod_base = OTHER; note = Uracil
  modified_base 12: mod_base = OTHER; note = Uracil
  modified_base 13: mod_base = OTHER; note = Uracil
gaagatggcatttct

SEQ ID NO: 4776 - DNA, 21 bp, synthetic construct
  misc_feature 1..21: note = Description of Artificial Sequence: Synthetic Antisense oligonucleotide
  misc_feature 1..21: note = Original Sequence: tcaaggaagauggcauuucua
  modified_base 1: mod_base = OTHER; note = bicyclic nucleic acid (BNA)
  modified_base 21: mod_base = OTHER; note = bicyclic nucleic acid (BNA)
  modified_base 2: mod_base = OTHER; note = 5-methyl
  modified_base 14: mod_base = OTHER; note = 5-methyl
  modified_base 19: mod_base = OTHER; note = 5-methyl
  source 1..21: mol_type = other DNA
  modified_base 11: mod_base = OTHER; note = Uracil
  modified_base 16: mod_base = OTHER; note = Uracil
  modified_base 17: mod_base = OTHER; note = Uracil
  modified_base 18: mod_base = OTHER; note = Uracil
  modified_base 20: mod_base = OTHER; note = Uracil
tcaaggaagatggcatttcta

SEQ ID NO: 4777 - DNA, 19 bp, synthetic construct
  misc_feature 1..19: note = Description of Artificial Sequence: Synthetic Antisense oligonucleotide
  misc_feature 1..19: note = Original Sequence: tcaaggaagauggcauuuc
  modified_base 1: mod_base = OTHER; note = bicyclic nucleic acid (BNA)
  modified_base 19: mod_base = OTHER; note = bicyclic nucleic acid (BNA)
  modified_base 2: mod_base = OTHER; note = 5-methyl
  modified_base 14: mod_base = OTHER; note = 5-methyl
  modified_base 19: mod_base = OTHER; note = 5-methyl
  source 1..19: mol_type = other DNA
  modified_base 11: mod_base = OTHER; note = Uracil
  modified_base 16: mod_base = OTHER; note = Uracil
  modified_base 17: mod_base = OTHER; note = Uracil
  modified_base 18: mod_base = OTHER; note = Uracil
tcaaggaagatggcatttc

SEQ ID NO: 4778 - DNA, 18 bp, synthetic construct
  misc_feature 1..18: note = Description of Artificial Sequence: Synthetic Antisense oligonucleotide
  misc_feature 1..18: note = Original Sequence: tcaaggaagauggcauut
  modified_base 1: mod_base = OTHER; note = bicyclic nucleic acid (BNA)
  modified_base 18: mod_base = OTHER; note = bicyclic nucleic acid (BNA)
  modified_base 2: mod_base = OTHER; note = 5-methyl
  modified_base 14: mod_base = OTHER; note = 5-methyl
  source 1..18: mol_type = other DNA
  modified_base 11: mod_base = OTHER; note = Uracil
  modified_base 16: mod_base = OTHER; note = Uracil
  modified_base 17: mod_base = OTHER; note = Uracil
tcaaggaagatggcattt

SEQ ID NO: 4779 - DNA, 17 bp, synthetic construct
  misc_feature 1..17: note = Description of Artificial Sequence: Synthetic Antisense oligonucleotide
  misc_feature 1..17: note = Original Sequence: tcaaggaagauggcaut
  modified_base 1: mod_base = OTHER; note = bicyclic nucleic acid (BNA)
  modified_base 17: mod_base = OTHER; note = bicyclic nucleic acid (BNA)
  modified_base 2: mod_base = OTHER; note = 5-methyl
  modified_base 14: mod_base = OTHER; note = 5-methyl
  source 1..17: mol_type = other DNA
  modified_base 11: mod_base = OTHER; note = Uracil
  modified_base 16: mod_base = OTHER; note = Uracil
tcaaggaagatggcatt

SEQ ID NO: 4780 - DNA, 15 bp, synthetic construct
  misc_feature 1..15: note = Description of Artificial Sequence: Synthetic Antisense oligonucleotide
  misc_feature 1..15: note = Original Sequence: tcaaggaagauggca
  modified_base 1: mod_base = OTHER; note = bicyclic nucleic acid (BNA)
  modified_base 15: mod_base = OTHER; note = bicyclic nucleic acid (BNA)
  modified_base 2: mod_base = OTHER; note = 5-methyl
  modified_base 14: mod_base = OTHER; note = 5-methyl
  source 1..15: mol_type = other DNA
  modified_base 11: mod_base = OTHER; note = Uracil
tcaaggaagatggca

SEQ ID NO: 4781 - DNA, 14 bp, synthetic construct
  misc_feature 1..14: note = Description of Artificial Sequence: Synthetic Antisense oligonucleotide
  misc_feature 1..14: note = Original Sequence: tcaaggaagauggc
  modified_base 1: mod_base = OTHER; note = bicyclic nucleic acid (BNA)
  modified_base 14: mod_base = OTHER; note = bicyclic nucleic acid (BNA)
  modified_base 2: mod_base = OTHER; note = 5-methyl
  modified_base 14: mod_base = OTHER; note = 5-methyl
  source 1..14: mol_type = other DNA
  modified_base 11: mod_base = OTHER; note = Uracil
tcaaggaagatggc

SEQ ID NO: 4782 - DNA, 13 bp, synthetic construct
  misc_feature 1..13: note = Description of Artificial Sequence: Synthetic Antisense oligonucleotide
  misc_feature 1..13: note = Original Sequence: tcaaggaagaugg
  modified_base 1: mod_base = OTHER; note = bicyclic nucleic acid (BNA)
  modified_base 13: mod_base = OTHER; note = bicyclic nucleic acid (BNA)
  modified_base 2: mod_base = OTHER; note = 5-methyl
  source 1..13: mol_type = other DNA
  modified_base 11: mod_base = OTHER; note = Uracil
tcaaggaagatgg

SEQ ID NO: 4783 - DNA, 12 bp, synthetic construct
  misc_feature 1..12: note = Description of Artificial Sequence: Synthetic Antisense oligonucleotide
  misc_feature 1..12: note = Original Sequence: tcaaggaagaug
  modified_base 1: mod_base = OTHER; note = bicyclic nucleic acid (BNA)
  modified_base 12: mod_base = OTHER; note = bicyclic nucleic acid (BNA)
  modified_base 2: mod_base = OTHER; note = 5-methyl
  source 1..12: mol_type = other DNA
  modified_base 11: mod_base = OTHER; note = Uracil
tcaaggaagatg

SEQ ID NO: 4784 - DNA, 11 bp, synthetic construct
  misc_feature 1..11: note = Description of Artificial Sequence: Synthetic Antisense oligonucleotide
  modified_base 1: mod_base = OTHER; note = bicyclic nucleic acid (BNA)
  modified_base 11: mod_base = OTHER; note = bicyclic nucleic acid (BNA)
  modified_base 2: mod_base = OTHER; note = 5-methyl
  source 1..11: mol_type = other DNA
tcaaggaagat

SEQ ID NO: 4785 - DNA, 10 bp, synthetic construct
  misc_feature 1..10: note = Description of Artificial Sequence: Synthetic Antisense oligonucleotide
  modified_base 1: mod_base = OTHER; note = bicyclic nucleic acid (BNA)
  modified_base 10: mod_base = OTHER; note = bicyclic nucleic acid (BNA)
  modified_base 2: mod_base = OTHER; note = 5-methyl
  source 1..10: mol_type = other DNA
tcaaggaaga

SEQ ID NO: 4786 - skipped

SEQ ID NO: 4787 - RNA, 21 nt, synthetic construct
  misc_feature 1..21: note = Description of Artificial Sequence: Synthetic Antisense oligonucleotide
  modified_base 1: mod_base = OTHER; note = 5-methyl
  modified_base 13: mod_base = OTHER; note = 5-methyl
  modified_base 18: mod_base = OTHER; note = 5-methyl
  modified_base 1: mod_base = OTHER; note = bicyclic nucleic acid (BNA)
  modified_base 21: mod_base = OTHER; note = bicyclic nucleic acid (BNA)
  source 1..21: mol_type = other RNA
caaggaagatggcatttctag

SEQ ID NO: 4788 - RNA, 20 nt, synthetic construct
  misc_feature 1..20: note = Description of Artificial Sequence: Synthetic Antisense oligonucleotide
  modified_base 1: mod_base = OTHER; note = 5-methyl
  modified_base 13: mod_base = OTHER; note = 5-methyl
  modified_base 18: mod_base = OTHER; note = 5-methyl
  modified_base 1: mod_base = OTHER; note = bicyclic nucleic acid (BNA)
  modified_base 20: mod_base = OTHER; note = bicyclic nucleic acid (BNA)
  source 1..20: mol_type = other RNA
caaggaagatggcatttcta

SEQ ID NO: 4789 - DNA, 19 bp, synthetic construct
  misc_feature 1..19: note = Description of Artificial Sequence: Synthetic Antisense oligonucleotide
  misc_feature 1..19: note = Original Sequence: caaggaagauggcauuuct
  modified_base 1: mod_base = OTHER; note = 5-methyl
  modified_base 13: mod_base = OTHER; note = 5-methyl
  modified_base 18: mod_base = OTHER; note = 5-methyl
  modified_base 1: mod_base = OTHER; note = bicyclic nucleic acid (BNA)
  modified_base 19: mod_base = OTHER; note = bicyclic nucleic acid (BNA)
  source 1..19: mol_type = other DNA
  modified_base 10: mod_base = OTHER; note = Uracil
  modified_base 15: mod_base = OTHER; note = Uracil
  modified_base 16: mod_base = OTHER; note = Uracil
  modified_base 17: mod_base = OTHER; note = Uracil
caaggaagatggcatttct

SEQ ID NO: 4790 - RNA, 18 nt, synthetic construct
  misc_feature 1..18: note = Description of Artificial Sequence: Synthetic Antisense oligonucleotide
  modified_base 1: mod_base = OTHER; note = 5-methyl
  modified_base 13: mod_base = OTHER; note = 5-methyl
  modified_base 18: mod_base = OTHER; note = 5-methyl
  modified_base 1: mod_base = OTHER; note = bicyclic nucleic acid (BNA)
  modified_base 18: mod_base = OTHER; note = bicyclic nucleic acid (BNA)
  source 1..18: mol_type = other RNA
caaggaagatggcatttc

SEQ ID NO: 4791 - DNA, 17 bp, synthetic construct
  misc_feature 1..17: note = Description of Artificial Sequence: Synthetic Antisense oligonucleotide
  misc_feature 1..17: note = Original Sequence: caaggaagauggcauut
  modified_base 1: mod_base = OTHER; note = 5-methyl
  modified_base 13: mod_base = OTHER; note = 5-methyl
  modified_base 1: mod_base = OTHER; note = bicyclic nucleic acid (BNA)
  modified_base 17: mod_base = OTHER; note = bicyclic nucleic acid (BNA)
  source 1..17: mol_type = other DNA
  modified_base 10: mod_base = OTHER; note = Uracil
  modified_base 15: mod_base = OTHER; note = Uracil
  modified_base 16: mod_base = OTHER; note = Uracil
caaggaagatggcattt

SEQ ID NO: 4792 - DNA, 16 bp, synthetic construct
  misc_feature 1..16: note = Description of Artificial Sequence: Synthetic Antisense oligonucleotide
  misc_feature 1..16: note = Original Sequence: caaggaagauggcaut
  modified_base 1: mod_base = OTHER; note = 5-methyl
  modified_base 13: mod_base = OTHER; note = 5-methyl
  modified_base 1: mod_base = OTHER; note = bicyclic nucleic acid (BNA)
  modified_base 16: mod_base = OTHER; note = bicyclic nucleic acid (BNA)
  source 1..16: mol_type = other DNA
  modified_base 10: mod_base = OTHER; note = Uracil
  modified_base 15: mod_base = OTHER; note = Uracil
caaggaagatggcatt

SEQ ID NO: 4793 - DNA, 15 bp, synthetic construct
  misc_feature 1..15: note = Description of Artificial Sequence: Synthetic Antisense oligonucleotide
  misc_feature 1..15: note = Original Sequence: caaggaagauggcat
  modified_base 1: mod_base = OTHER; note = 5-methyl
  modified_base 13: mod_base = OTHER; note = 5-methyl
  modified_base 1: mod_base = OTHER; note = bicyclic nucleic acid (BNA)
  modified_base 15: mod_base = OTHER; note = bicyclic nucleic acid (BNA)
  source 1..15: mol_type = other DNA
  modified_base 10: mod_base = OTHER; note = Uracil
caaggaagatggcat

SEQ ID NO: 4794 - RNA, 14 nt, synthetic construct
  misc_feature 1..14: note = Description of Artificial Sequence: Synthetic Antisense oligonucleotide
  modified_base 1: mod_base = OTHER; note = 5-methyl
  modified_base 13: mod_base = OTHER; note = 5-methyl
  modified_base 1: mod_base = OTHER; note = bicyclic nucleic acid (BNA)
  modified_base 14: mod_base = OTHER; note = bicyclic nucleic acid (BNA)
  source 1..14: mol_type = other RNA
caaggaagatggca

SEQ ID NO: 4795 - RNA, 13 nt, synthetic construct
  misc_feature 1..13: note = Description of Artificial Sequence: Synthetic Antisense oligonucleotide
  modified_base 1: mod_base = OTHER; note = 5-methyl
  modified_base 13: mod_base = OTHER; note = 5-methyl
  modified_base 1: mod_base = OTHER; note = bicyclic nucleic acid (BNA)
  modified_base 13: mod_base = OTHER; note = bicyclic nucleic acid (BNA)
  source 1..13: mol_type = other RNA
caaggaagatggc

SEQ ID NO: 4796 - RNA, 12 nt, synthetic construct
  misc_feature 1..12: note = Description of Artificial Sequence: Synthetic Antisense oligonucleotide
  modified_base 1: mod_base = OTHER; note = 5-methyl
  modified_base 1: mod_base = OTHER; note = bicyclic nucleic acid (BNA)
  modified_base 12: mod_base = OTHER; note = bicyclic nucleic acid (BNA)
  source 1..12: mol_type = other RNA
caaggaagatgg

SEQ ID NO: 4797 - RNA, 11 nt, synthetic construct
  misc_feature 1..11: note = Description of Artificial Sequence: Synthetic Antisense oligonucleotide
  modified_base 1: mod_base = OTHER; note = 5-methyl
  modified_base 1: mod_base = OTHER; note = bicyclic nucleic acid (BNA)
  modified_base 11: mod_base = OTHER; note = bicyclic nucleic acid (BNA)
  source 1..11: mol_type = other RNA
caaggaagatg

SEQ ID NO: 4798 - DNA, 10 bp, synthetic construct
  misc_feature 1..10: note = Description of Artificial Sequence: Synthetic Antisense oligonucleotide
  modified_base 1: mod_base = OTHER; note = 5-methyl
  modified_base 1: mod_base = OTHER; note = bicyclic nucleic acid (BNA)
  modified_base 10: mod_base = OTHER; note = bicyclic nucleic acid (BNA)
  source 1..10: mol_type = other DNA
caaggaagat

SEQ ID NO: 4799-4800 - skipped (2 entries)

SEQ ID NO: 4801 - RNA, 20 nt, synthetic construct
  misc_feature 1..20: note = Description of Artificial Sequence: Synthetic Antisense oligonucleotide
  modified_base 1: mod_base = OTHER; note = bicyclic nucleic acid (BNA)
  modified_base 20: mod_base = OTHER; note = bicyclic nucleic acid (BNA)
  modified_base 12: mod_base = OTHER; note = 5-methyl
  modified_base 17: mod_base = OTHER; note = 5-methyl
  source 1..20: mol_type = other RNA
aaggaagatggcatttctag

SEQ ID NO: 4802 - RNA, 19 nt, synthetic construct
  misc_feature 1..19: note = Description of Artificial Sequence: Synthetic Antisense oligonucleotide
  modified_base 1: mod_base = OTHER; note = bicyclic nucleic acid (BNA)
  modified_base 19: mod_base = OTHER; note = bicyclic nucleic acid (BNA)
  modified_base 12: mod_base = OTHER; note = 5-methyl
  modified_base 17: mod_base = OTHER; note = 5-methyl
  source 1..19: mol_type = other RNA
aaggaagatggcatttcta

SEQ ID NO: 4803 - DNA, 18 bp, synthetic construct
  misc_feature 1..18: note = Description of Artificial Sequence: Synthetic Antisense oligonucleotide
  misc_feature 1..18: note = Original Sequence: aaggaagauggcauuuct
  modified_base 1: mod_base = OTHER; note = bicyclic nucleic acid (BNA)
  modified_base 18: mod_base = OTHER; note = bicyclic nucleic acid (BNA)
  modified_base 12: mod_base = OTHER; note = 5-methyl
  modified_base 17: mod_base = OTHER; note = 5-methyl
  source 1..18: mol_type = other DNA
  modified_base 9: mod_base = OTHER; note = Uracil
  modified_base 14: mod_base = OTHER; note = Uracil
  modified_base 15: mod_base = OTHER; note = Uracil
  modified_base 16: mod_base = OTHER; note = Uracil
aaggaagatggcatttct

SEQ ID NO: 4804 - RNA, 17 nt, synthetic construct
  misc_feature 1..17: note = Description of Artificial Sequence: Synthetic Antisense oligonucleotide
  modified_base 1: mod_base = OTHER; note = bicyclic nucleic acid (BNA)
  modified_base 17: mod_base = OTHER; note = bicyclic nucleic acid (BNA)
  modified_base 12: mod_base = OTHER; note = 5-methyl
  modified_base 17: mod_base = OTHER; note = 5-methyl
  source 1..17: mol_type = other RNA
aaggaagatggcatttc

SEQ ID NO: 4805 - DNA, 16 bp, synthetic construct
  misc_feature 1..16: note = Description of Artificial Sequence: Synthetic Antisense oligonucleotide
  misc_feature 1..16: note = Original Sequence: aaggaagauggcauut
  modified_base 1: mod_base = OTHER; note = bicyclic nucleic acid (BNA)
  modified_base 16: mod_base = OTHER; note = bicyclic nucleic acid (BNA)
  modified_base 12: mod_base = OTHER; note = 5-methyl
  source 1..16: mol_type = other DNA
  modified_base 9: mod_base = OTHER; note = Uracil
  modified_base 14: mod_base = OTHER; note = Uracil
  modified_base 15: mod_base = OTHER; note = Uracil
aaggaagatggcattt

SEQ ID NO: 4806 - DNA, 15 bp, synthetic construct
  misc_feature 1..15: note = Description of Artificial Sequence: Synthetic Antisense oligonucleotide
  misc_feature 1..15: note = Original Sequence: aaggaagauggcaut
  modified_base 1: mod_base = OTHER; note = bicyclic nucleic acid (BNA)
  modified_base 15: mod_base = OTHER; note = bicyclic nucleic acid (BNA)
  modified_base 12: mod_base = OTHER; note = 5-methyl
  source 1..15: mol_type = other DNA
  modified_base 9: mod_base = OTHER; note = Uracil
  modified_base 14: mod_base = OTHER; note = Uracil
aaggaagatggcatt

SEQ ID NO: 4807 - DNA, 14 bp, synthetic construct
  misc_feature 1..14: note = Description of Artificial Sequence: Synthetic Antisense oligonucleotide
  misc_feature 1..14: note = Original Sequence: aaggaagauggcat
  modified_base 1: mod_base = OTHER; note = bicyclic nucleic acid (BNA)
  modified_base 14: mod_base = OTHER; note = bicyclic nucleic acid (BNA)
  modified_base 12: mod_base = OTHER; note = 5-methyl
  source 1..14: mol_type = other DNA
  modified_base 9: mod_base = OTHER; note = Uracil
aaggaagatggcat

SEQ ID NO: 4808 - RNA, 13 nt, synthetic construct
  misc_feature 1..13: note = Description of Artificial Sequence: Synthetic Antisense oligonucleotide
  modified_base 1: mod_base = OTHER; note = bicyclic nucleic acid (BNA)
  modified_base 13: mod_base = OTHER; note = bicyclic nucleic acid (BNA)
  modified_base 12: mod_base = OTHER; note = 5-methyl
  source 1..13: mol_type = other RNA
aaggaagatggca

SEQ ID NO: 4809 - RNA, 12 nt, synthetic construct
  misc_feature 1..12: note = Description of Artificial Sequence: Synthetic Antisense oligonucleotide
  modified_base 1: mod_base = OTHER; note = bicyclic nucleic acid (BNA)
  modified_base 12: mod_base = OTHER; note = bicyclic nucleic acid (BNA)
  modified_base 12: mod_base = OTHER; note = 5-methyl
  source 1..12: mol_type = other RNA
aaggaagatggc

SEQ ID NO: 4810 - RNA, 19 nt, synthetic construct
  misc_feature 1..19: note = Description of Artificial Sequence: Synthetic Antisense oligonucleotide
  modified_base 1: mod_base = OTHER; note = bicyclic nucleic acid (BNA)
  modified_base 19: mod_base = OTHER; note = bicyclic nucleic acid (BNA)
  modified_base 11: mod_base = OTHER; note = 5-methyl
  modified_base 16: mod_base = OTHER; note = 5-methyl
  source 1..19: mol_type = other RNA
aggaagatggcatttctag

SEQ ID NO: 4811 - RNA, 18 nt, synthetic construct
  misc_feature 1..18: note = Description of Artificial Sequence: Synthetic Antisense oligonucleotide
  modified_base 1: mod_base = OTHER; note = bicyclic nucleic acid (BNA)
  modified_base 18: mod_base = OTHER; note = bicyclic nucleic acid (BNA)
  modified_base 11: mod_base = OTHER; note = 5-methyl
  modified_base 16: mod_base = OTHER; note = 5-methyl
  source 1..18: mol_type = other RNA
aggaagatggcatttcta

SEQ ID NO: 4812 - DNA, 17 bp, synthetic construct
  misc_feature 1..17: note = Description of Artificial Sequence: Synthetic Antisense oligonucleotide
  misc_feature 1..17: note = Original Sequence: aggaagauggcauuuct
  modified_base 1: mod_base = OTHER; note = bicyclic nucleic acid (BNA)
  modified_base 17: mod_base = OTHER; note = bicyclic nucleic acid (BNA)
  modified_base 11: mod_base = OTHER; note = 5-methyl
  modified_base 16: mod_base = OTHER; note = 5-methyl
  source 1..17: mol_type = other DNA
  modified_base 8: mod_base = OTHER; note = Uracil
  modified_base 13: mod_base = OTHER; note = Uracil
  modified_base 14: mod_base = OTHER; note = Uracil
  modified_base 15: mod_base = OTHER; note = Uracil
aggaagatggcatttct

SEQ ID NO: 4813 - RNA, 16 nt, synthetic construct
  misc_feature 1..16: note = Description of Artificial Sequence: Synthetic Antisense oligonucleotide
  modified_base 1: mod_base = OTHER; note = bicyclic nucleic acid (BNA)
  modified_base 16: mod_base = OTHER; note = bicyclic nucleic acid (BNA)
  modified_base 11: mod_base = OTHER; note = 5-methyl
  modified_base 16: mod_base = OTHER; note = 5-methyl
  source 1..16: mol_type = other RNA
aggaagatggcatttc

SEQ ID NO: 4814 - DNA, 15 bp, synthetic construct
  misc_feature 1..15: note = Description of Artificial Sequence: Synthetic Antisense oligonucleotide
  misc_feature 1..15: note = Original Sequence: aggaagauggcauut
  modified_base 1: mod_base = OTHER; note = bicyclic nucleic acid (BNA)
  modified_base 15: mod_base = OTHER; note = bicyclic nucleic acid (BNA)
  modified_base 11: mod_base = OTHER; note = 5-methyl
  source 1..15: mol_type = other DNA
  modified_base 8: mod_base = OTHER; note = Uracil
  modified_base 13: mod_base = OTHER; note = Uracil
  modified_base 14: mod_base = OTHER; note = Uracil
aggaagatggcattt

SEQ ID NO: 4815 - DNA, 14 bp, synthetic construct
  misc_feature 1..14: note = Description of Artificial Sequence: Synthetic Antisense oligonucleotide
  misc_feature 1..14: note = Original Sequence: aggaagauggcaut
  modified_base 1: mod_base = OTHER; note = bicyclic nucleic acid (BNA)
  modified_base 14: mod_base = OTHER; note = bicyclic nucleic acid (BNA)
  modified_base 11: mod_base = OTHER; note = 5-methyl
  source 1..14: mol_type = other DNA
  modified_base 8: mod_base = OTHER; note = Uracil
  modified_base 13: mod_base = OTHER; note = Uracil
aggaagatggcatt

SEQ ID NO: 4816 - DNA, 13 bp, synthetic construct
  misc_feature 1..13: note = Description of Artificial Sequence: Synthetic Antisense oligonucleotide
  misc_feature 1..13: note = Original Sequence: aggaagauggcat
  modified_base 1: mod_base = OTHER; note = bicyclic nucleic acid (BNA)
  modified_base 13: mod_base = OTHER; note = bicyclic nucleic acid (BNA)
  modified_base 11: mod_base = OTHER; note = 5-methyl
  source 1..13: mol_type = other DNA
  modified_base 8: mod_base = OTHER; note = Uracil
aggaagatggcat

SEQ ID NO: 4817 - RNA, 12 nt, synthetic construct
  misc_feature 1..12: note = Description of Artificial Sequence: Synthetic Antisense oligonucleotide
  modified_base 1: mod_base = OTHER; note = bicyclic nucleic acid (BNA)
  modified_base 12: mod_base = OTHER; note = bicyclic nucleic acid (BNA)
  modified_base 11: mod_base = OTHER; note = 5-methyl
  source 1..12: mol_type = other RNA
aggaagatggca

SEQ ID NO: 4818 - RNA, 18 nt, synthetic construct
  misc_feature 1..18: note = Description of Artificial Sequence: Synthetic Antisense oligonucleotide
  modified_base 1: mod_base = OTHER; note = bicyclic nucleic acid (BNA)
  modified_base 18: mod_base = OTHER; note = bicyclic nucleic acid (BNA)
  modified_base 10: mod_base = OTHER; note = 5-methyl
  modified_base 15: mod_base = OTHER; note = 5-methyl
  source 1..18: mol_type = other RNA
ggaagatggcatttctag

SEQ ID NO: 4819 - RNA, 17 nt, synthetic construct
  misc_feature 1..17: note = Description of Artificial Sequence: Synthetic Antisense oligonucleotide
  modified_base 1: mod_base = OTHER; note = bicyclic nucleic acid (BNA)
  modified_base 17: mod_base = OTHER; note = bicyclic nucleic acid (BNA)
  modified_base 10: mod_base = OTHER; note = 5-methyl
  modified_base 15: mod_base = OTHER; note = 5-methyl
  source 1..17: mol_type = other RNA
ggaagatggcatttcta

SEQ ID NO: 4820 - DNA, 16 bp, synthetic construct
  misc_feature 1..16: note = Description of Artificial Sequence: Synthetic Antisense oligonucleotide
  misc_feature 1..16: note = Original Sequence: ggaagauggcauuuct
  modified_base 1: mod_base = OTHER; note = bicyclic nucleic acid (BNA)
  modified_base 16: mod_base = OTHER; note = bicyclic nucleic acid (BNA)
  modified_base 10: mod_base = OTHER; note = 5-methyl
  modified_base 15: mod_base = OTHER; note = 5-methyl
  source 1..16: mol_type = other DNA
  modified_base 7: mod_base = OTHER; note = Uracil
  modified_base 12: mod_base = OTHER; note = Uracil
  modified_base 13: mod_base = OTHER; note = Uracil
  modified_base 14: mod_base = OTHER; note = Uracil
ggaagatggcatttct

SEQ ID NO: 4821 - RNA, 15 nt, synthetic construct
  misc_feature 1..15: note = Description of Artificial Sequence: Synthetic Antisense oligonucleotide
  modified_base 1: mod_base = OTHER; note = bicyclic nucleic acid (BNA)
  modified_base 15: mod_base = OTHER; note = bicyclic nucleic acid (BNA)
  modified_base 10: mod_base = OTHER; note = 5-methyl
  modified_base 15: mod_base = OTHER; note = 5-methyl
  source 1..15: mol_type = other RNA
ggaagatggcatttc

SEQ ID NO: 4822 - DNA, 14 bp, synthetic construct
  misc_feature 1..14: note = Description of Artificial Sequence: Synthetic Antisense oligonucleotide
  misc_feature 1..14: note = Original Sequence: ggaagauggcauut
  modified_base 1: mod_base = OTHER; note = bicyclic nucleic acid (BNA)
  modified_base 14: mod_base = OTHER; note = bicyclic nucleic acid (BNA)
  modified_base 10: mod_base = OTHER; note = 5-methyl
  source 1..14: mol_type = other DNA
  modified_base 7: mod_base = OTHER; note = Uracil
  modified_base 12: mod_base = OTHER; note = Uracil
  modified_base 13: mod_base = OTHER; note = Uracil
ggaagatggcattt

SEQ ID NO: 4823 - DNA, 13 bp, synthetic construct
  misc_feature 1..13: note = Description of Artificial Sequence: Synthetic Antisense oligonucleotide
  misc_feature 1..13: note = Original Sequence: ggaagauggcaut
  modified_base 1: mod_base = OTHER; note = bicyclic nucleic acid (BNA)
  modified_base 13: mod_base = OTHER; note = bicyclic nucleic acid (BNA)
  modified_base 10: mod_base = OTHER; note = 5-methyl
  source 1..13: mol_type = other DNA
  modified_base 7: mod_base = OTHER; note = Uracil
  modified_base 12: mod_base = OTHER; note = Uracil
ggaagatggcatt

SEQ ID NO: 4824 - DNA, 12 bp, synthetic construct
  misc_feature 1..12: note = Description of Artificial Sequence: Synthetic Antisense oligonucleotide
  misc_feature 1..12: note = Original Sequence: ggaagauggcat
  modified_base 1: mod_base = OTHER; note = bicyclic nucleic acid (BNA)
  modified_base 12: mod_base = OTHER; note = bicyclic nucleic acid (BNA)
  modified_base 10: mod_base = OTHER; note = 5-methyl
  source 1..12: mol_type = other DNA
  modified_base 7: mod_base = OTHER; note = Uracil
ggaagatggcat

SEQ ID NO: 4825 - RNA, 11 nt, synthetic construct
  misc_feature 1..11: note = Description of Artificial Sequence: Synthetic Antisense oligonucleotide
  modified_base 1: mod_base = OTHER; note = bicyclic nucleic acid (BNA)
  modified_base 11: mod_base = OTHER; note = bicyclic nucleic acid (BNA)
  modified_base 10: mod_base = OTHER; note = 5-methyl
  source 1..11: mol_type = other RNA
ggaagatggca

SEQ ID NO: 4826 - RNA, 10 nt, synthetic construct
  misc_feature 1..10: note = Description of Artificial Sequence: Synthetic Antisense oligonucleotide
  modified_base 1: mod_base = OTHER; note = bicyclic nucleic acid (BNA)
  modified_base 10: mod_base = OTHER; note = bicyclic nucleic acid (BNA)
  modified_base 10: mod_base = OTHER; note = 5-methyl
  source 1..10: mol_type = other RNA
ggaagatggc

SEQ ID NO: 4827 - RNA, 17 nt, synthetic construct
  misc_feature 1..17: note = Description of Artificial Sequence: Synthetic Antisense oligonucleotide
  modified_base 1: mod_base = OTHER; note = bicyclic nucleic acid (BNA)
  modified_base 17: mod_base = OTHER; note = bicyclic nucleic acid (BNA)
  modified_base 9: mod_base = OTHER; note = 5-methyl
  modified_base 14: mod_base = OTHER; note = 5-methyl
  source 1..17: mol_type = other RNA
gaagatggcatttctag

SEQ ID NO: 4828 - RNA, 16 nt, synthetic construct
  misc_feature 1..16: note = Description of Artificial Sequence: Synthetic Antisense oligonucleotide
  modified_base 1: mod_base = OTHER; note = bicyclic nucleic acid (BNA)
  modified_base 16: mod_base = OTHER; note = bicyclic nucleic acid (BNA)
  modified_base 9: mod_base = OTHER; note = 5-methyl
  modified_base 14: mod_base = OTHER; note = 5-methyl
  source 1..16: mol_type = other RNA
gaagatggcatttcta

SEQ ID NO: 4829 - RNA, 14 nt, synthetic construct
  misc_feature 1..14: note = Description of Artificial Sequence: Synthetic Antisense oligonucleotide
  modified_base 1: mod_base = OTHER; note = bicyclic nucleic acid (BNA)
  modified_base 14: mod_base = OTHER; note = bicyclic nucleic acid (BNA)
  modified_base 9: mod_base = OTHER; note = 5-methyl
  modified_base 14: mod_base = OTHER; note = 5-methyl
  source 1..14: mol_type = other RNA
gaagatggcatttc

SEQ ID NO: 4830 - DNA, 13 bp, synthetic construct
  misc_feature 1..13: note = Description of Artificial Sequence: Synthetic Antisense oligonucleotide
  misc_feature 1..13: note = Original Sequence: gaagauggcauut
  modified_base 1: mod_base = OTHER; note = bicyclic nucleic acid (BNA)
  modified_base 13: mod_base = OTHER; note = bicyclic nucleic acid (BNA)
  modified_base 9: mod_base = OTHER; note = 5-methyl
  source 1..13: mol_type = other DNA
  modified_base 6: mod_base = OTHER; note = Uracil
  modified_base 11: mod_base = OTHER; note = Uracil
  modified_base 12: mod_base = OTHER; note = Uracil
gaagatggcattt

SEQ ID NO: 4831 - DNA, 12 bp, synthetic construct
  misc_feature 1..12: note = Description of Artificial Sequence: Synthetic Antisense oligonucleotide
  misc_feature 1..12: note = Original Sequence: gaagauggcaut
  modified_base 1: mod_base = OTHER; note = bicyclic nucleic acid (BNA)
  modified_base 12: mod_base = OTHER; note = bicyclic nucleic acid (BNA)
  modified_base 9: mod_base = OTHER; note = 5-methyl
  source 1..12: mol_type = other DNA
  modified_base 6: mod_base = OTHER; note = Uracil
  modified_base 11: mod_base = OTHER; note = Uracil
gaagatggcatt

SEQ ID NO: 4832 - DNA, 11 bp, synthetic construct
  misc_feature 1..11: note = Description of Artificial Sequence: Synthetic Antisense oligonucleotide
  misc_feature 1..11: note = Original Sequence: gaagauggcat
  modified_base 1: mod_base = OTHER; note = bicyclic nucleic acid (BNA)
  modified_base 11: mod_base = OTHER; note = bicyclic nucleic acid (BNA)
  modified_base 9: mod_base = OTHER; note = 5-methyl
  source 1..11: mol_type = other DNA
  modified_base 6: mod_base = OTHER; note = Uracil
gaagatggcat

SEQ ID NO: 4833 - RNA, 10 nt, synthetic construct
  misc_feature 1..10: note = Description of Artificial Sequence: Synthetic Antisense oligonucleotide
  modified_base 1: mod_base = OTHER; note = bicyclic nucleic acid (BNA)
  modified_base 10: mod_base = OTHER; note = bicyclic nucleic acid (BNA)
  modified_base 9: mod_base = OTHER; note = 5-methyl
  source 1..10: mol_type = other RNA
gaagatggca

SEQ ID NO: 4834 - skipped

SEQ ID NO: 4835 - RNA, 16 nt, synthetic construct
  misc_feature 1..16: note = Description of Artificial Sequence: Synthetic Antisense oligonucleotide
  modified_base 1: mod_base = OTHER; note = bicyclic nucleic acid (BNA)
  modified_base 16: mod_base = OTHER; note = bicyclic nucleic acid (BNA)
  modified_base 8: mod_base = OTHER; note = 5-methyl
  modified_base 13: mod_base = OTHER; note = 5-methyl
  source 1..16: mol_type = other RNA
aagatggcatttctag

SEQ ID NO: 4836 - RNA, 15 nt, synthetic construct
  misc_feature 1..15: note = Description of Artificial Sequence: Synthetic Antisense oligonucleotide
  modified_base 1: mod_base = OTHER; note = bicyclic nucleic acid (BNA)
  modified_base 15: mod_base = OTHER; note = bicyclic nucleic acid (BNA)
  modified_base 8: mod_base = OTHER; note = 5-methyl
  modified_base 13: mod_base = OTHER; note = 5-methyl
  source 1..15: mol_type = other RNA
aagatggcatttcta

SEQ ID NO: 4837 - DNA, 14 bp, synthetic construct
  misc_feature 1..14: note = Description of Artificial Sequence: Synthetic Antisense oligonucleotide
  misc_feature 1..14: note = Original Sequence: aagauggcauuuct
  modified_base 1: mod_base = OTHER; note = bicyclic nucleic acid (BNA)
  modified_base 14: mod_base = OTHER; note = bicyclic nucleic acid (BNA)
  modified_base 8: mod_base = OTHER; note = 5-methyl
  modified_base 13: mod_base = OTHER; note = 5-methyl
  source 1..14: mol_type = other DNA
  modified_base 5: mod_base = OTHER; note = Uracil
  modified_base 10: mod_base = OTHER; note = Uracil
  modified_base 11: mod_base = OTHER; note = Uracil
  modified_base 12: mod_base = OTHER; note = Uracil
aagatggcatttct

SEQ ID NO: 4838 - RNA, 13 nt, synthetic construct
  misc_feature 1..13: note = Description of Artificial Sequence: Synthetic Antisense oligonucleotide
  modified_base 1: mod_base = OTHER; note = bicyclic nucleic acid (BNA)
  modified_base 13: mod_base = OTHER; note = bicyclic nucleic acid (BNA)
  modified_base 8: mod_base = OTHER; note = 5-methyl
  modified_base 13: mod_base = OTHER; note = 5-methyl
  source 1..13: mol_type = other RNA
aagatggcatttc

SEQ ID NO: 4839 - DNA, 12 bp, synthetic construct
  misc_feature 1..12: note = Description of Artificial Sequence: Synthetic Antisense oligonucleotide
  misc_feature 1..12: note = Original Sequence: aagauggcauut
  modified_base 1: mod_base = OTHER; note = bicyclic nucleic acid (BNA)
  modified_base 12: mod_base = OTHER; note = bicyclic nucleic acid (BNA)
  modified_base 8: mod_base = OTHER; note = 5-methyl
  source 1..12: mol_type = other DNA
  modified_base 5: mod_base = OTHER; note = Uracil
  modified_base 10: mod_base = OTHER; note = Uracil
  modified_base 11: mod_base = OTHER; note = Uracil
aagatggcattt

SEQ ID NO: 4840 - DNA, 11 bp, synthetic construct
  misc_feature 1..11: note = Description of Artificial Sequence: Synthetic Antisense oligonucleotide
  misc_feature 1..11: note = Original Sequence: aagauggcaut
  modified_base 1: mod_base = OTHER; note = bicyclic nucleic acid (BNA)
  modified_base 11: mod_base = OTHER; note = bicyclic nucleic acid (BNA)
  modified_base 8: mod_base = OTHER; note = 5-methyl
  source 1..11: mol_type = other DNA
  modified_base 5: mod_base = OTHER; note = Uracil
  modified_base 10: mod_base = OTHER; note = Uracil
aagatggcatt

SEQ ID NO: 4841 - DNA, 10 bp, synthetic construct
  misc_feature 1..10: note = Description of Artificial Sequence: Synthetic Antisense oligonucleotide
  misc_feature 1..10: note = Original Sequence: aagauggcat
  modified_base 1: mod_base = OTHER; note = bicyclic nucleic acid (BNA)
  modified_base 10: mod_base = OTHER; note = bicyclic nucleic acid (BNA)
  modified_base 8: mod_base = OTHER; note = 5-methyl
  source 1..10: mol_type = other DNA
  modified_base 5: mod_base = OTHER; note = Uracil
aagatggcat

SEQ ID NO: 4842-4843 - skipped (2 entries)

SEQ ID NO: 4844 - RNA, 15 nt, synthetic construct
  misc_feature 1..15: note = Description of Artificial Sequence: Synthetic Antisense oligonucleotide
  modified_base 1: mod_base = OTHER; note = bicyclic nucleic acid (BNA)
  modified_base 15: mod_base = OTHER; note = bicyclic nucleic acid (BNA)
  modified_base 7: mod_base = OTHER; note = 5-methyl
  modified_base 12: mod_base = OTHER; note = 5-methyl
  source 1..15: mol_type = other RNA
agatggcatttctag

SEQ ID NO: 4845 - RNA, 14 nt, synthetic construct
  misc_feature 1..14: note = Description of Artificial Sequence: Synthetic Antisense oligonucleotide
  modified_base 1: mod_base = OTHER; note = bicyclic nucleic acid (BNA)
  modified_base 14: mod_base = OTHER; note = bicyclic nucleic acid (BNA)
  modified_base 7: mod_base = OTHER; note = 5-methyl
  modified_base 12: mod_base = OTHER; note = 5-methyl
  source 1..14: mol_type = other RNA
agatggcatttcta

SEQ ID NO: 4846 - DNA, 13 bp, synthetic construct
  misc_feature 1..13: note = Description of Artificial Sequence: Synthetic Antisense oligonucleotide
  misc_feature 1..13: note = Original Sequence: agauggcauuuct
  modified_base 1: mod_base = OTHER; note = bicyclic nucleic acid (BNA)
  modified_base 13: mod_base = OTHER; note = bicyclic nucleic acid (BNA)
  modified_base 7: mod_base = OTHER; note = 5-methyl
  modified_base 12: mod_base = OTHER; note = 5-methyl
  source 1..13: mol_type = other DNA
  modified_base 4: mod_base = OTHER; note = Uracil
  modified_base 9: mod_base = OTHER; note = Uracil
  modified_base 10: mod_base = OTHER; note = Uracil
  modified_base 11: mod_base = OTHER; note = Uracil
agatggcatttct

SEQ ID NO: 4847 - RNA, 12 nt, synthetic construct
  misc_feature 1..12: note = Description of Artificial Sequence: Synthetic Antisense oligonucleotide
  modified_base 1: mod_base = OTHER; note = bicyclic nucleic acid (BNA)
  modified_base 12: mod_base = OTHER; note = bicyclic nucleic acid (BNA)
  modified_base 7: mod_base = OTHER; note = 5-methyl
  modified_base 12: mod_base = OTHER; note = 5-methyl
  source 1..12: mol_type = other RNA
agatggcatttc

SEQ ID NO: 4848 - DNA, 11 bp, synthetic construct
  misc_feature 1..11: note = Description of Artificial Sequence: Synthetic Antisense oligonucleotide
  misc_feature 1..11: note = Original Sequence: agauggcauut
  modified_base 1: mod_base = OTHER; note = bicyclic nucleic acid (BNA)
  modified_base 11: mod_base = OTHER; note = bicyclic nucleic acid (BNA)
  modified_base 7: mod_base = OTHER; note = 5-methyl
  source 1..11: mol_type = other DNA
  modified_base 4: mod_base = OTHER; note = Uracil
  modified_base 9: mod_base = OTHER; note = Uracil
  modified_base 10: mod_base = OTHER; note = Uracil
agatggcattt

SEQ ID NO: 4849 - DNA, 10 bp, synthetic construct
  misc_feature 1..10: note = Description of Artificial Sequence: Synthetic Antisense oligonucleotide
  misc_feature 1..10: note = Original Sequence: agauggcaut
  modified_base 1: mod_base = OTHER; note = bicyclic nucleic acid (BNA)
  modified_base 10: mod_base = OTHER; note = bicyclic nucleic acid (BNA)
  modified_base 7: mod_base = OTHER; note = 5-methyl
  source 1..10: mol_type = other DNA
  modified_base 4: mod_base = OTHER; note = Uracil
  modified_base 9: mod_base = OTHER; note = Uracil
agatggcatt

SEQ ID NO: 4850-4851 - skipped (2 entries)

SEQ ID NO: 4852 - RNA, 30 nt, synthetic construct; identical to SEQ ID NO: 287
  misc_feature 1..30: note = Description of Artificial Sequence: Synthetic Antisense oligonucleotide
  modified_base 1: mod_base = OTHER; note = 5-methyl
  modified_base 3..4: mod_base = OTHER; note = 5-methyl
  modified_base 7: mod_base = OTHER; note = 5-methyl
  modified_base 10: mod_base = OTHER; note = 5-methyl
  modified_base 22: mod_base = OTHER; note = 5-methyl
  modified_base 27: mod_base = OTHER; note = 5-methyl
  modified_base 1: mod_base = OTHER; note = bicyclic nucleic acid (BNA)
  modified_base 30: mod_base = OTHER; note = bicyclic nucleic acid (BNA)
  source 1..30: mol_type = other RNA

SEQ ID NO: 4853 - RNA, 29 nt, synthetic construct
  misc_feature 1..29: note = Description of Artificial Sequence: Synthetic Antisense oligonucleotide
  modified_base 1: mod_base = OTHER; note = 5-methyl
  modified_base 3..4: mod_base = OTHER; note = 5-methyl
  modified_base 7: mod_base = OTHER; note = 5-methyl
  modified_base 10: mod_base = OTHER; note = 5-methyl
  modified_base 22: mod_base = OTHER; note = 5-methyl
  modified_base 27: mod_base = OTHER; note = 5-methyl
  modified_base 1: mod_base = OTHER; note = bicyclic nucleic acid (BNA)
  modified_base 29: mod_base = OTHER; note = bicyclic nucleic acid (BNA)
  source 1..29: mol_type = other RNA
ctccaacatcaaggaagatggcatttcta

SEQ ID NO: 4854 - DNA, 28 bp, synthetic construct
  misc_feature 1..28: note = Description of Artificial Sequence: Synthetic Antisense oligonucleotide
  misc_feature 1..28: note = Original Sequence: cuccaacaucaaggaagauggcauuuct
  modified_base 1: mod_base = OTHER; note = 5-methyl
  modified_base 3..4: mod_base = OTHER; note = 5-methyl
  modified_base 7: mod_base = OTHER; note = 5-methyl
  modified_base 10: mod_base = OTHER; note = 5-methyl
  modified_base 22: mod_base = OTHER; note = 5-methyl
  modified_base 27: mod_base = OTHER; note = 5-methyl
  modified_base 1: mod_base = OTHER; note = bicyclic nucleic acid (BNA)
  modified_base 28: mod_base = OTHER; note = bicyclic nucleic acid (BNA)
  source 1..28: mol_type = other DNA
  modified_base 2: mod_base = OTHER; note = Uracil
  modified_base 9: mod_base = OTHER; note = Uracil
  modified_base 19: mod_base = OTHER; note = Uracil
  modified_base 24: mod_base = OTHER; note = Uracil
  modified_base 25: mod_base = OTHER; note = Uracil
  modified_base 26: mod_base = OTHER; note = Uracil
ctccaacatcaaggaagatggcatttct

SEQ ID NO: 4855 - RNA, 27 nt, synthetic construct
  misc_feature 1..27: note = Description of Artificial Sequence: Synthetic Antisense oligonucleotide
  modified_base 1: mod_base = OTHER; note = 5-methyl
  modified_base 3..4: mod_base = OTHER; note = 5-methyl
  modified_base 7: mod_base = OTHER; note = 5-methyl
  modified_base 10: mod_base = OTHER; note = 5-methyl
  modified_base 22: mod_base = OTHER; note = 5-methyl
  modified_base 27: mod_base = OTHER; note = 5-methyl
  modified_base 1: mod_base = OTHER; note = bicyclic nucleic acid (BNA)
  modified_base 27: mod_base = OTHER; note = bicyclic nucleic acid (BNA)
  source 1..27: mol_type = other RNA
ctccaacatcaaggaagatggcatttc

SEQ ID NO: 4856 - DNA, 26 bp, synthetic construct
  misc_feature 1..26: note = Description of Artificial Sequence: Synthetic Antisense oligonucleotide
  misc_feature 1..26: note = Original Sequence: cuccaacaucaaggaagauggcauut
  modified_base 1: mod_base = OTHER; note = 5-methyl
  modified_base 3..4: mod_base = OTHER; note = 5-methyl
  modified_base 7: mod_base = OTHER; note = 5-methyl
  modified_base 10: mod_base = OTHER; note = 5-methyl
  modified_base 22: mod_base = OTHER; note = 5-methyl
  modified_base 1: mod_base = OTHER; note = bicyclic nucleic acid (BNA)
  modified_base 26: mod_base = OTHER; note = bicyclic nucleic acid (BNA)
  source 1..26: mol_type = other DNA
  modified_base 2: mod_base = OTHER; note = Uracil
  modified_base 9: mod_base = OTHER; note = Uracil
  modified_base 19: mod_base = OTHER; note = Uracil
  modified_base 24: mod_base = OTHER; note = Uracil
  modified_base 25: mod_base = OTHER; note = Uracil
ctccaacatcaaggaagatggcattt

SEQ ID NO: 4857 - DNA, 25 bp, synthetic construct
  misc_feature 1..25: note = Description of Artificial Sequence: Synthetic Antisense oligonucleotide
  misc_feature 1..25: note = Original Sequence: cuccaacaucaaggaagauggcaut
  modified_base 1: mod_base = OTHER; note = 5-methyl
  modified_base 3..4: mod_base = OTHER; note = 5-methyl
  modified_base 7: mod_base = OTHER; note = 5-methyl
  modified_base 10: mod_base = OTHER; note = 5-methyl
  modified_base 22: mod_base = OTHER; note = 5-methyl
  modified_base 1: mod_base = OTHER; note = bicyclic nucleic acid (BNA)
  modified_base 25: mod_base = OTHER; note = bicyclic nucleic acid (BNA)
  source 1..25: mol_type = other DNA
  modified_base 2: mod_base = OTHER; note = Uracil
  modified_base 9: mod_base = OTHER; note = Uracil
  modified_base 19: mod_base = OTHER; note = Uracil
  modified_base 24: mod_base = OTHER; note = Uracil
ctccaacatcaaggaagatggcatt

SEQ ID NO: 4858 - DNA, 24 bp, synthetic construct
  misc_feature 1..24: note = Description of Artificial Sequence: Synthetic Antisense oligonucleotide
  misc_feature 1..24: note = Original Sequence: cuccaacaucaaggaagauggcat
  modified_base 1: mod_base = OTHER; note = 5-methyl
  modified_base 3..4: mod_base = OTHER; note = 5-methyl
  modified_base 7: mod_base = OTHER; note = 5-methyl
  modified_base 10: mod_base = OTHER; note = 5-methyl
  modified_base 22: mod_base = OTHER; note = 5-methyl
  modified_base 1: mod_base = OTHER; note = bicyclic nucleic acid (BNA)
  modified_base 24: mod_base = OTHER; note = bicyclic nucleic acid (BNA)
  source 1..24: mol_type = other DNA
  modified_base 2: mod_base = OTHER; note = Uracil
  modified_base 9: mod_base = OTHER; note = Uracil
  modified_base 19: mod_base = OTHER; note = Uracil
ctccaacatcaaggaagatggcat

SEQ ID NO: 4859 - RNA, 23 nt, synthetic construct
  misc_feature 1..23: note = Description of Artificial Sequence: Synthetic Antisense oligonucleotide
  modified_base 1: mod_base = OTHER; note = 5-methyl
  modified_base 3..4: mod_base = OTHER; note = 5-methyl
  modified_base 7: mod_base = OTHER; note = 5-methyl
  modified_base 10: mod_base = OTHER; note = 5-methyl
  modified_base 22: mod_base = OTHER; note = 5-methyl
  modified_base 1: mod_base = OTHER; note = bicyclic nucleic acid (BNA)
  modified_base 23: mod_base = OTHER; note = bicyclic nucleic acid (BNA)
  source 1..23: mol_type = other RNA
ctccaacatcaaggaagatggca

SEQ ID NO: 4860 - RNA, 22 nt, synthetic construct
  misc_feature 1..22: note = Description of Artificial Sequence: Synthetic Antisense oligonucleotide
  modified_base 1: mod_base = OTHER; note = 5-methyl
  modified_base 3..4: mod_base = OTHER; note = 5-methyl
  modified_base 7: mod_base = OTHER; note = 5-methyl
  modified_base 10: mod_base = OTHER; note = 5-methyl
  modified_base 22: mod_base = OTHER; note = 5-methyl
  modified_base 1: mod_base = OTHER; note = bicyclic nucleic acid (BNA)
  modified_base 22: mod_base = OTHER; note = bicyclic nucleic acid (BNA)
  source 1..22: mol_type = other RNA
ctccaacatcaaggaagatggc

SEQ ID NO: 4861 - RNA, 21 nt, synthetic construct
  misc_feature 1..21: note = Description of Artificial Sequence: Synthetic Antisense oligonucleotide
  modified_base 1: mod_base = OTHER; note = 5-methyl
  modified_base 3..4: mod_base = OTHER; note = 5-methyl
  modified_base 7: mod_base = OTHER; note = 5-methyl
  modified_base 10: mod_base = OTHER; note = 5-methyl
  modified_base 1: mod_base = OTHER; note = bicyclic nucleic acid (BNA)
  modified_base 21: mod_base = OTHER; note = bicyclic nucleic acid (BNA)
  source 1..21: mol_type = other RNA
ctccaacatcaaggaagatgg

SEQ ID NO: 4862 - RNA, 20 nt, synthetic construct
  misc_feature 1..20: note = Description of Artificial Sequence: Synthetic Antisense oligonucleotide
  modified_base 1: mod_base = OTHER; note = 5-methyl
  modified_base 3..4: mod_base = OTHER; note = 5-methyl
  modified_base 7: mod_base = OTHER; note = 5-methyl
  modified_base 10: mod_base = OTHER; note = 5-methyl
  modified_base 1: mod_base = OTHER; note = bicyclic nucleic acid (BNA)
  modified_base 20: mod_base = OTHER; note = bicyclic nucleic acid (BNA)
  source 1..20: mol_type = other RNA
ctccaacatcaaggaagatg

SEQ ID NO: 4863 - DNA, 19 bp, synthetic construct
  misc_feature 1..19: note = Description of Artificial Sequence: Synthetic Antisense oligonucleotide
  misc_feature 1..19: note = Original Sequence: cuccaacaucaaggaagat
  modified_base 1: mod_base = OTHER; note = 5-methyl
  modified_base 3..4: mod_base = OTHER; note = 5-methyl
  modified_base 7: mod_base = OTHER; note = 5-methyl
  modified_base 10: mod_base = OTHER; note = 5-methyl
  modified_base 1: mod_base = OTHER; note = bicyclic nucleic acid (BNA)
  modified_base 19: mod_base = OTHER; note = bicyclic nucleic acid (BNA)
  source 1..19: mol_type = other DNA
  modified_base 2: mod_base = OTHER; note = Uracil
  modified_base 9: mod_base = OTHER; note = Uracil
ctccaacatcaaggaagat

SEQ ID NO: 4864 - RNA, 18 nt, synthetic construct
  misc_feature 1..18: note = Description of Artificial Sequence: Synthetic Antisense oligonucleotide
  modified_base 1: mod_base = OTHER; note = 5-methyl
  modified_base 3..4: mod_base = OTHER; note = 5-methyl
  modified_base 7: mod_base = OTHER; note = 5-methyl
  modified_base 10: mod_base = OTHER; note = 5-methyl
  modified_base 1: mod_base = OTHER; note = bicyclic nucleic acid (BNA)
  modified_base 18: mod_base = OTHER; note = bicyclic nucleic acid (BNA)
  source 1..18: mol_type = other RNA
ctccaacatcaaggaaga

SEQ ID NO: 4865 - RNA, 17 nt, synthetic construct
  misc_feature 1..17: note = Description of Artificial Sequence: Synthetic Antisense oligonucleotide
  modified_base 1: mod_base = OTHER; note = 5-methyl
  modified_base 3..4: mod_base = OTHER; note = 5-methyl
  modified_base 7: mod_base = OTHER; note = 5-methyl
  modified_base 10: mod_base = OTHER; note = 5-methyl
  modified_base 1: mod_base = OTHER; note = bicyclic nucleic acid (BNA)
  modified_base 17: mod_base = OTHER; note = bicyclic nucleic acid (BNA)
  source 1..17: mol_type = other RNA
ctccaacatcaaggaag

SEQ ID NO: 4866 - DNA, 29 bp, synthetic construct
  misc_feature 1..29: note = Description of Artificial Sequence: Synthetic Antisense oligonucleotide
  misc_feature 1..29: note = Original Sequence: tccaacaucaaggaagauggcauuucuag
  modified_base 1: mod_base = OTHER; note = bicyclic nucleic acid (BNA)
  modified_base 29: mod_base = OTHER; note = bicyclic nucleic acid (BNA)
  modified_base 2..3: mod_base = OTHER; note = 5-methyl
  modified_base 6: mod_base = OTHER; note = 5-methyl
  modified_base 9: mod_base = OTHER; note = 5-methyl
  modified_base 21: mod_base = OTHER; note = 5-methyl
  modified_base 26: mod_base = OTHER; note = 5-methyl
  source 1..29: mol_type = other DNA
  modified_base 8: mod_base = OTHER; note = Uracil
  modified_base 18: mod_base = OTHER; note = Uracil
  modified_base 23: mod_base = OTHER; note = Uracil
  modified_base 24: mod_base = OTHER; note = Uracil
  modified_base 25: mod_base = OTHER; note = Uracil
  modified_base 27: mod_base = OTHER; note = Uracil
tccaacatcaaggaagatggcatttctag

SEQ ID NO: 4867 - DNA, 28 bp, synthetic construct
  misc_feature 1..28: note = Description of Artificial Sequence: Synthetic Antisense oligonucleotide
  misc_feature 1..28: note = Original Sequence: tccaacaucaaggaagauggcauuucua
  modified_base 1: mod_base = OTHER; note = bicyclic nucleic acid (BNA)
  modified_base 28: mod_base = OTHER; note = bicyclic nucleic acid (BNA)
  modified_base 2..3: mod_base = OTHER; note = 5-methyl
  modified_base 6: mod_base = OTHER; note = 5-methyl
  modified_base 9: mod_base = OTHER; note = 5-methyl
  modified_base 21: mod_base = OTHER; note = 5-methyl
  modified_base 26: mod_base = OTHER; note = 5-methyl
  source 1..28: mol_type = other DNA
  modified_base 8: mod_base = OTHER; note = Uracil
  modified_base 18: mod_base = OTHER; note = Uracil
  modified_base 23: mod_base = OTHER; note = Uracil
  modified_base 24: mod_base = OTHER; note = Uracil
  modified_base 25: mod_base = OTHER; note = Uracil
  modified_base 27: mod_base = OTHER; note = Uracil
tccaacatcaaggaagatggcatttcta

SEQ ID NO: 4868 - DNA, 27 bp, synthetic construct
  misc_feature 1..27: note = Description of Artificial Sequence: Synthetic Antisense oligonucleotide
  misc_feature 1..27: note = Original Sequence: tccaacaucaaggaagauggcauuuct
  modified_base 1: mod_base = OTHER; note = bicyclic nucleic acid (BNA)
  modified_base 27: mod_base = OTHER; note = bicyclic nucleic acid (BNA)
  modified_base 2..3: mod_base = OTHER; note = 5-methyl
  modified_base 6: mod_base = OTHER; note = 5-methyl
  modified_base 9: mod_base = OTHER; note = 5-methyl
  modified_base 21: mod_base = OTHER; note = 5-methyl
  modified_base 26: mod_base = OTHER; note = 5-methyl
  source 1..27: mol_type = other DNA
  modified_base 8: mod_base = OTHER; note = Uracil
  modified_base 18: mod_base = OTHER; note = Uracil
  modified_base 23: mod_base = OTHER; note = Uracil
  modified_base 24: mod_base = OTHER; note = Uracil
  modified_base 25: mod_base = OTHER; note = Uracil
tccaacatcaaggaagatggcatttct

SEQ ID NO: 4869 - DNA, 26 bp, synthetic construct
  misc_feature 1..26: note = Description of Artificial Sequence: Synthetic Antisense oligonucleotide
  misc_feature 1..26: note = Original Sequence: tccaacaucaaggaagauggcauuuc
  modified_base 1: mod_base = OTHER; note = bicyclic nucleic acid (BNA)
  modified_base 26: mod_base = OTHER; note = bicyclic nucleic acid (BNA)
  modified_base 2..3: mod_base = OTHER; note = 5-methyl
  modified_base 6: mod_base = OTHER; note = 5-methyl
  modified_base 9: mod_base = OTHER; note = 5-methyl
  modified_base 21: mod_base = OTHER; note = 5-methyl
  modified_base 26: mod_base = OTHER; note = 5-methyl
  source 1..26: mol_type = other DNA
  modified_base 8: mod_base = OTHER; note = Uracil
  modified_base 18: mod_base = OTHER; note = Uracil
  modified_base 23: mod_base = OTHER; note = Uracil
  modified_base 24: mod_base = OTHER; note = Uracil
  modified_base 25: mod_base = OTHER; note = Uracil
tccaacatcaaggaagatggcatttc

SEQ ID NO: 4870 - DNA, 25 bp, synthetic construct
  misc_feature 1..25: note = Description of Artificial Sequence: Synthetic Antisense oligonucleotide
  misc_feature 1..25: note = Original Sequence: tccaacaucaaggaagauggcauut
  modified_base 1: mod_base = OTHER; note = bicyclic nucleic acid (BNA)
  modified_base 25: mod_base = OTHER; note = bicyclic nucleic acid (BNA)
  modified_base 2..3: mod_base = OTHER; note = 5-methyl
  modified_base 6: mod_base = OTHER; note = 5-methyl
  modified_base 9: mod_base = OTHER; note = 5-methyl
  modified_base 21: mod_base = OTHER; note = 5-methyl
  source 1..25: mol_type = other DNA
  modified_base 8: mod_base = OTHER; note = Uracil
  modified_base 18: mod_base = OTHER; note = Uracil
  modified_base 23: mod_base = OTHER; note = Uracil
  modified_base 24: mod_base = OTHER; note = Uracil
tccaacatcaaggaagatggcattt

SEQ ID NO: 4871 - DNA, 24 bp, synthetic construct
  misc_feature 1..24: note = Description of Artificial Sequence: Synthetic Antisense oligonucleotide
  misc_feature 1..24: note = Original Sequence: tccaacaucaaggaagauggcaut
  modified_base 1: mod_base = OTHER; note = bicyclic nucleic acid (BNA)
  modified_base 24: mod_base = OTHER; note = bicyclic nucleic acid (BNA)
  modified_base 2..3: mod_base = OTHER; note = 5-methyl
  modified_base 6: mod_base = OTHER; note = 5-methyl
  modified_base 9: mod_base = OTHER; note = 5-methyl
  modified_base 21: mod_base = OTHER; note = 5-methyl
  source 1..24: mol_type = other DNA
  modified_base 8: mod_base = OTHER; note = Uracil
  modified_base 18: mod_base = OTHER; note = Uracil
  modified_base 23: mod_base = OTHER; note = Uracil
tccaacatcaaggaagatggcatt

SEQ ID NO: 4872 - DNA, 23 bp, synthetic construct
  misc_feature 1..23: note = Description of Artificial Sequence: Synthetic Antisense oligonucleotide
  misc_feature 1..23: note = Original Sequence: tccaacaucaaggaagauggcat
  modified_base 1: mod_base = OTHER; note = bicyclic nucleic acid (BNA)
  modified_base 23: mod_base = OTHER; note = bicyclic nucleic acid (BNA)
  modified_base 2..3: mod_base = OTHER; note = 5-methyl
  modified_base 6: mod_base = OTHER; note = 5-methyl
  modified_base 9: mod_base = OTHER; note = 5-methyl
  modified_base 21: mod_base = OTHER; note = 5-methyl
  source 1..23: mol_type = other DNA
  modified_base 8: mod_base = OTHER; note = Uracil
  modified_base 18: mod_base = OTHER; note = Uracil
tccaacatcaaggaagatggcat

SEQ ID NO: 4873 - DNA, 22 bp, synthetic construct
  misc_feature 1..22: note = Description of Artificial Sequence: Synthetic Antisense oligonucleotide
  misc_feature 1..22: note = Original Sequence: tccaacaucaaggaagauggca
  modified_base 1: mod_base = OTHER; note = bicyclic nucleic acid (BNA)
  modified_base 22: mod_base = OTHER; note = bicyclic nucleic acid (BNA)
  modified_base 2..3: mod_base = OTHER; note = 5-methyl
  modified_base 6: mod_base = OTHER; note = 5-methyl
  modified_base 9: mod_base = OTHER; note = 5-methyl
  modified_base 21: mod_base = OTHER; note = 5-methyl
  source 1..22: mol_type = other DNA
  modified_base 8: mod_base = OTHER; note = Uracil
  modified_base 18: mod_base = OTHER; note = Uracil
tccaacatcaaggaagatggca

SEQ ID NO: 4874 - DNA, 21 bp, synthetic construct
  misc_feature 1..21: note = Description of Artificial Sequence: Synthetic Antisense oligonucleotide
  misc_feature 1..21: note = Original Sequence: tccaacaucaaggaagauggc
  modified_base 1: mod_base = OTHER; note = bicyclic nucleic acid (BNA)
  modified_base 21: mod_base = OTHER; note = bicyclic nucleic acid (BNA)
  modified_base 2..3: mod_base = OTHER; note = 5-methyl
  modified_base 6: mod_base = OTHER; note = 5-methyl
  modified_base 9: mod_base = OTHER; note = 5-methyl
  modified_base 21: mod_base = OTHER; note = 5-methyl
  source 1..21: mol_type = other DNA
  modified_base 8: mod_base = OTHER; note = Uracil
  modified_base 18: mod_base = OTHER; note = Uracil
tccaacatcaaggaagatggc

SEQ ID NO: 4875 - DNA, 20 bp, synthetic construct
  misc_feature 1..20: note = Description of Artificial Sequence: Synthetic Antisense oligonucleotide
  misc_feature 1..20: note = Original Sequence: tccaacaucaaggaagaugg
  modified_base 1: mod_base = OTHER; note = bicyclic nucleic acid (BNA)
  modified_base 20: mod_base = OTHER; note = bicyclic nucleic acid (BNA)
  modified_base 2..3: mod_base = OTHER; note = 5-methyl
  modified_base 6: mod_base = OTHER; note = 5-methyl
  modified_base 9: mod_base = OTHER; note = 5-methyl
  source 1..20: mol_type = other DNA
  modified_base 8: mod_base = OTHER; note = Uracil
  modified_base 18: mod_base = OTHER; note = Uracil
tccaacatcaaggaagatgg

SEQ ID NO: 4876 - DNA, 19 bp, synthetic construct
  misc_feature 1..19: note = Description of Artificial Sequence: Synthetic Antisense oligonucleotide
  misc_feature 1..19: note = Original Sequence: tccaacaucaaggaagaug
  modified_base 1: mod_base = OTHER; note = bicyclic nucleic acid (BNA)
  modified_base 19: mod_base = OTHER; note = bicyclic nucleic acid (BNA)
  modified_base 2..3: mod_base = OTHER; note = 5-methyl
  modified_base 6: mod_base = OTHER; note = 5-methyl
  modified_base 9: mod_base = OTHER; note = 5-methyl
  source 1..19: mol_type = other DNA
  modified_base 8: mod_base = OTHER; note = Uracil
  modified_base 18: mod_base = OTHER; note = Uracil
tccaacatcaaggaagatg

SEQ ID NO: 4877 - DNA, 18 bp, synthetic construct
  misc_feature 1..18: note = Description of Artificial Sequence: Synthetic Antisense oligonucleotide
  misc_feature 1..18: note = Original Sequence: tccaacaucaaggaagat
  modified_base 1: mod_base = OTHER; note = bicyclic nucleic acid (BNA)
  modified_base 18: mod_base = OTHER; note = bicyclic nucleic acid (BNA)
  modified_base 2..3: mod_base = OTHER; note = 5-methyl
  modified_base 6: mod_base = OTHER; note = 5-methyl
  modified_base 9: mod_base = OTHER; note = 5-methyl
  source 1..18: mol_type = other DNA
  modified_base 8: mod_base = OTHER; note = Uracil
tccaacatcaaggaagat

SEQ ID NO: 4878 - DNA, 17 bp, synthetic construct
  misc_feature 1..17: note = Description of Artificial Sequence: Synthetic Antisense oligonucleotide
  misc_feature 1..17: note = Original Sequence: tccaacaucaaggaaga
  modified_base 1: mod_base = OTHER; note = bicyclic nucleic acid (BNA)
  modified_base 17: mod_base = OTHER; note = bicyclic nucleic acid (BNA)
  modified_base 2..3: mod_base = OTHER; note = 5-methyl
  modified_base 6: mod_base = OTHER; note = 5-methyl
  modified_base 9: mod_base = OTHER; note = 5-methyl
  source 1..17: mol_type = other DNA
  modified_base 8: mod_base = OTHER; note = Uracil
tccaacatcaaggaaga

SEQ ID NO: 4879 - DNA, 16 bp, synthetic construct
  misc_feature 1..16: note = Description of Artificial Sequence: Synthetic Antisense oligonucleotide
  misc_feature 1..16: note = Original Sequence: tccaacaucaaggaag
  modified_base 1: mod_base = OTHER; note = bicyclic nucleic acid (BNA)
  modified_base 16: mod_base = OTHER; note = bicyclic nucleic acid (BNA)
  modified_base 2..3: mod_base = OTHER; note = 5-methyl
  modified_base 6: mod_base = OTHER; note = 5-methyl
  modified_base 9: mod_base = OTHER; note = 5-methyl
  source 1..16: mol_type = other DNA
  modified_base 8: mod_base = OTHER; note = Uracil
tccaacatcaaggaag

SEQ ID NO: 4880 - RNA, 28 nt, synthetic construct
  misc_feature 1..28: note = Description of Artificial Sequence: Synthetic Antisense oligonucleotide
  modified_base 1..2: mod_base = OTHER; note = 5-methyl
  modified_base 5: mod_base = OTHER; note = 5-methyl
  modified_base 8: mod_base = OTHER; note = 5-methyl
  modified_base 20: mod_base = OTHER; note = 5-methyl
  modified_base 25: mod_base = OTHER; note = 5-methyl
  modified_base 1: mod_base = OTHER; note = bicyclic nucleic acid (BNA)
  modified_base 28: mod_base = OTHER; note = bicyclic nucleic acid (BNA)
  source 1..28: mol_type = other RNA
ccaacatcaaggaagatggcatttctag

SEQ ID NO: 4881 - RNA, 27 nt, synthetic construct
  misc_feature 1..27: note = Description of Artificial Sequence: Synthetic Antisense oligonucleotide
  modified_base 1..2: mod_base = OTHER; note = 5-methyl
  modified_base 5: mod_base = OTHER; note = 5-methyl
  modified_base 8: mod_base = OTHER; note = 5-methyl
  modified_base 20: mod_base = OTHER; note = 5-methyl
  modified_base 25: mod_base = OTHER; note = 5-methyl
  modified_base 1: mod_base = OTHER; note = bicyclic nucleic acid (BNA)
  modified_base 27: mod_base = OTHER; note = bicyclic nucleic acid (BNA)
  source 1..27: mol_type = other RNA
ccaacatcaaggaagatggcatttcta

SEQ ID NO: 4882 - DNA, 26 bp, synthetic construct
  misc_feature 1..26: note = Description of Artificial Sequence: Synthetic Antisense oligonucleotide
  misc_feature 1..26: note = Original Sequence: ccaacaucaaggaagauggcauuuct
  modified_base 1..2: mod_base = OTHER; note = 5-methyl
  modified_base 5: mod_base = OTHER; note = 5-methyl
  modified_base 8: mod_base = OTHER; note = 5-methyl
  modified_base 20: mod_base = OTHER; note = 5-methyl
  modified_base 25: mod_base = OTHER; note = 5-methyl
  modified_base 1: mod_base = OTHER; note = bicyclic nucleic acid (BNA)
  modified_base 26: mod_base = OTHER; note = bicyclic nucleic acid (BNA)
  source 1..26: mol_type = other DNA
  modified_base 7: mod_base = OTHER; note = Uracil
  modified_base 17: mod_base = OTHER; note = Uracil
  modified_base 22: mod_base = OTHER; note = Uracil
  modified_base 23: mod_base = OTHER; note = Uracil
  modified_base 24: mod_base = OTHER; note = Uracil
ccaacatcaaggaagatggcatttct

SEQ ID NO: 4883 - RNA, 25 nt, synthetic construct
  misc_feature 1..25: note = Description of Artificial Sequence: Synthetic Antisense oligonucleotide
  modified_base 1..2: mod_base = OTHER; note = 5-methyl
  modified_base 5: mod_base = OTHER; note = 5-methyl
  modified_base 8: mod_base = OTHER; note = 5-methyl
  modified_base 20: mod_base = OTHER; note = 5-methyl
  modified_base 25: mod_base = OTHER; note = 5-methyl
  modified_base 1: mod_base = OTHER; note = bicyclic nucleic acid (BNA)
  modified_base 25: mod_base = OTHER; note = bicyclic nucleic acid (BNA)
  source 1..25: mol_type = other RNA
ccaacatcaaggaagatggcatttc

SEQ ID NO: 4884 - DNA, 24 bp, synthetic construct
  misc_feature 1..24: note = Description of Artificial Sequence: Synthetic Antisense oligonucleotide
  misc_feature 1..24: note = Original Sequence: ccaacaucaaggaagauggcauut
  modified_base 1..2: mod_base = OTHER; note = 5-methyl
  modified_base 5: mod_base = OTHER; note = 5-methyl
  modified_base 8: mod_base = OTHER; note = 5-methyl
  modified_base 20: mod_base = OTHER; note = 5-methyl
  modified_base 1: mod_base = OTHER; note = bicyclic nucleic acid (BNA)
  modified_base 24: mod_base = OTHER; note = bicyclic nucleic acid (BNA)
  source 1..24: mol_type = other DNA
  modified_base 7: mod_base = OTHER; note = Uracil
  modified_base 17: mod_base = OTHER; note = Uracil
  modified_base 22: mod_base = OTHER; note = Uracil
  modified_base 23: mod_base = OTHER; note = Uracil
ccaacatcaaggaagatggcattt

SEQ ID NO: 4885 - DNA, 23 bp, synthetic construct
  misc_feature 1..23: note = Description of Artificial Sequence: Synthetic Antisense oligonucleotide
  misc_feature 1..23: note = Original Sequence: ccaacaucaaggaagauggcaut
  modified_base 1..2: mod_base = OTHER; note = 5-methyl
  modified_base 5: mod_base = OTHER; note = 5-methyl
  modified_base 8: mod_base = OTHER; note = 5-methyl
  modified_base 20: mod_base = OTHER; note = 5-methyl
  modified_base 1: mod_base = OTHER; note = bicyclic nucleic acid (BNA)
  modified_base 23: mod_base = OTHER; note = bicyclic nucleic acid (BNA)
  source 1..23: mol_type = other DNA
  modified_base 7: mod_base = OTHER; note = Uracil
  modified_base 17: mod_base = OTHER; note = Uracil
  modified_base 22: mod_base = OTHER; note = Uracil
ccaacatcaaggaagatggcatt

SEQ ID NO: 4886 - DNA, 22 bp, synthetic construct
  misc_feature 1..22: note = Description of Artificial Sequence: Synthetic Antisense oligonucleotide
  misc_feature 1..22: note = Original Sequence: ccaacaucaaggaagauggcat
  modified_base 1..2: mod_base = OTHER; note = 5-methyl
  modified_base 5: mod_base = OTHER; note = 5-methyl
  modified_base 8: mod_base = OTHER; note = 5-methyl
  modified_base 20: mod_base = OTHER; note = 5-methyl
  modified_base 1: mod_base = OTHER; note = bicyclic nucleic acid (BNA)
  modified_base 22: mod_base = OTHER; note = bicyclic nucleic acid (BNA)
  source 1..22: mol_type = other DNA
  modified_base 7: mod_base = OTHER; note = Uracil
  modified_base 17: mod_base = OTHER; note = Uracil
ccaacatcaaggaagatggcat

SEQ ID NO: 4887 - RNA, 21 nt, synthetic construct
  misc_feature 1..21: note = Description of Artificial Sequence: Synthetic Antisense oligonucleotide
  modified_base 1..2: mod_base = OTHER; note = 5-methyl
  modified_base 5: mod_base = OTHER; note = 5-methyl
  modified_base 8: mod_base = OTHER; note = 5-methyl
  modified_base 20: mod_base = OTHER; note = 5-methyl
  modified_base 1: mod_base = OTHER; note = bicyclic nucleic acid (BNA)
  modified_base 21: mod_base = OTHER; note = bicyclic nucleic acid (BNA)
  source 1..21: mol_type = other RNA
ccaacatcaaggaagatggca

SEQ ID NO: 4888 - RNA, 20 nt, synthetic construct
  misc_feature 1..20: note = Description of Artificial Sequence: Synthetic Antisense oligonucleotide
  modified_base 1..2: mod_base = OTHER; note = 5-methyl
  modified_base 5: mod_base = OTHER; note = 5-methyl
  modified_base 8: mod_base = OTHER; note = 5-methyl
  modified_base 20: mod_base = OTHER; note = 5-methyl
  modified_base 1: mod_base = OTHER; note = bicyclic nucleic acid (BNA)
  modified_base 20: mod_base = OTHER; note = bicyclic nucleic acid (BNA)
  source 1..20: mol_type = other RNA
ccaacatcaaggaagatggc

SEQ ID NO: 4889 - RNA, 19 nt, synthetic construct
  misc_feature 1..19: note = Description of Artificial Sequence: Synthetic Antisense oligonucleotide
  modified_base 1..2: mod_base = OTHER; note = 5-methyl
  modified_base 5: mod_base = OTHER; note = 5-methyl
  modified_base 8: mod_base = OTHER; note = 5-methyl
  modified_base 1: mod_base = OTHER; note = bicyclic nucleic acid (BNA)
  modified_base 19: mod_base = OTHER; note = bicyclic nucleic acid (BNA)
  source 1..19: mol_type = other RNA
ccaacatcaaggaagatgg

SEQ ID NO: 4890 - RNA, 18 nt, synthetic construct
  misc_feature 1..18: note = Description of Artificial Sequence: Synthetic Antisense oligonucleotide
  modified_base 1..2: mod_base = OTHER; note = 5-methyl
  modified_base 5: mod_base = OTHER; note = 5-methyl
  modified_base 8: mod_base = OTHER; note = 5-methyl
  modified_base 1: mod_base = OTHER; note = bicyclic nucleic acid (BNA)
  modified_base 18: mod_base = OTHER; note = bicyclic nucleic acid (BNA)
  source 1..18: mol_type = other RNA
ccaacatcaaggaagatg

SEQ ID NO: 4891 - DNA, 17 bp, synthetic construct
  misc_feature 1..17: note = Description of Artificial Sequence: Synthetic Antisense oligonucleotide
  misc_feature 1..17: note = Original Sequence: ccaacaucaaggaagat
  modified_base 1..2: mod_base = OTHER; note = 5-methyl
  modified_base 5: mod_base = OTHER; note = 5-methyl
  modified_base 8: mod_base = OTHER; note = 5-methyl
  modified_base 1: mod_base = OTHER; note = bicyclic nucleic acid (BNA)
  modified_base 17: mod_base = OTHER; note = bicyclic nucleic acid (BNA)
  source 1..17: mol_type = other DNA
  modified_base 7: mod_base = OTHER; note = Uracil
ccaacatcaaggaagat

SEQ ID NO: 4892 - RNA, 16 nt, synthetic construct
  misc_feature 1..16: note = Description of Artificial Sequence: Synthetic Antisense oligonucleotide
  modified_base 1..2: mod_base = OTHER; note = 5-methyl
  modified_base 5: mod_base = OTHER; note = 5-methyl
  modified_base 8: mod_base = OTHER; note = 5-methyl
  modified_base 1: mod_base = OTHER; note = bicyclic nucleic acid (BNA)
  modified_base 16: mod_base = OTHER; note = bicyclic nucleic acid (BNA)
  source 1..16: mol_type = other RNA
ccaacatcaaggaaga

SEQ ID NO: 4893 - RNA, 15 nt, synthetic construct
  misc_feature 1..15: note = Description of Artificial Sequence: Synthetic Antisense oligonucleotide
  modified_base 1..2: mod_base = OTHER; note = 5-methyl
  modified_base 5: mod_base = OTHER; note = 5-methyl
  modified_base 8: mod_base = OTHER; note = 5-methyl
  modified_base 1: mod_base = OTHER; note = bicyclic nucleic acid (BNA)
  modified_base 15: mod_base = OTHER; note = bicyclic nucleic acid (BNA)
  source 1..15: mol_type = other RNA
ccaacatcaaggaag

SEQ ID NO: 4894 - RNA, 27 nt, synthetic construct
  misc_feature 1..27: note = Description of Artificial Sequence: Synthetic Antisense oligonucleotide
  modified_base 1: mod_base = OTHER; note = 5-methyl
  modified_base 4: mod_base = OTHER; note = 5-methyl
  modified_base 7: mod_base = OTHER; note = 5-methyl
  modified_base 19: mod_base = OTHER; note = 5-methyl
  modified_base 24: mod_base = OTHER; note = 5-methyl
  modified_base 1: mod_base = OTHER; note = bicyclic nucleic acid (BNA)
  modified_base 27: mod_base = OTHER; note = bicyclic nucleic acid (BNA)
  source 1..27: mol_type = other RNA
caacatcaaggaagatggcatttctag

SEQ ID NO: 4895 - RNA, 26 nt, synthetic construct
  misc_feature 1..26: note = Description of Artificial Sequence: Synthetic Antisense oligonucleotide
  modified_base 1: mod_base = OTHER; note = 5-methyl
  modified_base 4: mod_base = OTHER; note = 5-methyl
  modified_base 7: mod_base = OTHER; note = 5-methyl
  modified_base 19: mod_base = OTHER; note = 5-methyl
  modified_base 24: mod_base = OTHER; note = 5-methyl
  modified_base 1: mod_base = OTHER; note = bicyclic nucleic acid (BNA)
  modified_base 26: mod_base = OTHER; note = bicyclic nucleic acid (BNA)
  source 1..26: mol_type = other RNA
caacatcaaggaagatggcatttcta

SEQ ID NO: 4896 - DNA, 25 bp, synthetic construct
  misc_feature 1..25: note = Description of Artificial Sequence: Synthetic Antisense oligonucleotide
  misc_feature 1..25: note = Original Sequence: caacaucaaggaagauggcauuuct
  modified_base 1: mod_base = OTHER; note = 5-methyl
  modified_base 4: mod_base = OTHER; note = 5-methyl
  modified_base 7: mod_base = OTHER; note = 5-methyl
  modified_base 19: mod_base = OTHER; note = 5-methyl
  modified_base 24: mod_base = OTHER; note = 5-methyl
  modified_base 1: mod_base = OTHER; note = bicyclic nucleic acid (BNA)
  modified_base 25: mod_base = OTHER; note = bicyclic nucleic acid (BNA)
  source 1..25: mol_type = other DNA
  modified_base 6: mod_base = OTHER; note = Uracil
  modified_base 16: mod_base = OTHER; note = Uracil
  modified_base 21: mod_base = OTHER; note = Uracil
  modified_base 22: mod_base = OTHER; note = Uracil
  modified_base 23: mod_base = OTHER; note = Uracil
caacatcaaggaagatggcatttct

SEQ ID NO: 4897 - RNA, 24 nt, synthetic construct
  misc_feature 1..24: note = Description of Artificial Sequence: Synthetic Antisense oligonucleotide
  modified_base 1: mod_base = OTHER; note = 5-methyl
  modified_base 4: mod_base = OTHER; note = 5-methyl
  modified_base 7: mod_base = OTHER; note = 5-methyl
  modified_base 19: mod_base = OTHER; note = 5-methyl
  modified_base 24: mod_base = OTHER; note = 5-methyl
  modified_base 1: mod_base = OTHER; note = bicyclic nucleic acid (BNA)
  modified_base 24: mod_base = OTHER; note = bicyclic nucleic acid (BNA)
  source 1..24: mol_type = other RNA
caacatcaaggaagatggcatttc

SEQ ID NO: 4898 - DNA, 23 bp, synthetic construct
  misc_feature 1..23: note = Description of Artificial Sequence: Synthetic Antisense oligonucleotide
  misc_feature 1..23: note = Original Sequence: caacaucaaggaagauggcauut
  modified_base 1: mod_base = OTHER; note = 5-methyl
  modified_base 4: mod_base = OTHER; note = 5-methyl
  modified_base 7: mod_base = OTHER; note = 5-methyl
  modified_base 19: mod_base = OTHER; note = 5-methyl
  modified_base 1: mod_base = OTHER; note = bicyclic nucleic acid (BNA)
  modified_base 23: mod_base = OTHER; note = bicyclic nucleic acid (BNA)
  source 1..23: mol_type = other DNA
  modified_base 6: mod_base = OTHER; note = Uracil
  modified_base 16: mod_base = OTHER; note = Uracil
  modified_base 21: mod_base = OTHER; note = Uracil
  modified_base 22: mod_base = OTHER; note = Uracil
caacatcaaggaagatggcattt

SEQ ID NO: 4899 - DNA, 22 bp, synthetic construct
  misc_feature 1..22: note = Description of Artificial Sequence: Synthetic Antisense oligonucleotide
  misc_feature 1..22: note = Original Sequence: caacaucaaggaagauggcaut
  modified_base 1: mod_base = OTHER; note = 5-methyl
  modified_base 4: mod_base = OTHER; note = 5-methyl
  modified_base 7: mod_base = OTHER; note = 5-methyl
  modified_base 19: mod_base = OTHER; note = 5-methyl
  modified_base 1: mod_base = OTHER; note = bicyclic nucleic acid (BNA)
  modified_base 22: mod_base = OTHER; note = bicyclic nucleic acid (BNA)
  source 1..22: mol_type = other DNA
  modified_base 6: mod_base = OTHER; note = Uracil
  modified_base 16: mod_base = OTHER; note = Uracil
  modified_base 21: mod_base = OTHER; note = Uracil
caacatcaaggaagatggcatt

SEQ ID NO: 4900 - DNA, 21 bp, synthetic construct
  misc_feature 1..21: note = Description of Artificial Sequence: Synthetic Antisense oligonucleotide
  misc_feature 1..21: note = Original Sequence: caacaucaaggaagauggcat
  modified_base 1: mod_base = OTHER; note = 5-methyl
  modified_base 4: mod_base = OTHER; note = 5-methyl
  modified_base 7: mod_base = OTHER; note = 5-methyl
  modified_base 19: mod_base = OTHER; note = 5-methyl
  modified_base 1: mod_base = OTHER; note = bicyclic nucleic acid (BNA)
  modified_base 21: mod_base = OTHER; note = bicyclic nucleic acid (BNA)
  source 1..21: mol_type = other DNA
  modified_base 6: mod_base = OTHER; note = Uracil
  modified_base 16: mod_base = OTHER; note = Uracil
caacatcaaggaagatggcat

SEQ ID NO: 4901 - RNA, 20 nt, synthetic construct
  misc_feature 1..20: note = Description of Artificial Sequence: Synthetic Antisense oligonucleotide
  modified_base 1: mod_base = OTHER; note = 5-methyl
  modified_base 4: mod_base = OTHER; note = 5-methyl
  modified_base 7: mod_base = OTHER; note = 5-methyl
  modified_base 19: mod_base = OTHER; note = 5-methyl
  modified_base 1: mod_base = OTHER; note = bicyclic nucleic acid (BNA)
  modified_base 20: mod_base = OTHER; note = bicyclic nucleic acid (BNA)
  source 1..20: mol_type = other RNA
caacatcaaggaagatggca

SEQ ID NO: 4902 - RNA, 19 nt, synthetic construct
  misc_feature 1..19: note = Description of Artificial Sequence: Synthetic Antisense oligonucleotide
  modified_base 1: mod_base = OTHER; note = 5-methyl
  modified_base 4: mod_base = OTHER; note = 5-methyl
  modified_base 7: mod_base = OTHER; note = 5-methyl
  modified_base 19: mod_base = OTHER; note = 5-methyl
  modified_base 1: mod_base = OTHER; note = bicyclic nucleic acid (BNA)
  modified_base 19: mod_base = OTHER; note = bicyclic nucleic acid (BNA)
  source 1..19: mol_type = other RNA
caacatcaaggaagatggc

SEQ ID NO: 4903 - RNA, 18 nt, synthetic construct
  misc_feature 1..18: note = Description of Artificial Sequence: Synthetic Antisense oligonucleotide
  modified_base 1: mod_base = OTHER; note = 5-methyl
  modified_base 4: mod_base = OTHER; note = 5-methyl
  modified_base 7: mod_base = OTHER; note = 5-methyl
  modified_base 1: mod_base = OTHER; note = bicyclic nucleic acid (BNA)
  modified_base 18: mod_base = OTHER; note = bicyclic nucleic acid (BNA)
  source 1..18: mol_type = other RNA
caacatcaaggaagatgg

SEQ ID NO: 4904 - RNA, 17 nt, synthetic construct
  misc_feature 1..17: note = Description of Artificial Sequence: Synthetic Antisense oligonucleotide
  modified_base 1: mod_base = OTHER; note = 5-methyl
  modified_base 4: mod_base = OTHER; note = 5-methyl
  modified_base 7: mod_base = OTHER; note = 5-methyl
  modified_base 1: mod_base = OTHER; note = bicyclic nucleic acid (BNA)
  modified_base 17: mod_base = OTHER; note = bicyclic nucleic acid (BNA)
  source 1..17: mol_type = other RNA
caacatcaaggaagatg

SEQ ID NO: 4905 - DNA, 16 bp, synthetic construct
  misc_feature 1..16: note = Description of Artificial Sequence: Synthetic Antisense oligonucleotide
  misc_feature 1..16: note = Original Sequence: caacaucaaggaagat
  modified_base 1: mod_base = OTHER; note = 5-methyl
  modified_base 4: mod_base = OTHER; note = 5-methyl
  modified_base 7: mod_base = OTHER; note = 5-methyl
  modified_base 1: mod_base = OTHER; note = bicyclic nucleic acid (BNA)
  modified_base 16: mod_base = OTHER; note = bicyclic nucleic acid (BNA)
  source 1..16: mol_type = other DNA
  modified_base 6: mod_base = OTHER; note = Uracil
caacatcaaggaagat

SEQ ID NO: 4906 - RNA, 15 nt, synthetic construct
  misc_feature 1..15: note = Description of Artificial Sequence: Synthetic Antisense oligonucleotide
  modified_base 1: mod_base = OTHER; note = 5-methyl
  modified_base 4: mod_base = OTHER; note = 5-methyl
  modified_base 7: mod_base = OTHER; note = 5-methyl
  modified_base 1: mod_base = OTHER; note = bicyclic nucleic acid (BNA)
  modified_base 15: mod_base = OTHER; note = bicyclic nucleic acid (BNA)
  source 1..15: mol_type = other RNA
caacatcaaggaaga

SEQ ID NO: 4907 - RNA, 14 nt, synthetic construct
  misc_feature 1..14: note = Description of Artificial Sequence: Synthetic Antisense oligonucleotide
  modified_base 1: mod_base = OTHER; note = 5-methyl
  modified_base 4: mod_base = OTHER; note = 5-methyl
  modified_base 7: mod_base = OTHER; note = 5-methyl
  modified_base 1: mod_base = OTHER; note = bicyclic nucleic acid (BNA)
  modified_base 14: mod_base = OTHER; note = bicyclic nucleic acid (BNA)
  source 1..14: mol_type = other RNA
caacatcaaggaag

SEQ ID NO: 4908 - RNA, 26 nt, synthetic construct
  misc_feature 1..26: note = Description of Artificial Sequence: Synthetic Antisense oligonucleotide
  modified_base 1: mod_base = OTHER; note = bicyclic nucleic acid (BNA)
  modified_base 26: mod_base = OTHER; note = bicyclic nucleic acid (BNA)
  modified_base 3: mod_base = OTHER; note = 5-methyl
  modified_base 6: mod_base = OTHER; note = 5-methyl
  modified_base 18: mod_base = OTHER; note = 5-methyl
  modified_base 23: mod_base = OTHER; note = 5-methyl
  source 1..26: mol_type = other RNA
aacatcaaggaagatggcatttctag

SEQ ID NO: 4909 - RNA, 25 nt, synthetic construct
  misc_feature 1..25: note = Description of Artificial Sequence: Synthetic Antisense oligonucleotide
  modified_base 1: mod_base = OTHER; note = bicyclic nucleic acid (BNA)
  modified_base 25: mod_base = OTHER; note = bicyclic nucleic acid (BNA)
  modified_base 3: mod_base = OTHER; note = 5-methyl
  modified_base 6: mod_base = OTHER; note = 5-methyl
  modified_base 18: mod_base = OTHER; note = 5-methyl
  modified_base 23: mod_base = OTHER; note = 5-methyl
  source 1..25: mol_type = other RNA
aacatcaaggaagatggcatttcta

SEQ ID NO: 4910 - DNA, 24 bp, synthetic construct
  misc_feature 1..24: note = Description of Artificial Sequence: Synthetic Antisense oligonucleotide
  misc_feature 1..24: note = Original Sequence: aacaucaaggaagauggcauuuct
  modified_base 1: mod_base = OTHER; note = bicyclic nucleic acid (BNA)
  modified_base 24: mod_base = OTHER; note = bicyclic nucleic acid (BNA)
  modified_base 3: mod_base = OTHER; note = 5-methyl
  modified_base 6: mod_base = OTHER; note = 5-methyl
  modified_base 18: mod_base = OTHER; note = 5-methyl
  modified_base 23: mod_base = OTHER; note = 5-methyl
  source 1..24: mol_type = other DNA
  modified_base 5: mod_base = OTHER; note = Uracil
  modified_base 15: mod_base = OTHER; note = Uracil
  modified_base 20: mod_base = OTHER; note = Uracil
  modified_base 21: mod_base = OTHER; note = Uracil
  modified_base 22: mod_base = OTHER; note = Uracil
aacatcaaggaagatggcatttct

SEQ ID NO: 4911 - RNA, 23 nt, synthetic construct
  misc_feature 1..23: note = Description of Artificial Sequence: Synthetic Antisense oligonucleotide
  modified_base 1: mod_base = OTHER; note = bicyclic nucleic acid (BNA)
  modified_base 23: mod_base = OTHER; note = bicyclic nucleic acid (BNA)
  modified_base 3: mod_base = OTHER; note = 5-methyl
  modified_base 6: mod_base = OTHER; note = 5-methyl
  modified_base 18: mod_base = OTHER; note = 5-methyl
  modified_base 23: mod_base = OTHER; note = 5-methyl
  source 1..23: mol_type = other RNA
aacatcaaggaagatggcatttc

SEQ ID NO: 4912 - DNA, 22 bp, synthetic construct
  misc_feature 1..22: note = Description of Artificial Sequence: Synthetic Antisense oligonucleotide
  misc_feature 1..22: note = Original Sequence: aacaucaaggaagauggcauut
  modified_base 1: mod_base = OTHER; note = bicyclic nucleic acid (BNA)
  modified_base 22: mod_base = OTHER; note = bicyclic nucleic acid (BNA)
  modified_base 3: mod_base = OTHER; note = 5-methyl
  modified_base 6: mod_base = OTHER; note = 5-methyl
  modified_base 18: mod_base = OTHER; note = 5-methyl
  source 1..22: mol_type = other DNA
  modified_base 5: mod_base = OTHER; note = Uracil
  modified_base 15: mod_base = OTHER; note = Uracil
  modified_base 20: mod_base = OTHER; note = Uracil
  modified_base 21: mod_base = OTHER; note = Uracil
aacatcaaggaagatggcattt

SEQ ID NO: 4913 - DNA, 21 bp, synthetic construct
  misc_feature 1..21: note = Description of Artificial Sequence: Synthetic Antisense oligonucleotide
  misc_feature 1..21: note = Original Sequence: aacaucaaggaagauggcaut
  modified_base 1: mod_base = OTHER; note = bicyclic nucleic acid (BNA)
  modified_base 21: mod_base = OTHER; note = bicyclic nucleic acid (BNA)
  modified_base 3: mod_base = OTHER; note = 5-methyl
  modified_base 6: mod_base = OTHER; note = 5-methyl
  modified_base 18: mod_base = OTHER; note = 5-methyl
  source 1..21: mol_type = other DNA
  modified_base 5: mod_base = OTHER; note = Uracil
  modified_base 15: mod_base = OTHER; note = Uracil
  modified_base 20: mod_base = OTHER; note = Uracil
aacatcaaggaagatggcatt

SEQ ID NO: 4914 - DNA, 20 bp, synthetic construct
  misc_feature 1..20: note = Description of Artificial Sequence: Synthetic Antisense oligonucleotide
  misc_feature 1..20: note = Original Sequence: aacaucaaggaagauggcat
  modified_base 1: mod_base = OTHER; note = bicyclic nucleic acid (BNA)
  modified_base 20: mod_base = OTHER; note = bicyclic nucleic acid (BNA)
  modified_base 3: mod_base = OTHER; note = 5-methyl
  modified_base 6: mod_base = OTHER; note = 5-methyl
  modified_base 18: mod_base = OTHER; note = 5-methyl
  source 1..20: mol_type = other DNA
  modified_base 5: mod_base = OTHER; note = Uracil
  modified_base 15: mod_base = OTHER; note = Uracil
aacatcaaggaagatggcat

SEQ ID NO: 4915 - RNA, 19 nt, synthetic construct
  misc_feature 1..19: note = Description of Artificial Sequence: Synthetic Antisense oligonucleotide
  modified_base 1: mod_base = OTHER; note = bicyclic nucleic acid (BNA)
  modified_base 19: mod_base = OTHER; note = bicyclic nucleic acid (BNA)
  modified_base 3: mod_base = OTHER; note = 5-methyl
  modified_base 6: mod_base = OTHER; note = 5-methyl
  modified_base 18: mod_base = OTHER; note = 5-methyl
  source 1..19: mol_type = other RNA
aacatcaaggaagatggca

SEQ ID NO: 4916 - RNA, 18 nt, synthetic construct
  misc_feature 1..18: note = Description of Artificial Sequence: Synthetic Antisense oligonucleotide
  modified_base 1: mod_base = OTHER; note = bicyclic nucleic acid (BNA)
  modified_base 18: mod_base = OTHER; note = bicyclic nucleic acid (BNA)
  modified_base 3: mod_base = OTHER; note = 5-methyl
  modified_base 6: mod_base = OTHER; note = 5-methyl
  modified_base 18: mod_base = OTHER; note = 5-methyl
  source 1..18: mol_type = other RNA
aacatcaaggaagatggc

SEQ ID NO: 4917 - RNA, 17 nt, synthetic construct
  misc_feature 1..17: note = Description of Artificial Sequence: Synthetic Antisense oligonucleotide
  modified_base 1: mod_base = OTHER; note = bicyclic nucleic acid (BNA)
  modified_base 17: mod_base = OTHER; note = bicyclic nucleic acid (BNA)
  modified_base 3: mod_base = OTHER; note = 5-methyl
  modified_base 6: mod_base = OTHER; note = 5-methyl
  source 1..17: mol_type = other RNA
aacatcaaggaagatgg

SEQ ID NO: 4918 - RNA, 16 nt, synthetic construct
  misc_feature 1..16: note = Description of Artificial Sequence: Synthetic Antisense oligonucleotide
  modified_base 1: mod_base = OTHER; note = bicyclic nucleic acid (BNA)
  modified_base 16: mod_base = OTHER; note = bicyclic nucleic acid (BNA)
  modified_base 3: mod_base = OTHER; note = 5-methyl
  modified_base 6: mod_base = OTHER; note = 5-methyl
  source 1..16: mol_type = other RNA
aacatcaaggaagatg

SEQ ID NO: 4919 - DNA, 15 bp, synthetic construct
  misc_feature 1..15: note = Description of Artificial Sequence: Synthetic Antisense oligonucleotide
  misc_feature 1..15: note = Original Sequence: aacaucaaggaagat
  modified_base 1: mod_base = OTHER; note = bicyclic nucleic acid (BNA)
  modified_base 15: mod_base = OTHER; note = bicyclic nucleic acid (BNA)
  modified_base 3: mod_base = OTHER; note = 5-methyl
  modified_base 6: mod_base = OTHER; note = 5-methyl
  source 1..15: mol_type = other DNA
  modified_base 5: mod_base = OTHER; note = Uracil
aacatcaaggaagat

SEQ ID NO: 4920 - RNA, 14 nt, synthetic construct
  misc_feature 1..14: note = Description of Artificial Sequence: Synthetic Antisense oligonucleotide
  modified_base 1: mod_base = OTHER; note = bicyclic nucleic acid (BNA)
  modified_base 14: mod_base = OTHER; note = bicyclic nucleic acid (BNA)
  modified_base 3: mod_base = OTHER; note = 5-methyl
  modified_base 6: mod_base = OTHER; note = 5-methyl
  source 1..14: mol_type = other RNA
aacatcaaggaaga

SEQ ID NO: 4921 - RNA, 13 nt, synthetic construct
  misc_feature 1..13: note = Description of Artificial Sequence: Synthetic Antisense oligonucleotide
  modified_base 1: mod_base = OTHER; note = bicyclic nucleic acid (BNA)
  modified_base 13: mod_base = OTHER; note = bicyclic nucleic acid (BNA)
  modified_base 3: mod_base = OTHER; note = 5-methyl
  modified_base 6: mod_base = OTHER; note = 5-methyl
  source 1..13: mol_type = other RNA
aacatcaaggaag

SEQ ID NO: 4922 - RNA, 25 nt, synthetic construct
  misc_feature 1..25: note = Description of Artificial Sequence: Synthetic Antisense oligonucleotide
  modified_base 1: mod_base = OTHER; note = bicyclic nucleic acid (BNA)
  modified_base 25: mod_base = OTHER; note = bicyclic nucleic acid (BNA)
  modified_base 2: mod_base = OTHER; note = 5-methyl
  modified_base 5: mod_base = OTHER; note = 5-methyl
  modified_base 17: mod_base = OTHER; note = 5-methyl
  modified_base 22: mod_base = OTHER; note = 5-methyl
  source 1..25: mol_type = other RNA
acatcaaggaagatggcatttctag

SEQ ID NO: 4923 - RNA, 24 nt, synthetic construct
  misc_feature 1..24: note = Description of Artificial Sequence: Synthetic Antisense oligonucleotide
  modified_base 1: mod_base = OTHER; note = bicyclic nucleic acid (BNA)
  modified_base 24: mod_base = OTHER; note = bicyclic nucleic acid (BNA)
  modified_base 2: mod_base = OTHER; note = 5-methyl
  modified_base 5: mod_base = OTHER; note = 5-methyl
  modified_base 17: mod_base = OTHER; note = 5-methyl
  modified_base 22: mod_base = OTHER; note = 5-methyl
  source 1..24: mol_type = other RNA
acatcaaggaagatggcatttcta

SEQ ID NO: 4924 - DNA, 23 bp, synthetic construct
  misc_feature 1..23: note = Description of Artificial Sequence: Synthetic Antisense oligonucleotide
  misc_feature 1..23: note = Original Sequence: acaucaaggaagauggcauuuct
  modified_base 1: mod_base = OTHER; note = bicyclic nucleic acid (BNA)
  modified_base 23: mod_base = OTHER; note = bicyclic nucleic acid (BNA)
  modified_base 2: mod_base = OTHER; note = 5-methyl
  modified_base 5: mod_base = OTHER; note = 5-methyl
  modified_base 17: mod_base = OTHER; note = 5-methyl
  modified_base 22: mod_base = OTHER; note = 5-methyl
  source 1..23: mol_type = other DNA
  modified_base 4: mod_base = OTHER; note = Uracil
  modified_base 14: mod_base = OTHER; note = Uracil
  modified_base 19: mod_base = OTHER; note = Uracil
  modified_base 20: mod_base = OTHER; note = Uracil
  modified_base 21: mod_base = OTHER; note = Uracil
acatcaaggaagatggcatttct

SEQ ID NO: 4925 - RNA, 22 nt, synthetic construct
  misc_feature 1..22: note = Description of Artificial Sequence: Synthetic Antisense oligonucleotide
  modified_base 1: mod_base = OTHER; note = bicyclic nucleic acid (BNA)
  modified_base 22: mod_base = OTHER; note = bicyclic nucleic acid (BNA)
  modified_base 2: mod_base = OTHER; note = 5-methyl
  modified_base 5: mod_base = OTHER; note = 5-methyl
  modified_base 17: mod_base = OTHER; note = 5-methyl
  modified_base 22: mod_base = OTHER; note = 5-methyl
  source 1..22: mol_type = other RNA
acatcaaggaagatggcatttc

SEQ ID NO: 4926 - DNA, 21 bp, synthetic construct
  misc_feature 1..21: note = Description of Artificial Sequence: Synthetic Antisense oligonucleotide
  misc_feature 1..21: note = Original Sequence: acaucaaggaagauggcauut
  modified_base 1: mod_base = OTHER; note = bicyclic nucleic acid (BNA)
  modified_base 21: mod_base = OTHER; note = bicyclic nucleic acid (BNA)
  modified_base 2: mod_base = OTHER; note = 5-methyl
  modified_base 5: mod_base = OTHER; note = 5-methyl
  modified_base 17: mod_base = OTHER; note = 5-methyl
  source 1..21: mol_type = other DNA
  modified_base 4: mod_base = OTHER; note = Uracil
  modified_base 14: mod_base = OTHER; note = Uracil
  modified_base 19: mod_base = OTHER; note = Uracil
  modified_base 20: mod_base = OTHER; note = Uracil
acatcaaggaagatggcattt

SEQ ID NO: 4927 - DNA, 20 bp, synthetic construct
  misc_feature 1..20: note = Description of Artificial Sequence: Synthetic Antisense oligonucleotide
  misc_feature 1..20: note = Original Sequence: acaucaaggaagauggcaut
  modified_base 1: mod_base = OTHER; note = bicyclic nucleic acid (BNA)
  modified_base 20: mod_base = OTHER; note = bicyclic nucleic acid (BNA)
  modified_base 2: mod_base = OTHER; note = 5-methyl
  modified_base 5: mod_base = OTHER; note = 5-methyl
  modified_base 17: mod_base = OTHER; note = 5-methyl
  source 1..20: mol_type = other DNA
  modified_base 4: mod_base = OTHER; note = Uracil
  modified_base 14: mod_base = OTHER; note = Uracil
  modified_base 19: mod_base = OTHER; note = Uracil
acatcaaggaagatggcatt

SEQ ID NO: 4928 - DNA, 19 bp, synthetic construct
  misc_feature 1..19: note = Description of Artificial Sequence: Synthetic Antisense oligonucleotide
  misc_feature 1..19: note = Original Sequence: acaucaaggaagauggcat
  modified_base 1: mod_base = OTHER; note = bicyclic nucleic acid (BNA)
  modified_base 19: mod_base = OTHER; note = bicyclic nucleic acid (BNA)
  modified_base 2: mod_base = OTHER; note = 5-methyl
  modified_base 5: mod_base = OTHER; note = 5-methyl
  modified_base 17: mod_base = OTHER; note = 5-methyl
  source 1..19: mol_type = other DNA
  modified_base 4: mod_base = OTHER; note = Uracil
  modified_base 14: mod_base = OTHER; note = Uracil
acatcaaggaagatggcat

SEQ ID NO: 4929 - RNA, 18 nt, synthetic construct
  misc_feature 1..18: note = Description of Artificial Sequence: Synthetic Antisense oligonucleotide
  modified_base 1: mod_base = OTHER; note = bicyclic nucleic acid (BNA)
  modified_base 18: mod_base = OTHER; note = bicyclic nucleic acid (BNA)
  modified_base 2: mod_base = OTHER; note = 5-methyl
  modified_base 5: mod_base = OTHER; note = 5-methyl
  modified_base 17: mod_base = OTHER; note = 5-methyl
  source 1..18: mol_type = other RNA
acatcaaggaagatggca

SEQ ID NO: 4930 - RNA, 17 nt, synthetic construct
  misc_feature 1..17: note = Description of Artificial Sequence: Synthetic Antisense oligonucleotide
  modified_base 1: mod_base = OTHER; note = bicyclic nucleic acid (BNA)
  modified_base 17: mod_base = OTHER; note = bicyclic nucleic acid (BNA)
  modified_base 2: mod_base = OTHER; note = 5-methyl
  modified_base 5: mod_base = OTHER; note = 5-methyl
  modified_base 17: mod_base = OTHER; note = 5-methyl
  source 1..17: mol_type = other RNA
acatcaaggaagatggc

SEQ ID NO: 4931 - RNA, 16 nt, synthetic construct
  misc_feature 1..16: note = Description of Artificial Sequence: Synthetic Antisense oligonucleotide
  modified_base 1: mod_base = OTHER; note = bicyclic nucleic acid (BNA)
  modified_base 16: mod_base = OTHER; note = bicyclic nucleic acid (BNA)
  modified_base 2: mod_base = OTHER; note = 5-methyl
  modified_base 5: mod_base = OTHER; note = 5-methyl
  source 1..16: mol_type = other RNA
acatcaaggaagatgg

SEQ ID NO: 4932 - RNA, 15 nt, synthetic construct
  misc_feature 1..15: note = Description of Artificial Sequence: Synthetic Antisense oligonucleotide
  modified_base 1: mod_base = OTHER; note = bicyclic nucleic acid (BNA)
  modified_base 15: mod_base = OTHER; note = bicyclic nucleic acid (BNA)
  modified_base 2: mod_base = OTHER; note = 5-methyl
  modified_base 5: mod_base = OTHER; note = 5-methyl
  source 1..15: mol_type = other RNA
acatcaaggaagatg

SEQ ID NO: 4933 - DNA, 14 bp, synthetic construct
  misc_feature 1..14: note = Description of Artificial Sequence: Synthetic Antisense oligonucleotide
  misc_feature 1..14: note = Original Sequence: acaucaaggaagat
  modified_base 1: mod_base = OTHER; note = bicyclic nucleic acid (BNA)
  modified_base 14: mod_base = OTHER; note = bicyclic nucleic acid (BNA)
  modified_base 2: mod_base = OTHER; note = 5-methyl
  modified_base 5: mod_base = OTHER; note = 5-methyl
  source 1..14: mol_type = other DNA
  modified_base 4: mod_base = OTHER; note = Uracil
acatcaaggaagat

SEQ ID NO: 4934 - RNA, 13 nt, synthetic construct
  misc_feature 1..13: note = Description of Artificial Sequence: Synthetic Antisense oligonucleotide
  modified_base 1: mod_base = OTHER; note = bicyclic nucleic acid (BNA)
  modified_base 13: mod_base = OTHER; note = bicyclic nucleic acid (BNA)
  modified_base 2: mod_base = OTHER; note = 5-methyl
  modified_base 5: mod_base = OTHER; note = 5-methyl
  source 1..13: mol_type = other RNA
acatcaaggaaga

SEQ ID NO: 4935 - RNA, 12 nt, synthetic construct
  misc_feature 1..12: note = Description of Artificial Sequence: Synthetic Antisense oligonucleotide
  modified_base 1: mod_base = OTHER; note = bicyclic nucleic acid (BNA)
  modified_base 12: mod_base = OTHER; note = bicyclic nucleic acid (BNA)
  modified_base 2: mod_base = OTHER; note = 5-methyl
  modified_base 5: mod_base = OTHER; note = 5-methyl
  source 1..12: mol_type = other RNA
acatcaaggaag

SEQ ID NO: 4936 - RNA, 24 nt, synthetic construct
  misc_feature 1..24: note = Description of Artificial Sequence: Synthetic Antisense oligonucleotide
  modified_base 1: mod_base = OTHER; note = 5-methyl
  modified_base 4: mod_base = OTHER; note = 5-methyl
  modified_base 16: mod_base = OTHER; note = 5-methyl
  modified_base 21: mod_base = OTHER; note = 5-methyl
  modified_base 1: mod_base = OTHER; note = bicyclic nucleic acid (BNA)
  modified_base 24: mod_base = OTHER; note = bicyclic nucleic acid (BNA)
  source 1..24: mol_type = other RNA
catcaaggaagatggcatttctag

SEQ ID NO: 4937 - RNA, 23 nt, synthetic construct
  misc_feature 1..23: note = Description of Artificial Sequence: Synthetic Antisense oligonucleotide
  modified_base 1: mod_base = OTHER; note = 5-methyl
  modified_base 4: mod_base = OTHER; note = 5-methyl
  modified_base 16: mod_base = OTHER; note = 5-methyl
  modified_base 21: mod_base = OTHER; note = 5-methyl
  modified_base 1: mod_base = OTHER; note = bicyclic nucleic acid (BNA)
  modified_base 23: mod_base = OTHER; note = bicyclic nucleic acid (BNA)
  source 1..23: mol_type = other RNA
catcaaggaagatggcatttcta

SEQ ID NO: 4938 - DNA, 22 bp, synthetic construct
  misc_feature 1..22: note = Description of Artificial Sequence: Synthetic Antisense oligonucleotide
  misc_feature 1..22: note = Original Sequence: caucaaggaagauggcauuuct
  modified_base 1: mod_base = OTHER; note = 5-methyl
  modified_base 4: mod_base = OTHER; note = 5-methyl
  modified_base 16: mod_base = OTHER; note = 5-methyl
  modified_base 21: mod_base = OTHER; note = 5-methyl
  modified_base 1: mod_base = OTHER; note = bicyclic nucleic acid (BNA)
  modified_base 22: mod_base = OTHER; note = bicyclic nucleic acid (BNA)
  source 1..22: mol_type = other DNA
  modified_base 3: mod_base = OTHER; note = Uracil
  modified_base 13: mod_base = OTHER; note = Uracil
  modified_base 18: mod_base = OTHER; note = Uracil
  modified_base 19: mod_base = OTHER; note = Uracil
  modified_base 20: mod_base = OTHER; note = Uracil
catcaaggaagatggcatttct

SEQ ID NO: 4939 - RNA, 21 nt, synthetic construct
  misc_feature 1..21: note = Description of Artificial Sequence: Synthetic Antisense oligonucleotide
  modified_base 1: mod_base = OTHER; note = 5-methyl
  modified_base 4: mod_base = OTHER; note = 5-methyl
  modified_base 16: mod_base = OTHER; note = 5-methyl
  modified_base 21: mod_base = OTHER; note = 5-methyl
  modified_base 1: mod_base = OTHER; note = bicyclic nucleic acid (BNA)
  modified_base 21: mod_base = OTHER; note = bicyclic nucleic acid (BNA)
  source 1..21: mol_type = other RNA
catcaaggaagatggcatttc

SEQ ID NO: 4940 - DNA, 20 bp, synthetic construct
  misc_feature 1..20: note = Description of Artificial Sequence: Synthetic Antisense oligonucleotide
  misc_feature 1..20: note = Original Sequence: caucaaggaagauggcauut
  modified_base 1: mod_base = OTHER; note = 5-methyl
  modified_base 4: mod_base = OTHER; note = 5-methyl
  modified_base 16: mod_base = OTHER; note = 5-methyl
  modified_base 1: mod_base = OTHER; note = bicyclic nucleic acid (BNA)
  modified_base 20: mod_base = OTHER; note = bicyclic nucleic acid (BNA)
  source 1..20: mol_type = other DNA
  modified_base 3: mod_base = OTHER; note = Uracil
  modified_base 13: mod_base = OTHER; note = Uracil
  modified_base 18: mod_base = OTHER; note = Uracil
  modified_base 19: mod_base = OTHER; note = Uracil
catcaaggaagatggcattt

SEQ ID NO: 4941 - DNA, 19 bp, synthetic construct
  misc_feature 1..19: note = Description of Artificial Sequence: Synthetic Antisense oligonucleotide
  misc_feature 1..19: note = Original Sequence: caucaaggaagauggcaut
  modified_base 1: mod_base = OTHER; note = 5-methyl
  modified_base 4: mod_base = OTHER; note = 5-methyl
  modified_base 16: mod_base = OTHER; note = 5-methyl
  modified_base 1: mod_base = OTHER; note = bicyclic nucleic acid (BNA)
  modified_base 19: mod_base = OTHER; note = bicyclic nucleic acid (BNA)
  source 1..19: mol_type = other DNA
  modified_base 3: mod_base = OTHER; note = Uracil
  modified_base 13: mod_base = OTHER; note = Uracil
  modified_base 18: mod_base = OTHER; note = Uracil
catcaaggaagatggcatt

SEQ ID NO: 4942 - DNA, 18 bp, synthetic construct
  misc_feature 1..18: note = Description of Artificial Sequence: Synthetic Antisense oligonucleotide
  misc_feature 1..18: note = Original Sequence: caucaaggaagauggcat
  modified_base 1: mod_base = OTHER; note = 5-methyl
  modified_base 4: mod_base = OTHER; note = 5-methyl
  modified_base 16: mod_base = OTHER; note = 5-methyl
  modified_base 1: mod_base = OTHER; note = bicyclic nucleic acid (BNA)
  modified_base 18: mod_base = OTHER; note = bicyclic nucleic acid (BNA)
  source 1..18: mol_type = other DNA
  modified_base 3: mod_base = OTHER; note = Uracil
  modified_base 13: mod_base = OTHER; note = Uracil
catcaaggaagatggcat

SEQ ID NO: 4943 - RNA, 17 nt, synthetic construct
  misc_feature 1..17: note = Description of Artificial Sequence: Synthetic Antisense oligonucleotide
  modified_base 1: mod_base = OTHER; note = 5-methyl
  modified_base 4: mod_base = OTHER; note = 5-methyl
  modified_base 16: mod_base = OTHER; note = 5-methyl
  modified_base 1: mod_base = OTHER; note = bicyclic nucleic acid (BNA)
  modified_base 17: mod_base = OTHER; note = bicyclic nucleic acid (BNA)
  source 1..17: mol_type = other RNA
catcaaggaagatggca

SEQ ID NO: 4944 - RNA, 16 nt, synthetic construct
  misc_feature 1..16: note = Description of Artificial Sequence: Synthetic Antisense oligonucleotide
  modified_base 1: mod_base = OTHER; note = 5-methyl
  modified_base 4: mod_base = OTHER; note = 5-methyl
  modified_base 16: mod_base = OTHER; note = 5-methyl
  modified_base 1: mod_base = OTHER; note = bicyclic nucleic acid (BNA)
  modified_base 16: mod_base = OTHER; note = bicyclic nucleic acid (BNA)
  source 1..16: mol_type = other RNA
catcaaggaagatggc

SEQ ID NO: 4945 - RNA, 15 nt, synthetic construct
  misc_feature 1..15: note = Description of Artificial Sequence: Synthetic Antisense oligonucleotide
  modified_base 1: mod_base = OTHER; note = 5-methyl
  modified_base 4: mod_base = OTHER; note = 5-methyl
  modified_base 1: mod_base = OTHER; note = bicyclic nucleic acid (BNA)
  modified_base 15: mod_base = OTHER; note = bicyclic nucleic acid (BNA)
  source 1..15: mol_type = other RNA
catcaaggaagatgg

SEQ ID NO: 4946 - RNA, 14 nt, synthetic construct
  misc_feature 1..14: note = Description of Artificial Sequence: Synthetic Antisense oligonucleotide
  modified_base 1: mod_base = OTHER; note = 5-methyl
  modified_base 4: mod_base = OTHER; note = 5-methyl
  modified_base 1: mod_base = OTHER; note = bicyclic nucleic acid (BNA)
  modified_base 14: mod_base = OTHER; note = bicyclic nucleic acid (BNA)
  source 1..14: mol_type = other RNA
catcaaggaagatg

SEQ ID NO: 4947 - DNA, 13 bp, synthetic construct
  misc_feature 1..13: note = Description of Artificial Sequence: Synthetic Antisense oligonucleotide
  misc_feature 1..13: note = Original Sequence: caucaaggaagat
  modified_base 1: mod_base = OTHER; note = 5-methyl
  modified_base 4: mod_base = OTHER; note = 5-methyl
  modified_base 1: mod_base = OTHER; note = bicyclic nucleic acid (BNA)
  modified_base 13: mod_base = OTHER; note = bicyclic nucleic acid (BNA)
  source 1..13: mol_type = other DNA
  modified_base 3: mod_base = OTHER; note = Uracil
catcaaggaagat

SEQ ID NO: 4948 - RNA, 12 nt, synthetic construct
  misc_feature 1..12: note = Description of Artificial Sequence: Synthetic Antisense oligonucleotide
  modified_base 1: mod_base = OTHER; note = 5-methyl
  modified_base 4: mod_base = OTHER; note = 5-methyl
  modified_base 1: mod_base = OTHER; note = bicyclic nucleic acid (BNA)
  modified_base 12: mod_base = OTHER; note = bicyclic nucleic acid (BNA)
  source 1..12: mol_type = other RNA
catcaaggaaga

SEQ ID NO: 4949 - RNA, 11 nt, synthetic construct
  misc_feature 1..11: note = Description of Artificial Sequence: Synthetic Antisense oligonucleotide
  modified_base 1: mod_base = OTHER; note = 5-methyl
  modified_base 4: mod_base = OTHER; note = 5-methyl
  modified_base 1: mod_base = OTHER; note = bicyclic nucleic acid (BNA)
  modified_base 11: mod_base = OTHER; note = bicyclic nucleic acid (BNA)
  source 1..11: mol_type = other RNA
catcaaggaag

SEQ ID NO: 4950 - RNA, 23 nt, synthetic construct
  misc_feature 1..23: note = Description of Artificial Sequence: Synthetic Antisense oligonucleotide
  modified_base 1: mod_base = OTHER; note = bicyclic nucleic acid (BNA)
  modified_base 23: mod_base = OTHER; note = bicyclic nucleic acid (BNA)
  modified_base 3: mod_base = OTHER; note = 5-methyl
  modified_base 15: mod_base = OTHER; note = 5-methyl
  modified_base 20: mod_base = OTHER; note = 5-methyl
  source 1..23: mol_type = other RNA
atcaaggaagatggcatttctag

SEQ ID NO: 4951 - RNA, 22 nt, synthetic construct
  misc_feature 1..22: note = Description of Artificial Sequence: Synthetic Antisense oligonucleotide
  modified_base 1: mod_base = OTHER; note = bicyclic nucleic acid (BNA)
  modified_base 22: mod_base = OTHER; note = bicyclic nucleic acid (BNA)
  modified_base 3: mod_base = OTHER; note = 5-methyl
  modified_base 15: mod_base = OTHER; note = 5-methyl
  modified_base 20: mod_base = OTHER; note = 5-methyl
  source 1..22: mol_type = other RNA
atcaaggaagatggcatttcta

SEQ ID NO: 4952 - DNA, 21 bp, synthetic construct
  misc_feature 1..21: note = Description of Artificial Sequence: Synthetic Antisense oligonucleotide
  misc_feature 1..21: note = Original Sequence: aucaaggaagauggcauuuct
  modified_base 1: mod_base = OTHER; note = bicyclic nucleic acid (BNA)
  modified_base 21: mod_base = OTHER; note = bicyclic nucleic acid (BNA)
  modified_base 3: mod_base = OTHER; note = 5-methyl
  modified_base 15: mod_base = OTHER; note = 5-methyl
  modified_base 20: mod_base = OTHER; note = 5-methyl
  source 1..21: mol_type = other DNA
  modified_base 2: mod_base = OTHER; note = Uracil
  modified_base 12: mod_base = OTHER; note = Uracil
  modified_base 17: mod_base = OTHER; note = Uracil
  modified_base 18: mod_base = OTHER; note = Uracil
  modified_base 19: mod_base = OTHER; note = Uracil
atcaaggaagatggcatttct

SEQ ID NO: 4953 - RNA, 20 nt, synthetic construct
  misc_feature 1..20: note = Description of Artificial Sequence: Synthetic Antisense oligonucleotide
  modified_base 1: mod_base = OTHER; note = bicyclic nucleic acid (BNA)
  modified_base 20: mod_base = OTHER; note = bicyclic nucleic acid (BNA)
  modified_base 3: mod_base = OTHER; note = 5-methyl
  modified_base 15: mod_base = OTHER; note = 5-methyl
  modified_base 20: mod_base = OTHER; note = 5-methyl
  source 1..20: mol_type = other RNA
atcaaggaagatggcatttc

SEQ ID NO: 4954 - DNA, 19 bp, synthetic construct
  misc_feature 1..19: note = Description of Artificial Sequence: Synthetic Antisense oligonucleotide
  misc_feature 1..19: note = Original Sequence: aucaaggaagauggcauut
  modified_base 1: mod_base = OTHER; note = bicyclic nucleic acid (BNA)
  modified_base 19: mod_base = OTHER; note = bicyclic nucleic acid (BNA)
  modified_base 3: mod_base = OTHER; note = 5-methyl
  modified_base 15: mod_base = OTHER; note = 5-methyl
  source 1..19: mol_type = other DNA
  modified_base 2: mod_base = OTHER; note = Uracil
  modified_base 12: mod_base = OTHER; note = Uracil
  modified_base 17: mod_base = OTHER; note = Uracil
  modified_base 18: mod_base = OTHER; note = Uracil
atcaaggaagatggcattt

SEQ ID NO: 4955 - DNA, 18 bp, synthetic construct
  misc_feature 1..18: note = Description of Artificial Sequence: Synthetic Antisense oligonucleotide
  misc_feature 1..18: note = Original Sequence: aucaaggaagauggcaut
  modified_base 1: mod_base = OTHER; note = bicyclic nucleic acid (BNA)
  modified_base 18: mod_base = OTHER; note = bicyclic nucleic acid (BNA)
  modified_base 3: mod_base = OTHER; note = 5-methyl
  modified_base 15: mod_base = OTHER; note = 5-methyl
  source 1..18: mol_type = other DNA
  modified_base 2: mod_base = OTHER; note = Uracil
  modified_base 12: mod_base = OTHER; note = Uracil
  modified_base 17: mod_base = OTHER; note = Uracil
atcaaggaagatggcatt

SEQ ID NO: 4956 - DNA, 17 bp, synthetic construct
  misc_feature 1..17: note = Description of Artificial Sequence: Synthetic Antisense oligonucleotide
  misc_feature 1..17: note = Original Sequence: aucaaggaagauggcat
  modified_base 1: mod_base = OTHER; note = bicyclic nucleic acid (BNA)
  modified_base 17: mod_base = OTHER; note = bicyclic nucleic acid (BNA)
  modified_base 3: mod_base = OTHER; note = 5-methyl
  modified_base 15: mod_base = OTHER; note = 5-methyl
  source 1..17: mol_type = other DNA
  modified_base 2: mod_base = OTHER; note = Uracil
  modified_base 12: mod_base = OTHER; note = Uracil
atcaaggaagatggcat

SEQ ID NO: 4957 - RNA, 16 nt, synthetic construct
  misc_feature 1..16: note = Description of Artificial Sequence: Synthetic Antisense oligonucleotide
  modified_base 1: mod_base = OTHER; note = bicyclic nucleic acid (BNA)
  modified_base 16: mod_base = OTHER; note = bicyclic nucleic acid (BNA)
  modified_base 3: mod_base = OTHER; note = 5-methyl
  modified_base 15: mod_base = OTHER; note = 5-methyl
  source 1..16: mol_type = other RNA
atcaaggaagatggca

SEQ ID NO: 4958 - RNA, 15 nt, synthetic construct
  misc_feature 1..15: note = Description of Artificial Sequence: Synthetic Antisense oligonucleotide
  modified_base 1: mod_base = OTHER; note = bicyclic nucleic acid (BNA)
  modified_base 15: mod_base = OTHER; note = bicyclic nucleic acid (BNA)
  modified_base 3: mod_base = OTHER; note = 5-methyl
  modified_base 15: mod_base = OTHER; note = 5-methyl
  source 1..15: mol_type = other RNA
atcaaggaagatggc

SEQ ID NO: 4959 - RNA, 14 nt, synthetic construct
  misc_feature 1..14: note = Description of Artificial Sequence: Synthetic Antisense oligonucleotide
  modified_base 1: mod_base = OTHER; note = bicyclic nucleic acid (BNA)
  modified_base 14: mod_base = OTHER; note = bicyclic nucleic acid (BNA)
  modified_base 3: mod_base = OTHER; note = 5-methyl
  source 1..14: mol_type = other RNA
atcaaggaagatgg

SEQ ID NO: 4960 - RNA, 13 nt, synthetic construct
  misc_feature 1..13: note = Description of Artificial Sequence: Synthetic Antisense oligonucleotide
  modified_base 1: mod_base = OTHER; note = bicyclic nucleic acid (BNA)
  modified_base 13: mod_base = OTHER; note = bicyclic nucleic acid (BNA)
  modified_base 3: mod_base = OTHER; note = 5-methyl
  source 1..13: mol_type = other RNA
atcaaggaagatg

SEQ ID NO: 4961 - DNA, 12 bp, synthetic construct
  misc_feature 1..12: note = Description of Artificial Sequence: Synthetic Antisense oligonucleotide
  misc_feature 1..12: note = Original Sequence: aucaaggaagat
  modified_base 1: mod_base = OTHER; note = bicyclic nucleic acid (BNA)
  modified_base 12: mod_base = OTHER; note = bicyclic nucleic acid (BNA)
  modified_base 3: mod_base = OTHER; note = 5-methyl
  source 1..12: mol_type = other DNA
  modified_base 2: mod_base = OTHER; note = Uracil
atcaaggaagat

SEQ ID NO: 4962 - RNA, 11 nt, synthetic construct
  misc_feature 1..11: note = Description of Artificial Sequence: Synthetic Antisense oligonucleotide
  modified_base 1: mod_base = OTHER; note = bicyclic nucleic acid (BNA)
  modified_base 11: mod_base = OTHER; note = bicyclic nucleic acid (BNA)
  modified_base 3: mod_base = OTHER; note = 5-methyl
  source 1..11: mol_type = other RNA
atcaaggaaga

SEQ ID NO: 4963 - RNA, 10 nt, synthetic construct
  misc_feature 1..10: note = Description of Artificial Sequence: Synthetic Antisense oligonucleotide
  modified_base 1: mod_base = OTHER; note = bicyclic nucleic acid (BNA)
  modified_base 10: mod_base = OTHER; note = bicyclic nucleic acid (BNA)
  modified_base 3: mod_base = OTHER; note = 5-methyl
  source 1..10: mol_type = other RNA
atcaaggaag

SEQ ID NO: 4964 - RNA, 18 nt, synthetic construct
  misc_feature 1..18: note = Description of Artificial Sequence: Synthetic Antisense oligonucleotide
  modified_base 1..2: mod_base = OTHER; note = bicyclic nucleic acid (BNA)
  modified_base 9: mod_base = OTHER; note = 5-methyl
  modified_base 13..14: mod_base = OTHER; note = 5-methyl
  modified_base 18: mod_base = OTHER; note = 5-methyl
  source 1..18: mol_type = other RNA
ggtaagttctgtccaagc

SEQ ID NO: 4965 - DNA, 18 bp, synthetic construct
  misc_feature 1..18: note = Description of Artificial Sequence: Synthetic Antisense oligonucleotide
  misc_feature 1..18: note = Original Sequence: gtaaguucuguccaagcc
  modified_base 1..2: mod_base = OTHER; note = bicyclic nucleic acid (BNA)
  modified_base 8: mod_base = OTHER; note = 5-methyl
  modified_base 12..13: mod_base = OTHER; note = 5-methyl
  modified_base 17..18: mod_base = OTHER; note = 5-methyl
  source 1..18: mol_type = other DNA
  modified_base 6: mod_base = OTHER; note = Uracil
  modified_base 7: mod_base = OTHER; note = Uracil
  modified_base 9: mod_base = OTHER; note = Uracil
  modified_base 11: mod_base = OTHER; note = Uracil
gtaagttctgtccaagcc

SEQ ID NO: 4966 - RNA, 18 nt, synthetic construct
  misc_feature 1..18: note = Description of Artificial Sequence: Synthetic Antisense oligonucleotide
  modified_base 1..2: mod_base = OTHER; note = bicyclic nucleic acid (BNA)
  modified_base 4: mod_base = OTHER; note = 5-methyl
  modified_base 13: mod_base = OTHER; note = 5-methyl
  modified_base 17..18: mod_base = OTHER; note = 5-methyl
  source 1..18: mol_type = other RNA
agtcggtaagttctgtcc

SEQ ID NO: 4967 - DNA, 18 bp, synthetic construct
  misc_feature 1..18: note = Description of Artificial Sequence: Synthetic Antisense oligonucleotide
  misc_feature 1..18: note = Original Sequence: ctguccaagcccgguuga
  modified_base 1: mod_base = OTHER; note = 5-methyl
  modified_base 5..6: mod_base = OTHER; note = 5-methyl
  modified_base 10..12: mod_base = OTHER; note = 5-methyl
  modified_base 1..2: mod_base = OTHER; note = bicyclic nucleic acid (BNA)
  source 1..18: mol_type = other DNA
  modified_base 4: mod_base = OTHER; note = Uracil
  modified_base 15: mod_base = OTHER; note = Uracil
  modified_base 16: mod_base = OTHER; note = Uracil
ctgtccaagcccggttga

SEQ ID NO: 4968 - DNA, 15 bp, synthetic construct
  misc_feature 1..15: note = Description of Artificial Sequence: Synthetic Antisense oligonucleotide
  misc_feature 1..15: note = Original Sequence: taaguucuguccaag
  modified_base 1..2: mod_base = OTHER; note = bicyclic nucleic acid (BNA)
  modified_base 7: mod_base = OTHER; note = 5-methyl
  modified_base 11..12: mod_base = OTHER; note = 5-methyl
  source 1..15: mol_type = other DNA
  modified_base 5: mod_base = OTHER; note = Uracil
  modified_base 6: mod_base = OTHER; note = Uracil
  modified_base 8: mod_base = OTHER; note = Uracil
  modified_base 10: mod_base = OTHER; note = Uracil
taagttctgtccaag

SEQ ID NO: 4969 - DNA, 20 bp, synthetic construct
  misc_feature 1..20: note = Description of Artificial Sequence: Synthetic Antisense oligonucleotide
  misc_feature 1..20: note = Original Sequence: ttcuguccaagcccgguuga
  modified_base 1..2: mod_base = OTHER; note = bicyclic nucleic acid (BNA)
  modified_base 3: mod_base = OTHER; note = 5-methyl
  modified_base 7..8: mod_base = OTHER; note = 5-methyl
  modified_base 12..14: mod_base = OTHER; note = 5-methyl
  source 1..20: mol_type = other DNA
  modified_base 4: mod_base = OTHER; note = Uracil
  modified_base 6: mod_base = OTHER; note = Uracil
  modified_base 17: mod_base = OTHER; note = Uracil
  modified_base 18: mod_base = OTHER; note = Uracil
ttctgtccaagcccggttga

SEQ ID NO: 4970 - DNA, 19 bp, synthetic construct
  misc_feature 1..19: note = Description of Artificial Sequence: Synthetic Antisense oligonucleotide
  misc_feature 1..19: note = Original Sequence: ttcuguccaagcccgguug
  modified_base 1..2: mod_base = OTHER; note = bicyclic nucleic acid (BNA)
  modified_base 3: mod_base = OTHER; note = 5-methyl
  modified_base 7..8: mod_base = OTHER; note = 5-methyl
  modified_base 12..14: mod_base = OTHER; note = 5-methyl
  source 1..19: mol_type = other DNA
  modified_base 4: mod_base = OTHER; note = Uracil
  modified_base 6: mod_base = OTHER; note = Uracil
  modified_base 17: mod_base = OTHER; note = Uracil
  modified_base 18: mod_base = OTHER; note = Uracil
ttctgtccaagcccggttg

SEQ ID NO: 4971 - DNA, 18 bp, synthetic construct
  misc_feature 1..18: note = Description of Artificial Sequence: Synthetic Antisense oligonucleotide
  misc_feature 1..18: note = Original Sequence: ttcuguccaagcccgguu
  modified_base 1..2: mod_base = OTHER; note = bicyclic nucleic acid (BNA)
  modified_base 3: mod_base = OTHER; note = 5-methyl
  modified_base 7..8: mod_base = OTHER; note = 5-methyl
  modified_base 12..14: mod_base = OTHER; note = 5-methyl
  source 1..18: mol_type = other DNA
  modified_base 4: mod_base = OTHER; note = Uracil
  modified_base 6: mod_base = OTHER; note = Uracil
  modified_base 17: mod_base = OTHER; note = Uracil
  modified_base 18: mod_base = OTHER; note = Uracil
ttctgtccaagcccggtt

SEQ ID NO: 4972 - DNA, 17 bp, synthetic construct
  misc_feature 1..17: note = Description of Artificial Sequence: Synthetic Antisense oligonucleotide
  misc_feature 1..17: note = Original Sequence: ttcuguccaagcccggu
  modified_base 1..2: mod_base = OTHER; note = bicyclic nucleic acid (BNA)
  modified_base 3: mod_base = OTHER; note = 5-methyl
  modified_base 7..8: mod_base = OTHER; note = 5-methyl
  modified_base 12..14: mod_base = OTHER; note = 5-methyl
  source 1..17: mol_type = other DNA
  modified_base 4: mod_base = OTHER; note = Uracil
  modified_base 6: mod_base = OTHER; note = Uracil
  modified_base 17: mod_base = OTHER; note = Uracil
ttctgtccaagcccggt

SEQ ID NO: 4973 - DNA, 16 bp, synthetic construct
  misc_feature 1..16: note = Description of Artificial Sequence: Synthetic Antisense oligonucleotide
  misc_feature 1..16: note = Original Sequence: ttcuguccaagcccgg
  modified_base 1..2: mod_base = OTHER; note = bicyclic nucleic acid (BNA)
  modified_base 3: mod_base = OTHER; note = 5-methyl
  modified_base 7..8: mod_base = OTHER; note = 5-methyl
  modified_base 12..14: mod_base = OTHER; note = 5-methyl
  source 1..16: mol_type = other DNA
  modified_base 4: mod_base = OTHER; note = Uracil
  modified_base 6: mod_base = OTHER; note = Uracil
ttctgtccaagcccgg

SEQ ID NO: 4974 - DNA, 15 bp, synthetic construct
  misc_feature 1..15: note = Description of Artificial Sequence: Synthetic Antisense oligonucleotide
  misc_feature 1..15: note = Original Sequence: ttcuguccaagcccg
  modified_base 1..2: mod_base = OTHER; note = bicyclic nucleic acid (BNA)
  modified_base 3: mod_base = OTHER; note = 5-methyl
  modified_base 7..8: mod_base = OTHER; note = 5-methyl
  modified_base 12..14: mod_base = OTHER; note = 5-methyl
  source 1..15: mol_type = other DNA
  modified_base 4: mod_base = OTHER; note = Uracil
  modified_base 6: mod_base = OTHER; note = Uracil
ttctgtccaagcccg

SEQ ID NO: 4975 - DNA, 14 bp, synthetic construct
  misc_feature 1..14: note = Description of Artificial Sequence: Synthetic Antisense oligonucleotide
  misc_feature 1..14: note = Original Sequence: ttcuguccaagccc
  modified_base 1..2: mod_base = OTHER; note = bicyclic nucleic acid (BNA)
  modified_base 3: mod_base = OTHER; note = 5-methyl
  modified_base 7..8: mod_base = OTHER; note = 5-methyl
  modified_base 12..14: mod_base = OTHER; note = 5-methyl
  source 1..14: mol_type = other DNA
  modified_base 4: mod_base = OTHER; note = Uracil
  modified_base 6: mod_base = OTHER; note = Uracil
ttctgtccaagccc

SEQ ID NO: 4976 - DNA, 13 bp, synthetic construct
  misc_feature 1..13: note = Description of Artificial Sequence: Synthetic Antisense oligonucleotide
  misc_feature 1..13: note = Original Sequence: ttcuguccaagcc
  modified_base 1..2: mod_base = OTHER; note = bicyclic nucleic acid (BNA)
  modified_base 3: mod_base = OTHER; note = 5-methyl
  modified_base 7..8: mod_base = OTHER; note = 5-methyl
  modified_base 12..13: mod_base = OTHER; note = 5-methyl
  source 1..13: mol_type = other DNA
  modified_base 4: mod_base = OTHER; note = Uracil
  modified_base 6: mod_base = OTHER; note = Uracil
ttctgtccaagcc

SEQ ID NO: 4977 - DNA, 12 bp, synthetic construct
  misc_feature 1..12: note = Description of Artificial Sequence: Synthetic Antisense oligonucleotide
  misc_feature 1..12: note = Original Sequence: ttcuguccaagc
  modified_base 1..2: mod_base = OTHER; note = bicyclic nucleic acid (BNA)
  modified_base 3: mod_base = OTHER; note = 5-methyl
  modified_base 7..8: mod_base = OTHER; note = 5-methyl
  modified_base 12: mod_base = OTHER; note = 5-methyl
  source 1..12: mol_type = other DNA
  modified_base 4: mod_base = OTHER; note = Uracil
  modified_base 6: mod_base = OTHER; note = Uracil
ttctgtccaagc

SEQ ID NO: 4978 - DNA, 11 bp, synthetic construct
  misc_feature 1..11: note = Description of Artificial Sequence: Synthetic Antisense oligonucleotide
  misc_feature 1..11: note = Original Sequence: ttcuguccaag
  modified_base 1..2: mod_base = OTHER; note = bicyclic nucleic acid (BNA)
  modified_base 3: mod_base = OTHER; note = 5-methyl
  modified_base 7..8: mod_base = OTHER; note = 5-methyl
  source 1..11: mol_type = other DNA
  modified_base 4: mod_base = OTHER; note = Uracil
  modified_base 6: mod_base = OTHER; note = Uracil
ttctgtccaag

SEQ ID NO: 4979 - DNA, 10 bp, synthetic construct
  misc_feature 1..10: note = Description of Artificial Sequence: Synthetic Antisense oligonucleotide
  misc_feature 1..10: note = Original Sequence: ttcuguccaa
  modified_base 1..2: mod_base = OTHER; note = bicyclic nucleic acid (BNA)
  modified_base 3: mod_base = OTHER; note = 5-methyl
  modified_base 7..8: mod_base = OTHER; note = 5-methyl
  source 1..10: mol_type = other DNA
  modified_base 4: mod_base = OTHER; note = Uracil
  modified_base 6: mod_base = OTHER; note = Uracil
ttctgtccaa

SEQ ID NO: 4980-4981 - skipped (2 entries)

SEQ ID NO: 4982 - DNA, 19 bp, synthetic construct
  misc_feature 1..19: note = Description of Artificial Sequence: Synthetic Antisense oligonucleotide
  misc_feature 1..19: note = Original Sequence: tcuguccaagcccgguuga
  modified_base 1..2: mod_base = OTHER; note = bicyclic nucleic acid (BNA)
  modified_base 2: mod_base = OTHER; note = 5-methyl
  modified_base 6..7: mod_base = OTHER; note = 5-methyl
  modified_base 11..13: mod_base = OTHER; note = 5-methyl
  source 1..19: mol_type = other DNA
  modified_base 3: mod_base = OTHER; note = Uracil
  modified_base 5: mod_base = OTHER; note = Uracil
  modified_base 16: mod_base = OTHER; note = Uracil
  modified_base 17: mod_base = OTHER; note = Uracil
tctgtccaagcccggttga

SEQ ID NO: 4983 - DNA, 18 bp, synthetic construct
  misc_feature 1..18: note = Description of Artificial Sequence: Synthetic Antisense oligonucleotide
  misc_feature 1..18: note = Original Sequence: tcuguccaagcccgguug
  modified_base 1..2: mod_base = OTHER; note = bicyclic nucleic acid (BNA)
  modified_base 2: mod_base = OTHER; note = 5-methyl
  modified_base 6..7: mod_base = OTHER; note = 5-methyl
  modified_base 11..13: mod_base = OTHER; note = 5-methyl
  source 1..18: mol_type = other DNA
  modified_base 3: mod_base = OTHER; note = Uracil
  modified_base 5: mod_base = OTHER; note = Uracil
  modified_base 16: mod_base = OTHER; note = Uracil
  modified_base 17: mod_base = OTHER; note = Uracil
tctgtccaagcccggttg

SEQ ID NO: 4984 - DNA, 17 bp, synthetic construct
  misc_feature 1..17: note = Description of Artificial Sequence: Synthetic Antisense oligonucleotide
  misc_feature 1..17: note = Original Sequence: tcuguccaagcccgguu
  modified_base 1..2: mod_base = OTHER; note = bicyclic nucleic acid (BNA)
  modified_base 2: mod_base = OTHER; note = 5-methyl
  modified_base 6..7: mod_base = OTHER; note = 5-methyl
  modified_base 11..13: mod_base = OTHER; note = 5-methyl
  source 1..17: mol_type = other DNA
  modified_base 3: mod_base = OTHER; note = Uracil
  modified_base 5: mod_base = OTHER; note = Uracil
  modified_base 16: mod_base = OTHER; note = Uracil
  modified_base 17: mod_base = OTHER; note = Uracil
tctgtccaagcccggtt

SEQ ID NO: 4985 - DNA, 16 bp, synthetic construct
  misc_feature 1..16: note = Description of Artificial Sequence: Synthetic Antisense oligonucleotide
  misc_feature 1..16: note = Original Sequence: tcuguccaagcccggu
  modified_base 1..2: mod_base = OTHER; note = bicyclic nucleic acid (BNA)
  modified_base 2: mod_base = OTHER; note = 5-methyl
  modified_base 6..7: mod_base = OTHER; note = 5-methyl
  modified_base 11..13: mod_base = OTHER; note = 5-methyl
  source 1..16: mol_type = other DNA
  modified_base 3: mod_base = OTHER; note = Uracil
  modified_base 5: mod_base = OTHER; note = Uracil
  modified_base 16: mod_base = OTHER; note = Uracil
tctgtccaagcccggt

SEQ ID NO: 4986 - DNA, 15 bp, synthetic construct
  misc_feature 1..15: note = Description of Artificial Sequence: Synthetic Antisense oligonucleotide
  misc_feature 1..15: note = Original Sequence: tcuguccaagcccgg
  modified_base 1..2: mod_base = OTHER; note = bicyclic nucleic acid (BNA)
  modified_base 2: mod_base = OTHER; note = 5-methyl
  modified_base 6..7: mod_base = OTHER; note = 5-methyl
  modified_base 11..13: mod_base = OTHER; note = 5-methyl
  source 1..15: mol_type = other DNA
  modified_base 3: mod_base = OTHER; note = Uracil
  modified_base 5: mod_base = OTHER; note = Uracil
tctgtccaagcccgg

SEQ ID NO: 4987 - DNA, 14 bp, synthetic construct
  misc_feature 1..14: note = Description of Artificial Sequence: Synthetic Antisense oligonucleotide
  misc_feature 1..14: note = Original Sequence: tcuguccaagcccg
  modified_base 1..2: mod_base = OTHER; note = bicyclic nucleic acid (BNA)
  modified_base 2: mod_base = OTHER; note = 5-methyl
  modified_base 6..7: mod_base = OTHER; note = 5-methyl
  modified_base 11..13: mod_base = OTHER; note = 5-methyl
  source 1..14: mol_type = other DNA
  modified_base 3: mod_base = OTHER; note = Uracil
  modified_base 5: mod_base = OTHER; note = Uracil
tctgtccaagcccg

SEQ ID NO: 4988 - DNA, 13 bp, synthetic construct
  misc_feature 1..13: note = Description of Artificial Sequence: Synthetic Antisense oligonucleotide
  misc_feature 1..13: note = Original Sequence: tcuguccaagccc
  modified_base 1..2: mod_base = OTHER; note = bicyclic nucleic acid (BNA)
  modified_base 2: mod_base = OTHER; note = 5-methyl
  modified_base 6..7: mod_base = OTHER; note = 5-methyl
  modified_base 11..13: mod_base = OTHER; note = 5-methyl
  source 1..13: mol_type = other DNA
  modified_base 3: mod_base = OTHER; note = Uracil
  modified_base 5: mod_base = OTHER; note = Uracil
tctgtccaagccc

SEQ ID NO: 4989 - DNA, 12 bp, synthetic construct
  misc_feature 1..12: note = Description of Artificial Sequence: Synthetic Antisense oligonucleotide
  misc_feature 1..12: note = Original Sequence: tcuguccaagcc
  modified_base 1..2: mod_base = OTHER; note = bicyclic nucleic acid (BNA)
  modified_base 2: mod_base = OTHER; note = 5-methyl
  modified_base 6..7: mod_base = OTHER; note = 5-methyl
  modified_base 11..12: mod_base = OTHER; note = 5-methyl
  source 1..12: mol_type = other DNA
  modified_base 3: mod_base = OTHER; note = Uracil
  modified_base 5: mod_base = OTHER; note = Uracil
tctgtccaagcc

SEQ ID NO: 4990 - DNA, 11 bp, synthetic construct
  misc_feature 1..11: note = Description of Artificial Sequence: Synthetic Antisense oligonucleotide
  misc_feature 1..11: note = Original Sequence: tcuguccaagc
  modified_base 1..2: mod_base = OTHER; note = bicyclic nucleic acid (BNA)
  modified_base 2: mod_base = OTHER; note = 5-methyl
  modified_base 6..7: mod_base = OTHER; note = 5-methyl
  modified_base 11: mod_base = OTHER; note = 5-methyl
  source 1..11: mol_type = other DNA
  modified_base 3: mod_base = OTHER; note = Uracil
  modified_base 5: mod_base = OTHER; note = Uracil
tctgtccaagc

SEQ ID NO: 4991 - DNA, 10 bp, synthetic construct
  misc_feature 1..10: note = Description of Artificial Sequence: Synthetic Antisense oligonucleotide
  misc_feature 1..10: note = Original Sequence: tcuguccaag
  modified_base 1..2: mod_base = OTHER; note = bicyclic nucleic acid (BNA)
  modified_base 2: mod_base = OTHER; note = 5-methyl
  modified_base 6..7: mod_base = OTHER; note = 5-methyl
  source 1..10: mol_type = other DNA
  modified_base 3: mod_base = OTHER; note = Uracil
  modified_base 5: mod_base = OTHER; note = Uracil
tctgtccaag

SEQ ID NO: 4992-4993 - skipped (2 entries)

SEQ ID NO: 4994 - DNA, 17 bp, synthetic construct
  misc_feature 1..17: note = Description of Artificial Sequence: Synthetic Antisense oligonucleotide
  misc_feature 1..17: note = Original Sequence: ctguccaagcccgguug
  modified_base 1: mod_base = OTHER; note = 5-methyl
  modified_base 5..6: mod_base = OTHER; note = 5-methyl
  modified_base 10..12: mod_base = OTHER; note = 5-methyl
  modified_base 1..2: mod_base = OTHER; note = bicyclic nucleic acid (BNA)
  source 1..17: mol_type = other DNA
  modified_base 4: mod_base = OTHER; note = Uracil
  modified_base 15: mod_base = OTHER; note = Uracil
  modified_base 16: mod_base = OTHER; note = Uracil
ctgtccaagcccggttg

SEQ ID NO: 4995 - DNA, 16 bp, synthetic construct
  misc_feature 1..16: note = Description of Artificial Sequence: Synthetic Antisense oligonucleotide
  misc_feature 1..16: note = Original Sequence: ctguccaagcccgguu
  modified_base 1: mod_base = OTHER; note = 5-methyl
  modified_base 5..6: mod_base = OTHER; note = 5-methyl
  modified_base 10..12: mod_base = OTHER; note = 5-methyl
  modified_base 1..2: mod_base = OTHER; note = bicyclic nucleic acid (BNA)
  source 1..16: mol_type = other DNA
  modified_base 4: mod_base = OTHER; note = Uracil
  modified_base 15: mod_base = OTHER; note = Uracil
  modified_base 16: mod_base = OTHER; note = Uracil
ctgtccaagcccggtt

SEQ ID NO: 4996 - DNA, 15 bp, synthetic construct
  misc_feature 1..15: note = Description of Artificial Sequence: Synthetic Antisense oligonucleotide
  misc_feature 1..15: note = Original Sequence: ctguccaagcccggu
  modified_base 1: mod_base = OTHER; note = 5-methyl
  modified_base 5..6: mod_base = OTHER; note = 5-methyl
  modified_base 10..12: mod_base = OTHER; note = 5-methyl
  modified_base 1..2: mod_base = OTHER; note = bicyclic nucleic acid (BNA)
  source 1..15: mol_type = other DNA
  modified_base 4: mod_base = OTHER; note = Uracil
  modified_base 15: mod_base = OTHER; note = Uracil
ctgtccaagcccggt

SEQ ID NO: 4997 - DNA, 14 bp, synthetic construct
  misc_feature 1..14: note = Description of Artificial Sequence: Synthetic Antisense oligonucleotide
  misc_feature 1..14: note = Original Sequence: ctguccaagcccgg
  modified_base 1: mod_base = OTHER; note = 5-methyl
  modified_base 5..6: mod_base = OTHER; note = 5-methyl
  modified_base 10..12: mod_base = OTHER; note = 5-methyl
  modified_base 1..2: mod_base = OTHER; note = bicyclic nucleic acid (BNA)
  source 1..14: mol_type = other DNA
  modified_base 4: mod_base = OTHER; note = Uracil
ctgtccaagcccgg

SEQ ID NO: 4998 - DNA, 13 bp, synthetic construct
  misc_feature 1..13: note = Description of Artificial Sequence: Synthetic Antisense oligonucleotide
  misc_feature 1..13: note = Original Sequence: ctguccaagcccg
  modified_base 1: mod_base = OTHER; note = 5-methyl
  modified_base 5..6: mod_base = OTHER; note = 5-methyl
  modified_base 10..12: mod_base = OTHER; note = 5-methyl
  modified_base 1..2: mod_base = OTHER; note = bicyclic nucleic acid (BNA)
  source 1..13: mol_type = other DNA
  modified_base 4: mod_base = OTHER; note = Uracil
ctgtccaagcccg

SEQ ID NO: 4999 - DNA, 12 bp, synthetic construct
  misc_feature 1..12: note = Description of Artificial Sequence: Synthetic Antisense oligonucleotide
  misc_feature 1..12: note = Original Sequence: ctguccaagccc
  modified_base 1: mod_base = OTHER; note = 5-methyl
  modified_base 5..6: mod_base = OTHER; note = 5-methyl
  modified_base 10..12: mod_base = OTHER; note = 5-methyl
  modified_base 1..2: mod_base = OTHER; note = bicyclic nucleic acid (BNA)
  source 1..12: mol_type = other DNA
  modified_base 4: mod_base = OTHER; note = Uracil
ctgtccaagccc

SEQ ID NO: 5000 - DNA, 11 bp, synthetic construct
  misc_feature 1..11: note = Description of Artificial Sequence: Synthetic Antisense oligonucleotide
  misc_feature 1..11: note = Original Sequence: ctguccaagcc
  modified_base 1: mod_base = OTHER; note = 5-methyl
  modified_base 5..6: mod_base = OTHER; note = 5-methyl
  modified_base 10..11: mod_base = OTHER; note = 5-methyl
  modified_base 1..2: mod_base = OTHER; note = bicyclic nucleic acid (BNA)
  source 1..11: mol_type = other DNA
  modified_base 4: mod_base = OTHER; note = Uracil
ctgtccaagcc

SEQ ID NO: 5001 - DNA, 10 bp, synthetic construct
  misc_feature 1..10: note = Description of Artificial Sequence: Synthetic Antisense oligonucleotide
  misc_feature 1..10: note = Original Sequence: ctguccaagc
  modified_base 1: mod_base = OTHER; note = 5-methyl
  modified_base 5..6: mod_base = OTHER; note = 5-methyl
  modified_base 10: mod_base = OTHER; note = 5-methyl
  modified_base 1..2: mod_base = OTHER; note = bicyclic nucleic acid (BNA)
  source 1..10: mol_type = other DNA
  modified_base 4: mod_base = OTHER; note = Uracil
ctgtccaagc

SEQ ID NO: 5002-5003 - skipped (2 entries)

SEQ ID NO: 5004 - DNA, 20 bp, synthetic construct
  misc_feature 1..20: note = Description of Artificial Sequence: Synthetic Antisense oligonucleotide
  misc_feature 1..20: note = Original Sequence: gtucuguccaagcccgguug
  modified_base 1..2: mod_base = OTHER; note = bicyclic nucleic acid (BNA)
  modified_base 4: mod_base = OTHER; note = 5-methyl
  modified_base 8..9: mod_base = OTHER; note = 5-methyl
  modified_base 13..15: mod_base = OTHER; note = 5-methyl
  source 1..20: mol_type = other DNA
  modified_base 3: mod_base = OTHER; note = Uracil
  modified_base 5: mod_base = OTHER; note = Uracil
  modified_base 7: mod_base = OTHER; note = Uracil
  modified_base 18: mod_base = OTHER; note = Uracil
  modified_base 19: mod_base = OTHER; note = Uracil
gttctgtccaagcccggttg

SEQ ID NO: 5005 - DNA, 19 bp, synthetic construct
  misc_feature 1..19: note = Description of Artificial Sequence: Synthetic Antisense oligonucleotide
  misc_feature 1..19: note = Original Sequence: gtucuguccaagcccgguu
  modified_base 1..2: mod_base = OTHER; note = bicyclic nucleic acid (BNA)
  modified_base 4: mod_base = OTHER; note = 5-methyl
  modified_base 8..9: mod_base = OTHER; note = 5-methyl
  modified_base 13..15: mod_base = OTHER; note = 5-methyl
  source 1..19: mol_type = other DNA
  modified_base 3: mod_base = OTHER; note = Uracil
  modified_base 5: mod_base = OTHER; note = Uracil
  modified_base 7: mod_base = OTHER; note = Uracil
  modified_base 18: mod_base = OTHER; note = Uracil
  modified_base 19: mod_base = OTHER; note = Uracil
gttctgtccaagcccggtt

SEQ ID NO: 5006 - DNA, 18 bp, synthetic construct
  misc_feature 1..18: note = Description of Artificial Sequence: Synthetic Antisense oligonucleotide
  misc_feature 1..18: note = Original Sequence: gtucuguccaagcccggu
  modified_base 1..2: mod_base = OTHER; note = bicyclic nucleic acid (BNA)
  modified_base 4: mod_base = OTHER; note = 5-methyl
  modified_base 8..9: mod_base = OTHER; note = 5-methyl
  modified_base 13..15: mod_base = OTHER; note = 5-methyl
  source 1..18: mol_type = other DNA
  modified_base 3: mod_base = OTHER; note = Uracil
  modified_base 5: mod_base = OTHER; note = Uracil
  modified_base 7: mod_base = OTHER; note = Uracil
  modified_base 18: mod_base = OTHER; note = Uracil
gttctgtccaagcccggt

SEQ ID NO: 5007 - DNA, 17 bp, synthetic construct
  misc_feature 1..17: note = Description of Artificial Sequence: Synthetic Antisense oligonucleotide
  misc_feature 1..17: note = Original Sequence: gtucuguccaagcccgg
  modified_base 1..2: mod_base = OTHER; note = bicyclic nucleic acid (BNA)
  modified_base 4: mod_base = OTHER; note = 5-methyl
  modified_base 8..9: mod_base = OTHER; note = 5-methyl
  modified_base 13..15: mod_base = OTHER; note = 5-methyl
  source 1..17: mol_type = other DNA
  modified_base 3: mod_base = OTHER; note = Uracil
  modified_base 5: mod_base = OTHER; note = Uracil
  modified_base 7: mod_base = OTHER; note = Uracil
gttctgtccaagcccgg

SEQ ID NO: 5008 - DNA, 16 bp, synthetic construct
  misc_feature 1..16: note = Description of Artificial Sequence: Synthetic Antisense oligonucleotide
  misc_feature 1..16: note = Original Sequence: gtucuguccaagcccg
  modified_base 1..2: mod_base = OTHER; note = bicyclic nucleic acid (BNA)
  modified_base 4: mod_base = OTHER; note = 5-methyl
  modified_base 8..9: mod_base = OTHER; note = 5-methyl
  modified_base 13..15: mod_base = OTHER; note = 5-methyl
  source 1..16: mol_type = other DNA
  modified_base 3: mod_base = OTHER; note = Uracil
  modified_base 5: mod_base = OTHER; note = Uracil
  modified_base 7: mod_base = OTHER; note = Uracil
gttctgtccaagcccg

SEQ ID NO: 5009 - DNA, 15 bp, synthetic construct
  misc_feature 1..15: note = Description of Artificial Sequence: Synthetic Antisense oligonucleotide
  misc_feature 1..15: note = Original Sequence: gtucuguccaagccc
  modified_base 1..2: mod_base = OTHER; note = bicyclic nucleic acid (BNA)
  modified_base 4: mod_base = OTHER; note = 5-methyl
  modified_base 8..9: mod_base = OTHER; note = 5-methyl
  modified_base 13..15: mod_base = OTHER; note = 5-methyl
  source 1..15: mol_type = other DNA
  modified_base 3: mod_base = OTHER; note = Uracil
  modified_base 5: mod_base = OTHER; note = Uracil
  modified_base 7: mod_base = OTHER; note = Uracil
gttctgtccaagccc

SEQ ID NO: 5010 - DNA, 14 bp, synthetic construct
  misc_feature 1..14: note = Description of Artificial Sequence: Synthetic Antisense oligonucleotide
  misc_feature 1..14: note = Original Sequence: gtucuguccaagcc
  modified_base 1..2: mod_base = OTHER; note = bicyclic nucleic acid (BNA)
  modified_base 4: mod_base = OTHER; note = 5-methyl
  modified_base 8..9: mod_base = OTHER; note = 5-methyl
  modified_base 13..14: mod_base = OTHER; note = 5-methyl
  source 1..14: mol_type = other DNA
  modified_base 3: mod_base = OTHER; note = Uracil
  modified_base 5: mod_base = OTHER; note = Uracil
  modified_base 7: mod_base = OTHER; note = Uracil
gttctgtccaagcc

SEQ ID NO: 5011 - DNA, 13 bp, synthetic construct
  misc_feature 1..13: note = Description of Artificial Sequence: Synthetic Antisense oligonucleotide
  misc_feature 1..13: note = Original Sequence: gtucuguccaagc
  modified_base 1..2: mod_base = OTHER; note = bicyclic nucleic acid (BNA)
  modified_base 4: mod_base = OTHER; note = 5-methyl
  modified_base 8..9: mod_base = OTHER; note = 5-methyl
  modified_base 13: mod_base = OTHER; note = 5-methyl
  source 1..13: mol_type = other DNA
  modified_base 3: mod_base = OTHER; note = Uracil
  modified_base 5: mod_base = OTHER; note = Uracil
  modified_base 7: mod_base = OTHER; note = Uracil
gttctgtccaagc

SEQ ID NO: 5012 - DNA, 12 bp, synthetic construct
  misc_feature 1..12: note = Description of Artificial Sequence: Synthetic Antisense oligonucleotide
  misc_feature 1..12: note = Original Sequence: gtucuguccaag
  modified_base 1..2: mod_base = OTHER; note = bicyclic nucleic acid (BNA)
  modified_base 4: mod_base = OTHER; note = 5-methyl
  modified_base 8..9: mod_base = OTHER; note = 5-methyl
  source 1..12: mol_type = other DNA
  modified_base 3: mod_base = OTHER; note = Uracil
  modified_base 5: mod_base = OTHER; note = Uracil
  modified_base 7: mod_base = OTHER; note = Uracil
gttctgtccaag

SEQ ID NO: 5013 - DNA, 11 bp, synthetic construct
  misc_feature 1..11: note = Description of Artificial Sequence: Synthetic Antisense oligonucleotide
  misc_feature 1..11: note = Original Sequence: gtucuguccaa
  modified_base 1..2: mod_base = OTHER; note = bicyclic nucleic acid (BNA)
  modified_base 4: mod_base = OTHER; note = 5-methyl
  modified_base 8..9: mod_base = OTHER; note = 5-methyl
  source 1..11: mol_type = other DNA
  modified_base 3: mod_base = OTHER; note = Uracil
  modified_base 5: mod_base = OTHER; note = Uracil
  modified_base 7: mod_base = OTHER; note = Uracil
gttctgtccaa

SEQ ID NO: 5014 - DNA, 10 bp, synthetic construct
  misc_feature 1..10: note = Description of Artificial Sequence: Synthetic Antisense oligonucleotide
  misc_feature 1..10: note = Original Sequence: gtucugucca
  modified_base 1..2: mod_base = OTHER; note = bicyclic nucleic acid (BNA)
  modified_base 4: mod_base = OTHER; note = 5-methyl
  modified_base 8..9: mod_base = OTHER; note = 5-methyl
  source 1..10: mol_type = other DNA
  modified_base 3: mod_base = OTHER; note = Uracil
  modified_base 5: mod_base = OTHER; note = Uracil
  modified_base 7: mod_base = OTHER; note = Uracil
gttctgtcca

SEQ ID NO: 5015-5016 - skipped (2 entries)

SEQ ID NO: 5017 - RNA, 20 nt, synthetic construct
  misc_feature 1..20: note = Description of Artificial Sequence: Synthetic Antisense oligonucleotide
  modified_base 1..2: mod_base = OTHER; note = bicyclic nucleic acid (BNA)
  modified_base 5: mod_base = OTHER; note = 5-methyl
  modified_base 9..10: mod_base = OTHER; note = 5-methyl
  modified_base 14..16: mod_base = OTHER; note = 5-methyl
  source 1..20: mol_type = other RNA
agttctgtccaagcccggtt

SEQ ID NO: 5018 - RNA, 19 nt, synthetic construct
  misc_feature 1..19: note = Description of Artificial Sequence: Synthetic Antisense oligonucleotide
  modified_base 1..2: mod_base = OTHER; note = bicyclic nucleic acid (BNA)
  modified_base 5: mod_base = OTHER; note = 5-methyl
  modified_base 9..10: mod_base = OTHER; note = 5-methyl
  modified_base 14..16: mod_base = OTHER; note = 5-methyl
  source 1..19: mol_type = other RNA
agttctgtccaagcccggt

SEQ ID NO: 5019 - RNA, 18 nt, synthetic construct
  misc_feature 1..18: note = Description of Artificial Sequence: Synthetic Antisense oligonucleotide
  modified_base 1..2: mod_base = OTHER; note = bicyclic nucleic acid (BNA)
  modified_base 5: mod_base = OTHER; note = 5-methyl
  modified_base 9..10: mod_base = OTHER; note = 5-methyl
  modified_base 14..16: mod_base = OTHER; note = 5-methyl
  source 1..18: mol_type = other RNA
agttctgtccaagcccgg

SEQ ID NO: 5020 - RNA, 17 nt, synthetic construct
  misc_feature 1..17: note = Description of Artificial Sequence: Synthetic Antisense oligonucleotide
  modified_base 1..2: mod_base = OTHER; note = bicyclic nucleic acid (BNA)
  modified_base 5: mod_base = OTHER; note = 5-methyl
  modified_base 9..10: mod_base = OTHER; note = 5-methyl
  modified_base 14..16: mod_base = OTHER; note = 5-methyl
  source 1..17: mol_type = other RNA
agttctgtccaagcccg

SEQ ID NO: 5021 - RNA, 16 nt, synthetic construct
  misc_feature 1..16: note = Description of Artificial Sequence: Synthetic Antisense oligonucleotide
  modified_base 1..2: mod_base = OTHER; note = bicyclic nucleic acid (BNA)
  modified_base 5: mod_base = OTHER; note = 5-methyl
  modified_base 9..10: mod_base = OTHER; note = 5-methyl
  modified_base 14..16: mod_base = OTHER; note = 5-methyl
  source 1..16: mol_type = other RNA
agttctgtccaagccc

SEQ ID NO: 5022 - RNA, 15 nt, synthetic construct
  misc_feature 1..15: note = Description of Artificial Sequence: Synthetic Antisense oligonucleotide
  modified_base 1..2: mod_base = OTHER; note = bicyclic nucleic acid (BNA)
  modified_base 5: mod_base = OTHER; note = 5-methyl
  modified_base 9..10: mod_base = OTHER; note = 5-methyl
  modified_base 14..15: mod_base = OTHER; note = 5-methyl
  source 1..15: mol_type = other RNA
agttctgtccaagcc

SEQ ID NO: 5023 - RNA, 14 nt, synthetic construct
  misc_feature 1..14: note = Description of Artificial Sequence: Synthetic Antisense oligonucleotide
  modified_base 1..2: mod_base = OTHER; note = bicyclic nucleic acid (BNA)
  modified_base 5: mod_base = OTHER; note = 5-methyl
  modified_base 9..10: mod_base = OTHER; note = 5-methyl
  modified_base 14: mod_base = OTHER; note = 5-methyl
  source 1..14: mol_type = other RNA
agttctgtccaagc

SEQ ID NO: 5024 - RNA, 13 nt, synthetic construct
  misc_feature 1..13: note = Description of Artificial Sequence: Synthetic Antisense oligonucleotide
  modified_base 1..2: mod_base = OTHER; note = bicyclic nucleic acid (BNA)
  modified_base 5: mod_base = OTHER; note = 5-methyl
  modified_base 9..10: mod_base = OTHER; note = 5-methyl
  source 1..13: mol_type = other RNA
agttctgtccaag

SEQ ID NO: 5025 - RNA, 12 nt, synthetic construct
  misc_feature 1..12: note = Description of Artificial Sequence: Synthetic Antisense oligonucleotide
  modified_base 1..2: mod_base = OTHER; note = bicyclic nucleic acid (BNA)
  modified_base 5: mod_base = OTHER; note = 5-methyl
  modified_base 9..10: mod_base = OTHER; note = 5-methyl
  source 1..12: mol_type = other RNA
agttctgtccaa

SEQ ID NO: 5026 - RNA, 11 nt, synthetic construct
  misc_feature 1..11: note = Description of Artificial Sequence: Synthetic Antisense oligonucleotide
  modified_base 1..2: mod_base = OTHER; note = bicyclic nucleic acid (BNA)
  modified_base 5: mod_base = OTHER; note = 5-methyl
  modified_base 9..10: mod_base = OTHER; note = 5-methyl
  source 1..11: mol_type = other RNA
agttctgtcca

SEQ ID NO: 5027 - RNA, 10 nt, synthetic construct
  misc_feature 1..10: note = Description of Artificial Sequence: Synthetic Antisense oligonucleotide
  modified_base 1..2: mod_base = OTHER; note = bicyclic nucleic acid (BNA)
  modified_base 5: mod_base = OTHER; note = 5-methyl
  modified_base 9..10: mod_base = OTHER; note = 5-methyl
  source 1..10: mol_type = other RNA
agttctgtcc

SEQ ID NO: 5028-5029 - skipped (2 entries)

SEQ ID NO: 5030 - RNA, 20 nt, synthetic construct
  misc_feature 1..20: note = Description of Artificial Sequence: Synthetic Antisense oligonucleotide
  modified_base 1..2: mod_base = OTHER; note = bicyclic nucleic acid (BNA)
  modified_base 6: mod_base = OTHER; note = 5-methyl
  modified_base 10..11: mod_base = OTHER; note = 5-methyl
  modified_base 15..17: mod_base = OTHER; note = 5-methyl
  source 1..20: mol_type = other RNA
aagttctgtccaagcccggt

SEQ ID NO: 5031 - RNA, 19 nt, synthetic construct
  misc_feature 1..19: note = Description of Artificial Sequence: Synthetic Antisense oligonucleotide
  modified_base 1..2: mod_base = OTHER; note = bicyclic nucleic acid (BNA)
  modified_base 6: mod_base = OTHER; note = 5-methyl
  modified_base 10..11: mod_base = OTHER; note = 5-methyl
  modified_base 15..17: mod_base = OTHER; note = 5-methyl
  source 1..19: mol_type = other RNA
aagttctgtccaagcccgg

SEQ ID NO: 5032 - RNA, 18 nt, synthetic construct
  misc_feature 1..18: note = Description of Artificial Sequence: Synthetic Antisense oligonucleotide
  modified_base 1..2: mod_base = OTHER; note = bicyclic nucleic acid (BNA)
  modified_base 6: mod_base = OTHER; note = 5-methyl
  modified_base 10..11: mod_base = OTHER; note = 5-methyl
  modified_base 15..17: mod_base = OTHER; note = 5-methyl
  source 1..18: mol_type = other RNA
aagttctgtccaagcccg

SEQ ID NO: 5033 - RNA, 17 nt, synthetic construct
  misc_feature 1..17: note = Description of Artificial Sequence: Synthetic Antisense oligonucleotide
  modified_base 1..2: mod_base = OTHER; note = bicyclic nucleic acid (BNA)
  modified_base 6: mod_base = OTHER; note = 5-methyl
  modified_base 10..11: mod_base = OTHER; note = 5-methyl
  modified_base 15..17: mod_base = OTHER; note = 5-methyl
  source 1..17: mol_type = other RNA
aagttctgtccaagccc

SEQ ID NO: 5034 - RNA, 16 nt, synthetic construct
  misc_feature 1..16: note = Description of Artificial Sequence: Synthetic Antisense oligonucleotide
  modified_base 1..2: mod_base = OTHER; note = bicyclic nucleic acid (BNA)
  modified_base 6: mod_base = OTHER; note = 5-methyl
  modified_base 10..11: mod_base = OTHER; note = 5-methyl
  modified_base 15..16: mod_base = OTHER; note = 5-methyl
  source 1..16: mol_type = other RNA
aagttctgtccaagcc

SEQ ID NO: 5035 - RNA, 15 nt, synthetic construct
  misc_feature 1..15: note = Description of Artificial Sequence: Synthetic Antisense oligonucleotide
  modified_base 1..2: mod_base = OTHER; note = bicyclic nucleic acid (BNA)
  modified_base 6: mod_base = OTHER; note = 5-methyl
  modified_base 10..11: mod_base = OTHER; note = 5-methyl
  modified_base 15: mod_base = OTHER; note = 5-methyl
  source 1..15: mol_type = other RNA
aagttctgtccaagc

SEQ ID NO: 5036 - RNA, 14 nt, synthetic construct
  misc_feature 1..14: note = Description of Artificial Sequence: Synthetic Antisense oligonucleotide
  modified_base 1..2: mod_base = OTHER; note = bicyclic nucleic acid (BNA)
  modified_base 6: mod_base = OTHER; note = 5-methyl
  modified_base 10..11: mod_base = OTHER; note = 5-methyl
  source 1..14: mol_type = other RNA
aagttctgtccaag

SEQ ID NO: 5037 - RNA, 13 nt, synthetic construct
  misc_feature 1..13: note = Description of Artificial Sequence: Synthetic Antisense oligonucleotide
  modified_base 1..2: mod_base = OTHER; note = bicyclic nucleic acid (BNA)
  modified_base 6: mod_base = OTHER; note = 5-methyl
  modified_base 10..11: mod_base = OTHER; note = 5-methyl
  source 1..13: mol_type = other RNA
aagttctgtccaa

SEQ ID NO: 5038 - RNA, 12 nt, synthetic construct
  misc_feature 1..12: note = Description of Artificial Sequence: Synthetic Antisense oligonucleotide
  modified_base 1..2: mod_base = OTHER; note = bicyclic nucleic acid (BNA)
  modified_base 6: mod_base = OTHER; note = 5-methyl
  modified_base 10..11: mod_base = OTHER; note = 5-methyl
  source 1..12: mol_type = other RNA
aagttctgtcca

SEQ ID NO: 5039 - RNA, 11 nt, synthetic construct
  misc_feature 1..11: note = Description of Artificial Sequence: Synthetic Antisense oligonucleotide
  modified_base 1..2: mod_base = OTHER; note = bicyclic nucleic acid (BNA)
  modified_base 6: mod_base = OTHER; note = 5-methyl
  modified_base 10..11: mod_base = OTHER; note = 5-methyl
  source 1..11: mol_type = other RNA
aagttctgtcc

SEQ ID NO: 5040 - RNA, 10 nt, synthetic construct
  misc_feature 1..10: note = Description of Artificial Sequence: Synthetic Antisense oligonucleotide
  modified_base 1..2: mod_base = OTHER; note = bicyclic nucleic acid (BNA)
  modified_base 6: mod_base = OTHER; note = 5-methyl
  modified_base 10: mod_base = OTHER; note = 5-methyl
  source 1..10: mol_type = other RNA
aagttctgtc

SEQ ID NO: 5041-5042 - skipped (2 entries)

SEQ ID NO: 5043 - DNA, 20 bp, synthetic construct
  misc_feature 1..20: note = Description of Artificial Sequence: Synthetic Antisense oligonucleotide
  misc_feature 1..20: note = Original Sequence: taaguucuguccaagcccgg
  modified_base 1..2: mod_base = OTHER; note = bicyclic nucleic acid (BNA)
  modified_base 7: mod_base = OTHER; note = 5-methyl
  modified_base 11..12: mod_base = OTHER; note = 5-methyl
  modified_base 16..18: mod_base = OTHER; note = 5-methyl
  source 1..20: mol_type = other DNA
  modified_base 5: mod_base = OTHER; note = Uracil
  modified_base 6: mod_base = OTHER; note = Uracil
  modified_base 8: mod_base = OTHER; note = Uracil
  modified_base 10: mod_base = OTHER; note = Uracil
taagttctgtccaagcccgg

SEQ ID NO: 5044 - DNA, 19 bp, synthetic construct
  misc_feature 1..19: note = Description of Artificial Sequence: Synthetic Antisense oligonucleotide
  misc_feature 1..19: note = Original Sequence: taaguucuguccaagcccg
  modified_base 1..2: mod_base = OTHER; note = bicyclic nucleic acid (BNA)
  modified_base 7: mod_base = OTHER; note = 5-methyl
  modified_base 11..12: mod_base = OTHER; note = 5-methyl
  modified_base 16..18: mod_base = OTHER; note = 5-methyl
  source 1..19: mol_type = other DNA
  modified_base 5: mod_base = OTHER; note = Uracil
  modified_base 6: mod_base = OTHER; note = Uracil
  modified_base 8: mod_base = OTHER; note = Uracil
  modified_base 10: mod_base = OTHER; note = Uracil
taagttctgtccaagcccg

SEQ ID NO: 5045 - DNA, 18 bp, synthetic construct
  misc_feature 1..18: note = Description of Artificial Sequence: Synthetic Antisense oligonucleotide
  misc_feature 1..18: note = Original Sequence: taaguucuguccaagccc
  modified_base 1..2: mod_base = OTHER; note = bicyclic nucleic acid (BNA)
  modified_base 7: mod_base = OTHER; note = 5-methyl
  modified_base 11..12: mod_base = OTHER; note = 5-methyl
  modified_base 16..18: mod_base = OTHER; note = 5-methyl
  source 1..18: mol_type = other DNA
  modified_base 5: mod_base = OTHER; note = Uracil
  modified_base 6: mod_base = OTHER; note = Uracil
  modified_base 8: mod_base = OTHER; note = Uracil
  modified_base 10: mod_base = OTHER; note = Uracil
taagttctgtccaagccc

SEQ ID NO: 5046 - DNA, 17 bp, synthetic construct
  misc_feature 1..17: note = Description of Artificial Sequence: Synthetic Antisense oligonucleotide
  misc_feature 1..17: note = Original Sequence: taaguucuguccaagcc
  modified_base 1..2: mod_base = OTHER; note = bicyclic nucleic acid (BNA)
  modified_base 7: mod_base = OTHER; note = 5-methyl
  modified_base 11..12: mod_base = OTHER; note = 5-methyl
  modified_base 16..17: mod_base = OTHER; note = 5-methyl
  source 1..17: mol_type = other DNA
  modified_base 5: mod_base = OTHER; note = Uracil
  modified_base 6: mod_base = OTHER; note = Uracil
  modified_base 8: mod_base = OTHER; note = Uracil
  modified_base 10: mod_base = OTHER; note = Uracil
taagttctgtccaagcc

SEQ ID NO: 5047 - DNA, 16 bp, synthetic construct
  misc_feature 1..16: note = Description of Artificial Sequence: Synthetic Antisense oligonucleotide
  misc_feature 1..16: note = Original Sequence: taaguucuguccaagc
  modified_base 1..2: mod_base = OTHER; note = bicyclic nucleic acid (BNA)
  modified_base 7: mod_base = OTHER; note = 5-methyl
  modified_base 11..12: mod_base = OTHER; note = 5-methyl
  modified_base 16: mod_base = OTHER; note = 5-methyl
  source 1..16: mol_type = other DNA
  modified_base 5: mod_base = OTHER; note = Uracil
  modified_base 6: mod_base = OTHER; note = Uracil
  modified_base 8: mod_base = OTHER; note = Uracil
  modified_base 10: mod_base = OTHER; note = Uracil
taagttctgtccaagc

SEQ ID NO: 5048 - DNA, 14 bp, synthetic construct
  misc_feature 1..14: note = Description of Artificial Sequence: Synthetic Antisense oligonucleotide
  misc_feature 1..14: note = Original Sequence: taaguucuguccaa
  modified_base 1..2: mod_base = OTHER; note = bicyclic nucleic acid (BNA)
  modified_base 7: mod_base = OTHER; note = 5-methyl
  modified_base 11..12: mod_base = OTHER; note = 5-methyl
  source 1..14: mol_type = other DNA
  modified_base 5: mod_base = OTHER; note = Uracil
  modified_base 6: mod_base = OTHER; note = Uracil
  modified_base 8: mod_base = OTHER; note = Uracil
  modified_base 10: mod_base = OTHER; note = Uracil
taagttctgtccaa

SEQ ID NO: 5049 - DNA, 13 bp, synthetic construct
  misc_feature 1..13: note = Description of Artificial Sequence: Synthetic Antisense oligonucleotide
  misc_feature 1..13: note = Original Sequence: taaguucugucca
  modified_base 1..2: mod_base = OTHER; note = bicyclic nucleic acid (BNA)
  modified_base 7: mod_base = OTHER; note = 5-methyl
  modified_base 11..12: mod_base = OTHER; note = 5-methyl
  source 1..13: mol_type = other DNA
  modified_base 5: mod_base = OTHER; note = Uracil
  modified_base 6: mod_base = OTHER; note = Uracil
  modified_base 8: mod_base = OTHER; note = Uracil
  modified_base 10: mod_base = OTHER; note = Uracil
taagttctgtcca

SEQ ID NO: 5050 - DNA, 12 bp, synthetic construct
  misc_feature 1..12: note = Description of Artificial Sequence: Synthetic Antisense oligonucleotide
  misc_feature 1..12: note = Original Sequence: taaguucugucc
  modified_base 1..2: mod_base = OTHER; note = bicyclic nucleic acid (BNA)
  modified_base 7: mod_base = OTHER; note = 5-methyl
  modified_base 11..12: mod_base = OTHER; note = 5-methyl
  source 1..12: mol_type = other DNA
  modified_base 5: mod_base = OTHER; note = Uracil
  modified_base 6: mod_base = OTHER; note = Uracil
  modified_base 8: mod_base = OTHER; note = Uracil
  modified_base 10: mod_base = OTHER; note = Uracil
taagttctgtcc

SEQ ID NO: 5051 - DNA, 11 bp, synthetic construct
  misc_feature 1..11: note = Description of Artificial Sequence: Synthetic Antisense oligonucleotide
  misc_feature 1..11: note = Original Sequence: taaguucuguc
  modified_base 1..2: mod_base = OTHER; note = bicyclic nucleic acid (BNA)
  modified_base 7: mod_base = OTHER; note = 5-methyl
  modified_base 11: mod_base = OTHER; note = 5-methyl
  source 1..11: mol_type = other DNA
  modified_base 5: mod_base = OTHER; note = Uracil
  modified_base 6: mod_base = OTHER; note = Uracil
  modified_base 8: mod_base = OTHER; note = Uracil
  modified_base 10: mod_base = OTHER; note = Uracil
taagttctgtc

SEQ ID NO: 5052 - DNA, 10 bp, synthetic construct
  misc_feature 1..10: note = Description of Artificial Sequence: Synthetic Antisense oligonucleotide
  misc_feature 1..10: note = Original Sequence: taaguucugu
  modified_base 1..2: mod_base = OTHER; note = bicyclic nucleic acid (BNA)
  modified_base 7: mod_base = OTHER; note = 5-methyl
  source 1..10: mol_type = other DNA
  modified_base 5: mod_base = OTHER; note = Uracil
  modified_base 6: mod_base = OTHER; note = Uracil
  modified_base 8: mod_base = OTHER; note = Uracil
  modified_base 10: mod_base = OTHER; note = Uracil
taagttctgt

SEQ ID NO: 5053-5054 - skipped (2 entries)

SEQ ID NO: 5055 - DNA, 20 bp, synthetic construct
  misc_feature 1..20: note = Description of Artificial Sequence: Synthetic Antisense oligonucleotide
  misc_feature 1..20: note = Original Sequence: gtaaguucuguccaagcccg
  modified_base 1..2: mod_base = OTHER; note = bicyclic nucleic acid (BNA)
  modified_base 8: mod_base = OTHER; note = 5-methyl
  modified_base 12..13: mod_base = OTHER; note = 5-methyl
  modified_base 17..19: mod_base = OTHER; note = 5-methyl
  source 1..20: mol_type = other DNA
  modified_base 6: mod_base = OTHER; note = Uracil
  modified_base 7: mod_base = OTHER; note = Uracil
  modified_base 9: mod_base = OTHER; note = Uracil
  modified_base 11: mod_base = OTHER; note = Uracil
gtaagttctgtccaagcccg

SEQ ID NO: 5056 - DNA, 19 bp, synthetic construct
  misc_feature 1..19: note = Description of Artificial Sequence: Synthetic Antisense oligonucleotide
  misc_feature 1..19: note = Original Sequence: gtaaguucuguccaagccc
  modified_base 1..2: mod_base = OTHER; note = bicyclic nucleic acid (BNA)
  modified_base 8: mod_base = OTHER; note = 5-methyl
  modified_base 12..13: mod_base = OTHER; note = 5-methyl
  modified_base 17..19: mod_base = OTHER; note = 5-methyl
  source 1..19: mol_type = other DNA
  modified_base 6: mod_base = OTHER; note = Uracil
  modified_base 7: mod_base = OTHER; note = Uracil
  modified_base 9: mod_base = OTHER; note = Uracil
  modified_base 11: mod_base = OTHER; note = Uracil
gtaagttctgtccaagccc

SEQ ID NO: 5057 - DNA, 17 bp, synthetic construct
  misc_feature 1..17: note = Description of Artificial Sequence: Synthetic Antisense oligonucleotide
  misc_feature 1..17: note = Original Sequence: gtaaguucuguccaagc
  modified_base 1..2: mod_base = OTHER; note = bicyclic nucleic acid (BNA)
  modified_base 8: mod_base = OTHER; note = 5-methyl
  modified_base 12..13: mod_base = OTHER; note = 5-methyl
  modified_base 17: mod_base = OTHER; note = 5-methyl
  source 1..17: mol_type = other DNA
  modified_base 6: mod_base = OTHER; note = Uracil
  modified_base 7: mod_base = OTHER; note = Uracil
  modified_base 9: mod_base = OTHER; note = Uracil
  modified_base 11: mod_base = OTHER; note = Uracil
gtaagttctgtccaagc

SEQ ID NO: 5058 - DNA, 16 bp, synthetic construct
  misc_feature 1..16: note = Description of Artificial Sequence: Synthetic Antisense oligonucleotide
  misc_feature 1..16: note = Original Sequence: gtaaguucuguccaag
  modified_base 1..2: mod_base = OTHER; note = bicyclic nucleic acid (BNA)
  modified_base 8: mod_base = OTHER; note = 5-methyl
  modified_base 12..13: mod_base = OTHER; note = 5-methyl
  source 1..16: mol_type = other DNA
  modified_base 6: mod_base = OTHER; note = Uracil
  modified_base 7: mod_base = OTHER; note = Uracil
  modified_base 9: mod_base = OTHER; note = Uracil
  modified_base 11: mod_base = OTHER; note = Uracil
gtaagttctgtccaag

SEQ ID NO: 5059 - DNA, 15 bp, synthetic construct
  misc_feature 1..15: note = Description of Artificial Sequence: Synthetic Antisense oligonucleotide
  misc_feature 1..15: note = Original Sequence: gtaaguucuguccaa
  modified_base 1..2: mod_base = OTHER; note = bicyclic nucleic acid (BNA)
  modified_base 8: mod_base = OTHER; note = 5-methyl
  modified_base 12..13: mod_base = OTHER; note = 5-methyl
  source 1..15: mol_type = other DNA
  modified_base 6: mod_base = OTHER; note = Uracil
  modified_base 7: mod_base = OTHER; note = Uracil
  modified_base 9: mod_base = OTHER; note = Uracil
  modified_base 11: mod_base = OTHER; note = Uracil
gtaagttctgtccaa

SEQ ID NO: 5060 - DNA, 14 bp, synthetic construct
  misc_feature 1..14: note = Description of Artificial Sequence: Synthetic Antisense oligonucleotide
  misc_feature 1..14: note = Original Sequence: gtaaguucugucca
  modified_base 1..2: mod_base = OTHER; note = bicyclic nucleic acid (BNA)
  modified_base 8: mod_base = OTHER; note = 5-methyl
  modified_base 12..13: mod_base = OTHER; note = 5-methyl
  source 1..14: mol_type = other DNA
  modified_base 6: mod_base = OTHER; note = Uracil
  modified_base 7: mod_base = OTHER; note = Uracil
  modified_base 9: mod_base = OTHER; note = Uracil
  modified_base 11: mod_base = OTHER; note = Uracil
gtaagttctgtcca

SEQ ID NO: 5061 - DNA, 13 bp, synthetic construct
  misc_feature 1..13: note = Description of Artificial Sequence: Synthetic Antisense oligonucleotide
  misc_feature 1..13: note = Original Sequence: gtaaguucugucc
  modified_base 1..2: mod_base = OTHER; note = bicyclic nucleic acid (BNA)
  modified_base 8: mod_base = OTHER; note = 5-methyl
  modified_base 12..13: mod_base = OTHER; note = 5-methyl
  source 1..13: mol_type = other DNA
  modified_base 6: mod_base = OTHER; note = Uracil
  modified_base 7: mod_base = OTHER; note = Uracil
  modified_base 9: mod_base = OTHER; note = Uracil
  modified_base 11: mod_base = OTHER; note = Uracil
gtaagttctgtcc

SEQ ID NO: 5062 - DNA, 12 bp, synthetic construct
  misc_feature 1..12: note = Description of Artificial Sequence: Synthetic Antisense oligonucleotide
  misc_feature 1..12: note = Original Sequence: gtaaguucuguc
  modified_base 1..2: mod_base = OTHER; note = bicyclic nucleic acid (BNA)
  modified_base 8: mod_base = OTHER; note = 5-methyl
  modified_base 12: mod_base = OTHER; note = 5-methyl
  source 1..12: mol_type = other DNA
  modified_base 6: mod_base = OTHER; note = Uracil
  modified_base 7: mod_base = OTHER; note = Uracil
  modified_base 9: mod_base = OTHER; note = Uracil
  modified_base 11: mod_base = OTHER; note = Uracil
gtaagttctgtc

SEQ ID NO: 5063 - DNA, 11 bp, synthetic construct
  misc_feature 1..11: note = Description of Artificial Sequence: Synthetic Antisense oligonucleotide
  misc_feature 1..11: note = Original Sequence: gtaaguucugu
  modified_base 1..2: mod_base = OTHER; note = bicyclic nucleic acid (BNA)
  modified_base 8: mod_base = OTHER; note = 5-methyl
  source 1..11: mol_type = other DNA
  modified_base 6: mod_base = OTHER; note = Uracil
  modified_base 7: mod_base = OTHER; note = Uracil
  modified_base 9: mod_base = OTHER; note = Uracil
  modified_base 11: mod_base = OTHER; note = Uracil
gtaagttctgt

SEQ ID NO: 5064 - DNA, 10 bp, synthetic construct
  misc_feature 1..10: note = Description of Artificial Sequence: Synthetic Antisense oligonucleotide
  misc_feature 1..10: note = Original Sequence: gtaaguucug
  modified_base 1..2: mod_base = OTHER; note = bicyclic nucleic acid (BNA)
  modified_base 8: mod_base = OTHER; note = 5-methyl
  source 1..10: mol_type = other DNA
  modified_base 6: mod_base = OTHER; note = Uracil
  modified_base 7: mod_base = OTHER; note = Uracil
  modified_base 9: mod_base = OTHER; note = Uracil
gtaagttctg

SEQ ID NO: 5065-5066 - skipped (2 entries)

SEQ ID NO: 5067 - RNA, 20 nt, synthetic construct
  misc_feature 1..20: note = Description of Artificial Sequence: Synthetic Antisense oligonucleotide
  modified_base 1..2: mod_base = OTHER; note = bicyclic nucleic acid (BNA)
  modified_base 9: mod_base = OTHER; note = 5-methyl
  modified_base 13..14: mod_base = OTHER; note = 5-methyl
  modified_base 18..20: mod_base = OTHER; note = 5-methyl
  source 1..20: mol_type = other RNA
ggtaagttctgtccaagccc

SEQ ID NO: 5068 - RNA, 19 nt, synthetic construct
  misc_feature 1..19: note = Description of Artificial Sequence: Synthetic Antisense oligonucleotide
  modified_base 1..2: mod_base = OTHER; note = bicyclic nucleic acid (BNA)
  modified_base 9: mod_base = OTHER; note = 5-methyl
  modified_base 13..14: mod_base = OTHER; note = 5-methyl
  modified_base 18..19: mod_base = OTHER; note = 5-methyl
  source 1..19: mol_type = other RNA
ggtaagttctgtccaagcc

SEQ ID NO: 5069 - RNA, 17 nt, synthetic construct
  misc_feature 1..17: note = Description of Artificial Sequence: Synthetic Antisense oligonucleotide
  modified_base 1..2: mod_base = OTHER; note = bicyclic nucleic acid (BNA)
  modified_base 9: mod_base = OTHER; note = 5-methyl
  modified_base 13..14: mod_base = OTHER; note = 5-methyl
  source 1..17: mol_type = other RNA
ggtaagttctgtccaag

SEQ ID NO: 5070 - RNA, 16 nt, synthetic construct
  misc_feature 1..16: note = Description of Artificial Sequence: Synthetic Antisense oligonucleotide
  modified_base 1..2: mod_base = OTHER; note = bicyclic nucleic acid (BNA)
  modified_base 9: mod_base = OTHER; note = 5-methyl
  modified_base 13..14: mod_base = OTHER; note = 5-methyl
  source 1..16: mol_type = other RNA
ggtaagttctgtccaa

SEQ ID NO: 5071 - RNA, 15 nt, synthetic construct
  misc_feature 1..15: note = Description of Artificial Sequence: Synthetic Antisense oligonucleotide
  modified_base 1..2: mod_base = OTHER; note = bicyclic nucleic acid (BNA)
  modified_base 9: mod_base = OTHER; note = 5-methyl
  modified_base 13..14: mod_base = OTHER; note = 5-methyl
  source 1..15: mol_type = other RNA
ggtaagttctgtcca

SEQ ID NO: 5072 - RNA, 14 nt, synthetic construct
  misc_feature 1..14: note = Description of Artificial Sequence: Synthetic Antisense oligonucleotide
  modified_base 1..2: mod_base = OTHER; note = bicyclic nucleic acid (BNA)
  modified_base 9: mod_base = OTHER; note = 5-methyl
  modified_base 13..14: mod_base = OTHER; note = 5-methyl
  source 1..14: mol_type = other RNA
ggtaagttctgtcc

SEQ ID NO: 5073 - RNA, 13 nt, synthetic construct
  misc_feature 1..13: note = Description of Artificial Sequence: Synthetic Antisense oligonucleotide
  modified_base 1..2: mod_base = OTHER; note = bicyclic nucleic acid (BNA)
  modified_base 9: mod_base = OTHER; note = 5-methyl
  modified_base 13: mod_base = OTHER; note = 5-methyl
  source 1..13: mol_type = other RNA
ggtaagttctgtc

SEQ ID NO: 5074 - RNA, 12 nt, synthetic construct
  misc_feature 1..12: note = Description of Artificial Sequence: Synthetic Antisense oligonucleotide
  modified_base 1..2: mod_base = OTHER; note = bicyclic nucleic acid (BNA)
  modified_base 9: mod_base = OTHER; note = 5-methyl
  source 1..12: mol_type = other RNA
ggtaagttctgt

SEQ ID NO: 5075 - RNA, 11 nt, synthetic construct
  misc_feature 1..11: note = Description of Artificial Sequence: Synthetic Antisense oligonucleotide
  modified_base 1..2: mod_base = OTHER; note = bicyclic nucleic acid (BNA)
  modified_base 9: mod_base = OTHER; note = 5-methyl
  source 1..11: mol_type = other RNA
ggtaagttctg

SEQ ID NO: 5076 - RNA, 10 nt, synthetic construct
  misc_feature 1..10: note = Description of Artificial Sequence: Synthetic Antisense oligonucleotide
  modified_base 1..2: mod_base = OTHER; note = bicyclic nucleic acid (BNA)
  modified_base 9: mod_base = OTHER; note = 5-methyl
  source 1..10: mol_type = other RNA
ggtaagttct

SEQ ID NO: 5077 - skipped

SEQ ID NO: 5078 - RNA, 20 nt, synthetic construct
  misc_feature 1..20: note = Description of Artificial Sequence: Synthetic Antisense oligonucleotide
  modified_base 1: mod_base = OTHER; note = 5-methyl
  modified_base 10: mod_base = OTHER; note = 5-methyl
  modified_base 14..15: mod_base = OTHER; note = 5-methyl
  modified_base 19..20: mod_base = OTHER; note = 5-methyl
  modified_base 1..2: mod_base = OTHER; note = bicyclic nucleic acid (BNA)
  source 1..20: mol_type = other RNA
cggtaagttctgtccaagcc

SEQ ID NO: 5079 - RNA, 19 nt, synthetic construct
  misc_feature 1..19: note = Description of Artificial Sequence: Synthetic Antisense oligonucleotide
  modified_base 1: mod_base = OTHER; note = 5-methyl
  modified_base 10: mod_base = OTHER; note = 5-methyl
  modified_base 14..15: mod_base = OTHER; note = 5-methyl
  modified_base 19: mod_base = OTHER; note = 5-methyl
  modified_base 1..2: mod_base = OTHER; note = bicyclic nucleic acid (BNA)
  source 1..19: mol_type = other RNA
cggtaagttctgtccaagc

SEQ ID NO: 5080 - RNA, 18 nt, synthetic construct
  misc_feature 1..18: note = Description of Artificial Sequence: Synthetic Antisense oligonucleotide
  modified_base 1: mod_base = OTHER; note = 5-methyl
  modified_base 10: mod_base = OTHER; note = 5-methyl
  modified_base 14..15: mod_base = OTHER; note = 5-methyl
  modified_base 1..2: mod_base = OTHER; note = bicyclic nucleic acid (BNA)
  source 1..18: mol_type = other RNA
cggtaagttctgtccaag

SEQ ID NO: 5081 - RNA, 17 nt, synthetic construct
  misc_feature 1..17: note = Description of Artificial Sequence: Synthetic Antisense oligonucleotide
  modified_base 1: mod_base = OTHER; note = 5-methyl
  modified_base 10: mod_base = OTHER; note = 5-methyl
  modified_base 14..15: mod_base = OTHER; note = 5-methyl
  modified_base 1..2: mod_base = OTHER; note = bicyclic nucleic acid (BNA)
  source 1..17: mol_type = other RNA
cggtaagttctgtccaa

SEQ ID NO: 5082 - RNA, 16 nt, synthetic construct
  misc_feature 1..16: note = Description of Artificial Sequence: Synthetic Antisense oligonucleotide
  modified_base 1: mod_base = OTHER; note = 5-methyl
  modified_base 10: mod_base = OTHER; note = 5-methyl
  modified_base 14..15: mod_base = OTHER; note = 5-methyl
  modified_base 1..2: mod_base = OTHER; note = bicyclic nucleic acid (BNA)
  source 1..16: mol_type = other RNA
cggtaagttctgtcca

SEQ ID NO: 5083 - RNA, 15 nt, synthetic construct
  misc_feature 1..15: note = Description of Artificial Sequence: Synthetic Antisense oligonucleotide
  modified_base 1: mod_base = OTHER; note = 5-methyl
  modified_base 10: mod_base = OTHER; note = 5-methyl
  modified_base 14..15: mod_base = OTHER; note = 5-methyl
  modified_base 1..2: mod_base = OTHER; note = bicyclic nucleic acid (BNA)
  source 1..15: mol_type = other RNA
cggtaagttctgtcc

SEQ ID NO: 5084 - RNA, 14 nt, synthetic construct
  misc_feature 1..14: note = Description of Artificial Sequence: Synthetic Antisense oligonucleotide
  modified_base 1: mod_base = OTHER; note = 5-methyl
  modified_base 10: mod_base = OTHER; note = 5-methyl
  modified_base 14: mod_base = OTHER; note = 5-methyl
  modified_base 1..2: mod_base = OTHER; note = bicyclic nucleic acid (BNA)
  source 1..14: mol_type = other RNA
cggtaagttctgtc

SEQ ID NO: 5085 - RNA, 13 nt, synthetic construct
  misc_feature 1..13: note = Description of Artificial Sequence: Synthetic Antisense oligonucleotide
  modified_base 1: mod_base = OTHER; note = 5-methyl
  modified_base 10: mod_base = OTHER; note = 5-methyl
  modified_base 1..2: mod_base = OTHER; note = bicyclic nucleic acid (BNA)
  source 1..13: mol_type = other RNA
cggtaagttctgt

SEQ ID NO: 5086 - RNA, 12 nt, synthetic construct
  misc_feature 1..12: note = Description of Artificial Sequence: Synthetic Antisense oligonucleotide
  modified_base 1: mod_base = OTHER; note = 5-methyl
  modified_base 10: mod_base = OTHER; note = 5-methyl
  modified_base 1..2: mod_base = OTHER; note = bicyclic nucleic acid (BNA)
  source 1..12: mol_type = other RNA
cggtaagttctg

SEQ ID NO: 5087 - RNA, 11 nt, synthetic construct
  misc_feature 1..11: note = Description of Artificial Sequence: Synthetic Antisense oligonucleotide
  modified_base 1: mod_base = OTHER; note = 5-methyl
  modified_base 10: mod_base = OTHER; note = 5-methyl
  modified_base 1..2: mod_base = OTHER; note = bicyclic nucleic acid (BNA)
  source 1..11: mol_type = other RNA
cggtaagttct

SEQ ID NO: 5088 - RNA, 10 nt, synthetic construct
  misc_feature 1..10: note = Description of Artificial Sequence: Synthetic Antisense oligonucleotide
  modified_base 1: mod_base = OTHER; note = 5-methyl
  modified_base 10: mod_base = OTHER; note = 5-methyl
  modified_base 1..2: mod_base = OTHER; note = bicyclic nucleic acid (BNA)
  source 1..10: mol_type = other RNA
cggtaagttc

SEQ ID NO: 5089-5090 - skipped (2 entries)

SEQ ID NO: 5091 - DNA, 20 bp, synthetic construct
  misc_feature 1..20: note = Description of Artificial Sequence: Synthetic Antisense oligonucleotide
  misc_feature 1..20: note = Original Sequence: tcgguaaguucuguccaagc
  modified_base 1..2: mod_base = OTHER; note = bicyclic nucleic acid (BNA)
  modified_base 2: mod_base = OTHER; note = 5-methyl
  modified_base 11: mod_base = OTHER; note = 5-methyl
  modified_base 15..16: mod_base = OTHER; note = 5-methyl
  modified_base 20: mod_base = OTHER; note = 5-methyl
  source 1..20: mol_type = other DNA
  modified_base 5: mod_base = OTHER; note = Uracil
  modified_base 9: mod_base = OTHER; note = Uracil
  modified_base 10: mod_base = OTHER; note = Uracil
  modified_base 12: mod_base = OTHER; note = Uracil
  modified_base 14: mod_base = OTHER; note = Uracil
tcggtaagttctgtccaagc

SEQ ID NO: 5092 - DNA, 19 bp, synthetic construct
  misc_feature 1..19: note = Description of Artificial Sequence: Synthetic Antisense oligonucleotide
  misc_feature 1..19: note = Original Sequence: tcgguaaguucuguccaag
  modified_base 1..2: mod_base = OTHER; note = bicyclic nucleic acid (BNA)
  modified_base 2: mod_base = OTHER; note = 5-methyl
  modified_base 11: mod_base = OTHER; note = 5-methyl
  modified_base 15..16: mod_base = OTHER; note = 5-methyl
  source 1..19: mol_type = other DNA
  modified_base 5: mod_base = OTHER; note = Uracil
  modified_base 9: mod_base = OTHER; note = Uracil
  modified_base 10: mod_base = OTHER; note = Uracil
  modified_base 12: mod_base = OTHER; note = Uracil
  modified_base 14: mod_base = OTHER; note = Uracil
tcggtaagttctgtccaag

SEQ ID NO: 5093 - DNA, 18 bp, synthetic construct
  misc_feature 1..18: note = Description of Artificial Sequence: Synthetic Antisense oligonucleotide
  misc_feature 1..18: note = Original Sequence: tcgguaaguucuguccaa
  modified_base 1..2: mod_base = OTHER; note = bicyclic nucleic acid (BNA)
  modified_base 2: mod_base = OTHER; note = 5-methyl
  modified_base 11: mod_base = OTHER; note = 5-methyl
  modified_base 15..16: mod_base = OTHER; note = 5-methyl
  source 1..18: mol_type = other DNA
  modified_base 5: mod_base = OTHER; note = Uracil
  modified_base 9: mod_base = OTHER; note = Uracil
  modified_base 10: mod_base = OTHER; note = Uracil
  modified_base 12: mod_base = OTHER; note = Uracil
  modified_base 14: mod_base = OTHER; note = Uracil
tcggtaagttctgtccaa

SEQ ID NO: 5094 - DNA, 17 bp, synthetic construct
  misc_feature 1..17: note = Description of Artificial Sequence: Synthetic Antisense oligonucleotide
  misc_feature 1..17: note = Original Sequence: tcgguaaguucugucca
  modified_base 1..2: mod_base = OTHER; note = bicyclic nucleic acid (BNA)
  modified_base 2: mod_base = OTHER; note = 5-methyl
  modified_base 11: mod_base = OTHER; note = 5-methyl
  modified_base 15..16: mod_base = OTHER; note = 5-methyl
  source 1..17: mol_type = other DNA
  modified_base 5: mod_base = OTHER; note = Uracil
  modified_base 9: mod_base = OTHER; note = Uracil
  modified_base 10: mod_base = OTHER; note = Uracil
  modified_base 12: mod_base = OTHER; note = Uracil
  modified_base 14: mod_base = OTHER; note = Uracil
tcggtaagttctgtcca

SEQ ID NO: 5095 - DNA, 16 bp, synthetic construct
  misc_feature 1..16: note = Description of Artificial Sequence: Synthetic Antisense oligonucleotide
  misc_feature 1..16: note = Original Sequence: tcgguaaguucugucc
  modified_base 1..2: mod_base = OTHER; note = bicyclic nucleic acid (BNA)
  modified_base 2: mod_base = OTHER; note = 5-methyl
  modified_base 11: mod_base = OTHER; note = 5-methyl
  modified_base 15..16: mod_base = OTHER; note = 5-methyl
  source 1..16: mol_type = other DNA
  modified_base 5: mod_base = OTHER; note = Uracil
  modified_base 9: mod_base = OTHER; note = Uracil
  modified_base 10: mod_base = OTHER; note = Uracil
  modified_base 12: mod_base = OTHER; note = Uracil
  modified_base 14: mod_base = OTHER; note = Uracil
tcggtaagttctgtcc

SEQ ID NO: 5096 - DNA, 15 bp, synthetic construct
  misc_feature 1..15: note = Description of Artificial Sequence: Synthetic Antisense oligonucleotide
  misc_feature 1..15: note = Original Sequence: tcgguaaguucuguc
  modified_base 1..2: mod_base = OTHER; note = bicyclic nucleic acid (BNA)
  modified_base 2: mod_base = OTHER; note = 5-methyl
  modified_base 11: mod_base = OTHER; note = 5-methyl
  modified_base 15: mod_base = OTHER; note = 5-methyl
  source 1..15: mol_type = other DNA
  modified_base 5: mod_base = OTHER; note = Uracil
  modified_base 9: mod_base = OTHER; note = Uracil
  modified_base 10: mod_base = OTHER; note = Uracil
  modified_base 12: mod_base = OTHER; note = Uracil
  modified_base 14: mod_base = OTHER; note = Uracil
tcggtaagttctgtc

SEQ ID NO: 5097 - DNA, 14 bp, synthetic construct
  misc_feature 1..14: note = Description of Artificial Sequence: Synthetic Antisense oligonucleotide
  misc_feature 1..14: note = Original Sequence: tcgguaaguucugu
  modified_base 1..2: mod_base = OTHER; note = bicyclic nucleic acid (BNA)
  modified_base 2: mod_base = OTHER; note = 5-methyl
  modified_base 11: mod_base = OTHER; note = 5-methyl
  source 1..14: mol_type = other DNA
  modified_base 5: mod_base = OTHER; note = Uracil
  modified_base 9: mod_base = OTHER; note = Uracil
  modified_base 10: mod_base = OTHER; note = Uracil
  modified_base 12: mod_base = OTHER; note = Uracil
  modified_base 14: mod_base = OTHER; note = Uracil
tcggtaagttctgt

SEQ ID NO: 5098 - DNA, 13 bp, synthetic construct
  misc_feature 1..13: note = Description of Artificial Sequence: Synthetic Antisense oligonucleotide
  misc_feature 1..13: note = Original Sequence: tcgguaaguucug
  modified_base 1..2: mod_base = OTHER; note = bicyclic nucleic acid (BNA)
  modified_base 2: mod_base = OTHER; note = 5-methyl
  modified_base 11: mod_base = OTHER; note = 5-methyl
  source 1..13: mol_type = other DNA
  modified_base 5: mod_base = OTHER; note = Uracil
  modified_base 9: mod_base = OTHER; note = Uracil
  modified_base 10: mod_base = OTHER; note = Uracil
  modified_base 12: mod_base = OTHER; note = Uracil
tcggtaagttctg

SEQ ID NO: 5099 - DNA, 12 bp, synthetic construct
  misc_feature 1..12: note = Description of Artificial Sequence: Synthetic Antisense oligonucleotide
  misc_feature 1..12: note = Original Sequence: tcgguaaguucu
  modified_base 1..2: mod_base = OTHER; note = bicyclic nucleic acid (BNA)
  modified_base 2: mod_base = OTHER; note = 5-methyl
  modified_base 11: mod_base = OTHER; note = 5-methyl
  source 1..12: mol_type = other DNA
  modified_base 5: mod_base = OTHER; note = Uracil
  modified_base 9: mod_base = OTHER; note = Uracil
  modified_base 10: mod_base = OTHER; note = Uracil
  modified_base 12: mod_base = OTHER; note = Uracil
tcggtaagttct

SEQ ID NO: 5100 - DNA, 11 bp, synthetic construct
  misc_feature 1..11: note = Description of Artificial Sequence: Synthetic Antisense oligonucleotide
  misc_feature 1..11: note = Original Sequence: tcgguaaguuc
  modified_base 1..2: mod_base = OTHER; note = bicyclic nucleic acid (BNA)
  modified_base 2: mod_base = OTHER; note = 5-methyl
  modified_base 11: mod_base = OTHER; note = 5-methyl
  source 1..11: mol_type = other DNA
  modified_base 5: mod_base = OTHER; note = Uracil
  modified_base 9: mod_base = OTHER; note = Uracil
  modified_base 10: mod_base = OTHER; note = Uracil
tcggtaagttc

SEQ ID NO: 5101 - DNA, 10 bp, synthetic construct
  misc_feature 1..10: note = Description of Artificial Sequence: Synthetic Antisense oligonucleotide
  misc_feature 1..10: note = Original Sequence: tcgguaaguu
  modified_base 1..2: mod_base = OTHER; note = bicyclic nucleic acid (BNA)
  modified_base 2: mod_base = OTHER; note = 5-methyl
  source 1..10: mol_type = other DNA
  modified_base 5: mod_base = OTHER; note = Uracil
  modified_base 9: mod_base = OTHER; note = Uracil
  modified_base 10: mod_base = OTHER; note = Uracil
tcggtaagtt

SEQ ID NO: 5102 - skipped

SEQ ID NO: 5103 - DNA, 20 bp, synthetic construct
  misc_feature 1..20: note = Description of Artificial Sequence: Synthetic Antisense oligonucleotide
  misc_feature 1..20: note = Original Sequence: gtcgguaaguucuguccaag
  modified_base 1..2: mod_base = OTHER; note = bicyclic nucleic acid (BNA)
  modified_base 3: mod_base = OTHER; note = 5-methyl
  modified_base 12: mod_base = OTHER; note = 5-methyl
  modified_base 16..17: mod_base = OTHER; note = 5-methyl
  source 1..20: mol_type = other DNA
  modified_base 6: mod_base = OTHER; note = Uracil
  modified_base 10: mod_base = OTHER; note = Uracil
  modified_base 11: mod_base = OTHER; note = Uracil
  modified_base 13: mod_base = OTHER; note = Uracil
  modified_base 15: mod_base = OTHER; note = Uracil
gtcggtaagttctgtccaag

SEQ ID NO: 5104 - DNA, 19 bp, synthetic construct
  misc_feature 1..19: note = Description of Artificial Sequence: Synthetic Antisense oligonucleotide
  misc_feature 1..19: note = Original Sequence: gtcgguaaguucuguccaa
  modified_base 1..2: mod_base = OTHER; note = bicyclic nucleic acid (BNA)
  modified_base 3: mod_base = OTHER; note = 5-methyl
  modified_base 12: mod_base = OTHER; note = 5-methyl
  modified_base 16..17: mod_base = OTHER; note = 5-methyl
  source 1..19: mol_type = other DNA
  modified_base 6: mod_base = OTHER; note = Uracil
  modified_base 10: mod_base = OTHER; note = Uracil
  modified_base 11: mod_base = OTHER; note = Uracil
  modified_base 13: mod_base = OTHER; note = Uracil
  modified_base 15: mod_base = OTHER; note = Uracil
gtcggtaagttctgtccaa

SEQ ID NO: 5105 - DNA, 18 bp, synthetic construct
  misc_feature 1..18: note = Description of Artificial Sequence: Synthetic Antisense oligonucleotide
  misc_feature 1..18: note = Original Sequence: gtcgguaaguucugucca
  modified_base 1..2: mod_base = OTHER; note = bicyclic nucleic acid (BNA)
  modified_base 3: mod_base = OTHER; note = 5-methyl
  modified_base 12: mod_base = OTHER; note = 5-methyl
  modified_base 16..17: mod_base = OTHER; note = 5-methyl
  source 1..18: mol_type = other DNA
  modified_base 6: mod_base = OTHER; note = Uracil
  modified_base 10: mod_base = OTHER; note = Uracil
  modified_base 11: mod_base = OTHER; note = Uracil
  modified_base 13: mod_base = OTHER; note = Uracil
  modified_base 15: mod_base = OTHER; note = Uracil
gtcggtaagttctgtcca

SEQ ID NO: 5106 - DNA, 17 bp, synthetic construct
  misc_feature 1..17: note = Description of Artificial Sequence: Synthetic Antisense oligonucleotide
  misc_feature 1..17: note = Original Sequence: gtcgguaaguucugucc
  modified_base 1..2: mod_base = OTHER; note = bicyclic nucleic acid (BNA)
  modified_base 3: mod_base = OTHER; note = 5-methyl
  modified_base 12: mod_base = OTHER; note = 5-methyl
  modified_base 16..17: mod_base = OTHER; note = 5-methyl
  source 1..17: mol_type = other DNA
  modified_base 6: mod_base = OTHER; note = Uracil
  modified_base 10: mod_base = OTHER; note = Uracil
  modified_base 11: mod_base = OTHER; note = Uracil
  modified_base 13: mod_base = OTHER; note = Uracil
  modified_base 15: mod_base = OTHER; note = Uracil
gtcggtaagttctgtcc

SEQ ID NO: 5107 - DNA, 16 bp, synthetic construct
  misc_feature 1..16: note = Description of Artificial Sequence: Synthetic Antisense oligonucleotide
  misc_feature 1..16: note = Original Sequence: gtcgguaaguucuguc
  modified_base 1..2: mod_base = OTHER; note = bicyclic nucleic acid (BNA)
  modified_base 3: mod_base = OTHER; note = 5-methyl
  modified_base 12: mod_base = OTHER; note = 5-methyl
  modified_base 16: mod_base = OTHER; note = 5-methyl
  source 1..16: mol_type = other DNA
  modified_base 6: mod_base = OTHER; note = Uracil
  modified_base 10: mod_base = OTHER; note = Uracil
  modified_base 11: mod_base = OTHER; note = Uracil
  modified_base 13: mod_base = OTHER; note = Uracil
  modified_base 15: mod_base = OTHER; note = Uracil
gtcggtaagttctgtc

SEQ ID NO: 5108 - DNA, 15 bp, synthetic construct
  misc_feature 1..15: note = Description of Artificial Sequence: Synthetic Antisense oligonucleotide
  misc_feature 1..15: note = Original Sequence: gtcgguaaguucugu
  modified_base 1..2: mod_base = OTHER; note = bicyclic nucleic acid (BNA)
  modified_base 3: mod_base = OTHER; note = 5-methyl
  modified_base 12: mod_base = OTHER; note = 5-methyl
  source 1..15: mol_type = other DNA
  modified_base 6: mod_base = OTHER; note = Uracil
  modified_base 10: mod_base = OTHER; note = Uracil
  modified_base 11: mod_base = OTHER; note = Uracil
  modified_base 13: mod_base = OTHER; note = Uracil
  modified_base 15: mod_base = OTHER; note = Uracil
gtcggtaagttctgt

SEQ ID NO: 5109 - DNA, 14 bp, synthetic construct
  misc_feature 1..14: note = Description of Artificial Sequence: Synthetic Antisense oligonucleotide
  misc_feature 1..14: note = Original Sequence: gtcgguaaguucug
  modified_base 1..2: mod_base = OTHER; note = bicyclic nucleic acid (BNA)
  modified_base 3: mod_base = OTHER; note = 5-methyl
  modified_base 12: mod_base = OTHER; note = 5-methyl
  source 1..14: mol_type = other DNA
  modified_base 6: mod_base = OTHER; note = Uracil
  modified_base 10: mod_base = OTHER; note = Uracil
  modified_base 11: mod_base = OTHER; note = Uracil
  modified_base 13: mod_base = OTHER; note = Uracil
gtcggtaagttctg

SEQ ID NO: 5110 - DNA, 13 bp, synthetic construct
  misc_feature 1..13: note = Description of Artificial Sequence: Synthetic Antisense oligonucleotide
  misc_feature 1..13: note = Original Sequence: gtcgguaaguucu
  modified_base 1..2: mod_base = OTHER; note = bicyclic nucleic acid (BNA)
  modified_base 3: mod_base = OTHER; note = 5-methyl
  modified_base 12: mod_base = OTHER; note = 5-methyl
  source 1..13: mol_type = other DNA
  modified_base 6: mod_base = OTHER; note = Uracil
  modified_base 10: mod_base = OTHER; note = Uracil
  modified_base 11: mod_base = OTHER; note = Uracil
  modified_base 13: mod_base = OTHER; note = Uracil
gtcggtaagttct

SEQ ID NO: 5111 - DNA, 12 bp, synthetic construct
  misc_feature 1..12: note = Description of Artificial Sequence: Synthetic Antisense oligonucleotide
  misc_feature 1..12: note = Original Sequence: gtcgguaaguuc
  modified_base 1..2: mod_base = OTHER; note = bicyclic nucleic acid (BNA)
  modified_base 3: mod_base = OTHER; note = 5-methyl
  modified_base 12: mod_base = OTHER; note = 5-methyl
  source 1..12: mol_type = other DNA
  modified_base 6: mod_base = OTHER; note = Uracil
  modified_base 10: mod_base = OTHER; note = Uracil
  modified_base 11: mod_base = OTHER; note = Uracil
gtcggtaagttc

SEQ ID NO: 5112 - DNA, 11 bp, synthetic construct
  misc_feature 1..11: note = Description of Artificial Sequence: Synthetic Antisense oligonucleotide
  misc_feature 1..11: note = Original Sequence: gtcgguaaguu
  modified_base 1..2: mod_base = OTHER; note = bicyclic nucleic acid (BNA)
  modified_base 3: mod_base = OTHER; note = 5-methyl
  source 1..11: mol_type = other DNA
  modified_base 6: mod_base = OTHER; note = Uracil
  modified_base 10: mod_base = OTHER; note = Uracil
  modified_base 11: mod_base = OTHER; note = Uracil
gtcggtaagtt

SEQ ID NO: 5113 - DNA, 10 bp, synthetic construct
  misc_feature 1..10: note = Description of Artificial Sequence: Synthetic Antisense oligonucleotide
  misc_feature 1..10: note = Original Sequence: gtcgguaagu
  modified_base 1..2: mod_base = OTHER; note = bicyclic nucleic acid (BNA)
  modified_base 3: mod_base = OTHER; note = 5-methyl
  source 1..10: mol_type = other DNA
  modified_base 6: mod_base = OTHER; note = Uracil
  modified_base 10: mod_base = OTHER; note = Uracil
gtcggtaagt

SEQ ID NO: 5114 - RNA, 20 nt, synthetic construct
  misc_feature 1..20: note = Description of Artificial Sequence: Synthetic Antisense oligonucleotide
  modified_base 1..2: mod_base = OTHER; note = bicyclic nucleic acid (BNA)
  modified_base 4: mod_base = OTHER; note = 5-methyl
  modified_base 13: mod_base = OTHER; note = 5-methyl
  modified_base 17..18: mod_base = OTHER; note = 5-methyl
  source 1..20: mol_type = other RNA
agtcggtaagttctgtccaa

SEQ ID NO: 5115 - RNA, 19 nt, synthetic construct
  misc_feature 1..19: note = Description of Artificial Sequence: Synthetic Antisense oligonucleotide
  modified_base 1..2: mod_base = OTHER; note = bicyclic nucleic acid (BNA)
  modified_base 4: mod_base = OTHER; note = 5-methyl
  modified_base 13: mod_base = OTHER; note = 5-methyl
  modified_base 17..18: mod_base = OTHER; note = 5-methyl
  source 1..19: mol_type = other RNA
agtcggtaagttctgtcca

SEQ ID NO: 5116 - RNA, 17 nt, synthetic construct
  misc_feature 1..17: note = Description of Artificial Sequence: Synthetic Antisense oligonucleotide
  modified_base 1..2: mod_base = OTHER; note = bicyclic nucleic acid (BNA)
  modified_base 4: mod_base = OTHER; note = 5-methyl
  modified_base 13: mod_base = OTHER; note = 5-methyl
  modified_base 17: mod_base = OTHER; note = 5-methyl
  source 1..17: mol_type = other RNA
agtcggtaagttctgtc

SEQ ID NO: 5117 - RNA, 16 nt, synthetic construct
  misc_feature 1..16: note = Description of Artificial Sequence: Synthetic Antisense oligonucleotide
  modified_base 1..2: mod_base = OTHER; note = bicyclic nucleic acid (BNA)
  modified_base 4: mod_base = OTHER; note = 5-methyl
  modified_base 13: mod_base = OTHER; note = 5-methyl
  source 1..16: mol_type = other RNA
agtcggtaagttctgt

SEQ ID NO: 5118 - RNA, 15 nt, synthetic construct
  misc_feature 1..15: note = Description of Artificial Sequence: Synthetic Antisense oligonucleotide
  modified_base 1..2: mod_base = OTHER; note = bicyclic nucleic acid (BNA)
  modified_base 4: mod_base = OTHER; note = 5-methyl
  modified_base 13: mod_base = OTHER; note = 5-methyl
  source 1..15: mol_type = other RNA
agtcggtaagttctg

SEQ ID NO: 5119 - RNA, 14 nt, synthetic construct
  misc_feature 1..14: note = Description of Artificial Sequence: Synthetic Antisense oligonucleotide
  modified_base 1..2: mod_base = OTHER; note = bicyclic nucleic acid (BNA)
  modified_base 4: mod_base = OTHER; note = 5-methyl
  modified_base 13: mod_base = OTHER; note = 5-methyl
  source 1..14: mol_type = other RNA
agtcggtaagttct

SEQ ID NO: 5120 - RNA, 13 nt, synthetic construct
  misc_feature 1..13: note = Description of Artificial Sequence: Synthetic Antisense oligonucleotide
  modified_base 1..2: mod_base = OTHER; note = bicyclic nucleic acid (BNA)
  modified_base 4: mod_base = OTHER; note = 5-methyl
  modified_base 13: mod_base = OTHER; note = 5-methyl
  source 1..13: mol_type = other RNA
agtcggtaagttc

SEQ ID NO: 5121 - RNA, 12 nt, synthetic construct
  misc_feature 1..12: note = Description of Artificial Sequence: Synthetic Antisense oligonucleotide
  modified_base 1..2: mod_base = OTHER; note = bicyclic nucleic acid (BNA)
  modified_base 4: mod_base = OTHER; note = 5-methyl
  source 1..12: mol_type = other RNA
agtcggtaagtt

SEQ ID NO: 5122 - RNA, 11 nt, synthetic construct
  misc_feature 1..11: note = Description of Artificial Sequence: Synthetic Antisense oligonucleotide
  modified_base 1..2: mod_base = OTHER; note = bicyclic nucleic acid (BNA)
  modified_base 4: mod_base = OTHER; note = 5-methyl
  source 1..11: mol_type = other RNA
agtcggtaagt

SEQ ID NO: 5123 - RNA, 20 nt, synthetic construct
  misc_feature 1..20: note = Description of Artificial Sequence: Synthetic Antisense oligonucleotide
  modified_base 1: mod_base = OTHER; note = 5-methyl
  modified_base 5: mod_base = OTHER; note = 5-methyl
  modified_base 14: mod_base = OTHER; note = 5-methyl
  modified_base 18..19: mod_base = OTHER; note = 5-methyl
  modified_base 1..2: mod_base = OTHER; note = bicyclic nucleic acid (BNA)
  source 1..20: mol_type = other RNA
cagtcggtaagttctgtcca

SEQ ID NO: 5124 - RNA, 19 nt, synthetic construct
  misc_feature 1..19: note = Description of Artificial Sequence: Synthetic Antisense oligonucleotide
  modified_base 1: mod_base = OTHER; note = 5-methyl
  modified_base 5: mod_base = OTHER; note = 5-methyl
  modified_base 14: mod_base = OTHER; note = 5-methyl
  modified_base 18..19: mod_base = OTHER; note = 5-methyl
  modified_base 1..2: mod_base = OTHER; note = bicyclic nucleic acid (BNA)
  source 1..19: mol_type = other RNA
cagtcggtaagttctgtcc

SEQ ID NO: 5125 - RNA, 18 nt, synthetic construct
  misc_feature 1..18: note = Description of Artificial Sequence: Synthetic Antisense oligonucleotide
  modified_base 1: mod_base = OTHER; note = 5-methyl
  modified_base 5: mod_base = OTHER; note = 5-methyl
  modified_base 14: mod_base = OTHER; note = 5-methyl
  modified_base 18: mod_base = OTHER; note = 5-methyl
  modified_base 1..2: mod_base = OTHER; note = bicyclic nucleic acid (BNA)
  source 1..18: mol_type = other RNA
cagtcggtaagttctgtc

SEQ ID NO: 5126 - RNA, 17 nt, synthetic construct
  misc_feature 1..17: note = Description of Artificial Sequence: Synthetic Antisense oligonucleotide
  modified_base 1: mod_base = OTHER; note = 5-methyl
  modified_base 5: mod_base = OTHER; note = 5-methyl
  modified_base 14: mod_base = OTHER; note = 5-methyl
  modified_base 1..2: mod_base = OTHER; note = bicyclic nucleic acid (BNA)
  source 1..17: mol_type = other RNA
cagtcggtaagttctgt

SEQ ID NO: 5127 - RNA, 16 nt, synthetic construct
  misc_feature 1..16: note = Description of Artificial Sequence: Synthetic Antisense oligonucleotide
  modified_base 1: mod_base = OTHER; note = 5-methyl
  modified_base 5: mod_base = OTHER; note = 5-methyl
  modified_base 14: mod_base = OTHER; note = 5-methyl
  modified_base 1..2: mod_base = OTHER; note = bicyclic nucleic acid (BNA)
  source 1..16: mol_type = other RNA
cagtcggtaagttctg

SEQ ID NO: 5128 - RNA, 15 nt, synthetic construct
  misc_feature 1..15: note = Description of Artificial Sequence: Synthetic Antisense oligonucleotide
  modified_base 1: mod_base = OTHER; note = 5-methyl
  modified_base 5: mod_base = OTHER; note = 5-methyl
  modified_base 14: mod_base = OTHER; note = 5-methyl
  modified_base 1..2: mod_base = OTHER; note = bicyclic nucleic acid (BNA)
  source 1..15: mol_type = other RNA
cagtcggtaagttct

SEQ ID NO: 5129 - RNA, 14 nt, synthetic construct
  misc_feature 1..14: note = Description of Artificial Sequence: Synthetic Antisense oligonucleotide
  modified_base 1: mod_base = OTHER; note = 5-methyl
  modified_base 5: mod_base = OTHER; note = 5-methyl
  modified_base 14: mod_base = OTHER; note = 5-methyl
  modified_base 1..2: mod_base = OTHER; note = bicyclic nucleic acid (BNA)
  source 1..14: mol_type = other RNA
cagtcggtaagttc

SEQ ID NO: 5130 - RNA, 13 nt, synthetic construct
  misc_feature 1..13: note = Description of Artificial Sequence: Synthetic Antisense oligonucleotide
  modified_base 1: mod_base = OTHER; note = 5-methyl
  modified_base 5: mod_base = OTHER; note = 5-methyl
  modified_base 1..2: mod_base = OTHER; note = bicyclic nucleic acid (BNA)
  source 1..13: mol_type = other RNA
cagtcggtaagtt

SEQ ID NO: 5131 - RNA, 12 nt, synthetic construct
  misc_feature 1..12: note = Description of Artificial Sequence: Synthetic Antisense oligonucleotide
  modified_base 1: mod_base = OTHER; note = 5-methyl
  modified_base 5: mod_base = OTHER; note = 5-methyl
  modified_base 1..2: mod_base = OTHER; note = bicyclic nucleic acid (BNA)
  source 1..12: mol_type = other RNA
cagtcggtaagt

SEQ ID NO: 5132 - RNA, 20 nt, synthetic construct
  misc_feature 1..20: note = Description of Artificial Sequence: Synthetic Antisense oligonucleotide
  modified_base 1..2: mod_base = OTHER; note = 5-methyl
  modified_base 6: mod_base = OTHER; note = 5-methyl
  modified_base 15: mod_base = OTHER; note = 5-methyl
  modified_base 19..20: mod_base = OTHER; note = 5-methyl
  modified_base 1..2: mod_base = OTHER; note = bicyclic nucleic acid (BNA)
  source 1..20: mol_type = other RNA
ccagtcggtaagttctgtcc

SEQ ID NO: 5133 - RNA, 19 nt, synthetic construct
  misc_feature 1..19: note = Description of Artificial Sequence: Synthetic Antisense oligonucleotide
  modified_base 1..2: mod_base = OTHER; note = 5-methyl
  modified_base 6: mod_base = OTHER; note = 5-methyl
  modified_base 15: mod_base = OTHER; note = 5-methyl
  modified_base 19: mod_base = OTHER; note = 5-methyl
  modified_base 1..2: mod_base = OTHER; note = bicyclic nucleic acid (BNA)
  source 1..19: mol_type = other RNA
ccagtcggtaagttctgtc

SEQ ID NO: 5134 - RNA, 18 nt, synthetic construct
  misc_feature 1..18: note = Description of Artificial Sequence: Synthetic Antisense oligonucleotide
  modified_base 1..2: mod_base = OTHER; note = 5-methyl
  modified_base 6: mod_base = OTHER; note = 5-methyl
  modified_base 15: mod_base = OTHER; note = 5-methyl
  modified_base 1..2: mod_base = OTHER; note = bicyclic nucleic acid (BNA)
  source 1..18: mol_type = other RNA
ccagtcggtaagttctgt

SEQ ID NO: 5135 - RNA, 17 nt, synthetic construct
  misc_feature 1..17: note = Description of Artificial Sequence: Synthetic Antisense oligonucleotide
  modified_base 1..2: mod_base = OTHER; note = 5-methyl
  modified_base 6: mod_base = OTHER; note = 5-methyl
  modified_base 15: mod_base = OTHER; note = 5-methyl
  modified_base 1..2: mod_base = OTHER; note = bicyclic nucleic acid (BNA)
  source 1..17: mol_type = other RNA
ccagtcggtaagttctg

SEQ ID NO: 5136 - RNA, 16 nt, synthetic construct
  misc_feature 1..16: note = Description of Artificial Sequence: Synthetic Antisense oligonucleotide
  modified_base 1..2: mod_base = OTHER; note = 5-methyl
  modified_base 6: mod_base = OTHER; note = 5-methyl
  modified_base 15: mod_base = OTHER; note = 5-methyl
  modified_base 1..2: mod_base = OTHER; note = bicyclic nucleic acid (BNA)
  source 1..16: mol_type = other RNA
ccagtcggtaagttct

SEQ ID NO: 5137 - RNA, 15 nt, synthetic construct
  misc_feature 1..15: note = Description of Artificial Sequence: Synthetic Antisense oligonucleotide
  modified_base 1..2: mod_base = OTHER; note = 5-methyl
  modified_base 6: mod_base = OTHER; note = 5-methyl
  modified_base 15: mod_base = OTHER; note = 5-methyl
  modified_base 1..2: mod_base = OTHER; note = bicyclic nucleic acid (BNA)
  source 1..15: mol_type = other RNA
ccagtcggtaagttc

SEQ ID NO: 5138 - RNA, 14 nt, synthetic construct
  misc_feature 1..14: note = Description of Artificial Sequence: Synthetic Antisense oligonucleotide
  modified_base 1..2: mod_base = OTHER; note = 5-methyl
  modified_base 6: mod_base = OTHER; note = 5-methyl
  modified_base 1..2: mod_base = OTHER; note = bicyclic nucleic acid (BNA)
  source 1..14: mol_type = other RNA
ccagtcggtaagtt

SEQ ID NO: 5139 - RNA, 13 nt, synthetic construct
  misc_feature 1..13: note = Description of Artificial Sequence: Synthetic Antisense oligonucleotide
  modified_base 1..2: mod_base = OTHER; note = 5-methyl
  modified_base 6: mod_base = OTHER; note = 5-methyl
  modified_base 1..2: mod_base = OTHER; note = bicyclic nucleic acid (BNA)
  source 1..13: mol_type = other RNA
ccagtcggtaagt

SEQ ID NO: 5140 - RNA, 20 nt, synthetic construct
  misc_feature 1..20: note = Description of Artificial Sequence: Synthetic Antisense oligonucleotide
  modified_base 1..2: mod_base = OTHER; note = bicyclic nucleic acid (BNA)
  modified_base 2..3: mod_base = OTHER; note = 5-methyl
  modified_base 7: mod_base = OTHER; note = 5-methyl
  modified_base 16: mod_base = OTHER; note = 5-methyl
  modified_base 20: mod_base = OTHER; note = 5-methyl
  source 1..20: mol_type = other RNA
gccagtcggtaagttctgtc

SEQ ID NO: 5141 - RNA, 19 nt, synthetic construct
  misc_feature 1..19: note = Description of Artificial Sequence: Synthetic Antisense oligonucleotide
  modified_base 1..2: mod_base = OTHER; note = bicyclic nucleic acid (BNA)
  modified_base 2..3: mod_base = OTHER; note = 5-methyl
  modified_base 7: mod_base = OTHER; note = 5-methyl
  modified_base 16: mod_base = OTHER; note = 5-methyl
  source 1..19: mol_type = other RNA
gccagtcggtaagttctgt

SEQ ID NO: 5142 - RNA, 18 nt, synthetic construct
  misc_feature 1..18: note = Description of Artificial Sequence: Synthetic Antisense oligonucleotide
  modified_base 1..2: mod_base = OTHER; note = bicyclic nucleic acid (BNA)
  modified_base 2..3: mod_base = OTHER; note = 5-methyl
  modified_base 7: mod_base = OTHER; note = 5-methyl
  modified_base 16: mod_base = OTHER; note = 5-methyl
  source 1..18: mol_type = other RNA
gccagtcggtaagttctg

SEQ ID NO: 5143 - RNA, 17 nt, synthetic construct
  misc_feature 1..17: note = Description of Artificial Sequence: Synthetic Antisense oligonucleotide
  modified_base 1..2: mod_base = OTHER; note = bicyclic nucleic acid (BNA)
  modified_base 2..3: mod_base = OTHER; note = 5-methyl
  modified_base 7: mod_base = OTHER; note = 5-methyl
  modified_base 16: mod_base = OTHER; note = 5-methyl
  source 1..17: mol_type = other RNA
gccagtcggtaagttct

SEQ ID NO: 5144 - RNA, 16 nt, synthetic construct
  misc_feature 1..16: note = Description of Artificial Sequence: Synthetic Antisense oligonucleotide
  modified_base 1..2: mod_base = OTHER; note = bicyclic nucleic acid (BNA)
  modified_base 2..3: mod_base = OTHER; note = 5-methyl
  modified_base 7: mod_base = OTHER; note = 5-methyl
  modified_base 16: mod_base = OTHER; note = 5-methyl
  source 1..16: mol_type = other RNA
gccagtcggtaagttc

SEQ ID NO: 5145 - RNA, 15 nt, synthetic construct
  misc_feature 1..15: note = Description of Artificial Sequence: Synthetic Antisense oligonucleotide
  modified_base 1..2: mod_base = OTHER; note = bicyclic nucleic acid (BNA)
  modified_base 2..3: mod_base = OTHER; note = 5-methyl
  modified_base 7: mod_base = OTHER; note = 5-methyl
  source 1..15: mol_type = other RNA
gccagtcggtaagtt

SEQ ID NO: 5146 - RNA, 14 nt, synthetic construct
  misc_feature 1..14: note = Description of Artificial Sequence: Synthetic Antisense oligonucleotide
  modified_base 1..2: mod_base = OTHER; note = bicyclic nucleic acid (BNA)
  modified_base 2..3: mod_base = OTHER; note = 5-methyl
  modified_base 7: mod_base = OTHER; note = 5-methyl
  source 1..14: mol_type = other RNA
gccagtcggtaagt

SEQ ID NO: 5147 - DNA, 20 bp, synthetic construct
  misc_feature 1..20: note = Description of Artificial Sequence: Synthetic Antisense oligonucleotide
  misc_feature 1..20: note = Original Sequence: tcaaggaagauggcauuucu
  modified_base 1..2: mod_base = OTHER; note = bicyclic nucleic acid (BNA)
  modified_base 2: mod_base = OTHER; note = 5-methyl
  modified_base 14: mod_base = OTHER; note = 5-methyl
  modified_base 19: mod_base = OTHER; note = 5-methyl
  source 1..20: mol_type = other DNA
  modified_base 11: mod_base = OTHER; note = Uracil
  modified_base 16: mod_base = OTHER; note = Uracil
  modified_base 17: mod_base = OTHER; note = Uracil
  modified_base 18: mod_base = OTHER; note = Uracil
  modified_base 20: mod_base = OTHER; note = Uracil
tcaaggaagatggcatttct

SEQ ID NO: 5148 - DNA, 22 bp, synthetic construct
  misc_feature 1..22: note = Description of Artificial Sequence: Synthetic Antisense oligonucleotide
  misc_feature 1..22: note = Original Sequence: tcaaggaagauggcauuucuag
  modified_base 1..2: mod_base = OTHER; note = bicyclic nucleic acid (BNA)
  modified_base 2: mod_base = OTHER; note = 5-methyl
  modified_base 14: mod_base = OTHER; note = 5-methyl
  modified_base 19: mod_base = OTHER; note = 5-methyl
  source 1..22: mol_type = other DNA
  modified_base 11: mod_base = OTHER; note = Uracil
  modified_base 16: mod_base = OTHER; note = Uracil
  modified_base 17: mod_base = OTHER; note = Uracil
  modified_base 18: mod_base = OTHER; note = Uracil
  modified_base 20: mod_base = OTHER; note = Uracil
tcaaggaagatggcatttctag

SEQ ID NO: 5149 - DNA, 16 bp, synthetic construct
  misc_feature 1..16: note = Description of Artificial Sequence: Synthetic Antisense oligonucleotide
  misc_feature 1..16: note = Original Sequence: tcaaggaagauggcau
  modified_base 1..2: mod_base = OTHER; note = bicyclic nucleic acid (BNA)
  modified_base 2: mod_base = OTHER; note = 5-methyl
  modified_base 14: mod_base = OTHER; note = 5-methyl
  source 1..16: mol_type = other DNA
  modified_base 11: mod_base = OTHER; note = Uracil
  modified_base 16: mod_base = OTHER; note = Uracil
tcaaggaagatggcat

SEQ ID NO: 5150 - RNA, 15 nt, synthetic construct
  misc_feature 1..15: note = Description of Artificial Sequence: Synthetic Antisense oligonucleotide
  modified_base 1..2: mod_base = OTHER; note = bicyclic nucleic acid (BNA)
  modified_base 9: mod_base = OTHER; note = 5-methyl
  modified_base 14: mod_base = OTHER; note = 5-methyl
  source 1..15: mol_type = other RNA
gaagatggcatttct

SEQ ID NO: 5151 - DNA, 21 bp, synthetic construct
  misc_feature 1..21: note = Description of Artificial Sequence: Synthetic Antisense oligonucleotide
  misc_feature 1..21: note = Original Sequence: tcaaggaagauggcauuucua
  modified_base 1..2: mod_base = OTHER; note = bicyclic nucleic acid (BNA)
  modified_base 2: mod_base = OTHER; note = 5-methyl
  modified_base 14: mod_base = OTHER; note = 5-methyl
  modified_base 19: mod_base = OTHER; note = 5-methyl
  source 1..21: mol_type = other DNA
  modified_base 11: mod_base = OTHER; note = Uracil
  modified_base 16: mod_base = OTHER; note = Uracil
  modified_base 17: mod_base = OTHER; note = Uracil
  modified_base 18: mod_base = OTHER; note = Uracil
  modified_base 20: mod_base = OTHER; note = Uracil
tcaaggaagatggcatttcta

SEQ ID NO: 5152 - DNA, 19 bp, synthetic construct
  misc_feature 1..19: note = Description of Artificial Sequence: Synthetic Antisense oligonucleotide
  misc_feature 1..19: note = Original Sequence: tcaaggaagauggcauuuc
  modified_base 1..2: mod_base = OTHER; note = bicyclic nucleic acid (BNA)
  modified_base 2: mod_base = OTHER; note = 5-methyl
  modified_base 14: mod_base = OTHER; note = 5-methyl
  modified_base 19: mod_base = OTHER; note = 5-methyl
  source 1..19: mol_type = other DNA
  modified_base 11: mod_base = OTHER; note = Uracil
  modified_base 16: mod_base = OTHER; note = Uracil
  modified_base 17: mod_base = OTHER; note = Uracil
  modified_base 18: mod_base = OTHER; note = Uracil
tcaaggaagatggcatttc

SEQ ID NO: 5153 - DNA, 18 bp, synthetic construct
  misc_feature 1..18: note = Description of Artificial Sequence: Synthetic Antisense oligonucleotide
  misc_feature 1..18: note = Original Sequence: tcaaggaagauggcauuu
  modified_base 1..2: mod_base = OTHER; note = bicyclic nucleic acid (BNA)
  modified_base 2: mod_base = OTHER; note = 5-methyl
  modified_base 14: mod_base = OTHER; note = 5-methyl
  source 1..18: mol_type = other DNA
  modified_base 11: mod_base = OTHER; note = Uracil
  modified_base 16: mod_base = OTHER; note = Uracil
  modified_base 17: mod_base = OTHER; note = Uracil
  modified_base 18: mod_base = OTHER; note = Uracil
tcaaggaagatggcattt

SEQ ID NO: 5154 - DNA, 17 bp, synthetic construct
  misc_feature 1..17: note = Description of Artificial Sequence: Synthetic Antisense oligonucleotide
  misc_feature 1..17: note = Original Sequence: tcaaggaagauggcauu
  modified_base 1..2: mod_base = OTHER; note = bicyclic nucleic acid (BNA)
  modified_base 2: mod_base = OTHER; note = 5-methyl
  modified_base 14: mod_base = OTHER; note = 5-methyl
  source 1..17: mol_type = other DNA
  modified_base 11: mod_base = OTHER; note = Uracil
  modified_base 16: mod_base = OTHER; note = Uracil
  modified_base 17: mod_base = OTHER; note = Uracil
tcaaggaagatggcatt

SEQ ID NO: 5155 - DNA, 15 bp, synthetic construct
  misc_feature 1..15: note = Description of Artificial Sequence: Synthetic Antisense oligonucleotide
  misc_feature 1..15: note = Original Sequence: tcaaggaagauggca
  modified_base 1..2: mod_base = OTHER; note = bicyclic nucleic acid (BNA)
  modified_base 2: mod_base = OTHER; note = 5-methyl
  modified_base 14: mod_base = OTHER; note = 5-methyl
  source 1..15: mol_type = other DNA
  modified_base 11: mod_base = OTHER; note = Uracil
tcaaggaagatggca

SEQ ID NO: 5156 - DNA, 14 bp, synthetic construct
  misc_feature 1..14: note = Description of Artificial Sequence: Synthetic Antisense oligonucleotide
  misc_feature 1..14: note = Original Sequence: tcaaggaagauggc
  modified_base 1..2: mod_base = OTHER; note = bicyclic nucleic acid (BNA)
  modified_base 2: mod_base = OTHER; note = 5-methyl
  modified_base 14: mod_base = OTHER; note = 5-methyl
  source 1..14: mol_type = other DNA
  modified_base 11: mod_base = OTHER; note = Uracil
tcaaggaagatggc

SEQ ID NO: 5157 - DNA, 13 bp, synthetic construct
  misc_feature 1..13: note = Description of Artificial Sequence: Synthetic Antisense oligonucleotide
  misc_feature 1..13: note = Original Sequence: tcaaggaagaugg
  modified_base 1..2: mod_base = OTHER; note = bicyclic nucleic acid (BNA)
  modified_base 2: mod_base = OTHER; note = 5-methyl
  source 1..13: mol_type = other DNA
  modified_base 11: mod_base = OTHER; note = Uracil
tcaaggaagatgg

SEQ ID NO: 5158 - DNA, 12 bp, synthetic construct
  misc_feature 1..12: note = Description of Artificial Sequence: Synthetic Antisense oligonucleotide
  misc_feature 1..12: note = Original Sequence: tcaaggaagaug
  modified_base 1..2: mod_base = OTHER; note = bicyclic nucleic acid (BNA)
  modified_base 2: mod_base = OTHER; note = 5-methyl
  source 1..12: mol_type = other DNA
  modified_base 11: mod_base = OTHER; note = Uracil
tcaaggaagatg

SEQ ID NO: 5159 - DNA, 11 bp, synthetic construct
  misc_feature 1..11: note = Description of Artificial Sequence: Synthetic Antisense oligonucleotide
  misc_feature 1..11: note = Original Sequence: tcaaggaagau
  modified_base 1..2: mod_base = OTHER; note = bicyclic nucleic acid (BNA)
  modified_base 2: mod_base = OTHER; note = 5-methyl
  source 1..11: mol_type = other DNA
  modified_base 11: mod_base = OTHER; note = Uracil
tcaaggaagat

SEQ ID NO: 5160 - DNA, 10 bp, synthetic construct
  misc_feature 1..10: note = Description of Artificial Sequence: Synthetic Antisense oligonucleotide
  modified_base 1..2: mod_base = OTHER; note = bicyclic nucleic acid (BNA)
  modified_base 2: mod_base = OTHER; note = 5-methyl
  source 1..10: mol_type = other DNA
tcaaggaaga

SEQ ID NO: 5161 - skipped

SEQ ID NO: 5162 - RNA, 21 nt, synthetic construct
  misc_feature 1..21: note = Description of Artificial Sequence: Synthetic Antisense oligonucleotide
  modified_base 1: mod_base = OTHER; note = 5-methyl
  modified_base 13: mod_base = OTHER; note = 5-methyl
  modified_base 18: mod_base = OTHER; note = 5-methyl
  modified_base 1..2: mod_base = OTHER; note = bicyclic nucleic acid (BNA)
  source 1..21: mol_type = other RNA
caaggaagatggcatttctag

SEQ ID NO: 5163 - RNA, 20 nt, synthetic construct
  misc_feature 1..20: note = Description of Artificial Sequence: Synthetic Antisense oligonucleotide
  modified_base 1: mod_base = OTHER; note = 5-methyl
  modified_base 13: mod_base = OTHER; note = 5-methyl
  modified_base 18: mod_base = OTHER; note = 5-methyl
  modified_base 1..2: mod_base = OTHER; note = bicyclic nucleic acid (BNA)
  source 1..20: mol_type = other RNA
caaggaagatggcatttcta

SEQ ID NO: 5164 - RNA, 19 nt, synthetic construct
  misc_feature 1..19: note = Description of Artificial Sequence: Synthetic Antisense oligonucleotide
  modified_base 1: mod_base = OTHER; note = 5-methyl
  modified_base 13: mod_base = OTHER; note = 5-methyl
  modified_base 18: mod_base = OTHER; note = 5-methyl
  modified_base 1..2: mod_base = OTHER; note = bicyclic nucleic acid (BNA)
  source 1..19: mol_type = other RNA
caaggaagatggcatttct

SEQ ID NO: 5165 - RNA, 18 nt, synthetic construct
  misc_feature 1..18: note = Description of Artificial Sequence: Synthetic Antisense oligonucleotide
  modified_base 1: mod_base = OTHER; note = 5-methyl
  modified_base 13: mod_base = OTHER; note = 5-methyl
  modified_base 18: mod_base = OTHER; note = 5-methyl
  modified_base 1..2: mod_base = OTHER; note = bicyclic nucleic acid (BNA)
  source 1..18: mol_type = other RNA
caaggaagatggcatttc

SEQ ID NO: 5166 - RNA, 17 nt, synthetic construct
  misc_feature 1..17: note = Description of Artificial Sequence: Synthetic Antisense oligonucleotide
  modified_base 1: mod_base = OTHER; note = 5-methyl
  modified_base 13: mod_base = OTHER; note = 5-methyl
  modified_base 1..2: mod_base = OTHER; note = bicyclic nucleic acid (BNA)
  source 1..17: mol_type = other RNA
caaggaagatggcattt

SEQ ID NO: 5167 - RNA, 16 nt, synthetic construct
  misc_feature 1..16: note = Description of Artificial Sequence: Synthetic Antisense oligonucleotide
  modified_base 1: mod_base = OTHER; note = 5-methyl
  modified_base 13: mod_base = OTHER; note = 5-methyl
  modified_base 1..2: mod_base = OTHER; note = bicyclic nucleic acid (BNA)
  source 1..16: mol_type = other RNA
caaggaagatggcatt

SEQ ID NO: 5168 - RNA, 15 nt, synthetic construct
  misc_feature 1..15: note = Description of Artificial Sequence: Synthetic Antisense oligonucleotide
  modified_base 1: mod_base = OTHER; note = 5-methyl
  modified_base 13: mod_base = OTHER; note = 5-methyl
  modified_base 1..2: mod_base = OTHER; note = bicyclic nucleic acid (BNA)
  source 1..15: mol_type = other RNA
caaggaagatggcat

SEQ ID NO: 5169 - RNA, 14 nt, synthetic construct
  misc_feature 1..14: note = Description of Artificial Sequence: Synthetic Antisense oligonucleotide
  modified_base 1: mod_base = OTHER; note = 5-methyl
  modified_base 13: mod_base = OTHER; note = 5-methyl
  modified_base 1..2: mod_base = OTHER; note = bicyclic nucleic acid (BNA)
  source 1..14: mol_type = other RNA
caaggaagatggca

SEQ ID NO: 5170 - RNA, 13 nt, synthetic construct
  misc_feature 1..13: note = Description of Artificial Sequence: Synthetic Antisense oligonucleotide
  modified_base 1: mod_base = OTHER; note = 5-methyl
  modified_base 13: mod_base = OTHER; note = 5-methyl
  modified_base 1..2: mod_base = OTHER; note = bicyclic nucleic acid (BNA)
  source 1..13: mol_type = other RNA
caaggaagatggc

SEQ ID NO: 5171 - RNA, 12 nt, synthetic construct
  misc_feature 1..12: note = Description of Artificial Sequence: Synthetic Antisense oligonucleotide
  modified_base 1: mod_base = OTHER; note = 5-methyl
  modified_base 1..2: mod_base = OTHER; note = bicyclic nucleic acid (BNA)
  source 1..12: mol_type = other RNA
caaggaagatgg

SEQ ID NO: 5172 - RNA, 11 nt, synthetic construct
  misc_feature 1..11: note = Description of Artificial Sequence: Synthetic Antisense oligonucleotide
  modified_base 1: mod_base = OTHER; note = 5-methyl
  modified_base 1..2: mod_base = OTHER; note = bicyclic nucleic acid (BNA)
  source 1..11: mol_type = other RNA
caaggaagatg

SEQ ID NO: 5173 - RNA, 10 nt, synthetic construct
  misc_feature 1..10: note = Description of Artificial Sequence: Synthetic Antisense oligonucleotide
  modified_base 1: mod_base = OTHER; note = 5-methyl
  modified_base 1..2: mod_base = OTHER; note = bicyclic nucleic acid (BNA)
  source 1..10: mol_type = other RNA
caaggaagat

SEQ ID NO: 5174-5175 - skipped (2 entries)

SEQ ID NO: 5176 - RNA, 20 nt, synthetic construct
  misc_feature 1..20: note = Description of Artificial Sequence: Synthetic Antisense oligonucleotide
  modified_base 1..2: mod_base = OTHER; note = bicyclic nucleic acid (BNA)
  modified_base 12: mod_base = OTHER; note = 5-methyl
  modified_base 17: mod_base = OTHER; note = 5-methyl
  source 1..20: mol_type = other RNA
aaggaagatggcatttctag

SEQ ID NO: 5177 - RNA, 19 nt, synthetic construct
  misc_feature 1..19: note = Description of Artificial Sequence: Synthetic Antisense oligonucleotide
  modified_base 1..2: mod_base = OTHER; note = bicyclic nucleic acid (BNA)
  modified_base 12: mod_base = OTHER; note = 5-methyl
  modified_base 17: mod_base = OTHER; note = 5-methyl
  source 1..19: mol_type = other RNA
aaggaagatggcatttcta

SEQ ID NO: 5178 - RNA, 18 nt, synthetic construct
  misc_feature 1..18: note = Description of Artificial Sequence: Synthetic Antisense oligonucleotide
  modified_base 1..2: mod_base = OTHER; note = bicyclic nucleic acid (BNA)
  modified_base 12: mod_base = OTHER; note = 5-methyl
  modified_base 17: mod_base = OTHER; note = 5-methyl
  source 1..18: mol_type = other RNA
aaggaagatggcatttct

SEQ ID NO: 5179 - RNA, 17 nt, synthetic construct
  misc_feature 1..17: note = Description of Artificial Sequence: Synthetic Antisense oligonucleotide
  modified_base 1..2: mod_base = OTHER; note = bicyclic nucleic acid (BNA)
  modified_base 12: mod_base = OTHER; note = 5-methyl
  modified_base 17: mod_base = OTHER; note = 5-methyl
  source 1..17: mol_type = other RNA
aaggaagatggcatttc

SEQ ID NO: 5180 - RNA, 16 nt, synthetic construct
  misc_feature 1..16: note = Description of Artificial Sequence: Synthetic Antisense oligonucleotide
  modified_base 1..2: mod_base = OTHER; note = bicyclic nucleic acid (BNA)
  modified_base 12: mod_base = OTHER; note = 5-methyl
  source 1..16: mol_type = other RNA
aaggaagatggcattt

SEQ ID NO: 5181 - RNA, 15 nt, synthetic construct
  misc_feature 1..15: note = Description of Artificial Sequence: Synthetic Antisense oligonucleotide
  modified_base 1..2: mod_base = OTHER; note = bicyclic nucleic acid (BNA)
  modified_base 12: mod_base = OTHER; note = 5-methyl
  source 1..15: mol_type = other RNA
aaggaagatggcatt

SEQ ID NO: 5182 - RNA, 14 nt, synthetic construct
  misc_feature 1..14: note = Description of Artificial Sequence: Synthetic Antisense oligonucleotide
  modified_base 1..2: mod_base = OTHER; note = bicyclic nucleic acid (BNA)
  modified_base 12: mod_base = OTHER; note = 5-methyl
  source 1..14: mol_type = other RNA
aaggaagatggcat

SEQ ID NO: 5183 - RNA, 13 nt, synthetic construct
  misc_feature 1..13: note = Description of Artificial Sequence: Synthetic Antisense oligonucleotide
  modified_base 1..2: mod_base = OTHER; note = bicyclic nucleic acid (BNA)
  modified_base 12: mod_base = OTHER; note = 5-methyl
  source 1..13: mol_type = other RNA
aaggaagatggca

SEQ ID NO: 5184 - RNA, 12 nt, synthetic construct
  misc_feature 1..12: note = Description of Artificial Sequence: Synthetic Antisense oligonucleotide
  modified_base 1..2: mod_base = OTHER; note = bicyclic nucleic acid (BNA)
  modified_base 12: mod_base = OTHER; note = 5-methyl
  source 1..12: mol_type = other RNA
aaggaagatggc

SEQ ID NO: 5185 - RNA, 19 nt, synthetic construct
  misc_feature 1..19: note = Description of Artificial Sequence: Synthetic Antisense oligonucleotide
  modified_base 1..2: mod_base = OTHER; note = bicyclic nucleic acid (BNA)
  modified_base 11: mod_base = OTHER; note = 5-methyl
  modified_base 16: mod_base = OTHER; note = 5-methyl
  source 1..19: mol_type = other RNA
aggaagatggcatttctag

SEQ ID NO: 5186 - RNA, 18 nt, synthetic construct
  misc_feature 1..18: note = Description of Artificial Sequence: Synthetic Antisense oligonucleotide
  modified_base 1..2: mod_base = OTHER; note = bicyclic nucleic acid (BNA)
  modified_base 11: mod_base = OTHER; note = 5-methyl
  modified_base 16: mod_base = OTHER; note = 5-methyl
  source 1..18: mol_type = other RNA
aggaagatggcatttcta

SEQ ID NO: 5187 - RNA, 17 nt, synthetic construct
  misc_feature 1..17: note = Description of Artificial Sequence: Synthetic Antisense oligonucleotide
  modified_base 1..2: mod_base = OTHER; note = bicyclic nucleic acid (BNA)
  modified_base 11: mod_base = OTHER; note = 5-methyl
  modified_base 16: mod_base = OTHER; note = 5-methyl
  source 1..17: mol_type = other RNA
aggaagatggcatttct

SEQ ID NO: 5188 - RNA, 16 nt, synthetic construct
  misc_feature 1..16: note = Description of Artificial Sequence: Synthetic Antisense oligonucleotide
  modified_base 1..2: mod_base = OTHER; note = bicyclic nucleic acid (BNA)
  modified_base 11: mod_base = OTHER; note = 5-methyl
  modified_base 16: mod_base = OTHER; note = 5-methyl
  source 1..16: mol_type = other RNA
aggaagatggcatttc

SEQ ID NO: 5189 - RNA, 15 nt, synthetic construct
  misc_feature 1..15: note = Description of Artificial Sequence: Synthetic Antisense oligonucleotide
  modified_base 1..2: mod_base = OTHER; note = bicyclic nucleic acid (BNA)
  modified_base 11: mod_base = OTHER; note = 5-methyl
  source 1..15: mol_type = other RNA
aggaagatggcattt

SEQ ID NO: 5190 - RNA, 14 nt, synthetic construct
  misc_feature 1..14: note = Description of Artificial Sequence: Synthetic Antisense oligonucleotide
  modified_base 1..2: mod_base = OTHER; note = bicyclic nucleic acid (BNA)
  modified_base 11: mod_base = OTHER; note = 5-methyl
  source 1..14: mol_type = other RNA
aggaagatggcatt

SEQ ID NO: 5191 - RNA, 13 nt, synthetic construct
  misc_feature 1..13: note = Description of Artificial Sequence: Synthetic Antisense oligonucleotide
  modified_base 1..2: mod_base = OTHER; note = bicyclic nucleic acid (BNA)
  modified_base 11: mod_base = OTHER; note = 5-methyl
  source 1..13: mol_type = other RNA
aggaagatggcat

SEQ ID NO: 5192 - RNA, 12 nt, synthetic construct
  misc_feature 1..12: note = Description of Artificial Sequence: Synthetic Antisense oligonucleotide
  modified_base 1..2: mod_base = OTHER; note = bicyclic nucleic acid (BNA)
  modified_base 11: mod_base = OTHER; note = 5-methyl
  source 1..12: mol_type = other RNA
aggaagatggca

SEQ ID NO: 5193 - RNA, 18 nt, synthetic construct
  misc_feature 1..18: note = Description of Artificial Sequence: Synthetic Antisense oligonucleotide
  modified_base 1..2: mod_base = OTHER; note = bicyclic nucleic acid (BNA)
  modified_base 10: mod_base = OTHER; note = 5-methyl
  modified_base 15: mod_base = OTHER; note = 5-methyl
  source 1..18: mol_type = other RNA
ggaagatggcatttctag

SEQ ID NO: 5194 - RNA, 17 nt, synthetic construct
  misc_feature 1..17: note = Description of Artificial Sequence: Synthetic Antisense oligonucleotide
  modified_base 1..2: mod_base = OTHER; note = bicyclic nucleic acid (BNA)
  modified_base 10: mod_base = OTHER; note = 5-methyl
  modified_base 15: mod_base = OTHER; note = 5-methyl
  source 1..17: mol_type = other RNA
ggaagatggcatttcta

SEQ ID NO: 5195 - RNA, 16 nt, synthetic construct
  misc_feature 1..16: note = Description of Artificial Sequence: Synthetic Antisense oligonucleotide
  modified_base 1..2: mod_base = OTHER; note = bicyclic nucleic acid (BNA)
  modified_base 10: mod_base = OTHER; note = 5-methyl
  modified_base 15: mod_base = OTHER; note = 5-methyl
  source 1..16: mol_type = other RNA
ggaagatggcatttct

SEQ ID NO: 5196 - RNA, 15 nt, synthetic construct
  misc_feature 1..15: note = Description of Artificial Sequence: Synthetic Antisense oligonucleotide
  modified_base 1..2: mod_base = OTHER; note = bicyclic nucleic acid (BNA)
  modified_base 10: mod_base = OTHER; note = 5-methyl
  modified_base 15: mod_base = OTHER; note = 5-methyl
  source 1..15: mol_type = other RNA
ggaagatggcatttc

SEQ ID NO: 5197 - RNA, 14 nt, synthetic construct
  misc_feature 1..14: note = Description of Artificial Sequence: Synthetic Antisense oligonucleotide
  modified_base 1..2: mod_base = OTHER; note = bicyclic nucleic acid (BNA)
  modified_base 10: mod_base = OTHER; note = 5-methyl
  source 1..14: mol_type = other RNA
ggaagatggcattt

SEQ ID NO: 5198 - RNA, 13 nt, synthetic construct
  misc_feature 1..13: note = Description of Artificial Sequence: Synthetic Antisense oligonucleotide
  modified_base 1..2: mod_base = OTHER; note = bicyclic nucleic acid (BNA)
  modified_base 10: mod_base = OTHER; note = 5-methyl
  source 1..13: mol_type = other RNA
ggaagatggcatt

SEQ ID NO: 5199 - RNA, 12 nt, synthetic construct
  misc_feature 1..12: note = Description of Artificial Sequence: Synthetic Antisense oligonucleotide
  modified_base 1..2: mod_base = OTHER; note = bicyclic nucleic acid (BNA)
  modified_base 10: mod_base = OTHER; note = 5-methyl
  source 1..12: mol_type = other RNA
ggaagatggcat

SEQ ID NO: 5200 - RNA, 11 nt, synthetic construct
  misc_feature 1..11: note = Description of Artificial Sequence: Synthetic Antisense oligonucleotide
  modified_base 1..2: mod_base = OTHER; note = bicyclic nucleic acid (BNA)
  modified_base 10: mod_base = OTHER; note = 5-methyl
  source 1..11: mol_type = other RNA
ggaagatggca

SEQ ID NO: 5201 - RNA, 10 nt, synthetic construct
  misc_feature 1..10: note = Description of Artificial Sequence: Synthetic Antisense oligonucleotide
  modified_base 1..2: mod_base = OTHER; note = bicyclic nucleic acid (BNA)
  modified_base 10: mod_base = OTHER; note = 5-methyl
  source 1..10: mol_type = other RNA
ggaagatggc

SEQ ID NO: 5202 - RNA, 17 nt, synthetic construct
  misc_feature 1..17: note = Description of Artificial Sequence: Synthetic Antisense oligonucleotide
  modified_base 1..2: mod_base = OTHER; note = bicyclic nucleic acid (BNA)
  modified_base 9: mod_base = OTHER; note = 5-methyl
  modified_base 14: mod_base = OTHER; note = 5-methyl
  source 1..17: mol_type = other RNA
gaagatggcatttctag

SEQ ID NO: 5203 - RNA, 16 nt, synthetic construct
  misc_feature 1..16: note = Description of Artificial Sequence: Synthetic Antisense oligonucleotide
  modified_base 1..2: mod_base = OTHER; note = bicyclic nucleic acid (BNA)
  modified_base 9: mod_base = OTHER; note = 5-methyl
  modified_base 14: mod_base = OTHER; note = 5-methyl
  source 1..16: mol_type = other RNA
gaagatggcatttcta

SEQ ID NO: 5204 - RNA, 14 nt, synthetic construct
  misc_feature 1..14: note = Description of Artificial Sequence: Synthetic Antisense oligonucleotide
  modified_base 1..2: mod_base = OTHER; note = bicyclic nucleic acid (BNA)
  modified_base 9: mod_base = OTHER; note = 5-methyl
  modified_base 14: mod_base = OTHER; note = 5-methyl
  source 1..14: mol_type = other RNA
gaagatggcatttc

SEQ ID NO: 5205 - RNA, 13 nt, synthetic construct
  misc_feature 1..13: note = Description of Artificial Sequence: Synthetic Antisense oligonucleotide
  modified_base 1..2: mod_base = OTHER; note = bicyclic nucleic acid (BNA)
  modified_base 9: mod_base = OTHER; note = 5-methyl
  source 1..13: mol_type = other RNA
gaagatggcattt

SEQ ID NO: 5206 - RNA, 12 nt, synthetic construct
  misc_feature 1..12: note = Description of Artificial Sequence: Synthetic Antisense oligonucleotide
  modified_base 1..2: mod_base = OTHER; note = bicyclic nucleic acid (BNA)
  modified_base 9: mod_base = OTHER; note = 5-methyl
  source 1..12: mol_type = other RNA
gaagatggcatt

SEQ ID NO: 5207 - RNA, 11 nt, synthetic construct
  misc_feature 1..11: note = Description of Artificial Sequence: Synthetic Antisense oligonucleotide
  modified_base 1..2: mod_base = OTHER; note = bicyclic nucleic acid (BNA)
  modified_base 9: mod_base = OTHER; note = 5-methyl
  source 1..11: mol_type = other RNA
gaagatggcat

SEQ ID NO: 5208 - RNA, 10 nt, synthetic construct
  misc_feature 1..10: note = Description of Artificial Sequence: Synthetic Antisense oligonucleotide
  modified_base 1..2: mod_base = OTHER; note = bicyclic nucleic acid (BNA)
  modified_base 9: mod_base = OTHER; note = 5-methyl
  source 1..10: mol_type = other RNA
gaagatggca

SEQ ID NO: 5209 - skipped

SEQ ID NO: 5210 - RNA, 16 nt, synthetic construct
  misc_feature 1..16: note = Description of Artificial Sequence: Synthetic Antisense oligonucleotide
  modified_base 1..2: mod_base = OTHER; note = bicyclic nucleic acid (BNA)
  modified_base 8: mod_base = OTHER; note = 5-methyl
  modified_base 13: mod_base = OTHER; note = 5-methyl
  source 1..16: mol_type = other RNA
aagatggcatttctag

SEQ ID NO: 5211 - RNA, 15 nt, synthetic construct
  misc_feature 1..15: note = Description of Artificial Sequence: Synthetic Antisense oligonucleotide
  modified_base 1..2: mod_base = OTHER; note = bicyclic nucleic acid (BNA)
  modified_base 8: mod_base = OTHER; note = 5-methyl
  modified_base 13: mod_base = OTHER; note = 5-methyl
  source 1..15: mol_type = other RNA
aagatggcatttcta

SEQ ID NO: 5212 - RNA, 14 nt, synthetic construct
  misc_feature 1..14: note = Description of Artificial Sequence: Synthetic Antisense oligonucleotide
  modified_base 1..2: mod_base = OTHER; note = bicyclic nucleic acid (BNA)
  modified_base 8: mod_base = OTHER; note = 5-methyl
  modified_base 13: mod_base = OTHER; note = 5-methyl
  source 1..14: mol_type = other RNA
aagatggcatttct

SEQ ID NO: 5213 - RNA, 13 nt, synthetic construct
  misc_feature 1..13: note = Description of Artificial Sequence: Synthetic Antisense oligonucleotide
  modified_base 1..2: mod_base = OTHER; note = bicyclic nucleic acid (BNA)
  modified_base 8: mod_base = OTHER; note = 5-methyl
  modified_base 13: mod_base = OTHER; note = 5-methyl
  source 1..13: mol_type = other RNA
aagatggcatttc

SEQ ID NO: 5214 - RNA, 12 nt, synthetic construct
  misc_feature 1..12: note = Description of Artificial Sequence: Synthetic Antisense oligonucleotide
  modified_base 1..2: mod_base = OTHER; note = bicyclic nucleic acid (BNA)
  modified_base 8: mod_base = OTHER; note = 5-methyl
  source 1..12: mol_type = other RNA
aagatggcattt

SEQ ID NO: 5215 - RNA, 11 nt, synthetic construct
  misc_feature 1..11: note = Description of Artificial Sequence: Synthetic Antisense oligonucleotide
  modified_base 1..2: mod_base = OTHER; note = bicyclic nucleic acid (BNA)
  modified_base 8: mod_base = OTHER; note = 5-methyl
  source 1..11: mol_type = other RNA
aagatggcatt

SEQ ID NO: 5216 - RNA, 10 nt, synthetic construct
  misc_feature 1..10: note = Description of Artificial Sequence: Synthetic Antisense oligonucleotide
  modified_base 1..2: mod_base = OTHER; note = bicyclic nucleic acid (BNA)
  modified_base 8: mod_base = OTHER; note = 5-methyl
  source 1..10: mol_type = other RNA
aagatggcat

SEQ ID NO: 5217-5218 - skipped (2 entries)

SEQ ID NO: 5219 - RNA, 15 nt, synthetic construct
  misc_feature 1..15: note = Description of Artificial Sequence: Synthetic Antisense oligonucleotide
  modified_base 1..2: mod_base = OTHER; note = bicyclic nucleic acid (BNA)
  modified_base 7: mod_base = OTHER; note = 5-methyl
  modified_base 12: mod_base = OTHER; note = 5-methyl
  source 1..15: mol_type = other RNA
agatggcatttctag

SEQ ID NO: 5220 - RNA, 14 nt, synthetic construct
  misc_feature 1..14: note = Description of Artificial Sequence: Synthetic Antisense oligonucleotide
  modified_base 1..2: mod_base = OTHER; note = bicyclic nucleic acid (BNA)
  modified_base 7: mod_base = OTHER; note = 5-methyl
  modified_base 12: mod_base = OTHER; note = 5-methyl
  source 1..14: mol_type = other RNA
agatggcatttcta

SEQ ID NO: 5221 - RNA, 13 nt, synthetic construct
  misc_feature 1..13: note = Description of Artificial Sequence: Synthetic Antisense oligonucleotide
  modified_base 1..2: mod_base = OTHER; note = bicyclic nucleic acid (BNA)
  modified_base 7: mod_base = OTHER; note = 5-methyl
  modified_base 12: mod_base = OTHER; note = 5-methyl
  source 1..13: mol_type = other RNA
agatggcatttct

SEQ ID NO: 5222 - RNA, 12 nt, synthetic construct
  misc_feature 1..12: note = Description of Artificial Sequence: Synthetic Antisense oligonucleotide
  modified_base 1..2: mod_base = OTHER; note = bicyclic nucleic acid (BNA)
  modified_base 7: mod_base = OTHER; note = 5-methyl
  modified_base 12: mod_base = OTHER; note = 5-methyl
  source 1..12: mol_type = other RNA
agatggcatttc

SEQ ID NO: 5223 - RNA, 11 nt, synthetic construct
  misc_feature 1..11: note = Description of Artificial Sequence: Synthetic Antisense oligonucleotide
  modified_base 1..2: mod_base = OTHER; note = bicyclic nucleic acid (BNA)
  modified_base 7: mod_base = OTHER; note = 5-methyl
  source 1..11: mol_type = other RNA
agatggcattt

SEQ ID NO: 5224 - RNA, 10 nt, synthetic construct
  misc_feature 1..10: note = Description of Artificial Sequence: Synthetic Antisense oligonucleotide
  modified_base 1..2: mod_base = OTHER; note = bicyclic nucleic acid (BNA)
  modified_base 7: mod_base = OTHER; note = 5-methyl
  source 1..10: mol_type = other RNA
agatggcatt

SEQ ID NO: 5225-5226 - skipped (2 entries)

SEQ ID NO: 5227 - DNA, 30 bp, synthetic construct; identical to SEQ ID NO: 8
  misc_feature 1..30: note = Description of Artificial Sequence: Synthetic Antisense oligonucleotide
  misc_feature 1..30: note = Original Sequence: ctccaacaucaaggaagauggcauuucuag
  modified_base 1: mod_base = OTHER; note = 5-methyl
  modified_base 3..4: mod_base = OTHER; note = 5-methyl
  modified_base 7: mod_base = OTHER; note = 5-methyl
  modified_base 10: mod_base = OTHER; note = 5-methyl
  modified_base 22: mod_base = OTHER; note = 5-methyl
  modified_base 27: mod_base = OTHER; note = 5-methyl
  modified_base 1..2: mod_base = OTHER; note = bicyclic nucleic acid (BNA)
  source 1..30: mol_type = other DNA
  modified_base 9: mod_base = OTHER; note = Uracil
  modified_base 19: mod_base = OTHER; note = Uracil
  modified_base 24: mod_base = OTHER; note = Uracil
  modified_base 25: mod_base = OTHER; note = Uracil
  modified_base 26: mod_base = OTHER; note = Uracil
  modified_base 28: mod_base = OTHER; note = Uracil

SEQ ID NO: 5228 - DNA, 29 bp, synthetic construct
  misc_feature 1..29: note = Description of Artificial Sequence: Synthetic Antisense oligonucleotide
  misc_feature 1..29: note = Original Sequence: ctccaacaucaaggaagauggcauuucua
  modified_base 1: mod_base = OTHER; note = 5-methyl
  modified_base 3..4: mod_base = OTHER; note = 5-methyl
  modified_base 7: mod_base = OTHER; note = 5-methyl
  modified_base 10: mod_base = OTHER; note = 5-methyl
  modified_base 22: mod_base = OTHER; note = 5-methyl
  modified_base 27: mod_base = OTHER; note = 5-methyl
  modified_base 1..2: mod_base = OTHER; note = bicyclic nucleic acid (BNA)
  source 1..29: mol_type = other DNA
  modified_base 9: mod_base = OTHER; note = Uracil
  modified_base 19: mod_base = OTHER; note = Uracil
  modified_base 24: mod_base = OTHER; note = Uracil
  modified_base 25: mod_base = OTHER; note = Uracil
  modified_base 26: mod_base = OTHER; note = Uracil
  modified_base 28: mod_base = OTHER; note = Uracil
ctccaacatcaaggaagatggcatttcta

SEQ ID NO: 5229 - DNA, 28 bp, synthetic construct
  misc_feature 1..28: note = Description of Artificial Sequence: Synthetic Antisense oligonucleotide
  misc_feature 1..28: note = Original Sequence: ctccaacaucaaggaagauggcauuucu
  modified_base 1: mod_base = OTHER; note = 5-methyl
  modified_base 3..4: mod_base = OTHER; note = 5-methyl
  modified_base 7: mod_base = OTHER; note = 5-methyl
  modified_base 10: mod_base = OTHER; note = 5-methyl
  modified_base 22: mod_base = OTHER; note = 5-methyl
  modified_base 27: mod_base = OTHER; note = 5-methyl
  modified_base 1..2: mod_base = OTHER; note = bicyclic nucleic acid (BNA)
  source 1..28: mol_type = other DNA
  modified_base 9: mod_base = OTHER; note = Uracil
  modified_base 19: mod_base = OTHER; note = Uracil
  modified_base 24: mod_base = OTHER; note = Uracil
  modified_base 25: mod_base = OTHER; note = Uracil
  modified_base 26: mod_base = OTHER; note = Uracil
  modified_base 28: mod_base = OTHER; note = Uracil
ctccaacatcaaggaagatggcatttct

SEQ ID NO: 5230 - DNA, 27 bp, synthetic construct
  misc_feature 1..27: note = Description of Artificial Sequence: Synthetic Antisense oligonucleotide
  misc_feature 1..27: note = Original Sequence: ctccaacaucaaggaagauggcauuuc
  modified_base 1: mod_base = OTHER; note = 5-methyl
  modified_base 3..4: mod_base = OTHER; note = 5-methyl
  modified_base 7: mod_base = OTHER; note = 5-methyl
  modified_base 10: mod_base = OTHER; note = 5-methyl
  modified_base 22: mod_base = OTHER; note = 5-methyl
  modified_base 27: mod_base = OTHER; note = 5-methyl
  modified_base 1..2: mod_base = OTHER; note = bicyclic nucleic acid (BNA)
  source 1..27: mol_type = other DNA
  modified_base 9: mod_base = OTHER; note = Uracil
  modified_base 19: mod_base = OTHER; note = Uracil
  modified_base 24: mod_base = OTHER; note = Uracil
  modified_base 25: mod_base = OTHER; note = Uracil
  modified_base 26: mod_base = OTHER; note = Uracil
ctccaacatcaaggaagatggcatttc

SEQ ID NO: 5231 - DNA, 26 bp, synthetic construct
  misc_feature 1..26: note = Description of Artificial Sequence: Synthetic Antisense oligonucleotide
  misc_feature 1..26: note = Original Sequence: ctccaacaucaaggaagauggcauuu
  modified_base 1: mod_base = OTHER; note = 5-methyl
  modified_base 3..4: mod_base = OTHER; note = 5-methyl
  modified_base 7: mod_base = OTHER; note = 5-methyl
  modified_base 10: mod_base = OTHER; note = 5-methyl
  modified_base 22: mod_base = OTHER; note = 5-methyl
  modified_base 1..2: mod_base = OTHER; note = bicyclic nucleic acid (BNA)
  source 1..26: mol_type = other DNA
  modified_base 9: mod_base = OTHER; note = Uracil
  modified_base 19: mod_base = OTHER; note = Uracil
  modified_base 24: mod_base = OTHER; note = Uracil
  modified_base 25: mod_base = OTHER; note = Uracil
  modified_base 26: mod_base = OTHER; note = Uracil
ctccaacatcaaggaagatggcattt

SEQ ID NO: 5232 - DNA, 25 bp, synthetic construct
  misc_feature 1..25: note = Description of Artificial Sequence: Synthetic Antisense oligonucleotide
  misc_feature 1..25: note = Original Sequence: ctccaacaucaaggaagauggcauu
  modified_base 1: mod_base = OTHER; note = 5-methyl
  modified_base 3..4: mod_base = OTHER; note = 5-methyl
  modified_base 7: mod_base = OTHER; note = 5-methyl
  modified_base 10: mod_base = OTHER; note = 5-methyl
  modified_base 22: mod_base = OTHER; note = 5-methyl
  modified_base 1..2: mod_base = OTHER; note = bicyclic nucleic acid (BNA)
  source 1..25: mol_type = other DNA
  modified_base 9: mod_base = OTHER; note = Uracil
  modified_base 19: mod_base = OTHER; note = Uracil
  modified_base 24: mod_base = OTHER; note = Uracil
  modified_base 25: mod_base = OTHER; note = Uracil
ctccaacatcaaggaagatggcatt

SEQ ID NO: 5233 - DNA, 24 bp, synthetic construct
  misc_feature 1..24: note = Description of Artificial Sequence: Synthetic Antisense oligonucleotide
  misc_feature 1..24: note = Original Sequence: ctccaacaucaaggaagauggcau
  modified_base 1: mod_base = OTHER; note = 5-methyl
  modified_base 3..4: mod_base = OTHER; note = 5-methyl
  modified_base 7: mod_base = OTHER; note = 5-methyl
  modified_base 10: mod_base = OTHER; note = 5-methyl
  modified_base 22: mod_base = OTHER; note = 5-methyl
  modified_base 1..2: mod_base = OTHER; note = bicyclic nucleic acid (BNA)
  source 1..24: mol_type = other DNA
  modified_base 9: mod_base = OTHER; note = Uracil
  modified_base 19: mod_base = OTHER; note = Uracil
  modified_base 24: mod_base = OTHER; note = Uracil
ctccaacatcaaggaagatggcat

SEQ ID NO: 5234 - DNA, 23 bp, synthetic construct
  misc_feature 1..23: note = Description of Artificial Sequence: Synthetic Antisense oligonucleotide
  misc_feature 1..23: note = Original Sequence: ctccaacaucaaggaagauggca
  modified_base 1: mod_base = OTHER; note = 5-methyl
  modified_base 3..4: mod_base = OTHER; note = 5-methyl
  modified_base 7: mod_base = OTHER; note = 5-methyl
  modified_base 10: mod_base = OTHER; note = 5-methyl
  modified_base 22: mod_base = OTHER; note = 5-methyl
  modified_base 1..2: mod_base = OTHER; note = bicyclic nucleic acid (BNA)
  source 1..23: mol_type = other DNA
  modified_base 9: mod_base = OTHER; note = Uracil
  modified_base 19: mod_base = OTHER; note = Uracil
ctccaacatcaaggaagatggca

SEQ ID NO: 5235 - DNA, 22 bp, synthetic construct
  misc_feature 1..22: note = Description of Artificial Sequence: Synthetic Antisense oligonucleotide
  misc_feature 1..22: note = Original Sequence: ctccaacaucaaggaagauggc
  modified_base 1: mod_base = OTHER; note = 5-methyl
  modified_base 3..4: mod_base = OTHER; note = 5-methyl
  modified_base 7: mod_base = OTHER; note = 5-methyl
  modified_base 10: mod_base = OTHER; note = 5-methyl
  modified_base 22: mod_base = OTHER; note = 5-methyl
  modified_base 1..2: mod_base = OTHER; note = bicyclic nucleic acid (BNA)
  source 1..22: mol_type = other DNA
  modified_base 9: mod_base = OTHER; note = Uracil
  modified_base 19: mod_base = OTHER; note = Uracil
ctccaacatcaaggaagatggc

SEQ ID NO: 5236 - DNA, 21 bp, synthetic construct
  misc_feature 1..21: note = Description of Artificial Sequence: Synthetic Antisense oligonucleotide
  misc_feature 1..21: note = Original Sequence: ctccaacaucaaggaagaugg
  modified_base 1: mod_base = OTHER; note = 5-methyl
  modified_base 3..4: mod_base = OTHER; note = 5-methyl
  modified_base 7: mod_base = OTHER; note = 5-methyl
  modified_base 10: mod_base = OTHER; note = 5-methyl
  modified_base 1..2: mod_base = OTHER; note = bicyclic nucleic acid (BNA)
  source 1..21: mol_type = other DNA
  modified_base 9: mod_base = OTHER; note = Uracil
  modified_base 19: mod_base = OTHER; note = Uracil
ctccaacatcaaggaagatgg

SEQ ID NO: 5237 - DNA, 20 bp, synthetic construct
  misc_feature 1..20: note = Description of Artificial Sequence: Synthetic Antisense oligonucleotide
  misc_feature 1..20: note = Original Sequence: ctccaacaucaaggaagaug
  modified_base 1: mod_base = OTHER; note = 5-methyl
  modified_base 3..4: mod_base = OTHER; note = 5-methyl
  modified_base 7: mod_base = OTHER; note = 5-methyl
  modified_base 10: mod_base = OTHER; note = 5-methyl
  modified_base 1..2: mod_base = OTHER; note = bicyclic nucleic acid (BNA)
  source 1..20: mol_type = other DNA
  modified_base 9: mod_base = OTHER; note = Uracil
  modified_base 19: mod_base = OTHER; note = Uracil
ctccaacatcaaggaagatg

SEQ ID NO: 5238 - DNA, 19 bp, synthetic construct
  misc_feature 1..19: note = Description of Artificial Sequence: Synthetic Antisense oligonucleotide
  misc_feature 1..19: note = Original Sequence: ctccaacaucaaggaagau
  modified_base 1: mod_base = OTHER; note = 5-methyl
  modified_base 3..4: mod_base = OTHER; note = 5-methyl
  modified_base 7: mod_base = OTHER; note = 5-methyl
  modified_base 10: mod_base = OTHER; note = 5-methyl
  modified_base 1..2: mod_base = OTHER; note = bicyclic nucleic acid (BNA)
  source 1..19: mol_type = other DNA
  modified_base 9: mod_base = OTHER; note = Uracil
  modified_base 19: mod_base = OTHER; note = Uracil
ctccaacatcaaggaagat

SEQ ID NO: 5239 - DNA, 18 bp, synthetic construct
  misc_feature 1..18: note = Description of Artificial Sequence: Synthetic Antisense oligonucleotide
  misc_feature 1..18: note = Original Sequence: ctccaacaucaaggaaga
  modified_base 1: mod_base = OTHER; note = 5-methyl
  modified_base 3..4: mod_base = OTHER; note = 5-methyl
  modified_base 7: mod_base = OTHER; note = 5-methyl
  modified_base 10: mod_base = OTHER; note = 5-methyl
  modified_base 1..2: mod_base = OTHER; note = bicyclic nucleic acid (BNA)
  source 1..18: mol_type = other DNA
  modified_base 9: mod_base = OTHER; note = Uracil
ctccaacatcaaggaaga

SEQ ID NO: 5240 - DNA, 17 bp, synthetic construct
  misc_feature 1..17: note = Description of Artificial Sequence: Synthetic Antisense oligonucleotide
  misc_feature 1..17: note = Original Sequence: ctccaacaucaaggaag
  modified_base 1: mod_base = OTHER; note = 5-methyl
  modified_base 3..4: mod_base = OTHER; note = 5-methyl
  modified_base 7: mod_base = OTHER; note = 5-methyl
  modified_base 10: mod_base = OTHER; note = 5-methyl
  modified_base 1..2: mod_base = OTHER; note = bicyclic nucleic acid (BNA)
  source 1..17: mol_type = other DNA
  modified_base 9: mod_base = OTHER; note = Uracil
ctccaacatcaaggaag

SEQ ID NO: 5241 - DNA, 29 bp, synthetic construct
  misc_feature 1..29: note = Description of Artificial Sequence: Synthetic Antisense oligonucleotide
  misc_feature 1..29: note = Original Sequence: tccaacaucaaggaagauggcauuucuag
  modified_base 1..2: mod_base = OTHER; note = bicyclic nucleic acid (BNA)
  modified_base 2..3: mod_base = OTHER; note = 5-methyl
  modified_base 6: mod_base = OTHER; note = 5-methyl
  modified_base 9: mod_base = OTHER; note = 5-methyl
  modified_base 21: mod_base = OTHER; note = 5-methyl
  modified_base 26: mod_base = OTHER; note = 5-methyl
  source 1..29: mol_type = other DNA
  modified_base 8: mod_base = OTHER; note = Uracil
  modified_base 18: mod_base = OTHER; note = Uracil
  modified_base 23: mod_base = OTHER; note = Uracil
  modified_base 24: mod_base = OTHER; note = Uracil
  modified_base 25: mod_base = OTHER; note = Uracil
  modified_base 27: mod_base = OTHER; note = Uracil
tccaacatcaaggaagatggcatttctag

SEQ ID NO: 5242 - DNA, 28 bp, synthetic construct
  misc_feature 1..28: note = Description of Artificial Sequence: Synthetic Antisense oligonucleotide
  misc_feature 1..28: note = Original Sequence: tccaacaucaaggaagauggcauuucua
  modified_base 1..2: mod_base = OTHER; note = bicyclic nucleic acid (BNA)
  modified_base 2..3: mod_base = OTHER; note = 5-methyl
  modified_base 6: mod_base = OTHER; note = 5-methyl
  modified_base 9: mod_base = OTHER; note = 5-methyl
  modified_base 21: mod_base = OTHER; note = 5-methyl
  modified_base 26: mod_base = OTHER; note = 5-methyl
  source 1..28: mol_type = other DNA
  modified_base 8: mod_base = OTHER; note = Uracil
  modified_base 18: mod_base = OTHER; note = Uracil
  modified_base 23: mod_base = OTHER; note = Uracil
  modified_base 24: mod_base = OTHER; note = Uracil
  modified_base 25: mod_base = OTHER; note = Uracil
  modified_base 27: mod_base = OTHER; note = Uracil
tccaacatcaaggaagatggcatttcta

SEQ ID NO: 5243 - DNA, 27 bp, synthetic construct
  misc_feature 1..27: note = Description of Artificial Sequence: Synthetic Antisense oligonucleotide
  misc_feature 1..27: note = Original Sequence: tccaacaucaaggaagauggcauuucu
  modified_base 1..2: mod_base = OTHER; note = bicyclic nucleic acid (BNA)
  modified_base 2..3: mod_base = OTHER; note = 5-methyl
  modified_base 6: mod_base = OTHER; note = 5-methyl
  modified_base 9: mod_base = OTHER; note = 5-methyl
  modified_base 21: mod_base = OTHER; note = 5-methyl
  modified_base 26: mod_base = OTHER; note = 5-methyl
  source 1..27: mol_type = other DNA
  modified_base 8: mod_base = OTHER; note = Uracil
  modified_base 18: mod_base = OTHER; note = Uracil
  modified_base 23: mod_base = OTHER; note = Uracil
  modified_base 24: mod_base = OTHER; note = Uracil
  modified_base 25: mod_base = OTHER; note = Uracil
  modified_base 27: mod_base = OTHER; note = Uracil
tccaacatcaaggaagatggcatttct

SEQ ID NO: 5244 - DNA, 26 bp, synthetic construct
  misc_feature 1..26: note = Description of Artificial Sequence: Synthetic Antisense oligonucleotide
  misc_feature 1..26: note = Original Sequence: tccaacaucaaggaagauggcauuuc
  modified_base 1..2: mod_base = OTHER; note = bicyclic nucleic acid (BNA)
  modified_base 2..3: mod_base = OTHER; note = 5-methyl
  modified_base 6: mod_base = OTHER; note = 5-methyl
  modified_base 9: mod_base = OTHER; note = 5-methyl
  modified_base 21: mod_base = OTHER; note = 5-methyl
  modified_base 26: mod_base = OTHER; note = 5-methyl
  source 1..26: mol_type = other DNA
  modified_base 8: mod_base = OTHER; note = Uracil
  modified_base 18: mod_base = OTHER; note = Uracil
  modified_base 23: mod_base = OTHER; note = Uracil
  modified_base 24: mod_base = OTHER; note = Uracil
  modified_base 25: mod_base = OTHER; note = Uracil
tccaacatcaaggaagatggcatttc

SEQ ID NO: 5245 - DNA, 25 bp, synthetic construct
  misc_feature 1..25: note = Description of Artificial Sequence: Synthetic Antisense oligonucleotide
  misc_feature 1..25: note = Original Sequence: tccaacaucaaggaagauggcauuu
  modified_base 1..2: mod_base = OTHER; note = bicyclic nucleic acid (BNA)
  modified_base 2..3: mod_base = OTHER; note = 5-methyl
  modified_base 6: mod_base = OTHER; note = 5-methyl
  modified_base 9: mod_base = OTHER; note = 5-methyl
  modified_base 21: mod_base = OTHER; note = 5-methyl
  source 1..25: mol_type = other DNA
  modified_base 8: mod_base = OTHER; note = Uracil
  modified_base 18: mod_base = OTHER; note = Uracil
  modified_base 23: mod_base = OTHER; note = Uracil
  modified_base 24: mod_base = OTHER; note = Uracil
  modified_base 25: mod_base = OTHER; note = Uracil
tccaacatcaaggaagatggcattt

SEQ ID NO: 5246 - DNA, 24 bp, synthetic construct
  misc_feature 1..24: note = Description of Artificial Sequence: Synthetic Antisense oligonucleotide
  misc_feature 1..24: note = Original Sequence: tccaacaucaaggaagauggcauu
  modified_base 1..2: mod_base = OTHER; note = bicyclic nucleic acid (BNA)
  modified_base 2..3: mod_base = OTHER; note = 5-methyl
  modified_base 6: mod_base = OTHER; note = 5-methyl
  modified_base 9: mod_base = OTHER; note = 5-methyl
  modified_base 21: mod_base = OTHER; note = 5-methyl
  source 1..24: mol_type = other DNA
  modified_base 8: mod_base = OTHER; note = Uracil
  modified_base 18: mod_base = OTHER; note = Uracil
  modified_base 23: mod_base = OTHER; note = Uracil
  modified_base 24: mod_base = OTHER; note = Uracil
tccaacatcaaggaagatggcatt

SEQ ID NO: 5247 - DNA, 23 bp, synthetic construct
  misc_feature 1..23: note = Description of Artificial Sequence: Synthetic Antisense oligonucleotide
  misc_feature 1..23: note = Original Sequence: tccaacaucaaggaagauggcau
  modified_base 1..2: mod_base = OTHER; note = bicyclic nucleic acid (BNA)
  modified_base 2..3: mod_base = OTHER; note = 5-methyl
  modified_base 6: mod_base = OTHER; note = 5-methyl
  modified_base 9: mod_base = OTHER; note = 5-methyl
  modified_base 21: mod_base = OTHER; note = 5-methyl
  source 1..23: mol_type = other DNA
  modified_base 8: mod_base = OTHER; note = Uracil
  modified_base 18: mod_base = OTHER; note = Uracil
  modified_base 23: mod_base = OTHER; note = Uracil
tccaacatcaaggaagatggcat

SEQ ID NO: 5248 - DNA, 22 bp, synthetic construct
  misc_feature 1..22: note = Description of Artificial Sequence: Synthetic Antisense oligonucleotide
  misc_feature 1..22: note = Original Sequence: tccaacaucaaggaagauggca
  modified_base 1..2: mod_base = OTHER; note = bicyclic nucleic acid (BNA)
  modified_base 2..3: mod_base = OTHER; note = 5-methyl
  modified_base 6: mod_base = OTHER; note = 5-methyl
  modified_base 9: mod_base = OTHER; note = 5-methyl
  modified_base 21: mod_base = OTHER; note = 5-methyl
  source 1..22: mol_type = other DNA
  modified_base 8: mod_base = OTHER; note = Uracil
  modified_base 18: mod_base = OTHER; note = Uracil
tccaacatcaaggaagatggca

SEQ ID NO: 5249 - DNA, 21 bp, synthetic construct
  misc_feature 1..21: note = Description of Artificial Sequence: Synthetic Antisense oligonucleotide
  misc_feature 1..21: note = Original Sequence: tccaacaucaaggaagauggc
  modified_base 1..2: mod_base = OTHER; note = bicyclic nucleic acid (BNA)
  modified_base 2..3: mod_base = OTHER; note = 5-methyl
  modified_base 6: mod_base = OTHER; note = 5-methyl
  modified_base 9: mod_base = OTHER; note = 5-methyl
  modified_base 21: mod_base = OTHER; note = 5-methyl
  source 1..21: mol_type = other DNA
  modified_base 8: mod_base = OTHER; note = Uracil
  modified_base 18: mod_base = OTHER; note = Uracil
tccaacatcaaggaagatggc

SEQ ID NO: 5250 - DNA, 20 bp, synthetic construct
  misc_feature 1..20: note = Description of Artificial Sequence: Synthetic Antisense oligonucleotide
  misc_feature 1..20: note = Original Sequence: tccaacaucaaggaagaugg
  modified_base 1..2: mod_base = OTHER; note = bicyclic nucleic acid (BNA)
  modified_base 2..3: mod_base = OTHER; note = 5-methyl
  modified_base 6: mod_base = OTHER; note = 5-methyl
  modified_base 9: mod_base = OTHER; note = 5-methyl
  source 1..20: mol_type = other DNA
  modified_base 8: mod_base = OTHER; note = Uracil
  modified_base 18: mod_base = OTHER; note = Uracil
tccaacatcaaggaagatgg

SEQ ID NO: 5251 - DNA, 19 bp, synthetic construct
  misc_feature 1..19: note = Description of Artificial Sequence: Synthetic Antisense oligonucleotide
  misc_feature 1..19: note = Original Sequence: tccaacaucaaggaagaug
  modified_base 1..2: mod_base = OTHER; note = bicyclic nucleic acid (BNA)
  modified_base 2..3: mod_base = OTHER; note = 5-methyl
  modified_base 6: mod_base = OTHER; note = 5-methyl
  modified_base 9: mod_base = OTHER; note = 5-methyl
  source 1..19: mol_type = other DNA
  modified_base 8: mod_base = OTHER; note = Uracil
  modified_base 18: mod_base = OTHER; note = Uracil
tccaacatcaaggaagatg

SEQ ID NO: 5252 - DNA, 18 bp, synthetic construct
  misc_feature 1..18: note = Description of Artificial Sequence: Synthetic Antisense oligonucleotide
  misc_feature 1..18: note = Original Sequence: tccaacaucaaggaagau
  modified_base 1..2: mod_base = OTHER; note = bicyclic nucleic acid (BNA)
  modified_base 2..3: mod_base = OTHER; note = 5-methyl
  modified_base 6: mod_base = OTHER; note = 5-methyl
  modified_base 9: mod_base = OTHER; note = 5-methyl
  source 1..18: mol_type = other DNA
  modified_base 8: mod_base = OTHER; note = Uracil
  modified_base 18: mod_base = OTHER; note = Uracil
tccaacatcaaggaagat

SEQ ID NO: 5253 - DNA, 17 bp, synthetic construct
  misc_feature 1..17: note = Description of Artificial Sequence: Synthetic Antisense oligonucleotide
  misc_feature 1..17: note = Original Sequence: tccaacaucaaggaaga
  modified_base 1..2: mod_base = OTHER; note = bicyclic nucleic acid (BNA)
  modified_base 2..3: mod_base = OTHER; note = 5-methyl
  modified_base 6: mod_base = OTHER; note = 5-methyl
  modified_base 9: mod_base = OTHER; note = 5-methyl
  source 1..17: mol_type = other DNA
  modified_base 8: mod_base = OTHER; note = Uracil
tccaacatcaaggaaga

SEQ ID NO: 5254 - DNA, 16 bp, synthetic construct
  misc_feature 1..16: note = Description of Artificial Sequence: Synthetic Antisense oligonucleotide
  misc_feature 1..16: note = Original Sequence: tccaacaucaaggaag
  modified_base 1..2: mod_base = OTHER; note = bicyclic nucleic acid (BNA)
  modified_base 2..3: mod_base = OTHER; note = 5-methyl
  modified_base 6: mod_base = OTHER; note = 5-methyl
  modified_base 9: mod_base = OTHER; note = 5-methyl
  source 1..16: mol_type = other DNA
  modified_base 8: mod_base = OTHER; note = Uracil
tccaacatcaaggaag

SEQ ID NO: 5255 - RNA, 28 nt, synthetic construct
  misc_feature 1..28: note = Description of Artificial Sequence: Synthetic Antisense oligonucleotide
  modified_base 1..2: mod_base = OTHER; note = 5-methyl
  modified_base 5: mod_base = OTHER; note = 5-methyl
  modified_base 8: mod_base = OTHER; note = 5-methyl
  modified_base 20: mod_base = OTHER; note = 5-methyl
  modified_base 25: mod_base = OTHER; note = 5-methyl
  modified_base 1..2: mod_base = OTHER; note = bicyclic nucleic acid (BNA)
  source 1..28: mol_type = other RNA
ccaacatcaaggaagatggcatttctag

SEQ ID NO: 5256 - RNA, 27 nt, synthetic construct
  misc_feature 1..27: note = Description of Artificial Sequence: Synthetic Antisense oligonucleotide
  modified_base 1..2: mod_base = OTHER; note = 5-methyl
  modified_base 5: mod_base = OTHER; note = 5-methyl
  modified_base 8: mod_base = OTHER; note = 5-methyl
  modified_base 20: mod_base = OTHER; note = 5-methyl
  modified_base 25: mod_base = OTHER; note = 5-methyl
  modified_base 1..2: mod_base = OTHER; note = bicyclic nucleic acid (BNA)
  source 1..27: mol_type = other RNA
ccaacatcaaggaagatggcatttcta

SEQ ID NO: 5257 - RNA, 26 nt, synthetic construct
  misc_feature 1..26: note = Description of Artificial Sequence: Synthetic Antisense oligonucleotide
  modified_base 1..2: mod_base = OTHER; note = 5-methyl
  modified_base 5: mod_base = OTHER; note = 5-methyl
  modified_base 8: mod_base = OTHER; note = 5-methyl
  modified_base 20: mod_base = OTHER; note = 5-methyl
  modified_base 25: mod_base = OTHER; note = 5-methyl
  modified_base 1..2: mod_base = OTHER; note = bicyclic nucleic acid (BNA)
  source 1..26: mol_type = other RNA
ccaacatcaaggaagatggcatttct

SEQ ID NO: 5258 - RNA, 25 nt, synthetic construct
  misc_feature 1..25: note = Description of Artificial Sequence: Synthetic Antisense oligonucleotide
  modified_base 1..2: mod_base = OTHER; note = 5-methyl
  modified_base 5: mod_base = OTHER; note = 5-methyl
  modified_base 8: mod_base = OTHER; note = 5-methyl
  modified_base 20: mod_base = OTHER; note = 5-methyl
  modified_base 25: mod_base = OTHER; note = 5-methyl
  modified_base 1..2: mod_base = OTHER; note = bicyclic nucleic acid (BNA)
  source 1..25: mol_type = other RNA
ccaacatcaaggaagatggcatttc

SEQ ID NO: 5259 - RNA, 24 nt, synthetic construct
  misc_feature 1..24: note = Description of Artificial Sequence: Synthetic Antisense oligonucleotide
  modified_base 1..2: mod_base = OTHER; note = 5-methyl
  modified_base 5: mod_base = OTHER; note = 5-methyl
  modified_base 8: mod_base = OTHER; note = 5-methyl
  modified_base 20: mod_base = OTHER; note = 5-methyl
  modified_base 1..2: mod_base = OTHER; note = bicyclic nucleic acid (BNA)
  source 1..24: mol_type = other RNA
ccaacatcaaggaagatggcattt

SEQ ID NO: 5260 - RNA, 23 nt, synthetic construct
  misc_feature 1..23: note = Description of Artificial Sequence: Synthetic Antisense oligonucleotide
  modified_base 1..2: mod_base = OTHER; note = 5-methyl
  modified_base 5: mod_base = OTHER; note = 5-methyl
  modified_base 8: mod_base = OTHER; note = 5-methyl
  modified_base 20: mod_base = OTHER; note = 5-methyl
  modified_base 1..2: mod_base = OTHER; note = bicyclic nucleic acid (BNA)
  source 1..23: mol_type = other RNA
ccaacatcaaggaagatggcatt

SEQ ID NO: 5261 - RNA, 22 nt, synthetic construct
  misc_feature 1..22: note = Description of Artificial Sequence: Synthetic Antisense oligonucleotide
  modified_base 1..2: mod_base = OTHER; note = 5-methyl
  modified_base 5: mod_base = OTHER; note = 5-methyl
  modified_base 8: mod_base = OTHER; note = 5-methyl
  modified_base 20: mod_base = OTHER; note = 5-methyl
  modified_base 1..2: mod_base = OTHER; note = bicyclic nucleic acid (BNA)
  source 1..22: mol_type = other RNA
ccaacatcaaggaagatggcat

SEQ ID NO: 5262 - RNA, 21 nt, synthetic construct
  misc_feature 1..21: note = Description of Artificial Sequence: Synthetic Antisense oligonucleotide
  modified_base 1..2: mod_base = OTHER; note = 5-methyl
  modified_base 5: mod_base = OTHER; note = 5-methyl
  modified_base 8: mod_base = OTHER; note = 5-methyl
  modified_base 20: mod_base = OTHER; note = 5-methyl
  modified_base 1..2: mod_base = OTHER; note = bicyclic nucleic acid (BNA)
  source 1..21: mol_type = other RNA
ccaacatcaaggaagatggca

SEQ ID NO: 5263 - RNA, 20 nt, synthetic construct
  misc_feature 1..20: note = Description of Artificial Sequence: Synthetic Antisense oligonucleotide
  modified_base 1..2: mod_base = OTHER; note = 5-methyl
  modified_base 5: mod_base = OTHER; note = 5-methyl
  modified_base 8: mod_base = OTHER; note = 5-methyl
  modified_base 20: mod_base = OTHER; note = 5-methyl
  modified_base 1..2: mod_base = OTHER; note = bicyclic nucleic acid (BNA)
  source 1..20: mol_type = other RNA
ccaacatcaaggaagatggc

SEQ ID NO: 5264 - RNA, 19 nt, synthetic construct
  misc_feature 1..19: note = Description of Artificial Sequence: Synthetic Antisense oligonucleotide
  modified_base 1..2: mod_base = OTHER; note = 5-methyl
  modified_base 5: mod_base = OTHER; note = 5-methyl
  modified_base 8: mod_base = OTHER; note = 5-methyl
  modified_base 1..2: mod_base = OTHER; note = bicyclic nucleic acid (BNA)
  source 1..19: mol_type = other RNA
ccaacatcaaggaagatgg

SEQ ID NO: 5265 - RNA, 18 nt, synthetic construct
  misc_feature 1..18: note = Description of Artificial Sequence: Synthetic Antisense oligonucleotide
  modified_base 1..2: mod_base = OTHER; note = 5-methyl
  modified_base 5: mod_base = OTHER; note = 5-methyl
  modified_base 8: mod_base = OTHER; note = 5-methyl
  modified_base 1..2: mod_base = OTHER; note = bicyclic nucleic acid (BNA)
  source 1..18: mol_type = other RNA
ccaacatcaaggaagatg

SEQ ID NO: 5266 - RNA, 17 nt, synthetic construct
  misc_feature 1..17: note = Description of Artificial Sequence: Synthetic Antisense oligonucleotide
  modified_base 1..2: mod_base = OTHER; note = 5-methyl
  modified_base 5: mod_base = OTHER; note = 5-methyl
  modified_base 8: mod_base = OTHER; note = 5-methyl
  modified_base 1..2: mod_base = OTHER; note = bicyclic nucleic acid (BNA)
  source 1..17: mol_type = other RNA
ccaacatcaaggaagat

SEQ ID NO: 5267 - RNA, 16 nt, synthetic construct
  misc_feature 1..16: note = Description of Artificial Sequence: Synthetic Antisense oligonucleotide
  modified_base 1..2: mod_base = OTHER; note = 5-methyl
  modified_base 5: mod_base = OTHER; note = 5-methyl
  modified_base 8: mod_base = OTHER; note = 5-methyl
  modified_base 1..2: mod_base = OTHER; note = bicyclic nucleic acid (BNA)
  source 1..16: mol_type = other RNA
ccaacatcaaggaaga

SEQ ID NO: 5268 - RNA, 15 nt, synthetic construct
  misc_feature 1..15: note = Description of Artificial Sequence: Synthetic Antisense oligonucleotide
  modified_base 1..2: mod_base = OTHER; note = 5-methyl
  modified_base 5: mod_base = OTHER; note = 5-methyl
  modified_base 8: mod_base = OTHER; note = 5-methyl
  modified_base 1..2: mod_base = OTHER; note = bicyclic nucleic acid (BNA)
  source 1..15: mol_type = other RNA
ccaacatcaaggaag

SEQ ID NO: 5269 - RNA, 27 nt, synthetic construct
  misc_feature 1..27: note = Description of Artificial Sequence: Synthetic Antisense oligonucleotide
  modified_base 1: mod_base = OTHER; note = 5-methyl
  modified_base 4: mod_base = OTHER; note = 5-methyl
  modified_base 7: mod_base = OTHER; note = 5-methyl
  modified_base 19: mod_base = OTHER; note = 5-methyl
  modified_base 24: mod_base = OTHER; note = 5-methyl
  modified_base 1..2: mod_base = OTHER; note = bicyclic nucleic acid (BNA)
  source 1..27: mol_type = other RNA
caacatcaaggaagatggcatttctag

SEQ ID NO: 5270 - RNA, 26 nt, synthetic construct
  misc_feature 1..26: note = Description of Artificial Sequence: Synthetic Antisense oligonucleotide
  modified_base 1: mod_base = OTHER; note = 5-methyl
  modified_base 4: mod_base = OTHER; note = 5-methyl
  modified_base 7: mod_base = OTHER; note = 5-methyl
  modified_base 19: mod_base = OTHER; note = 5-methyl
  modified_base 24: mod_base = OTHER; note = 5-methyl
  modified_base 1..2: mod_base = OTHER; note = bicyclic nucleic acid (BNA)
  source 1..26: mol_type = other RNA
caacatcaaggaagatggcatttcta

SEQ ID NO: 5271 - RNA, 25 nt, synthetic construct
  misc_feature 1..25: note = Description of Artificial Sequence: Synthetic Antisense oligonucleotide
  modified_base 1: mod_base = OTHER; note = 5-methyl
  modified_base 4: mod_base = OTHER; note = 5-methyl
  modified_base 7: mod_base = OTHER; note = 5-methyl
  modified_base 19: mod_base = OTHER; note = 5-methyl
  modified_base 24: mod_base = OTHER; note = 5-methyl
  modified_base 1..2: mod_base = OTHER; note = bicyclic nucleic acid (BNA)
  source 1..25: mol_type = other RNA
caacatcaaggaagatggcatttct

SEQ ID NO: 5272 - RNA, 24 nt, synthetic construct
  misc_feature 1..24: note = Description of Artificial Sequence: Synthetic Antisense oligonucleotide
  modified_base 1: mod_base = OTHER; note = 5-methyl
  modified_base 4: mod_base = OTHER; note = 5-methyl
  modified_base 7: mod_base = OTHER; note = 5-methyl
  modified_base 19: mod_base = OTHER; note = 5-methyl
  modified_base 24: mod_base = OTHER; note = 5-methyl
  modified_base 1..2: mod_base = OTHER; note = bicyclic nucleic acid (BNA)
  source 1..24: mol_type = other RNA
caacatcaaggaagatggcatttc

SEQ ID NO: 5273 - RNA, 23 nt, synthetic construct
  misc_feature 1..23: note = Description of Artificial Sequence: Synthetic Antisense oligonucleotide
  modified_base 1: mod_base = OTHER; note = 5-methyl
  modified_base 4: mod_base = OTHER; note = 5-methyl
  modified_base 7: mod_base = OTHER; note = 5-methyl
  modified_base 19: mod_base = OTHER; note = 5-methyl
  modified_base 1..2: mod_base = OTHER; note = bicyclic nucleic acid (BNA)
  source 1..23: mol_type = other RNA
caacatcaaggaagatggcattt

SEQ ID NO: 5274 - RNA, 22 nt, synthetic construct
  misc_feature 1..22: note = Description of Artificial Sequence: Synthetic Antisense oligonucleotide
  modified_base 1: mod_base = OTHER; note = 5-methyl
  modified_base 4: mod_base = OTHER; note = 5-methyl
  modified_base 7: mod_base = OTHER; note = 5-methyl
  modified_base 19: mod_base = OTHER; note = 5-methyl
  modified_base 1..2: mod_base = OTHER; note = bicyclic nucleic acid (BNA)
  source 1..22: mol_type = other RNA
caacatcaaggaagatggcatt

SEQ ID NO: 5275 - RNA, 21 nt, synthetic construct
  misc_feature 1..21: note = Description of Artificial Sequence: Synthetic Antisense oligonucleotide
  modified_base 1: mod_base = OTHER; note = 5-methyl
  modified_base 4: mod_base = OTHER; note = 5-methyl
  modified_base 7: mod_base = OTHER; note = 5-methyl
  modified_base 19: mod_base = OTHER; note = 5-methyl
  modified_base 1..2: mod_base = OTHER; note = bicyclic nucleic acid (BNA)
  source 1..21: mol_type = other RNA
caacatcaaggaagatggcat

SEQ ID NO: 5276 - RNA, 20 nt, synthetic construct
  misc_feature 1..20: note = Description of Artificial Sequence: Synthetic Antisense oligonucleotide
  modified_base 1: mod_base = OTHER; note = 5-methyl
  modified_base 4: mod_base = OTHER; note = 5-methyl
  modified_base 7: mod_base = OTHER; note = 5-methyl
  modified_base 19: mod_base = OTHER; note = 5-methyl
  modified_base 1..2: mod_base = OTHER; note = bicyclic nucleic acid (BNA)
  source 1..20: mol_type = other RNA
caacatcaaggaagatggca

SEQ ID NO: 5277 - RNA, 19 nt, synthetic construct
  misc_feature 1..19: note = Description of Artificial Sequence: Synthetic Antisense oligonucleotide
  modified_base 1: mod_base = OTHER; note = 5-methyl
  modified_base 4: mod_base = OTHER; note = 5-methyl
  modified_base 7: mod_base = OTHER; note = 5-methyl
  modified_base 19: mod_base = OTHER; note = 5-methyl
  modified_base 1..2: mod_base = OTHER; note = bicyclic nucleic acid (BNA)
  source 1..19: mol_type = other RNA
caacatcaaggaagatggc

SEQ ID NO: 5278 - RNA, 18 nt, synthetic construct
  misc_feature 1..18: note = Description of Artificial Sequence: Synthetic Antisense oligonucleotide
  modified_base 1: mod_base = OTHER; note = 5-methyl
  modified_base 4: mod_base = OTHER; note = 5-methyl
  modified_base 7: mod_base = OTHER; note = 5-methyl
  modified_base 1..2: mod_base = OTHER; note = bicyclic nucleic acid (BNA)
  source 1..18: mol_type = other RNA
caacatcaaggaagatgg

SEQ ID NO: 5279 - RNA, 17 nt, synthetic construct
  misc_feature 1..17: note = Description of Artificial Sequence: Synthetic Antisense oligonucleotide
  modified_base 1: mod_base = OTHER; note = 5-methyl
  modified_base 4: mod_base = OTHER; note = 5-methyl
  modified_base 7: mod_base = OTHER; note = 5-methyl
  modified_base 1..2: mod_base = OTHER; note = bicyclic nucleic acid (BNA)
  source 1..17: mol_type = other RNA
caacatcaaggaagatg

SEQ ID NO: 5280 - RNA, 16 nt, synthetic construct
  misc_feature 1..16: note = Description of Artificial Sequence: Synthetic Antisense oligonucleotide
  modified_base 1: mod_base = OTHER; note = 5-methyl
  modified_base 4: mod_base = OTHER; note = 5-methyl
  modified_base 7: mod_base = OTHER; note = 5-methyl
  modified_base 1..2: mod_base = OTHER; note = bicyclic nucleic acid (BNA)
  source 1..16: mol_type = other RNA
caacatcaaggaagat

SEQ ID NO: 5281 - RNA, 15 nt, synthetic construct
  misc_feature 1..15: note = Description of Artificial Sequence: Synthetic Antisense oligonucleotide
  modified_base 1: mod_base = OTHER; note = 5-methyl
  modified_base 4: mod_base = OTHER; note = 5-methyl
  modified_base 7: mod_base = OTHER; note = 5-methyl
  modified_base 1..2: mod_base = OTHER; note = bicyclic nucleic acid (BNA)
  source 1..15: mol_type = other RNA
caacatcaaggaaga

SEQ ID NO: 5282 - RNA, 14 nt, synthetic construct
  misc_feature 1..14: note = Description of Artificial Sequence: Synthetic Antisense oligonucleotide
  modified_base 1: mod_base = OTHER; note = 5-methyl
  modified_base 4: mod_base = OTHER; note = 5-methyl
  modified_base 7: mod_base = OTHER; note = 5-methyl
  modified_base 1..2: mod_base = OTHER; note = bicyclic nucleic acid (BNA)
  source 1..14: mol_type = other RNA
caacatcaaggaag

SEQ ID NO: 5283 - RNA, 26 nt, synthetic construct
  misc_feature 1..26: note = Description of Artificial Sequence: Synthetic Antisense oligonucleotide
  modified_base 1..2: mod_base = OTHER; note = bicyclic nucleic acid (BNA)
  modified_base 3: mod_base = OTHER; note = 5-methyl
  modified_base 6: mod_base = OTHER; note = 5-methyl
  modified_base 18: mod_base = OTHER; note = 5-methyl
  modified_base 23: mod_base = OTHER; note = 5-methyl
  source 1..26: mol_type = other RNA
aacatcaaggaagatggcatttctag

SEQ ID NO: 5284 - RNA, 25 nt, synthetic construct
  misc_feature 1..25: note = Description of Artificial Sequence: Synthetic Antisense oligonucleotide
  modified_base 1..2: mod_base = OTHER; note = bicyclic nucleic acid (BNA)
  modified_base 3: mod_base = OTHER; note = 5-methyl
  modified_base 6: mod_base = OTHER; note = 5-methyl
  modified_base 18: mod_base = OTHER; note = 5-methyl
  modified_base 23: mod_base = OTHER; note = 5-methyl
  source 1..25: mol_type = other RNA
aacatcaaggaagatggcatttcta

SEQ ID NO: 5285 - RNA, 24 nt, synthetic construct
  misc_feature 1..24: note = Description of Artificial Sequence: Synthetic Antisense oligonucleotide
  modified_base 1..2: mod_base = OTHER; note = bicyclic nucleic acid (BNA)
  modified_base 3: mod_base = OTHER; note = 5-methyl
  modified_base 6: mod_base = OTHER; note = 5-methyl
  modified_base 18: mod_base = OTHER; note = 5-methyl
  modified_base 23: mod_base = OTHER; note = 5-methyl
  source 1..24: mol_type = other RNA
aacatcaaggaagatggcatttct

SEQ ID NO: 5286 - RNA, 23 nt, synthetic construct
  misc_feature 1..23: note = Description of Artificial Sequence: Synthetic Antisense oligonucleotide
  modified_base 1..2: mod_base = OTHER; note = bicyclic nucleic acid (BNA)
  modified_base 3: mod_base = OTHER; note = 5-methyl
  modified_base 6: mod_base = OTHER; note = 5-methyl
  modified_base 18: mod_base = OTHER; note = 5-methyl
  modified_base 23: mod_base = OTHER; note = 5-methyl
  source 1..23: mol_type = other RNA
aacatcaaggaagatggcatttc

SEQ ID NO: 5287 - RNA, 22 nt, synthetic construct
  misc_feature 1..22: note = Description of Artificial Sequence: Synthetic Antisense oligonucleotide
  modified_base 1..2: mod_base = OTHER; note = bicyclic nucleic acid (BNA)
  modified_base 3: mod_base = OTHER; note = 5-methyl
  modified_base 6: mod_base = OTHER; note = 5-methyl
  modified_base 18: mod_base = OTHER; note = 5-methyl
  source 1..22: mol_type = other RNA
aacatcaaggaagatggcattt

SEQ ID NO: 5288 - RNA, 21 nt, synthetic construct
  misc_feature 1..21: note = Description of Artificial Sequence: Synthetic Antisense oligonucleotide
  modified_base 1..2: mod_base = OTHER; note = bicyclic nucleic acid (BNA)
  modified_base 3: mod_base = OTHER; note = 5-methyl
  modified_base 6: mod_base = OTHER; note = 5-methyl
  modified_base 18: mod_base = OTHER; note = 5-methyl
  source 1..21: mol_type = other RNA
aacatcaaggaagatggcatt

SEQ ID NO: 5289 - RNA, 20 nt, synthetic construct
  misc_feature 1..20: note = Description of Artificial Sequence: Synthetic Antisense oligonucleotide
  modified_base 1..2: mod_base = OTHER; note = bicyclic nucleic acid (BNA)
  modified_base 3: mod_base = OTHER; note = 5-methyl
  modified_base 6: mod_base = OTHER; note = 5-methyl
  modified_base 18: mod_base = OTHER; note = 5-methyl
  source 1..20: mol_type = other RNA
aacatcaaggaagatggcat

SEQ ID NO: 5290 - RNA, 19 nt, synthetic construct
  misc_feature 1..19: note = Description of Artificial Sequence: Synthetic Antisense oligonucleotide
  modified_base 1..2: mod_base = OTHER; note = bicyclic nucleic acid (BNA)
  modified_base 3: mod_base = OTHER; note = 5-methyl
  modified_base 6: mod_base = OTHER; note = 5-methyl
  modified_base 18: mod_base = OTHER; note = 5-methyl
  source 1..19: mol_type = other RNA
aacatcaaggaagatggca

SEQ ID NO: 5291 - RNA, 18 nt, synthetic construct
  misc_feature 1..18: note = Description of Artificial Sequence: Synthetic Antisense oligonucleotide
  modified_base 1..2: mod_base = OTHER; note = bicyclic nucleic acid (BNA)
  modified_base 3: mod_base = OTHER; note = 5-methyl
  modified_base 6: mod_base = OTHER; note = 5-methyl
  modified_base 18: mod_base = OTHER; note = 5-methyl
  source 1..18: mol_type = other RNA
aacatcaaggaagatggc

SEQ ID NO: 5292 - RNA, 17 nt, synthetic construct
  misc_feature 1..17: note = Description of Artificial Sequence: Synthetic Antisense oligonucleotide
  modified_base 1..2: mod_base = OTHER; note = bicyclic nucleic acid (BNA)
  modified_base 3: mod_base = OTHER; note = 5-methyl
  modified_base 6: mod_base = OTHER; note = 5-methyl
  source 1..17: mol_type = other RNA
aacatcaaggaagatgg

SEQ ID NO: 5293 - RNA, 16 nt, synthetic construct
  misc_feature 1..16: note = Description of Artificial Sequence: Synthetic Antisense oligonucleotide
  modified_base 1..2: mod_base = OTHER; note = bicyclic nucleic acid (BNA)
  modified_base 3: mod_base = OTHER; note = 5-methyl
  modified_base 6: mod_base = OTHER; note = 5-methyl
  source 1..16: mol_type = other RNA
aacatcaaggaagatg

SEQ ID NO: 5294 - RNA, 15 nt, synthetic construct
  misc_feature 1..15: note = Description of Artificial Sequence: Synthetic Antisense oligonucleotide
  modified_base 1..2: mod_base = OTHER; note = bicyclic nucleic acid (BNA)
  modified_base 3: mod_base = OTHER; note = 5-methyl
  modified_base 6: mod_base = OTHER; note = 5-methyl
  source 1..15: mol_type = other RNA
aacatcaaggaagat

SEQ ID NO: 5295 - RNA, 14 nt, synthetic construct
  misc_feature 1..14: note = Description of Artificial Sequence: Synthetic Antisense oligonucleotide
  modified_base 1..2: mod_base = OTHER; note = bicyclic nucleic acid (BNA)
  modified_base 3: mod_base = OTHER; note = 5-methyl
  modified_base 6: mod_base = OTHER; note = 5-methyl
  source 1..14: mol_type = other RNA
aacatcaaggaaga

SEQ ID NO: 5296 - RNA, 13 nt, synthetic construct
  misc_feature 1..13: note = Description of Artificial Sequence: Synthetic Antisense oligonucleotide
  modified_base 1..2: mod_base = OTHER; note = bicyclic nucleic acid (BNA)
  modified_base 3: mod_base = OTHER; note = 5-methyl
  modified_base 6: mod_base = OTHER; note = 5-methyl
  source 1..13: mol_type = other RNA
aacatcaaggaag

SEQ ID NO: 5297 - RNA, 25 nt, synthetic construct
  misc_feature 1..25: note = Description of Artificial Sequence: Synthetic Antisense oligonucleotide
  modified_base 1..2: mod_base = OTHER; note = bicyclic nucleic acid (BNA)
  modified_base 2: mod_base = OTHER; note = 5-methyl
  modified_base 5: mod_base = OTHER; note = 5-methyl
  modified_base 17: mod_base = OTHER; note = 5-methyl
  modified_base 22: mod_base = OTHER; note = 5-methyl
  source 1..25: mol_type = other RNA
acatcaaggaagatggcatttctag

SEQ ID NO: 5298 - RNA, 24 nt, synthetic construct
  misc_feature 1..24: note = Description of Artificial Sequence: Synthetic Antisense oligonucleotide
  modified_base 1..2: mod_base = OTHER; note = bicyclic nucleic acid (BNA)
  modified_base 2: mod_base = OTHER; note = 5-methyl
  modified_base 5: mod_base = OTHER; note = 5-methyl
  modified_base 17: mod_base = OTHER; note = 5-methyl
  modified_base 22: mod_base = OTHER; note = 5-methyl
  source 1..24: mol_type = other RNA
acatcaaggaagatggcatttcta

SEQ ID NO: 5299 - RNA, 23 nt, synthetic construct
  misc_feature 1..23: note = Description of Artificial Sequence: Synthetic Antisense oligonucleotide
  modified_base 1..2: mod_base = OTHER; note = bicyclic nucleic acid (BNA)
  modified_base 2: mod_base = OTHER; note = 5-methyl
  modified_base 5: mod_base = OTHER; note = 5-methyl
  modified_base 17: mod_base = OTHER; note = 5-methyl
  modified_base 22: mod_base = OTHER; note = 5-methyl
  source 1..23: mol_type = other RNA
acatcaaggaagatggcatttct

SEQ ID NO: 5300 - RNA, 22 nt, synthetic construct
  misc_feature 1..22: note = Description of Artificial Sequence: Synthetic Antisense oligonucleotide
  modified_base 1..2: mod_base = OTHER; note = bicyclic nucleic acid (BNA)
  modified_base 2: mod_base = OTHER; note = 5-methyl
  modified_base 5: mod_base = OTHER; note = 5-methyl
  modified_base 17: mod_base = OTHER; note = 5-methyl
  modified_base 22: mod_base = OTHER; note = 5-methyl
  source 1..22: mol_type = other RNA
acatcaaggaagatggcatttc

SEQ ID NO: 5301 - RNA, 21 nt, synthetic construct
  misc_feature 1..21: note = Description of Artificial Sequence: Synthetic Antisense oligonucleotide
  modified_base 1..2: mod_base = OTHER; note = bicyclic nucleic acid (BNA)
  modified_base 2: mod_base = OTHER; note = 5-methyl
  modified_base 5: mod_base = OTHER; note = 5-methyl
  modified_base 17: mod_base = OTHER; note = 5-methyl
  source 1..21: mol_type = other RNA
acatcaaggaagatggcattt

SEQ ID NO: 5302 - RNA, 20 nt, synthetic construct
  misc_feature 1..20: note = Description of Artificial Sequence: Synthetic Antisense oligonucleotide
  modified_base 1..2: mod_base = OTHER; note = bicyclic nucleic acid (BNA)
  modified_base 2: mod_base = OTHER; note = 5-methyl
  modified_base 5: mod_base = OTHER; note = 5-methyl
  modified_base 17: mod_base = OTHER; note = 5-methyl
  source 1..20: mol_type = other RNA
acatcaaggaagatggcatt

SEQ ID NO: 5303 - RNA, 19 nt, synthetic construct
  misc_feature 1..19: note = Description of Artificial Sequence: Synthetic Antisense oligonucleotide
  modified_base 1..2: mod_base = OTHER; note = bicyclic nucleic acid (BNA)
  modified_base 2: mod_base = OTHER; note = 5-methyl
  modified_base 5: mod_base = OTHER; note = 5-methyl
  modified_base 17: mod_base = OTHER; note = 5-methyl
  source 1..19: mol_type = other RNA
acatcaaggaagatggcat

SEQ ID NO: 5304 - RNA, 18 nt, synthetic construct
  misc_feature 1..18: note = Description of Artificial Sequence: Synthetic Antisense oligonucleotide
  modified_base 1..2: mod_base = OTHER; note = bicyclic nucleic acid (BNA)
  modified_base 2: mod_base = OTHER; note = 5-methyl
  modified_base 5: mod_base = OTHER; note = 5-methyl
  modified_base 17: mod_base = OTHER; note = 5-methyl
  source 1..18: mol_type = other RNA
acatcaaggaagatggca

SEQ ID NO: 5305 - RNA, 17 nt, synthetic construct
  misc_feature 1..17: note = Description of Artificial Sequence: Synthetic Antisense oligonucleotide
  modified_base 1..2: mod_base = OTHER; note = bicyclic nucleic acid (BNA)
  modified_base 2: mod_base = OTHER; note = 5-methyl
  modified_base 5: mod_base = OTHER; note = 5-methyl
  modified_base 17: mod_base = OTHER; note = 5-methyl
  source 1..17: mol_type = other RNA
acatcaaggaagatggc

SEQ ID NO: 5306 - RNA, 16 nt, synthetic construct
  misc_feature 1..16: note = Description of Artificial Sequence: Synthetic Antisense oligonucleotide
  modified_base 1..2: mod_base = OTHER; note = bicyclic nucleic acid (BNA)
  modified_base 2: mod_base = OTHER; note = 5-methyl
  modified_base 5: mod_base = OTHER; note = 5-methyl
  source 1..16: mol_type = other RNA
acatcaaggaagatgg

SEQ ID NO: 5307 - RNA, 15 nt, synthetic construct
  misc_feature 1..15: note = Description of Artificial Sequence: Synthetic Antisense oligonucleotide
  modified_base 1..2: mod_base = OTHER; note = bicyclic nucleic acid (BNA)
  modified_base 2: mod_base = OTHER; note = 5-methyl
  modified_base 5: mod_base = OTHER; note = 5-methyl
  source 1..15: mol_type = other RNA
acatcaaggaagatg

SEQ ID NO: 5308 - RNA, 14 nt, synthetic construct
  misc_feature 1..14: note = Description of Artificial Sequence: Synthetic Antisense oligonucleotide
  modified_base 1..2: mod_base = OTHER; note = bicyclic nucleic acid (BNA)
  modified_base 2: mod_base = OTHER; note = 5-methyl
  modified_base 5: mod_base = OTHER; note = 5-methyl
  source 1..14: mol_type = other RNA
acatcaaggaagat

SEQ ID NO: 5309 - RNA, 13 nt, synthetic construct
  misc_feature 1..13: note = Description of Artificial Sequence: Synthetic Antisense oligonucleotide
  modified_base 1..2: mod_base = OTHER; note = bicyclic nucleic acid (BNA)
  modified_base 2: mod_base = OTHER; note = 5-methyl
  modified_base 5: mod_base = OTHER; note = 5-methyl
  source 1..13: mol_type = other RNA
acatcaaggaaga

SEQ ID NO: 5310 - RNA, 12 nt, synthetic construct
  misc_feature 1..12: note = Description of Artificial Sequence: Synthetic Antisense oligonucleotide
  modified_base 1..2: mod_base = OTHER; note = bicyclic nucleic acid (BNA)
  modified_base 2: mod_base = OTHER; note = 5-methyl
  modified_base 5: mod_base = OTHER; note = 5-methyl
  source 1..12: mol_type = other RNA
acatcaaggaag

SEQ ID NO: 5311 - RNA, 24 nt, synthetic construct
  misc_feature 1..24: note = Description of Artificial Sequence: Synthetic Antisense oligonucleotide
  modified_base 1: mod_base = OTHER; note = 5-methyl
  modified_base 4: mod_base = OTHER; note = 5-methyl
  modified_base 16: mod_base = OTHER; note = 5-methyl
  modified_base 21: mod_base = OTHER; note = 5-methyl
  modified_base 1..2: mod_base = OTHER; note = bicyclic nucleic acid (BNA)
  source 1..24: mol_type = other RNA
catcaaggaagatggcatttctag

SEQ ID NO: 5312 - RNA, 23 nt, synthetic construct
  misc_feature 1..23: note = Description of Artificial Sequence: Synthetic Antisense oligonucleotide
  modified_base 1: mod_base = OTHER; note = 5-methyl
  modified_base 4: mod_base = OTHER; note = 5-methyl
  modified_base 16: mod_base = OTHER; note = 5-methyl
  modified_base 21: mod_base = OTHER; note = 5-methyl
  modified_base 1..2: mod_base = OTHER; note = bicyclic nucleic acid (BNA)
  source 1..23: mol_type = other RNA
catcaaggaagatggcatttcta

SEQ ID NO: 5313 - RNA, 22 nt, synthetic construct
  misc_feature 1..22: note = Description of Artificial Sequence: Synthetic Antisense oligonucleotide
  modified_base 1: mod_base = OTHER; note = 5-methyl
  modified_base 4: mod_base = OTHER; note = 5-methyl
  modified_base 16: mod_base = OTHER; note = 5-methyl
  modified_base 21: mod_base = OTHER; note = 5-methyl
  modified_base 1..2: mod_base = OTHER; note = bicyclic nucleic acid (BNA)
  source 1..22: mol_type = other RNA
catcaaggaagatggcatttct

SEQ ID NO: 5314 - RNA, 21 nt, synthetic construct
  misc_feature 1..21: note = Description of Artificial Sequence: Synthetic Antisense oligonucleotide
  modified_base 1: mod_base = OTHER; note = 5-methyl
  modified_base 4: mod_base = OTHER; note = 5-methyl
  modified_base 16: mod_base = OTHER; note = 5-methyl
  modified_base 21: mod_base = OTHER; note = 5-methyl
  modified_base 1..2: mod_base = OTHER; note = bicyclic nucleic acid (BNA)
  source 1..21: mol_type = other RNA
catcaaggaagatggcatttc

SEQ ID NO: 5315 - RNA, 20 nt, synthetic construct
  misc_feature 1..20: note = Description of Artificial Sequence: Synthetic Antisense oligonucleotide
  modified_base 1: mod_base = OTHER; note = 5-methyl
  modified_base 4: mod_base = OTHER; note = 5-methyl
  modified_base 16: mod_base = OTHER; note = 5-methyl
  modified_base 1..2: mod_base = OTHER; note = bicyclic nucleic acid (BNA)
  source 1..20: mol_type = other RNA
catcaaggaagatggcattt

SEQ ID NO: 5316 - RNA, 19 nt, synthetic construct
  misc_feature 1..19: note = Description of Artificial Sequence: Synthetic Antisense oligonucleotide
  modified_base 1: mod_base = OTHER; note = 5-methyl
  modified_base 4: mod_base = OTHER; note = 5-methyl
  modified_base 16: mod_base = OTHER; note = 5-methyl
  modified_base 1..2: mod_base = OTHER; note = bicyclic nucleic acid (BNA)
  source 1..19: mol_type = other RNA
catcaaggaagatggcatt

SEQ ID NO: 5317 - RNA, 18 nt, synthetic construct
  misc_feature 1..18: note = Description of Artificial Sequence: Synthetic Antisense oligonucleotide
  modified_base 1: mod_base = OTHER; note = 5-methyl
  modified_base 4: mod_base = OTHER; note = 5-methyl
  modified_base 16: mod_base = OTHER; note = 5-methyl
  modified_base 1..2: mod_base = OTHER; note = bicyclic nucleic acid (BNA)
  source 1..18: mol_type = other RNA
catcaaggaagatggcat

SEQ ID NO: 5318 - RNA, 17 nt, synthetic construct
  misc_feature 1..17: note = Description of Artificial Sequence: Synthetic Antisense oligonucleotide
  modified_base 1: mod_base = OTHER; note = 5-methyl
  modified_base 4: mod_base = OTHER; note = 5-methyl
  modified_base 16: mod_base = OTHER; note = 5-methyl
  modified_base 1..2: mod_base = OTHER; note = bicyclic nucleic acid (BNA)
  source 1..17: mol_type = other RNA
catcaaggaagatggca

SEQ ID NO: 5319 - RNA, 16 nt, synthetic construct
  misc_feature 1..16: note = Description of Artificial Sequence: Synthetic Antisense oligonucleotide
  modified_base 1: mod_base = OTHER; note = 5-methyl
  modified_base 4: mod_base = OTHER; note = 5-methyl
  modified_base 16: mod_base = OTHER; note = 5-methyl
  modified_base 1..2: mod_base = OTHER; note = bicyclic nucleic acid (BNA)
  source 1..16: mol_type = other RNA
catcaaggaagatggc

SEQ ID NO: 5320 - RNA, 15 nt, synthetic construct
  misc_feature 1..15: note = Description of Artificial Sequence: Synthetic Antisense oligonucleotide
  modified_base 1: mod_base = OTHER; note = 5-methyl
  modified_base 4: mod_base = OTHER; note = 5-methyl
  modified_base 1..2: mod_base = OTHER; note = bicyclic nucleic acid (BNA)
  source 1..15: mol_type = other RNA
catcaaggaagatgg

SEQ ID NO: 5321 - RNA, 14 nt, synthetic construct
  misc_feature 1..14: note = Description of Artificial Sequence: Synthetic Antisense oligonucleotide
  modified_base 1: mod_base = OTHER; note = 5-methyl
  modified_base 4: mod_base = OTHER; note = 5-methyl
  modified_base 1..2: mod_base = OTHER; note = bicyclic nucleic acid (BNA)
  source 1..14: mol_type = other RNA
catcaaggaagatg

SEQ ID NO: 5322 - RNA, 13 nt, synthetic construct
  misc_feature 1..13: note = Description of Artificial Sequence: Synthetic Antisense oligonucleotide
  modified_base 1: mod_base = OTHER; note = 5-methyl
  modified_base 4: mod_base = OTHER; note = 5-methyl
  modified_base 1..2: mod_base = OTHER; note = bicyclic nucleic acid (BNA)
  source 1..13: mol_type = other RNA
catcaaggaagat

SEQ ID NO: 5323 - RNA, 12 nt, synthetic construct
  misc_feature 1..12: note = Description of Artificial Sequence: Synthetic Antisense oligonucleotide
  modified_base 1: mod_base = OTHER; note = 5-methyl
  modified_base 4: mod_base = OTHER; note = 5-methyl
  modified_base 1..2: mod_base = OTHER; note = bicyclic nucleic acid (BNA)
  source 1..12: mol_type = other RNA
catcaaggaaga

SEQ ID NO: 5324 - RNA, 11 nt, synthetic construct
  misc_feature 1..11: note = Description of Artificial Sequence: Synthetic Antisense oligonucleotide
  modified_base 1: mod_base = OTHER; note = 5-methyl
  modified_base 4: mod_base = OTHER; note = 5-methyl
  modified_base 1..2: mod_base = OTHER; note = bicyclic nucleic acid (BNA)
  source 1..11: mol_type = other RNA
catcaaggaag

SEQ ID NO: 5325 - DNA, 23 bp, synthetic construct
  misc_feature 1..23: note = Description of Artificial Sequence: Synthetic Antisense oligonucleotide
  misc_feature 1..23: note = Original Sequence: atcaaggaagauggcauuucuag
  modified_base 1..2: mod_base = OTHER; note = bicyclic nucleic acid (BNA)
  modified_base 3: mod_base = OTHER; note = 5-methyl
  modified_base 15: mod_base = OTHER; note = 5-methyl
  modified_base 20: mod_base = OTHER; note = 5-methyl
  source 1..23: mol_type = other DNA
  modified_base 12: mod_base = OTHER; note = Uracil
  modified_base 17: mod_base = OTHER; note = Uracil
  modified_base 18: mod_base = OTHER; note = Uracil
  modified_base 19: mod_base = OTHER; note = Uracil
  modified_base 21: mod_base = OTHER; note = Uracil
atcaaggaagatggcatttctag

SEQ ID NO: 5326 - DNA, 22 bp, synthetic construct
  misc_feature 1..22: note = Description of Artificial Sequence: Synthetic Antisense oligonucleotide
  misc_feature 1..22: note = Original Sequence: atcaaggaagauggcauuucua
  modified_base 1..2: mod_base = OTHER; note = bicyclic nucleic acid (BNA)
  modified_base 3: mod_base = OTHER; note = 5-methyl
  modified_base 15: mod_base = OTHER; note = 5-methyl
  modified_base 20: mod_base = OTHER; note = 5-methyl
  source 1..22: mol_type = other DNA
  modified_base 12: mod_base = OTHER; note = Uracil
  modified_base 17: mod_base = OTHER; note = Uracil
  modified_base 18: mod_base = OTHER; note = Uracil
  modified_base 19: mod_base = OTHER; note = Uracil
  modified_base 21: mod_base = OTHER; note = Uracil
atcaaggaagatggcatttcta

SEQ ID NO: 5327 - DNA, 21 bp, synthetic construct
  misc_feature 1..21: note = Description of Artificial Sequence: Synthetic Antisense oligonucleotide
  misc_feature 1..21: note = Original Sequence: atcaaggaagauggcauuucu
  modified_base 1..2: mod_base = OTHER; note = bicyclic nucleic acid (BNA)
  modified_base 3: mod_base = OTHER; note = 5-methyl
  modified_base 15: mod_base = OTHER; note = 5-methyl
  modified_base 20: mod_base = OTHER; note = 5-methyl
  source 1..21: mol_type = other DNA
  modified_base 12: mod_base = OTHER; note = Uracil
  modified_base 17: mod_base = OTHER; note = Uracil
  modified_base 18: mod_base = OTHER; note = Uracil
  modified_base 19: mod_base = OTHER; note = Uracil
  modified_base 21: mod_base = OTHER; note = Uracil
atcaaggaagatggcatttct

SEQ ID NO: 5328 - DNA, 20 bp, synthetic construct
  misc_feature 1..20: note = Description of Artificial Sequence: Synthetic Antisense oligonucleotide
  misc_feature 1..20: note = Original Sequence: atcaaggaagauggcauuuc
  modified_base 1..2: mod_base = OTHER; note = bicyclic nucleic acid (BNA)
  modified_base 3: mod_base = OTHER; note = 5-methyl
  modified_base 15: mod_base = OTHER; note = 5-methyl
  modified_base 20: mod_base = OTHER; note = 5-methyl
  source 1..20: mol_type = other DNA
  modified_base 12: mod_base = OTHER; note = Uracil
  modified_base 17: mod_base = OTHER; note = Uracil
  modified_base 18: mod_base = OTHER; note = Uracil
  modified_base 19: mod_base = OTHER; note = Uracil
atcaaggaagatggcatttc

SEQ ID NO: 5329 - DNA, 19 bp, synthetic construct
  misc_feature 1..19: note = Description of Artificial Sequence: Synthetic Antisense oligonucleotide
  misc_feature 1..19: note = Original Sequence: atcaaggaagauggcauuu
  modified_base 1..2: mod_base = OTHER; note = bicyclic nucleic acid (BNA)
  modified_base 3: mod_base = OTHER; note = 5-methyl
  modified_base 15: mod_base = OTHER; note = 5-methyl
  source 1..19: mol_type = other DNA
  modified_base 12: mod_base = OTHER; note = Uracil
  modified_base 17: mod_base = OTHER; note = Uracil
  modified_base 18: mod_base = OTHER; note = Uracil
  modified_base 19: mod_base = OTHER; note = Uracil
atcaaggaagatggcattt

SEQ ID NO: 5330 - DNA, 18 bp, synthetic construct
  misc_feature 1..18: note = Description of Artificial Sequence: Synthetic Antisense oligonucleotide
  misc_feature 1..18: note = Original Sequence: atcaaggaagauggcauu
  modified_base 1..2: mod_base = OTHER; note = bicyclic nucleic acid (BNA)
  modified_base 3: mod_base = OTHER; note = 5-methyl
  modified_base 15: mod_base = OTHER; note = 5-methyl
  source 1..18: mol_type = other DNA
  modified_base 12: mod_base = OTHER; note = Uracil
  modified_base 17: mod_base = OTHER; note = Uracil
  modified_base 18: mod_base = OTHER; note = Uracil
atcaaggaagatggcatt

SEQ ID NO: 5331 - DNA, 17 bp, synthetic construct
  misc_feature 1..17: note = Description of Artificial Sequence: Synthetic Antisense oligonucleotide
  misc_feature 1..17: note = Original Sequence: atcaaggaagauggcau
  modified_base 1..2: mod_base = OTHER; note = bicyclic nucleic acid (BNA)
  modified_base 3: mod_base = OTHER; note = 5-methyl
  modified_base 15: mod_base = OTHER; note = 5-methyl
  source 1..17: mol_type = other DNA
  modified_base 12: mod_base = OTHER; note = Uracil
  modified_base 17: mod_base = OTHER; note = Uracil
atcaaggaagatggcat

SEQ ID NO: 5332 - DNA, 16 bp, synthetic construct
  misc_feature 1..16: note = Description of Artificial Sequence: Synthetic Antisense oligonucleotide
  misc_feature 1..16: note = Original Sequence: atcaaggaagauggca
  modified_base 1..2: mod_base = OTHER; note = bicyclic nucleic acid (BNA)
  modified_base 3: mod_base = OTHER; note = 5-methyl
  modified_base 15: mod_base = OTHER; note = 5-methyl
  source 1..16: mol_type = other DNA
  modified_base 12: mod_base = OTHER; note = Uracil
atcaaggaagatggca

SEQ ID NO: 5333 - DNA, 15 bp, synthetic construct
  misc_feature 1..15: note = Description of Artificial Sequence: Synthetic Antisense oligonucleotide
  misc_feature 1..15: note = Original Sequence: atcaaggaagauggc
  modified_base 1..2: mod_base = OTHER; note = bicyclic nucleic acid (BNA)
  modified_base 3: mod_base = OTHER; note = 5-methyl
  modified_base 15: mod_base = OTHER; note = 5-methyl
  source 1..15: mol_type = other DNA
  modified_base 12: mod_base = OTHER; note = Uracil
atcaaggaagatggc

SEQ ID NO: 5334 - DNA, 14 bp, synthetic construct
  misc_feature 1..14: note = Description of Artificial Sequence: Synthetic Antisense oligonucleotide
  misc_feature 1..14: note = Original Sequence: atcaaggaagaugg
  modified_base 1..2: mod_base = OTHER; note = bicyclic nucleic acid (BNA)
  modified_base 3: mod_base = OTHER; note = 5-methyl
  source 1..14: mol_type = other DNA
  modified_base 12: mod_base = OTHER; note = Uracil
atcaaggaagatgg

SEQ ID NO: 5335 - DNA, 13 bp, synthetic construct
  misc_feature 1..13: note = Description of Artificial Sequence: Synthetic Antisense oligonucleotide
  misc_feature 1..13: note = Original Sequence: atcaaggaagaug
  modified_base 1..2: mod_base = OTHER; note = bicyclic nucleic acid (BNA)
  modified_base 3: mod_base = OTHER; note = 5-methyl
  source 1..13: mol_type = other DNA
  modified_base 12: mod_base = OTHER; note = Uracil
atcaaggaagatg

SEQ ID NO: 5336 - DNA, 12 bp, synthetic construct
  misc_feature 1..12: note = Description of Artificial Sequence: Synthetic Antisense oligonucleotide
  misc_feature 1..12: note = Original Sequence: atcaaggaagau
  modified_base 1..2: mod_base = OTHER; note = bicyclic nucleic acid (BNA)
  modified_base 3: mod_base = OTHER; note = 5-methyl
  source 1..12: mol_type = other DNA
  modified_base 12: mod_base = OTHER; note = Uracil
atcaaggaagat

SEQ ID NO: 5337 - DNA, 11 bp, synthetic construct
  misc_feature 1..11: note = Description of Artificial Sequence: Synthetic Antisense oligonucleotide
  modified_base 1..2: mod_base = OTHER; note = bicyclic nucleic acid (BNA)
  modified_base 3: mod_base = OTHER; note = 5-methyl
  source 1..11: mol_type = other DNA
atcaaggaaga

SEQ ID NO: 5338 - DNA, 10 bp, synthetic construct
  misc_feature 1..10: note = Description of Artificial Sequence: Synthetic Antisense oligonucleotide
  modified_base 1..2: mod_base = OTHER; note = bicyclic nucleic acid (BNA)
  modified_base 3: mod_base = OTHER; note = 5-methyl
  source 1..10: mol_type = other DNA
atcaaggaag

SEQ ID NO: 5339 - RNA, 18 nt, synthetic construct
  misc_feature 1..18: note = Description of Artificial Sequence: Synthetic Antisense oligonucleotide
  modified_base 9: mod_base = OTHER; note = 5-methyl
  modified_base 13..14: mod_base = OTHER; note = 5-methyl
  modified_base 18: mod_base = OTHER; note = 5-methyl
  modified_base 17..18: mod_base = OTHER; note = bicyclic nucleic acid (BNA)
  source 1..18: mol_type = other RNA
ggtaagttctgtccaagc

SEQ ID NO: 5340 - RNA, 18 nt, synthetic construct
  misc_feature 1..18: note = Description of Artificial Sequence: Synthetic Antisense oligonucleotide
  modified_base 8: mod_base = OTHER; note = 5-methyl
  modified_base 12..13: mod_base = OTHER; note = 5-methyl
  modified_base 17..18: mod_base = OTHER; note = 5-methyl
  modified_base 17..18: mod_base = OTHER; note = bicyclic nucleic acid (BNA)
  source 1..18: mol_type = other RNA
gtaagttctgtccaagcc

SEQ ID NO: 5341 - RNA, 18 nt, synthetic construct
  misc_feature 1..18: note = Description of Artificial Sequence: Synthetic Antisense oligonucleotide
  modified_base 4: mod_base = OTHER; note = 5-methyl
  modified_base 13: mod_base = OTHER; note = 5-methyl
  modified_base 17..18: mod_base = OTHER; note = 5-methyl
  modified_base 17..18: mod_base = OTHER; note = bicyclic nucleic acid (BNA)
  source 1..18: mol_type = other RNA
agtcggtaagttctgtcc

SEQ ID NO: 5342 - RNA, 18 nt, synthetic construct
  misc_feature 1..18: note = Description of Artificial Sequence: Synthetic Antisense oligonucleotide
  modified_base 1: mod_base = OTHER; note = 5-methyl
  modified_base 5..6: mod_base = OTHER; note = 5-methyl
  modified_base 10..12: mod_base = OTHER; note = 5-methyl
  modified_base 17..18: mod_base = OTHER; note = bicyclic nucleic acid (BNA)
  source 1..18: mol_type = other RNA
ctgtccaagcccggttga

SEQ ID NO: 5343 - RNA, 15 nt, synthetic construct
  misc_feature 1..15: note = Description of Artificial Sequence: Synthetic Antisense oligonucleotide
  modified_base 7: mod_base = OTHER; note = 5-methyl
  modified_base 11..12: mod_base = OTHER; note = 5-methyl
  modified_base 14..15: mod_base = OTHER; note = bicyclic nucleic acid (BNA)
  source 1..15: mol_type = other RNA
taagttctgtccaag

SEQ ID NO: 5344 - RNA, 20 nt, synthetic construct
  misc_feature 1..20: note = Description of Artificial Sequence: Synthetic Antisense oligonucleotide
  modified_base 3: mod_base = OTHER; note = 5-methyl
  modified_base 7..8: mod_base = OTHER; note = 5-methyl
  modified_base 12..14: mod_base = OTHER; note = 5-methyl
  modified_base 19..20: mod_base = OTHER; note = bicyclic nucleic acid (BNA)
  source 1..20: mol_type = other RNA
ttctgtccaagcccggttga

SEQ ID NO: 5345 - DNA, 19 bp, synthetic construct
  misc_feature 1..19: note = Description of Artificial Sequence: Synthetic Antisense oligonucleotide
  misc_feature 1..19: note = Original Sequence: uucuguccaagcccggutg
  modified_base 3: mod_base = OTHER; note = 5-methyl
  modified_base 7..8: mod_base = OTHER; note = 5-methyl
  modified_base 12..14: mod_base = OTHER; note = 5-methyl
  modified_base 18..19: mod_base = OTHER; note = bicyclic nucleic acid (BNA)
  source 1..19: mol_type = other DNA
  modified_base 1: mod_base = OTHER; note = Uracil
  modified_base 2: mod_base = OTHER; note = Uracil
  modified_base 4: mod_base = OTHER; note = Uracil
  modified_base 6: mod_base = OTHER; note = Uracil
  modified_base 17: mod_base = OTHER; note = Uracil
ttctgtccaagcccggttg

SEQ ID NO: 5346 - DNA, 18 bp, synthetic construct
  misc_feature 1..18: note = Description of Artificial Sequence: Synthetic Antisense oligonucleotide
  misc_feature 1..18: note = Original Sequence: uucuguccaagcccggtt
  modified_base 3: mod_base = OTHER; note = 5-methyl
  modified_base 7..8: mod_base = OTHER; note = 5-methyl
  modified_base 12..14: mod_base = OTHER; note = 5-methyl
  modified_base 17..18: mod_base = OTHER; note = bicyclic nucleic acid (BNA)
  source 1..18: mol_type = other DNA
  modified_base 1: mod_base = OTHER; note = Uracil
  modified_base 2: mod_base = OTHER; note = Uracil
  modified_base 4: mod_base = OTHER; note = Uracil
  modified_base 6: mod_base = OTHER; note = Uracil
ttctgtccaagcccggtt

SEQ ID NO: 5347 - DNA, 17 bp, synthetic construct
  misc_feature 1..17: note = Description of Artificial Sequence: Synthetic Antisense oligonucleotide
  misc_feature 1..17: note = Original Sequence: uucuguccaagcccggt
  modified_base 3: mod_base = OTHER; note = 5-methyl
  modified_base 7..8: mod_base = OTHER; note = 5-methyl
  modified_base 12..14: mod_base = OTHER; note = 5-methyl
  modified_base 16..17: mod_base = OTHER; note = bicyclic nucleic acid (BNA)
  source 1..17: mol_type = other DNA
  modified_base 1: mod_base = OTHER; note = Uracil
  modified_base 2: mod_base = OTHER; note = Uracil
  modified_base 4: mod_base = OTHER; note = Uracil
  modified_base 6: mod_base = OTHER; note = Uracil
ttctgtccaagcccggt

SEQ ID NO: 5348 - RNA, 16 nt, synthetic construct
  misc_feature 1..16: note = Description of Artificial Sequence: Synthetic Antisense oligonucleotide
  modified_base 3: mod_base = OTHER; note = 5-methyl
  modified_base 7..8: mod_base = OTHER; note = 5-methyl
  modified_base 12..14: mod_base = OTHER; note = 5-methyl
  modified_base 15..16: mod_base = OTHER; note = bicyclic nucleic acid (BNA)
  source 1..16: mol_type = other RNA
ttctgtccaagcccgg

SEQ ID NO: 5349 - RNA, 15 nt, synthetic construct
  misc_feature 1..15: note = Description of Artificial Sequence: Synthetic Antisense oligonucleotide
  modified_base 3: mod_base = OTHER; note = 5-methyl
  modified_base 7..8: mod_base = OTHER; note = 5-methyl
  modified_base 12..14: mod_base = OTHER; note = 5-methyl
  modified_base 14..15: mod_base = OTHER; note = bicyclic nucleic acid (BNA)
  source 1..15: mol_type = other RNA
ttctgtccaagcccg

SEQ ID NO: 5350 - RNA, 14 nt, synthetic construct
  misc_feature 1..14: note = Description of Artificial Sequence: Synthetic Antisense oligonucleotide
  modified_base 3: mod_base = OTHER; note = 5-methyl
  modified_base 7..8: mod_base = OTHER; note = 5-methyl
  modified_base 12..14: mod_base = OTHER; note = 5-methyl
  modified_base 13..14: mod_base = OTHER; note = bicyclic nucleic acid (BNA)
  source 1..14: mol_type = other RNA
ttctgtccaagccc

SEQ ID NO: 5351 - RNA, 13 nt, synthetic construct
  misc_feature 1..13: note = Description of Artificial Sequence: Synthetic Antisense oligonucleotide
  modified_base 3: mod_base = OTHER; note = 5-methyl
  modified_base 7..8: mod_base = OTHER; note = 5-methyl
  modified_base 12..13: mod_base = OTHER; note = 5-methyl
  modified_base 12..13: mod_base = OTHER; note = bicyclic nucleic acid (BNA)
  source 1..13: mol_type = other RNA
ttctgtccaagcc

SEQ ID NO: 5352 - RNA, 12 nt, synthetic construct
  misc_feature 1..12: note = Description of Artificial Sequence: Synthetic Antisense oligonucleotide
  modified_base 3: mod_base = OTHER; note = 5-methyl
  modified_base 7..8: mod_base = OTHER; note = 5-methyl
  modified_base 12: mod_base = OTHER; note = 5-methyl
  modified_base 11..12: mod_base = OTHER; note = bicyclic nucleic acid (BNA)
  source 1..12: mol_type = other RNA
ttctgtccaagc

SEQ ID NO: 5353 - RNA, 11 nt, synthetic construct
  misc_feature 1..11: note = Description of Artificial Sequence: Synthetic Antisense oligonucleotide
  modified_base 3: mod_base = OTHER; note = 5-methyl
  modified_base 7..8: mod_base = OTHER; note = 5-methyl
  modified_base 10..11: mod_base = OTHER; note = bicyclic nucleic acid (BNA)
  source 1..11: mol_type = other RNA
ttctgtccaag

SEQ ID NO: 5354 - RNA, 10 nt, synthetic construct
  misc_feature 1..10: note = Description of Artificial Sequence: Synthetic Antisense oligonucleotide
  modified_base 3: mod_base = OTHER; note = 5-methyl
  modified_base 7..8: mod_base = OTHER; note = 5-methyl
  modified_base 9..10: mod_base = OTHER; note = bicyclic nucleic acid (BNA)
  source 1..10: mol_type = other RNA
ttctgtccaa

SEQ ID NO: 5355-5356 - skipped (2 entries)

SEQ ID NO: 5357 - RNA, 19 nt, synthetic construct
  misc_feature 1..19: note = Description of Artificial Sequence: Synthetic Antisense oligonucleotide
  modified_base 2: mod_base = OTHER; note = 5-methyl
  modified_base 6..7: mod_base = OTHER; note = 5-methyl
  modified_base 11..13: mod_base = OTHER; note = 5-methyl
  modified_base 18..19: mod_base = OTHER; note = bicyclic nucleic acid (BNA)
  source 1..19: mol_type = other RNA
tctgtccaagcccggttga

SEQ ID NO: 5358 - DNA, 18 bp, synthetic construct
  misc_feature 1..18: note = Description of Artificial Sequence: Synthetic Antisense oligonucleotide
  misc_feature 1..18: note = Original Sequence: ucuguccaagcccggutg
  modified_base 2: mod_base = OTHER; note = 5-methyl
  modified_base 6..7: mod_base = OTHER; note = 5-methyl
  modified_base 11..13: mod_base = OTHER; note = 5-methyl
  modified_base 17..18: mod_base = OTHER; note = bicyclic nucleic acid (BNA)
  source 1..18: mol_type = other DNA
  modified_base 1: mod_base = OTHER; note = Uracil
  modified_base 3: mod_base = OTHER; note = Uracil
  modified_base 5: mod_base = OTHER; note = Uracil
  modified_base 16: mod_base = OTHER; note = Uracil
tctgtccaagcccggttg

SEQ ID NO: 5359 - DNA, 17 bp, synthetic construct
  misc_feature 1..17: note = Description of Artificial Sequence: Synthetic Antisense oligonucleotide
  misc_feature 1..17: note = Original Sequence: ucuguccaagcccggtt
  modified_base 2: mod_base = OTHER; note = 5-methyl
  modified_base 6..7: mod_base = OTHER; note = 5-methyl
  modified_base 11..13: mod_base = OTHER; note = 5-methyl
  modified_base 16..17: mod_base = OTHER; note = bicyclic nucleic acid (BNA)
  source 1..17: mol_type = other DNA
  modified_base 1: mod_base = OTHER; note = Uracil
  modified_base 3: mod_base = OTHER; note = Uracil
  modified_base 5: mod_base = OTHER; note = Uracil
tctgtccaagcccggtt

SEQ ID NO: 5360 - DNA, 16 bp, synthetic construct
  misc_feature 1..16: note = Description of Artificial Sequence: Synthetic Antisense oligonucleotide
  misc_feature 1..16: note = Original Sequence: ucuguccaagcccggt
  modified_base 2: mod_base = OTHER; note = 5-methyl
  modified_base 6..7: mod_base = OTHER; note = 5-methyl
  modified_base 11..13: mod_base = OTHER; note = 5-methyl
  modified_base 15..16: mod_base = OTHER; note = bicyclic nucleic acid (BNA)
  source 1..16: mol_type = other DNA
  modified_base 1: mod_base = OTHER; note = Uracil
  modified_base 3: mod_base = OTHER; note = Uracil
  modified_base 5: mod_base = OTHER; note = Uracil
tctgtccaagcccggt

SEQ ID NO: 5361 - RNA, 15 nt, synthetic construct
  misc_feature 1..15: note = Description of Artificial Sequence: Synthetic Antisense oligonucleotide
  modified_base 2: mod_base = OTHER; note = 5-methyl
  modified_base 6..7: mod_base = OTHER; note = 5-methyl
  modified_base 11..13: mod_base = OTHER; note = 5-methyl
  modified_base 14..15: mod_base = OTHER; note = bicyclic nucleic acid (BNA)
  source 1..15: mol_type = other RNA
tctgtccaagcccgg

SEQ ID NO: 5362 - RNA, 14 nt, synthetic construct
  misc_feature 1..14: note = Description of Artificial Sequence: Synthetic Antisense oligonucleotide
  modified_base 2: mod_base = OTHER; note = 5-methyl
  modified_base 6..7: mod_base = OTHER; note = 5-methyl
  modified_base 11..13: mod_base = OTHER; note = 5-methyl
  modified_base 13..14: mod_base = OTHER; note = bicyclic nucleic acid (BNA)
  source 1..14: mol_type = other RNA
tctgtccaagcccg

SEQ ID NO: 5363 - RNA, 13 nt, synthetic construct
  misc_feature 1..13: note = Description of Artificial Sequence: Synthetic Antisense oligonucleotide
  modified_base 2: mod_base = OTHER; note = 5-methyl
  modified_base 6..7: mod_base = OTHER; note = 5-methyl
  modified_base 11..13: mod_base = OTHER; note = 5-methyl
  modified_base 12..13: mod_base = OTHER; note = bicyclic nucleic acid (BNA)
  source 1..13: mol_type = other RNA
tctgtccaagccc

SEQ ID NO: 5364 - RNA, 12 nt, synthetic construct
  misc_feature 1..12: note = Description of Artificial Sequence: Synthetic Antisense oligonucleotide
  modified_base 2: mod_base = OTHER; note = 5-methyl
  modified_base 6..7: mod_base = OTHER; note = 5-methyl
  modified_base 11..12: mod_base = OTHER; note = 5-methyl
  modified_base 11..12: mod_base = OTHER; note = bicyclic nucleic acid (BNA)
  source 1..12: mol_type = other RNA
tctgtccaagcc

SEQ ID NO: 5365 - RNA, 11 nt, synthetic construct
  misc_feature 1..11: note = Description of Artificial Sequence: Synthetic Antisense oligonucleotide
  modified_base 2: mod_base = OTHER; note = 5-methyl
  modified_base 6..7: mod_base = OTHER; note = 5-methyl
  modified_base 11: mod_base = OTHER; note = 5-methyl
  modified_base 10..11: mod_base = OTHER; note = bicyclic nucleic acid (BNA)
  source 1..11: mol_type = other RNA
tctgtccaagc

SEQ ID NO: 5366 - RNA, 10 nt, synthetic construct
  misc_feature 1..10: note = Description of Artificial Sequence: Synthetic Antisense oligonucleotide
  modified_base 2: mod_base = OTHER; note = 5-methyl
  modified_base 6..7: mod_base = OTHER; note = 5-methyl
  modified_base 9..10: mod_base = OTHER; note = bicyclic nucleic acid (BNA)
  source 1..10: mol_type = other RNA
tctgtccaag

SEQ ID NO: 5367-5368 - skipped (2 entries)

SEQ ID NO: 5369 - DNA, 17 bp, synthetic construct
  misc_feature 1..17: note = Description of Artificial Sequence: Synthetic Antisense oligonucleotide
  misc_feature 1..17: note = Original Sequence: cuguccaagcccggutg
  modified_base 1: mod_base = OTHER; note = 5-methyl
  modified_base 5..6: mod_base = OTHER; note = 5-methyl
  modified_base 10..12: mod_base = OTHER; note = 5-methyl
  modified_base 16..17: mod_base = OTHER; note = bicyclic nucleic acid (BNA)
  source 1..17: mol_type = other DNA
  modified_base 2: mod_base = OTHER; note = Uracil
  modified_base 4: mod_base = OTHER; note = Uracil
  modified_base 15: mod_base = OTHER; note = Uracil
ctgtccaagcccggttg

SEQ ID NO: 5370 - DNA, 16 bp, synthetic construct
  misc_feature 1..16: note = Description of Artificial Sequence: Synthetic Antisense oligonucleotide
  misc_feature 1..16: note = Original Sequence: cuguccaagcccggtt
  modified_base 1: mod_base = OTHER; note = 5-methyl
  modified_base 5..6: mod_base = OTHER; note = 5-methyl
  modified_base 10..12: mod_base = OTHER; note = 5-methyl
  modified_base 15..16: mod_base = OTHER; note = bicyclic nucleic acid (BNA)
  source 1..16: mol_type = other DNA
  modified_base 2: mod_base = OTHER; note = Uracil
  modified_base 4: mod_base = OTHER; note = Uracil
ctgtccaagcccggtt

SEQ ID NO: 5371 - DNA, 15 bp, synthetic construct
  misc_feature 1..15: note = Description of Artificial Sequence: Synthetic Antisense oligonucleotide
  misc_feature 1..15: note = Original Sequence: cuguccaagcccggt
  modified_base 1: mod_base = OTHER; note = 5-methyl
  modified_base 5..6: mod_base = OTHER; note = 5-methyl
  modified_base 10..12: mod_base = OTHER; note = 5-methyl
  modified_base 14..15: mod_base = OTHER; note = bicyclic nucleic acid (BNA)
  source 1..15: mol_type = other DNA
  modified_base 2: mod_base = OTHER; note = Uracil
  modified_base 4: mod_base = OTHER; note = Uracil
ctgtccaagcccggt

SEQ ID NO: 5372 - RNA, 14 nt, synthetic construct
  misc_feature 1..14: note = Description of Artificial Sequence: Synthetic Antisense oligonucleotide
  modified_base 1: mod_base = OTHER; note = 5-methyl
  modified_base 5..6: mod_base = OTHER; note = 5-methyl
  modified_base 10..12: mod_base = OTHER; note = 5-methyl
  modified_base 13..14: mod_base = OTHER; note = bicyclic nucleic acid (BNA)
  source 1..14: mol_type = other RNA
ctgtccaagcccgg

SEQ ID NO: 5373 - RNA, 13 nt, synthetic construct
  misc_feature 1..13: note = Description of Artificial Sequence: Synthetic Antisense oligonucleotide
  modified_base 1: mod_base = OTHER; note = 5-methyl
  modified_base 5..6: mod_base = OTHER; note = 5-methyl
  modified_base 10..12: mod_base = OTHER; note = 5-methyl
  modified_base 12..13: mod_base = OTHER; note = bicyclic nucleic acid (BNA)
  source 1..13: mol_type = other RNA
ctgtccaagcccg

SEQ ID NO: 5374 - RNA, 12 nt, synthetic construct
  misc_feature 1..12: note = Description of Artificial Sequence: Synthetic Antisense oligonucleotide
  modified_base 1: mod_base = OTHER; note = 5-methyl
  modified_base 5..6: mod_base = OTHER; note = 5-methyl
  modified_base 10..12: mod_base = OTHER; note = 5-methyl
  modified_base 11..12: mod_base = OTHER; note = bicyclic nucleic acid (BNA)
  source 1..12: mol_type = other RNA
ctgtccaagccc

SEQ ID NO: 5375 - RNA, 11 nt, synthetic construct
  misc_feature 1..11: note = Description of Artificial Sequence: Synthetic Antisense oligonucleotide
  modified_base 1: mod_base = OTHER; note = 5-methyl
  modified_base 5..6: mod_base = OTHER; note = 5-methyl
  modified_base 10..11: mod_base = OTHER; note = 5-methyl
  modified_base 10..11: mod_base = OTHER; note = bicyclic nucleic acid (BNA)
  source 1..11: mol_type = other RNA
ctgtccaagcc

SEQ ID NO: 5376 - RNA, 10 nt, synthetic construct
  misc_feature 1..10: note = Description of Artificial Sequence: Synthetic Antisense oligonucleotide
  modified_base 1: mod_base = OTHER; note = 5-methyl
  modified_base 5..6: mod_base = OTHER; note = 5-methyl
  modified_base 10: mod_base = OTHER; note = 5-methyl
  modified_base 9..10: mod_base = OTHER; note = bicyclic nucleic acid (BNA)
  source 1..10: mol_type = other RNA
ctgtccaagc

SEQ ID NO: 5377-5378 - skipped (2 entries)

SEQ ID NO: 5379 - DNA, 20 bp, synthetic construct
  misc_feature 1..20: note = Description of Artificial Sequence: Synthetic Antisense oligonucleotide
  misc_feature 1..20: note = Original Sequence: guucuguccaagcccggutg
  modified_base 4: mod_base = OTHER; note = 5-methyl
  modified_base 8..9: mod_base = OTHER; note = 5-methyl
  modified_base 13..15: mod_base = OTHER; note = 5-methyl
  modified_base 19..20: mod_base = OTHER; note = bicyclic nucleic acid (BNA)
  source 1..20: mol_type = other DNA
  modified_base 2: mod_base = OTHER; note = Uracil
  modified_base 3: mod_base = OTHER; note = Uracil
  modified_base 5: mod_base = OTHER; note = Uracil
  modified_base 7: mod_base = OTHER; note = Uracil
  modified_base 18: mod_base = OTHER; note = Uracil
gttctgtccaagcccggttg

SEQ ID NO: 5380 - DNA, 19 bp, synthetic construct
  misc_feature 1..19: note = Description of Artificial Sequence: Synthetic Antisense oligonucleotide
  misc_feature 1..19: note = Original Sequence: guucuguccaagcccggtt
  modified_base 4: mod_base = OTHER; note = 5-methyl
  modified_base 8..9: mod_base = OTHER; note = 5-methyl
  modified_base 13..15: mod_base = OTHER; note = 5-methyl
  modified_base 18..19: mod_base = OTHER; note = bicyclic nucleic acid (BNA)
  source 1..19: mol_type = other DNA
  modified_base 2: mod_base = OTHER; note = Uracil
  modified_base 3: mod_base = OTHER; note = Uracil
  modified_base 5: mod_base = OTHER; note = Uracil
  modified_base 7: mod_base = OTHER; note = Uracil
gttctgtccaagcccggtt

SEQ ID NO: 5381 - DNA, 18 bp, synthetic construct
  misc_feature 1..18: note = Description of Artificial Sequence: Synthetic Antisense oligonucleotide
  misc_feature 1..18: note = Original Sequence: guucuguccaagcccggt
  modified_base 4: mod_base = OTHER; note = 5-methyl
  modified_base 8..9: mod_base = OTHER; note = 5-methyl
  modified_base 13..15: mod_base = OTHER; note = 5-methyl
  modified_base 17..18: mod_base = OTHER; note = bicyclic nucleic acid (BNA)
  source 1..18: mol_type = other DNA
  modified_base 2: mod_base = OTHER; note = Uracil
  modified_base 3: mod_base = OTHER; note = Uracil
  modified_base 5: mod_base = OTHER; note = Uracil
  modified_base 7: mod_base = OTHER; note = Uracil
gttctgtccaagcccggt

SEQ ID NO: 5382 - RNA, 17 nt, synthetic construct
  misc_feature 1..17: note = Description of Artificial Sequence: Synthetic Antisense oligonucleotide
  modified_base 4: mod_base = OTHER; note = 5-methyl
  modified_base 8..9: mod_base = OTHER; note = 5-methyl
  modified_base 13..15: mod_base = OTHER; note = 5-methyl
  modified_base 16..17: mod_base = OTHER; note = bicyclic nucleic acid (BNA)
  source 1..17: mol_type = other RNA
gttctgtccaagcccgg

SEQ ID NO: 5383 - RNA, 16 nt, synthetic construct
  misc_feature 1..16: note = Description of Artificial Sequence: Synthetic Antisense oligonucleotide
  modified_base 4: mod_base = OTHER; note = 5-methyl
  modified_base 8..9: mod_base = OTHER; note = 5-methyl
  modified_base 13..15: mod_base = OTHER; note = 5-methyl
  modified_base 15..16: mod_base = OTHER; note = bicyclic nucleic acid (BNA)
  source 1..16: mol_type = other RNA
gttctgtccaagcccg

SEQ ID NO: 5384 - RNA, 15 nt, synthetic construct
  misc_feature 1..15: note = Description of Artificial Sequence: Synthetic Antisense oligonucleotide
  modified_base 4: mod_base = OTHER; note = 5-methyl
  modified_base 8..9: mod_base = OTHER; note = 5-methyl
  modified_base 13..15: mod_base = OTHER; note = 5-methyl
  modified_base 14..15: mod_base = OTHER; note = bicyclic nucleic acid (BNA)
  source 1..15: mol_type = other RNA
gttctgtccaagccc

SEQ ID NO: 5385 - RNA, 14 nt, synthetic construct
  misc_feature 1..14: note = Description of Artificial Sequence: Synthetic Antisense oligonucleotide
  modified_base 4: mod_base = OTHER; note = 5-methyl
  modified_base 8..9: mod_base = OTHER; note = 5-methyl
  modified_base 13..14: mod_base = OTHER; note = 5-methyl
  modified_base 13..14: mod_base = OTHER; note = bicyclic nucleic acid (BNA)
  source 1..14: mol_type = other RNA
gttctgtccaagcc

SEQ ID NO: 5386 - RNA, 13 nt, synthetic construct
  misc_feature 1..13: note = Description of Artificial Sequence: Synthetic Antisense oligonucleotide
  modified_base 4: mod_base = OTHER; note = 5-methyl
  modified_base 8..9: mod_base = OTHER; note = 5-methyl
  modified_base 13: mod_base = OTHER; note = 5-methyl
  modified_base 12..13: mod_base = OTHER; note = bicyclic nucleic acid (BNA)
  source 1..13: mol_type = other RNA
gttctgtccaagc

SEQ ID NO: 5387 - RNA, 12 nt, synthetic construct
  misc_feature 1..12: note = Description of Artificial Sequence: Synthetic Antisense oligonucleotide
  modified_base 4: mod_base = OTHER; note = 5-methyl
  modified_base 8..9: mod_base = OTHER; note = 5-methyl
  modified_base 11..12: mod_base = OTHER; note = bicyclic nucleic acid (BNA)
  source 1..12: mol_type = other RNA
gttctgtccaag

SEQ ID NO: 5388 - RNA, 11 nt, synthetic construct
  misc_feature 1..11: note = Description of Artificial Sequence: Synthetic Antisense oligonucleotide
  modified_base 4: mod_base = OTHER; note = 5-methyl
  modified_base 8..9: mod_base = OTHER; note = 5-methyl
  modified_base 10..11: mod_base = OTHER; note = bicyclic nucleic acid (BNA)
  source 1..11: mol_type = other RNA
gttctgtccaa

SEQ ID NO: 5389 - RNA, 10 nt, synthetic construct
  misc_feature 1..10: note = Description of Artificial Sequence: Synthetic Antisense oligonucleotide
  modified_base 4: mod_base = OTHER; note = 5-methyl
  modified_base 8..9: mod_base = OTHER; note = 5-methyl
  modified_base 9..10: mod_base = OTHER; note = bicyclic nucleic acid (BNA)
  source 1..10: mol_type = other RNA
gttctgtcca

SEQ ID NO: 5390-5391 - skipped (2 entries)

SEQ ID NO: 5392 - DNA, 20 bp, synthetic construct
  misc_feature 1..20: note = Description of Artificial Sequence: Synthetic Antisense oligonucleotide
  misc_feature 1..20: note = Original Sequence: aguucuguccaagcccggtt
  modified_base 5: mod_base = OTHER; note = 5-methyl
  modified_base 9..10: mod_base = OTHER; note = 5-methyl
  modified_base 14..16: mod_base = OTHER; note = 5-methyl
  modified_base 19..20: mod_base = OTHER; note = bicyclic nucleic acid (BNA)
  source 1..20: mol_type = other DNA
  modified_base 3: mod_base = OTHER; note = Uracil
  modified_base 4: mod_base = OTHER; note = Uracil
  modified_base 6: mod_base = OTHER; note = Uracil
  modified_base 8: mod_base = OTHER; note = Uracil
agttctgtccaagcccggtt

SEQ ID NO: 5393 - DNA, 19 bp, synthetic construct
  misc_feature 1..19: note = Description of Artificial Sequence: Synthetic Antisense oligonucleotide
  misc_feature 1..19: note = Original Sequence: aguucuguccaagcccggt
  modified_base 5: mod_base = OTHER; note = 5-methyl
  modified_base 9..10: mod_base = OTHER; note = 5-methyl
  modified_base 14..16: mod_base = OTHER; note = 5-methyl
  modified_base 18..19: mod_base = OTHER; note = bicyclic nucleic acid (BNA)
  source 1..19: mol_type = other DNA
  modified_base 3: mod_base = OTHER; note = Uracil
  modified_base 4: mod_base = OTHER; note = Uracil
  modified_base 6: mod_base = OTHER; note = Uracil
  modified_base 8: mod_base = OTHER; note = Uracil
agttctgtccaagcccggt

SEQ ID NO: 5394 - RNA, 18 nt, synthetic construct
  misc_feature 1..18: note = Description of Artificial Sequence: Synthetic Antisense oligonucleotide
  modified_base 5: mod_base = OTHER; note = 5-methyl
  modified_base 9..10: mod_base = OTHER; note = 5-methyl
  modified_base 14..16: mod_base = OTHER; note = 5-methyl
  modified_base 17..18: mod_base = OTHER; note = bicyclic nucleic acid (BNA)
  source 1..18: mol_type = other RNA
agttctgtccaagcccgg

SEQ ID NO: 5395 - RNA, 17 nt, synthetic construct
  misc_feature 1..17: note = Description of Artificial Sequence: Synthetic Antisense oligonucleotide
  modified_base 5: mod_base = OTHER; note = 5-methyl
  modified_base 9..10: mod_base = OTHER; note = 5-methyl
  modified_base 14..16: mod_base = OTHER; note = 5-methyl
  modified_base 16..17: mod_base = OTHER; note = bicyclic nucleic acid (BNA)
  source 1..17: mol_type = other RNA
agttctgtccaagcccg

SEQ ID NO: 5396 - RNA, 16 nt, synthetic construct
  misc_feature 1..16: note = Description of Artificial Sequence: Synthetic Antisense oligonucleotide
  modified_base 5: mod_base = OTHER; note = 5-methyl
  modified_base 9..10: mod_base = OTHER; note = 5-methyl
  modified_base 14..16: mod_base = OTHER; note = 5-methyl
  modified_base 15..16: mod_base = OTHER; note = bicyclic nucleic acid (BNA)
  source 1..16: mol_type = other RNA
agttctgtccaagccc

SEQ ID NO: 5397 - RNA, 15 nt, synthetic construct
  misc_feature 1..15: note = Description of Artificial Sequence: Synthetic Antisense oligonucleotide
  modified_base 5: mod_base = OTHER; note = 5-methyl
  modified_base 9..10: mod_base = OTHER; note = 5-methyl
  modified_base 14..15: mod_base = OTHER; note = 5-methyl
  modified_base 14..15: mod_base = OTHER; note = bicyclic nucleic acid (BNA)
  source 1..15: mol_type = other RNA
agttctgtccaagcc

SEQ ID NO: 5398 - RNA, 14 nt, synthetic construct
  misc_feature 1..14: note = Description of Artificial Sequence: Synthetic Antisense oligonucleotide
  modified_base 5: mod_base = OTHER; note = 5-methyl
  modified_base 9..10: mod_base = OTHER; note = 5-methyl
  modified_base 14: mod_base = OTHER; note = 5-methyl
  modified_base 13..14: mod_base = OTHER; note = bicyclic nucleic acid (BNA)
  source 1..14: mol_type = other RNA
agttctgtccaagc

SEQ ID NO: 5399 - RNA, 13 nt, synthetic construct
  misc_feature 1..13: note = Description of Artificial Sequence: Synthetic Antisense oligonucleotide
  modified_base 5: mod_base = OTHER; note = 5-methyl
  modified_base 9..10: mod_base = OTHER; note = 5-methyl
  modified_base 12..13: mod_base = OTHER; note = bicyclic nucleic acid (BNA)
  source 1..13: mol_type = other RNA
agttctgtccaag

SEQ ID NO: 5400 - RNA, 12 nt, synthetic construct
  misc_feature 1..12: note = Description of Artificial Sequence: Synthetic Antisense oligonucleotide
  modified_base 5: mod_base = OTHER; note = 5-methyl
  modified_base 9..10: mod_base = OTHER; note = 5-methyl
  modified_base 11..12: mod_base = OTHER; note = bicyclic nucleic acid (BNA)
  source 1..12: mol_type = other RNA
agttctgtccaa

SEQ ID NO: 5401 - RNA, 11 nt, synthetic construct
  misc_feature 1..11: note = Description of Artificial Sequence: Synthetic Antisense oligonucleotide
  modified_base 5: mod_base = OTHER; note = 5-methyl
  modified_base 9..10: mod_base = OTHER; note = 5-methyl
  modified_base 10..11: mod_base = OTHER; note = bicyclic nucleic acid (BNA)
  source 1..11: mol_type = other RNA
agttctgtcca

SEQ ID NO: 5402 - RNA, 10 nt, synthetic construct
  misc_feature 1..10: note = Description of Artificial Sequence: Synthetic Antisense oligonucleotide
  modified_base 5: mod_base = OTHER; note = 5-methyl
  modified_base 9..10: mod_base = OTHER; note = 5-methyl
  modified_base 9..10: mod_base = OTHER; note = bicyclic nucleic acid (BNA)
  source 1..10: mol_type = other RNA
agttctgtcc

SEQ ID NO: 5403-5404 - skipped (2 entries)

SEQ ID NO: 5405 - DNA, 20 bp, synthetic construct
  misc_feature 1..20: note = Description of Artificial Sequence: Synthetic Antisense oligonucleotide
  misc_feature 1..20: note = Original Sequence: aaguucuguccaagcccggt
  modified_base 6: mod_base = OTHER; note = 5-methyl
  modified_base 10..11: mod_base = OTHER; note = 5-methyl
  modified_base 15..17: mod_base = OTHER; note = 5-methyl
  modified_base 19..20: mod_base = OTHER; note = bicyclic nucleic acid (BNA)
  source 1..20: mol_type = other DNA
  modified_base 4: mod_base = OTHER; note = Uracil
  modified_base 5: mod_base = OTHER; note = Uracil
  modified_base 7: mod_base = OTHER; note = Uracil
  modified_base 9: mod_base = OTHER; note = Uracil
aagttctgtccaagcccggt

SEQ ID NO: 5406 - RNA, 19 nt, synthetic construct
  misc_feature 1..19: note = Description of Artificial Sequence: Synthetic Antisense oligonucleotide
  modified_base 6: mod_base = OTHER; note = 5-methyl
  modified_base 10..11: mod_base = OTHER; note = 5-methyl
  modified_base 15..17: mod_base = OTHER; note = 5-methyl
  modified_base 18..19: mod_base = OTHER; note = bicyclic nucleic acid (BNA)
  source 1..19: mol_type = other RNA
aagttctgtccaagcccgg

SEQ ID NO: 5407 - RNA, 18 nt, synthetic construct
  misc_feature 1..18: note = Description of Artificial Sequence: Synthetic Antisense oligonucleotide
  modified_base 6: mod_base = OTHER; note = 5-methyl
  modified_base 10..11: mod_base = OTHER; note = 5-methyl
  modified_base 15..17: mod_base = OTHER; note = 5-methyl
  modified_base 17..18: mod_base = OTHER; note = bicyclic nucleic acid (BNA)
  source 1..18: mol_type = other RNA
aagttctgtccaagcccg

SEQ ID NO: 5408 - RNA, 17 nt, synthetic construct
  misc_feature 1..17: note = Description of Artificial Sequence: Synthetic Antisense oligonucleotide
  modified_base 6: mod_base = OTHER; note = 5-methyl
  modified_base 10..11: mod_base = OTHER; note = 5-methyl
  modified_base 15..17: mod_base = OTHER; note = 5-methyl
  modified_base 16..17: mod_base = OTHER; note = bicyclic nucleic acid (BNA)
  source 1..17: mol_type = other RNA
aagttctgtccaagccc

SEQ ID NO: 5409 - RNA, 16 nt, synthetic construct
  misc_feature 1..16: note = Description of Artificial Sequence: Synthetic Antisense oligonucleotide
  modified_base 6: mod_base = OTHER; note = 5-methyl
  modified_base 10..11: mod_base = OTHER; note = 5-methyl
  modified_base 15..16: mod_base = OTHER; note = 5-methyl
  modified_base 15..16: mod_base = OTHER; note = bicyclic nucleic acid (BNA)
  source 1..16: mol_type = other RNA
aagttctgtccaagcc

SEQ ID NO: 5410 - RNA, 15 nt, synthetic construct
  misc_feature 1..15: note = Description of Artificial Sequence: Synthetic Antisense oligonucleotide
  modified_base 6: mod_base = OTHER; note = 5-methyl
  modified_base 10..11: mod_base = OTHER; note = 5-methyl
  modified_base 15: mod_base = OTHER; note = 5-methyl
  modified_base 14..15: mod_base = OTHER; note = bicyclic nucleic acid (BNA)
  source 1..15: mol_type = other RNA
aagttctgtccaagc

SEQ ID NO: 5411 - RNA, 14 nt, synthetic construct
  misc_feature 1..14: note = Description of Artificial Sequence: Synthetic Antisense oligonucleotide
  modified_base 6: mod_base = OTHER; note = 5-methyl
  modified_base 10..11: mod_base = OTHER; note = 5-methyl
  modified_base 13..14: mod_base = OTHER; note = bicyclic nucleic acid (BNA)
  source 1..14: mol_type = other RNA
aagttctgtccaag

SEQ ID NO: 5412 - RNA, 13 nt, synthetic construct
  misc_feature 1..13: note = Description of Artificial Sequence: Synthetic Antisense oligonucleotide
  modified_base 6: mod_base = OTHER; note = 5-methyl
  modified_base 10..11: mod_base = OTHER; note = 5-methyl
  modified_base 12..13: mod_base = OTHER; note = bicyclic nucleic acid (BNA)
  source 1..13: mol_type = other RNA
aagttctgtccaa

SEQ ID NO: 5413 - RNA, 12 nt, synthetic construct
  misc_feature 1..12: note = Description of Artificial Sequence: Synthetic Antisense oligonucleotide
  modified_base 6: mod_base = OTHER; note = 5-methyl
  modified_base 10..11: mod_base = OTHER; note = 5-methyl
  modified_base 11..12: mod_base = OTHER; note = bicyclic nucleic acid (BNA)
  source 1..12: mol_type = other RNA
aagttctgtcca

SEQ ID NO: 5414 - RNA, 11 nt, synthetic construct
  misc_feature 1..11: note = Description of Artificial Sequence: Synthetic Antisense oligonucleotide
  modified_base 6: mod_base = OTHER; note = 5-methyl
  modified_base 10..11: mod_base = OTHER; note = 5-methyl
  modified_base 10..11: mod_base = OTHER; note = bicyclic nucleic acid (BNA)
  source 1..11: mol_type = other RNA
aagttctgtcc

SEQ ID NO: 5415 - DNA, 10 bp, synthetic construct
  misc_feature 1..10: note = Description of Artificial Sequence: Synthetic Antisense oligonucleotide
  misc_feature 1..10: note = Original Sequence: aaguucugtc
  modified_base 6: mod_base = OTHER; note = 5-methyl
  modified_base 10: mod_base = OTHER; note = 5-methyl
  modified_base 9..10: mod_base = OTHER; note = bicyclic nucleic acid (BNA)
  source 1..10: mol_type = other DNA
  modified_base 4: mod_base = OTHER; note = Uracil
  modified_base 5: mod_base = OTHER; note = Uracil
  modified_base 7: mod_base = OTHER; note = Uracil
aagttctgtc

SEQ ID NO: 5416-5417 - skipped (2 entries)

SEQ ID NO: 5418 - RNA, 20 nt, synthetic construct
  misc_feature 1..20: note = Description of Artificial Sequence: Synthetic Antisense oligonucleotide
  modified_base 7: mod_base = OTHER; note = 5-methyl
  modified_base 11..12: mod_base = OTHER; note = 5-methyl
  modified_base 16..18: mod_base = OTHER; note = 5-methyl
  modified_base 19..20: mod_base = OTHER; note = bicyclic nucleic acid (BNA)
  source 1..20: mol_type = other RNA
taagttctgtccaagcccgg

SEQ ID NO: 5419 - RNA, 19 nt, synthetic construct
  misc_feature 1..19: note = Description of Artificial Sequence: Synthetic Antisense oligonucleotide
  modified_base 7: mod_base = OTHER; note = 5-methyl
  modified_base 11..12: mod_base = OTHER; note = 5-methyl
  modified_base 16..18: mod_base = OTHER; note = 5-methyl
  modified_base 18..19: mod_base = OTHER; note = bicyclic nucleic acid (BNA)
  source 1..19: mol_type = other RNA
taagttctgtccaagcccg

SEQ ID NO: 5420 - RNA, 18 nt, synthetic construct
  misc_feature 1..18: note = Description of Artificial Sequence: Synthetic Antisense oligonucleotide
  modified_base 7: mod_base = OTHER; note = 5-methyl
  modified_base 11..12: mod_base = OTHER; note = 5-methyl
  modified_base 16..18: mod_base = OTHER; note = 5-methyl
  modified_base 17..18: mod_base = OTHER; note = bicyclic nucleic acid (BNA)
  source 1..18: mol_type = other RNA
taagttctgtccaagccc

SEQ ID NO: 5421 - RNA, 17 nt, synthetic construct
  misc_feature 1..17: note = Description of Artificial Sequence: Synthetic Antisense oligonucleotide
  modified_base 7: mod_base = OTHER; note = 5-methyl
  modified_base 11..12: mod_base = OTHER; note = 5-methyl
  modified_base 16..17: mod_base = OTHER; note = 5-methyl
  modified_base 16..17: mod_base = OTHER; note = bicyclic nucleic acid (BNA)
  source 1..17: mol_type = other RNA
taagttctgtccaagcc

SEQ ID NO: 5422 - RNA, 16 nt, synthetic construct
  misc_feature 1..16: note = Description of Artificial Sequence: Synthetic Antisense oligonucleotide
  modified_base 7: mod_base = OTHER; note = 5-methyl
  modified_base 11..12: mod_base = OTHER; note = 5-methyl
  modified_base 16: mod_base = OTHER; note = 5-methyl
  modified_base 15..16: mod_base = OTHER; note = bicyclic nucleic acid (BNA)
  source 1..16: mol_type = other RNA
taagttctgtccaagc

SEQ ID NO: 5423 - RNA, 14 nt, synthetic construct
  misc_feature 1..14: note = Description of Artificial Sequence: Synthetic Antisense oligonucleotide
  modified_base 7: mod_base = OTHER; note = 5-methyl
  modified_base 11..12: mod_base = OTHER; note = 5-methyl
  modified_base 13..14: mod_base = OTHER; note = bicyclic nucleic acid (BNA)
  source 1..14: mol_type = other RNA
taagttctgtccaa

SEQ ID NO: 5424 - RNA, 13 nt, synthetic construct
  misc_feature 1..13: note = Description of Artificial Sequence: Synthetic Antisense oligonucleotide
  modified_base 7: mod_base = OTHER; note = 5-methyl
  modified_base 11..12: mod_base = OTHER; note = 5-methyl
  modified_base 12..13: mod_base = OTHER; note = bicyclic nucleic acid (BNA)
  source 1..13: mol_type = other RNA
taagttctgtcca

SEQ ID NO: 5425 - RNA, 12 nt, synthetic construct
  misc_feature 1..12: note = Description of Artificial Sequence: Synthetic Antisense oligonucleotide
  modified_base 7: mod_base = OTHER; note = 5-methyl
  modified_base 11..12: mod_base = OTHER; note = 5-methyl
  modified_base 11..12: mod_base = OTHER; note = bicyclic nucleic acid (BNA)
  source 1..12: mol_type = other RNA
taagttctgtcc

SEQ ID NO: 5426 - DNA, 11 bp, synthetic construct
  misc_feature 1..11: note = Description of Artificial Sequence: Synthetic Antisense oligonucleotide
  misc_feature 1..11: note = Original Sequence: uaaguucugtc
  modified_base 7: mod_base = OTHER; note = 5-methyl
  modified_base 11: mod_base = OTHER; note = 5-methyl
  modified_base 10..11: mod_base = OTHER; note = bicyclic nucleic acid (BNA)
  source 1..11: mol_type = other DNA
  modified_base 1: mod_base = OTHER; note = Uracil
  modified_base 5: mod_base = OTHER; note = Uracil
  modified_base 6: mod_base = OTHER; note = Uracil
  modified_base 8: mod_base = OTHER; note = Uracil
taagttctgtc

SEQ ID NO: 5427 - DNA, 10 bp, synthetic construct
  misc_feature 1..10: note = Description of Artificial Sequence: Synthetic Antisense oligonucleotide
  misc_feature 1..10: note = Original Sequence: uaaguucugt
  modified_base 7: mod_base = OTHER; note = 5-methyl
  modified_base 9..10: mod_base = OTHER; note = bicyclic nucleic acid (BNA)
  source 1..10: mol_type = other DNA
  modified_base 1: mod_base = OTHER; note = Uracil
  modified_base 5: mod_base = OTHER; note = Uracil
  modified_base 6: mod_base = OTHER; note = Uracil
  modified_base 8: mod_base = OTHER; note = Uracil
taagttctgt

SEQ ID NO: 5428-5429 - skipped (2 entries)

SEQ ID NO: 5430 - RNA, 20 nt, synthetic construct
  misc_feature 1..20: note = Description of Artificial Sequence: Synthetic Antisense oligonucleotide
  modified_base 8: mod_base = OTHER; note = 5-methyl
  modified_base 12..13: mod_base = OTHER; note = 5-methyl
  modified_base 17..19: mod_base = OTHER; note = 5-methyl
  modified_base 19..20: mod_base = OTHER; note = bicyclic nucleic acid (BNA)
  source 1..20: mol_type = other RNA
gtaagttctgtccaagcccg

SEQ ID NO: 5431 - RNA, 19 nt, synthetic construct
  misc_feature 1..19: note = Description of Artificial Sequence: Synthetic Antisense oligonucleotide
  modified_base 8: mod_base = OTHER; note = 5-methyl
  modified_base 12..13: mod_base = OTHER; note = 5-methyl
  modified_base 17..19: mod_base = OTHER; note = 5-methyl
  modified_base 18..19: mod_base = OTHER; note = bicyclic nucleic acid (BNA)
  source 1..19: mol_type = other RNA
gtaagttctgtccaagccc

SEQ ID NO: 5432 - RNA, 17 nt, synthetic construct
  misc_feature 1..17: note = Description of Artificial Sequence: Synthetic Antisense oligonucleotide
  modified_base 8: mod_base = OTHER; note = 5-methyl
  modified_base 12..13: mod_base = OTHER; note = 5-methyl
  modified_base 17: mod_base = OTHER; note = 5-methyl
  modified_base 16..17: mod_base = OTHER; note = bicyclic nucleic acid (BNA)
  source 1..17: mol_type = other RNA
gtaagttctgtccaagc

SEQ ID NO: 5433 - RNA, 16 nt, synthetic construct
  misc_feature 1..16: note = Description of Artificial Sequence: Synthetic Antisense oligonucleotide
  modified_base 8: mod_base = OTHER; note = 5-methyl
  modified_base 12..13: mod_base = OTHER; note = 5-methyl
  modified_base 15..16: mod_base = OTHER; note = bicyclic nucleic acid (BNA)
  source 1..16: mol_type = other RNA
gtaagttctgtccaag

SEQ ID NO: 5434 - RNA, 15 nt, synthetic construct
  misc_feature 1..15: note = Description of Artificial Sequence: Synthetic Antisense oligonucleotide
  modified_base 8: mod_base = OTHER; note = 5-methyl
  modified_base 12..13: mod_base = OTHER; note = 5-methyl
  modified_base 14..15: mod_base = OTHER; note = bicyclic nucleic acid (BNA)
  source 1..15: mol_type = other RNA
gtaagttctgtccaa

SEQ ID NO: 5435 - RNA, 14 nt, synthetic construct
  misc_feature 1..14: note = Description of Artificial Sequence: Synthetic Antisense oligonucleotide
  modified_base 8: mod_base = OTHER; note = 5-methyl
  modified_base 12..13: mod_base = OTHER; note = 5-methyl
  modified_base 13..14: mod_base = OTHER; note = bicyclic nucleic acid (BNA)
  source 1..14: mol_type = other RNA
gtaagttctgtcca

SEQ ID NO: 5436 - RNA, 13 nt, synthetic construct
  misc_feature 1..13: note = Description of Artificial Sequence: Synthetic Antisense oligonucleotide
  modified_base 8: mod_base = OTHER; note = 5-methyl
  modified_base 12..13: mod_base = OTHER; note = 5-methyl
  modified_base 12..13: mod_base = OTHER; note = bicyclic nucleic acid (BNA)
  source 1..13: mol_type = other RNA
gtaagttctgtcc

SEQ ID NO: 5437 - DNA, 12 bp, synthetic construct
  misc_feature 1..12: note = Description of Artificial Sequence: Synthetic Antisense oligonucleotide
  misc_feature 1..12: note = Original Sequence: guaaguucugtc
  modified_base 8: mod_base = OTHER; note = 5-methyl
  modified_base 12: mod_base = OTHER; note = 5-methyl
  modified_base 11..12: mod_base = OTHER; note = bicyclic nucleic acid (BNA)
  source 1..12: mol_type = other DNA
  modified_base 2: mod_base = OTHER; note = Uracil
  modified_base 6: mod_base = OTHER; note = Uracil
  modified_base 7: mod_base = OTHER; note = Uracil
  modified_base 9: mod_base = OTHER; note = Uracil
gtaagttctgtc

SEQ ID NO: 5438 - DNA, 11 bp, synthetic construct
  misc_feature 1..11: note = Description of Artificial Sequence: Synthetic Antisense oligonucleotide
  misc_feature 1..11: note = Original Sequence: guaaguucugt
  modified_base 8: mod_base = OTHER; note = 5-methyl
  modified_base 10..11: mod_base = OTHER; note = bicyclic nucleic acid (BNA)
  source 1..11: mol_type = other DNA
  modified_base 2: mod_base = OTHER; note = Uracil
  modified_base 6: mod_base = OTHER; note = Uracil
  modified_base 7: mod_base = OTHER; note = Uracil
  modified_base 9: mod_base = OTHER; note = Uracil
gtaagttctgt

SEQ ID NO: 5439 - DNA, 10 bp, synthetic construct
  misc_feature 1..10: note = Description of Artificial Sequence: Synthetic Antisense oligonucleotide
  misc_feature 1..10: note = Original Sequence: guaaguuctg
  modified_base 8: mod_base = OTHER; note = 5-methyl
  modified_base 9..10: mod_base = OTHER; note = bicyclic nucleic acid (BNA)
  source 1..10: mol_type = other DNA
  modified_base 2: mod_base = OTHER; note = Uracil
  modified_base 6: mod_base = OTHER; note = Uracil
  modified_base 7: mod_base = OTHER; note = Uracil
gtaagttctg

SEQ ID NO: 5440-5441 - skipped (2 entries)

SEQ ID NO: 5442 - RNA, 20 nt, synthetic construct
  misc_feature 1..20: note = Description of Artificial Sequence: Synthetic Antisense oligonucleotide
  modified_base 9: mod_base = OTHER; note = 5-methyl
  modified_base 13..14: mod_base = OTHER; note = 5-methyl
  modified_base 18..20: mod_base = OTHER; note = 5-methyl
  modified_base 19..20: mod_base = OTHER; note = bicyclic nucleic acid (BNA)
  source 1..20: mol_type = other RNA
ggtaagttctgtccaagccc

SEQ ID NO: 5443 - RNA, 19 nt, synthetic construct
  misc_feature 1..19: note = Description of Artificial Sequence: Synthetic Antisense oligonucleotide
  modified_base 9: mod_base = OTHER; note = 5-methyl
  modified_base 13..14: mod_base = OTHER; note = 5-methyl
  modified_base 18..19: mod_base = OTHER; note = 5-methyl
  modified_base 18..19: mod_base = OTHER; note = bicyclic nucleic acid (BNA)
  source 1..19: mol_type = other RNA
ggtaagttctgtccaagcc

SEQ ID NO: 5444 - RNA, 17 nt, synthetic construct
  misc_feature 1..17: note = Description of Artificial Sequence: Synthetic Antisense oligonucleotide
  modified_base 9: mod_base = OTHER; note = 5-methyl
  modified_base 13..14: mod_base = OTHER; note = 5-methyl
  modified_base 16..17: mod_base = OTHER; note = bicyclic nucleic acid (BNA)
  source 1..17: mol_type = other RNA
ggtaagttctgtccaag

SEQ ID NO: 5445 - RNA, 16 nt, synthetic construct
  misc_feature 1..16: note = Description of Artificial Sequence: Synthetic Antisense oligonucleotide
  modified_base 9: mod_base = OTHER; note = 5-methyl
  modified_base 13..14: mod_base = OTHER; note = 5-methyl
  modified_base 15..16: mod_base = OTHER; note = bicyclic nucleic acid (BNA)
  source 1..16: mol_type = other RNA
ggtaagttctgtccaa

SEQ ID NO: 5446 - RNA, 15 nt, synthetic construct
  misc_feature 1..15: note = Description of Artificial Sequence: Synthetic Antisense oligonucleotide
  modified_base 9: mod_base = OTHER; note = 5-methyl
  modified_base 13..14: mod_base = OTHER; note = 5-methyl
  modified_base 14..15: mod_base = OTHER; note = bicyclic nucleic acid (BNA)
  source 1..15: mol_type = other RNA
ggtaagttctgtcca

SEQ ID NO: 5447 - RNA, 14 nt, synthetic construct
  misc_feature 1..14: note = Description of Artificial Sequence: Synthetic Antisense oligonucleotide
  modified_base 9: mod_base = OTHER; note = 5-methyl
  modified_base 13..14: mod_base = OTHER; note = 5-methyl
  modified_base 13..14: mod_base = OTHER; note = bicyclic nucleic acid (BNA)
  source 1..14: mol_type = other RNA
ggtaagttctgtcc

SEQ ID NO: 5448 - DNA, 13 bp, synthetic construct
  misc_feature 1..13: note = Description of Artificial Sequence: Synthetic Antisense oligonucleotide
  misc_feature 1..13: note = Original Sequence: gguaaguucugtc
  modified_base 9: mod_base = OTHER; note = 5-methyl
  modified_base 13: mod_base = OTHER; note = 5-methyl
  modified_base 12..13: mod_base = OTHER; note = bicyclic nucleic acid (BNA)
  source 1..13: mol_type = other DNA
  modified_base 3: mod_base = OTHER; note = Uracil
  modified_base 7: mod_base = OTHER; note = Uracil
  modified_base 8: mod_base = OTHER; note = Uracil
  modified_base 10: mod_base = OTHER; note = Uracil
ggtaagttctgtc

SEQ ID NO: 5449 - DNA, 12 bp, synthetic construct
  misc_feature 1..12: note = Description of Artificial Sequence: Synthetic Antisense oligonucleotide
  misc_feature 1..12: note = Original Sequence: gguaaguucugt
  modified_base 9: mod_base = OTHER; note = 5-methyl
  modified_base 11..12: mod_base = OTHER; note = bicyclic nucleic acid (BNA)
  source 1..12: mol_type = other DNA
  modified_base 3: mod_base = OTHER; note = Uracil
  modified_base 7: mod_base = OTHER; note = Uracil
  modified_base 8: mod_base = OTHER; note = Uracil
  modified_base 10: mod_base = OTHER; note = Uracil
ggtaagttctgt

SEQ ID NO: 5450 - DNA, 11 bp, synthetic construct
  misc_feature 1..11: note = Description of Artificial Sequence: Synthetic Antisense oligonucleotide
  misc_feature 1..11: note = Original Sequence: gguaaguuctg
  modified_base 9: mod_base = OTHER; note = 5-methyl
  modified_base 10..11: mod_base = OTHER; note = bicyclic nucleic acid (BNA)
  source 1..11: mol_type = other DNA
  modified_base 3: mod_base = OTHER; note = Uracil
  modified_base 7: mod_base = OTHER; note = Uracil
  modified_base 8: mod_base = OTHER; note = Uracil
ggtaagttctg

SEQ ID NO: 5451 - DNA, 10 bp, synthetic construct
  misc_feature 1..10: note = Description of Artificial Sequence: Synthetic Antisense oligonucleotide
  misc_feature 1..10: note = Original Sequence: gguaaguuct
  modified_base 9: mod_base = OTHER; note = 5-methyl
  modified_base 9..10: mod_base = OTHER; note = bicyclic nucleic acid (BNA)
  source 1..10: mol_type = other DNA
  modified_base 3: mod_base = OTHER; note = Uracil
  modified_base 7: mod_base = OTHER; note = Uracil
  modified_base 8: mod_base = OTHER; note = Uracil
ggtaagttct

SEQ ID NO: 5452 - skipped

SEQ ID NO: 5453 - RNA, 20 nt, synthetic construct
  misc_feature 1..20: note = Description of Artificial Sequence: Synthetic Antisense oligonucleotide
  modified_base 1: mod_base = OTHER; note = 5-methyl
  modified_base 10: mod_base = OTHER; note = 5-methyl
  modified_base 14..15: mod_base = OTHER; note = 5-methyl
  modified_base 19..20: mod_base = OTHER; note = 5-methyl
  modified_base 19..20: mod_base = OTHER; note = bicyclic nucleic acid (BNA)
  source 1..20: mol_type = other RNA
cggtaagttctgtccaagcc

SEQ ID NO: 5454 - RNA, 19 nt, synthetic construct
  misc_feature 1..19: note = Description of Artificial Sequence: Synthetic Antisense oligonucleotide
  modified_base 1: mod_base = OTHER; note = 5-methyl
  modified_base 10: mod_base = OTHER; note = 5-methyl
  modified_base 14..15: mod_base = OTHER; note = 5-methyl
  modified_base 19: mod_base = OTHER; note = 5-methyl
  modified_base 18..19: mod_base = OTHER; note = bicyclic nucleic acid (BNA)
  source 1..19: mol_type = other RNA
cggtaagttctgtccaagc

SEQ ID NO: 5455 - RNA, 18 nt, synthetic construct
  misc_feature 1..18: note = Description of Artificial Sequence: Synthetic Antisense oligonucleotide
  modified_base 1: mod_base = OTHER; note = 5-methyl
  modified_base 10: mod_base = OTHER; note = 5-methyl
  modified_base 14..15: mod_base = OTHER; note = 5-methyl
  modified_base 17..18: mod_base = OTHER; note = bicyclic nucleic acid (BNA)
  source 1..18: mol_type = other RNA
cggtaagttctgtccaag

SEQ ID NO: 5456 - RNA, 17 nt, synthetic construct
  misc_feature 1..17: note = Description of Artificial Sequence: Synthetic Antisense oligonucleotide
  modified_base 1: mod_base = OTHER; note = 5-methyl
  modified_base 10: mod_base = OTHER; note = 5-methyl
  modified_base 14..15: mod_base = OTHER; note = 5-methyl
  modified_base 16..17: mod_base = OTHER; note = bicyclic nucleic acid (BNA)
  source 1..17: mol_type = other RNA
cggtaagttctgtccaa

SEQ ID NO: 5457 - RNA, 16 nt, synthetic construct
  misc_feature 1..16: note = Description of Artificial Sequence: Synthetic Antisense oligonucleotide
  modified_base 1: mod_base = OTHER; note = 5-methyl
  modified_base 10: mod_base = OTHER; note = 5-methyl
  modified_base 14..15: mod_base = OTHER; note = 5-methyl
  modified_base 15..16: mod_base = OTHER; note = bicyclic nucleic acid (BNA)
  source 1..16: mol_type = other RNA
cggtaagttctgtcca

SEQ ID NO: 5458 - RNA, 15 nt, synthetic construct
  misc_feature 1..15: note = Description of Artificial Sequence: Synthetic Antisense oligonucleotide
  modified_base 1: mod_base = OTHER; note = 5-methyl
  modified_base 10: mod_base = OTHER; note = 5-methyl
  modified_base 14..15: mod_base = OTHER; note = 5-methyl
  modified_base 14..15: mod_base = OTHER; note = bicyclic nucleic acid (BNA)
  source 1..15: mol_type = other RNA
cggtaagttctgtcc

SEQ ID NO: 5459 - DNA, 14 bp, synthetic construct
  misc_feature 1..14: note = Description of Artificial Sequence: Synthetic Antisense oligonucleotide
  misc_feature 1..14: note = Original Sequence: cgguaaguucugtc
  modified_base 1: mod_base = OTHER; note = 5-methyl
  modified_base 10: mod_base = OTHER; note = 5-methyl
  modified_base 14: mod_base = OTHER; note = 5-methyl
  modified_base 13..14: mod_base = OTHER; note = bicyclic nucleic acid (BNA)
  source 1..14: mol_type = other DNA
  modified_base 4: mod_base = OTHER; note = Uracil
  modified_base 8: mod_base = OTHER; note = Uracil
  modified_base 9: mod_base = OTHER; note = Uracil
  modified_base 11: mod_base = OTHER; note = Uracil
cggtaagttctgtc

SEQ ID NO: 5460 - DNA, 13 bp, synthetic construct
  misc_feature 1..13: note = Description of Artificial Sequence: Synthetic Antisense oligonucleotide
  misc_feature 1..13: note = Original Sequence: cgguaaguucugt
  modified_base 1: mod_base = OTHER; note = 5-methyl
  modified_base 10: mod_base = OTHER; note = 5-methyl
  modified_base 12..13: mod_base = OTHER; note = bicyclic nucleic acid (BNA)
  source 1..13: mol_type = other DNA
  modified_base 4: mod_base = OTHER; note = Uracil
  modified_base 8: mod_base = OTHER; note = Uracil
  modified_base 9: mod_base = OTHER; note = Uracil
  modified_base 11: mod_base = OTHER; note = Uracil
cggtaagttctgt

SEQ ID NO: 5461 - DNA, 12 bp, synthetic construct
  misc_feature 1..12: note = Description of Artificial Sequence: Synthetic Antisense oligonucleotide
  misc_feature 1..12: note = Original Sequence: cgguaaguuctg
  modified_base 1: mod_base = OTHER; note = 5-methyl
  modified_base 10: mod_base = OTHER; note = 5-methyl
  modified_base 11..12: mod_base = OTHER; note = bicyclic nucleic acid (BNA)
  source 1..12: mol_type = other DNA
  modified_base 4: mod_base = OTHER; note = Uracil
  modified_base 8: mod_base = OTHER; note = Uracil
  modified_base 9: mod_base = OTHER; note = Uracil
cggtaagttctg

SEQ ID NO: 5462 - DNA, 11 bp, synthetic construct
  misc_feature 1..11: note = Description of Artificial Sequence: Synthetic Antisense oligonucleotide
  misc_feature 1..11: note = Original Sequence: cgguaaguuct
  modified_base 1: mod_base = OTHER; note = 5-methyl
  modified_base 10: mod_base = OTHER; note = 5-methyl
  modified_base 10..11: mod_base = OTHER; note = bicyclic nucleic acid (BNA)
  source 1..11: mol_type = other DNA
  modified_base 4: mod_base = OTHER; note = Uracil
  modified_base 8: mod_base = OTHER; note = Uracil
  modified_base 9: mod_base = OTHER; note = Uracil
cggtaagttct

SEQ ID NO: 5463 - DNA, 10 bp, synthetic construct
  misc_feature 1..10: note = Description of Artificial Sequence: Synthetic Antisense oligonucleotide
  misc_feature 1..10: note = Original Sequence: cgguaagutc
  modified_base 1: mod_base = OTHER; note = 5-methyl
  modified_base 10: mod_base = OTHER; note = 5-methyl
  modified_base 9..10: mod_base = OTHER; note = bicyclic nucleic acid (BNA)
  source 1..10: mol_type = other DNA
  modified_base 4: mod_base = OTHER; note = Uracil
  modified_base 8: mod_base = OTHER; note = Uracil
cggtaagttc

SEQ ID NO: 5464-5465 - skipped (2 entries)

SEQ ID NO: 5466 - RNA, 20 nt, synthetic construct
  misc_feature 1..20: note = Description of Artificial Sequence: Synthetic Antisense oligonucleotide
  modified_base 2: mod_base = OTHER; note = 5-methyl
  modified_base 11: mod_base = OTHER; note = 5-methyl
  modified_base 15..16: mod_base = OTHER; note = 5-methyl
  modified_base 20: mod_base = OTHER; note = 5-methyl
  modified_base 19..20: mod_base = OTHER; note = bicyclic nucleic acid (BNA)
  source 1..20: mol_type = other RNA
tcggtaagttctgtccaagc

SEQ ID NO: 5467 - RNA, 19 nt, synthetic construct
  misc_feature 1..19: note = Description of Artificial Sequence: Synthetic Antisense oligonucleotide
  modified_base 2: mod_base = OTHER; note = 5-methyl
  modified_base 11: mod_base = OTHER; note = 5-methyl
  modified_base 15..16: mod_base = OTHER; note = 5-methyl
  modified_base 18..19: mod_base = OTHER; note = bicyclic nucleic acid (BNA)
  source 1..19: mol_type = other RNA
tcggtaagttctgtccaag

SEQ ID NO: 5468 - RNA, 18 nt, synthetic construct
  misc_feature 1..18: note = Description of Artificial Sequence: Synthetic Antisense oligonucleotide
  modified_base 2: mod_base = OTHER; note = 5-methyl
  modified_base 11: mod_base = OTHER; note = 5-methyl
  modified_base 15..16: mod_base = OTHER; note = 5-methyl
  modified_base 17..18: mod_base = OTHER; note = bicyclic nucleic acid (BNA)
  source 1..18: mol_type = other RNA
tcggtaagttctgtccaa

SEQ ID NO: 5469 - RNA, 17 nt, synthetic construct
  misc_feature 1..17: note = Description of Artificial Sequence: Synthetic Antisense oligonucleotide
  modified_base 2: mod_base = OTHER; note = 5-methyl
  modified_base 11: mod_base = OTHER; note = 5-methyl
  modified_base 15..16: mod_base = OTHER; note = 5-methyl
  modified_base 16..17: mod_base = OTHER; note = bicyclic nucleic acid (BNA)
  source 1..17: mol_type = other RNA
tcggtaagttctgtcca

SEQ ID NO: 5470 - RNA, 16 nt, synthetic construct
  misc_feature 1..16: note = Description of Artificial Sequence: Synthetic Antisense oligonucleotide
  modified_base 2: mod_base = OTHER; note = 5-methyl
  modified_base 11: mod_base = OTHER; note = 5-methyl
  modified_base 15..16: mod_base = OTHER; note = 5-methyl
  modified_base 15..16: mod_base = OTHER; note = bicyclic nucleic acid (BNA)
  source 1..16: mol_type = other RNA
tcggtaagttctgtcc

SEQ ID NO: 5471 - DNA, 15 bp, synthetic construct
  misc_feature 1..15: note = Description of Artificial Sequence: Synthetic Antisense oligonucleotide
  misc_feature 1..15: note = Original Sequence: ucgguaaguucugtc
  modified_base 2: mod_base = OTHER; note = 5-methyl
  modified_base 11: mod_base = OTHER; note = 5-methyl
  modified_base 15: mod_base = OTHER; note = 5-methyl
  modified_base 14..15: mod_base = OTHER; note = bicyclic nucleic acid (BNA)
  source 1..15: mol_type = other DNA
  modified_base 1: mod_base = OTHER; note = Uracil
  modified_base 5: mod_base = OTHER; note = Uracil
  modified_base 9: mod_base = OTHER; note = Uracil
  modified_base 10: mod_base = OTHER; note = Uracil
  modified_base 12: mod_base = OTHER; note = Uracil
tcggtaagttctgtc

SEQ ID NO: 5472 - DNA, 14 bp, synthetic construct
  misc_feature 1..14: note = Description of Artificial Sequence: Synthetic Antisense oligonucleotide
  misc_feature 1..14: note = Original Sequence: ucgguaaguucugt
  modified_base 2: mod_base = OTHER; note = 5-methyl
  modified_base 11: mod_base = OTHER; note = 5-methyl
  modified_base 13..14: mod_base = OTHER; note = bicyclic nucleic acid (BNA)
  source 1..14: mol_type = other DNA
  modified_base 1: mod_base = OTHER; note = Uracil
  modified_base 5: mod_base = OTHER; note = Uracil
  modified_base 9: mod_base = OTHER; note = Uracil
  modified_base 10: mod_base = OTHER; note = Uracil
  modified_base 12: mod_base = OTHER; note = Uracil
tcggtaagttctgt

SEQ ID NO: 5473 - DNA, 13 bp, synthetic construct
  misc_feature 1..13: note = Description of Artificial Sequence: Synthetic Antisense oligonucleotide
  misc_feature 1..13: note = Original Sequence: ucgguaaguuctg
  modified_base 2: mod_base = OTHER; note = 5-methyl
  modified_base 11: mod_base = OTHER; note = 5-methyl
  modified_base 12..13: mod_base = OTHER; note = bicyclic nucleic acid (BNA)
  source 1..13: mol_type = other DNA
  modified_base 1: mod_base = OTHER; note = Uracil
  modified_base 5: mod_base = OTHER; note = Uracil
  modified_base 9: mod_base = OTHER; note = Uracil
  modified_base 10: mod_base = OTHER; note = Uracil
tcggtaagttctg

SEQ ID NO: 5474 - DNA, 12 bp, synthetic construct
  misc_feature 1..12: note = Description of Artificial Sequence: Synthetic Antisense oligonucleotide
  misc_feature 1..12: note = Original Sequence: ucgguaaguuct
  modified_base 2: mod_base = OTHER; note = 5-methyl
  modified_base 11: mod_base = OTHER; note = 5-methyl
  modified_base 11..12: mod_base = OTHER; note = bicyclic nucleic acid (BNA)
  source 1..12: mol_type = other DNA
  modified_base 1: mod_base = OTHER; note = Uracil
  modified_base 5: mod_base = OTHER; note = Uracil
  modified_base 9: mod_base = OTHER; note = Uracil
  modified_base 10: mod_base = OTHER; note = Uracil
tcggtaagttct

SEQ ID NO: 5475 - DNA, 11 bp, synthetic construct
  misc_feature 1..11: note = Description of Artificial Sequence: Synthetic Antisense oligonucleotide
  misc_feature 1..11: note = Original Sequence: ucgguaagutc
  modified_base 2: mod_base = OTHER; note = 5-methyl
  modified_base 11: mod_base = OTHER; note = 5-methyl
  modified_base 10..11: mod_base = OTHER; note = bicyclic nucleic acid (BNA)
  source 1..11: mol_type = other DNA
  modified_base 1: mod_base = OTHER; note = Uracil
  modified_base 5: mod_base = OTHER; note = Uracil
  modified_base 9: mod_base = OTHER; note = Uracil
tcggtaagttc

SEQ ID NO: 5476 - DNA, 10 bp, synthetic construct
  misc_feature 1..10: note = Description of Artificial Sequence: Synthetic Antisense oligonucleotide
  misc_feature 1..10: note = Original Sequence: ucgguaagtt
  modified_base 2: mod_base = OTHER; note = 5-methyl
  modified_base 9..10: mod_base = OTHER; note = bicyclic nucleic acid (BNA)
  source 1..10: mol_type = other DNA
  modified_base 1: mod_base = OTHER; note = Uracil
  modified_base 5: mod_base = OTHER; note = Uracil
tcggtaagtt

SEQ ID NO: 5477 - skipped

SEQ ID NO: 5478 - RNA, 20 nt, synthetic construct
  misc_feature 1..20: note = Description of Artificial Sequence: Synthetic Antisense oligonucleotide
  modified_base 3: mod_base = OTHER; note = 5-methyl
  modified_base 12: mod_base = OTHER; note = 5-methyl
  modified_base 16..17: mod_base = OTHER; note = 5-methyl
  modified_base 19..20: mod_base = OTHER; note = bicyclic nucleic acid (BNA)
  source 1..20: mol_type = other RNA
gtcggtaagttctgtccaag

SEQ ID NO: 5479 - RNA, 19 nt, synthetic construct
  misc_feature 1..19: note = Description of Artificial Sequence: Synthetic Antisense oligonucleotide
  modified_base 3: mod_base = OTHER; note = 5-methyl
  modified_base 12: mod_base = OTHER; note = 5-methyl
  modified_base 16..17: mod_base = OTHER; note = 5-methyl
  modified_base 18..19: mod_base = OTHER; note = bicyclic nucleic acid (BNA)
  source 1..19: mol_type = other RNA
gtcggtaagttctgtccaa

SEQ ID NO: 5480 - RNA, 18 nt, synthetic construct
  misc_feature 1..18: note = Description of Artificial Sequence: Synthetic Antisense oligonucleotide
  modified_base 3: mod_base = OTHER; note = 5-methyl
  modified_base 12: mod_base = OTHER; note = 5-methyl
  modified_base 16..17: mod_base = OTHER; note = 5-methyl
  modified_base 17..18: mod_base = OTHER; note = bicyclic nucleic acid (BNA)
  source 1..18: mol_type = other RNA
gtcggtaagttctgtcca

SEQ ID NO: 5481 - RNA, 17 nt, synthetic construct
  misc_feature 1..17: note = Description of Artificial Sequence: Synthetic Antisense oligonucleotide
  modified_base 3: mod_base = OTHER; note = 5-methyl
  modified_base 12: mod_base = OTHER; note = 5-methyl
  modified_base 16..17: mod_base = OTHER; note = 5-methyl
  modified_base 16..17: mod_base = OTHER; note = bicyclic nucleic acid (BNA)
  source 1..17: mol_type = other RNA
gtcggtaagttctgtcc

SEQ ID NO: 5482 - DNA, 16 bp, synthetic construct
  misc_feature 1..16: note = Description of Artificial Sequence: Synthetic Antisense oligonucleotide
  misc_feature 1..16: note = Original Sequence: gucgguaaguucugtc
  modified_base 3: mod_base = OTHER; note = 5-methyl
  modified_base 12: mod_base = OTHER; note = 5-methyl
  modified_base 16: mod_base = OTHER; note = 5-methyl
  modified_base 15..16: mod_base = OTHER; note = bicyclic nucleic acid (BNA)
  source 1..16: mol_type = other DNA
  modified_base 2: mod_base = OTHER; note = Uracil
  modified_base 6: mod_base = OTHER; note = Uracil
  modified_base 10: mod_base = OTHER; note = Uracil
  modified_base 11: mod_base = OTHER; note = Uracil
  modified_base 13: mod_base = OTHER; note = Uracil
gtcggtaagttctgtc

SEQ ID NO: 5483 - DNA, 15 bp, synthetic construct
  misc_feature 1..15: note = Description of Artificial Sequence: Synthetic Antisense oligonucleotide
  misc_feature 1..15: note = Original Sequence: gucgguaaguucugt
  modified_base 3: mod_base = OTHER; note = 5-methyl
  modified_base 12: mod_base = OTHER; note = 5-methyl
  modified_base 14..15: mod_base = OTHER; note = bicyclic nucleic acid (BNA)
  source 1..15: mol_type = other DNA
  modified_base 2: mod_base = OTHER; note = Uracil
  modified_base 6: mod_base = OTHER; note = Uracil
  modified_base 10: mod_base = OTHER; note = Uracil
  modified_base 11: mod_base = OTHER; note = Uracil
  modified_base 13: mod_base = OTHER; note = Uracil
gtcggtaagttctgt

SEQ ID NO: 5484 - DNA, 14 bp, synthetic construct
  misc_feature 1..14: note = Description of Artificial Sequence: Synthetic Antisense oligonucleotide
  misc_feature 1..14: note = Original Sequence: gucgguaaguuctg
  modified_base 3: mod_base = OTHER; note = 5-methyl
  modified_base 12: mod_base = OTHER; note = 5-methyl
  modified_base 13..14: mod_base = OTHER; note = bicyclic nucleic acid (BNA)
  source 1..14: mol_type = other DNA
  modified_base 2: mod_base = OTHER; note = Uracil
  modified_base 6: mod_base = OTHER; note = Uracil
  modified_base 10: mod_base = OTHER; note = Uracil
  modified_base 11: mod_base = OTHER; note = Uracil
gtcggtaagttctg

SEQ ID NO: 5485 - DNA, 13 bp, synthetic construct
  misc_feature 1..13: note = Description of Artificial Sequence: Synthetic Antisense oligonucleotide
  misc_feature 1..13: note = Original Sequence: gucgguaaguuct
  modified_base 3: mod_base = OTHER; note = 5-methyl
  modified_base 12: mod_base = OTHER; note = 5-methyl
  modified_base 12..13: mod_base = OTHER; note = bicyclic nucleic acid (BNA)
  source 1..13: mol_type = other DNA
  modified_base 2: mod_base = OTHER; note = Uracil
  modified_base 6: mod_base = OTHER; note = Uracil
  modified_base 10: mod_base = OTHER; note = Uracil
  modified_base 11: mod_base = OTHER; note = Uracil
gtcggtaagttct

SEQ ID NO: 5486 - DNA, 12 bp, synthetic construct
  misc_feature 1..12: note = Description of Artificial Sequence: Synthetic Antisense oligonucleotide
  misc_feature 1..12: note = Original Sequence: gucgguaagutc
  modified_base 3: mod_base = OTHER; note = 5-methyl
  modified_base 12: mod_base = OTHER; note = 5-methyl
  modified_base 11..12: mod_base = OTHER; note = bicyclic nucleic acid (BNA)
  source 1..12: mol_type = other DNA
  modified_base 2: mod_base = OTHER; note = Uracil
  modified_base 6: mod_base = OTHER; note = Uracil
  modified_base 10: mod_base = OTHER; note = Uracil
gtcggtaagttc

SEQ ID NO: 5487 - DNA, 11 bp, synthetic construct
  misc_feature 1..11: note = Description of Artificial Sequence: Synthetic Antisense oligonucleotide
  misc_feature 1..11: note = Original Sequence: gucgguaagtt
  modified_base 3: mod_base = OTHER; note = 5-methyl
  modified_base 10..11: mod_base = OTHER; note = bicyclic nucleic acid (BNA)
  source 1..11: mol_type = other DNA
  modified_base 2: mod_base = OTHER; note = Uracil
  modified_base 6: mod_base = OTHER; note = Uracil
gtcggtaagtt

SEQ ID NO: 5488 - DNA, 10 bp, synthetic construct
  misc_feature 1..10: note = Description of Artificial Sequence: Synthetic Antisense oligonucleotide
  misc_feature 1..10: note = Original Sequence: gucgguaagt
  modified_base 3: mod_base = OTHER; note = 5-methyl
  modified_base 9..10: mod_base = OTHER; note = bicyclic nucleic acid (BNA)
  source 1..10: mol_type = other DNA
  modified_base 2: mod_base = OTHER; note = Uracil
  modified_base 6: mod_base = OTHER; note = Uracil
gtcggtaagt

SEQ ID NO: 5489 - RNA, 20 nt, synthetic construct
  misc_feature 1..20: note = Description of Artificial Sequence: Synthetic Antisense oligonucleotide
  modified_base 4: mod_base = OTHER; note = 5-methyl
  modified_base 13: mod_base = OTHER; note = 5-methyl
  modified_base 17..18: mod_base = OTHER; note = 5-methyl
  modified_base 19..20: mod_base = OTHER; note = bicyclic nucleic acid (BNA)
  source 1..20: mol_type = other RNA
agtcggtaagttctgtccaa

SEQ ID NO: 5490 - RNA, 19 nt, synthetic construct
  misc_feature 1..19: note = Description of Artificial Sequence: Synthetic Antisense oligonucleotide
  modified_base 4: mod_base = OTHER; note = 5-methyl
  modified_base 13: mod_base = OTHER; note = 5-methyl
  modified_base 17..18: mod_base = OTHER; note = 5-methyl
  modified_base 18..19: mod_base = OTHER; note = bicyclic nucleic acid (BNA)
  source 1..19: mol_type = other RNA
agtcggtaagttctgtcca

SEQ ID NO: 5491 - DNA, 17 bp, synthetic construct
  misc_feature 1..17: note = Description of Artificial Sequence: Synthetic Antisense oligonucleotide
  misc_feature 1..17: note = Original Sequence: agucgguaaguucugtc
  modified_base 4: mod_base = OTHER; note = 5-methyl
  modified_base 13: mod_base = OTHER; note = 5-methyl
  modified_base 17: mod_base = OTHER; note = 5-methyl
  modified_base 16..17: mod_base = OTHER; note = bicyclic nucleic acid (BNA)
  source 1..17: mol_type = other DNA
  modified_base 3: mod_base = OTHER; note = Uracil
  modified_base 7: mod_base = OTHER; note = Uracil
  modified_base 11: mod_base = OTHER; note = Uracil
  modified_base 12: mod_base = OTHER; note = Uracil
  modified_base 14: mod_base = OTHER; note = Uracil
agtcggtaagttctgtc

SEQ ID NO: 5492 - DNA, 16 bp, synthetic construct
  misc_feature 1..16: note = Description of Artificial Sequence: Synthetic Antisense oligonucleotide
  misc_feature 1..16: note = Original Sequence: agucgguaaguucugt
  modified_base 4: mod_base = OTHER; note = 5-methyl
  modified_base 13: mod_base = OTHER; note = 5-methyl
  modified_base 15..16: mod_base = OTHER; note = bicyclic nucleic acid (BNA)
  source 1..16: mol_type = other DNA
  modified_base 3: mod_base = OTHER; note = Uracil
  modified_base 7: mod_base = OTHER; note = Uracil
  modified_base 11: mod_base = OTHER; note = Uracil
  modified_base 12: mod_base = OTHER; note = Uracil
  modified_base 14: mod_base = OTHER; note = Uracil
agtcggtaagttctgt

SEQ ID NO: 5493 - DNA, 15 bp, synthetic construct
  misc_feature 1..15: note = Description of Artificial Sequence: Synthetic Antisense oligonucleotide
  misc_feature 1..15: note = Original Sequence: agucgguaaguuctg
  modified_base 4: mod_base = OTHER; note = 5-methyl
  modified_base 13: mod_base = OTHER; note = 5-methyl
  modified_base 14..15: mod_base = OTHER; note = bicyclic nucleic acid (BNA)
  source 1..15: mol_type = other DNA
  modified_base 3: mod_base = OTHER; note = Uracil
  modified_base 7: mod_base = OTHER; note = Uracil
  modified_base 11: mod_base = OTHER; note = Uracil
  modified_base 12: mod_base = OTHER; note = Uracil
agtcggtaagttctg

SEQ ID NO: 5494 - DNA, 14 bp, synthetic construct
  misc_feature 1..14: note = Description of Artificial Sequence: Synthetic Antisense oligonucleotide
  misc_feature 1..14: note = Original Sequence: agucgguaaguuct
  modified_base 4: mod_base = OTHER; note = 5-methyl
  modified_base 13: mod_base = OTHER; note = 5-methyl
  modified_base 13..14: mod_base = OTHER; note = bicyclic nucleic acid (BNA)
  source 1..14: mol_type = other DNA
  modified_base 3: mod_base = OTHER; note = Uracil
  modified_base 7: mod_base = OTHER; note = Uracil
  modified_base 11: mod_base = OTHER; note = Uracil
  modified_base 12: mod_base = OTHER; note = Uracil
agtcggtaagttct

SEQ ID NO: 5495 - DNA, 13 bp, synthetic construct
  misc_feature 1..13: note = Description of Artificial Sequence: Synthetic Antisense oligonucleotide
  misc_feature 1..13: note = Original Sequence: agucgguaagutc
  modified_base 4: mod_base = OTHER; note = 5-methyl
  modified_base 13: mod_base = OTHER; note = 5-methyl
  modified_base 12..13: mod_base = OTHER; note = bicyclic nucleic acid (BNA)
  source 1..13: mol_type = other DNA
  modified_base 3: mod_base = OTHER; note = Uracil
  modified_base 7: mod_base = OTHER; note = Uracil
  modified_base 11: mod_base = OTHER; note = Uracil
agtcggtaagttc

SEQ ID NO: 5496 - DNA, 12 bp, synthetic construct
  misc_feature 1..12: note = Description of Artificial Sequence: Synthetic Antisense oligonucleotide
  misc_feature 1..12: note = Original Sequence: agucgguaagtt
  modified_base 4: mod_base = OTHER; note = 5-methyl
  modified_base 11..12: mod_base = OTHER; note = bicyclic nucleic acid (BNA)
  source 1..12: mol_type = other DNA
  modified_base 3: mod_base = OTHER; note = Uracil
  modified_base 7: mod_base = OTHER; note = Uracil
agtcggtaagtt

SEQ ID NO: 5497 - DNA, 11 bp, synthetic construct
  misc_feature 1..11: note = Description of Artificial Sequence: Synthetic Antisense oligonucleotide
  misc_feature 1..11: note = Original Sequence: agucgguaagt
  modified_base 4: mod_base = OTHER; note = 5-methyl
  modified_base 10..11: mod_base = OTHER; note = bicyclic nucleic acid (BNA)
  source 1..11: mol_type = other DNA
  modified_base 3: mod_base = OTHER; note = Uracil
  modified_base 7: mod_base = OTHER; note = Uracil
agtcggtaagt

SEQ ID NO: 5498 - RNA, 20 nt, synthetic construct
  misc_feature 1..20: note = Description of Artificial Sequence: Synthetic Antisense oligonucleotide
  modified_base 1: mod_base = OTHER; note = 5-methyl
  modified_base 5: mod_base = OTHER; note = 5-methyl
  modified_base 14: mod_base = OTHER; note = 5-methyl
  modified_base 18..19: mod_base = OTHER; note = 5-methyl
  modified_base 19..20: mod_base = OTHER; note = bicyclic nucleic acid (BNA)
  source 1..20: mol_type = other RNA
cagtcggtaagttctgtcca

SEQ ID NO: 5499 - RNA, 19 nt, synthetic construct
  misc_feature 1..19: note = Description of Artificial Sequence: Synthetic Antisense oligonucleotide
  modified_base 1: mod_base = OTHER; note = 5-methyl
  modified_base 5: mod_base = OTHER; note = 5-methyl
  modified_base 14: mod_base = OTHER; note = 5-methyl
  modified_base 18..19: mod_base = OTHER; note = 5-methyl
  modified_base 18..19: mod_base = OTHER; note = bicyclic nucleic acid (BNA)
  source 1..19: mol_type = other RNA
cagtcggtaagttctgtcc

SEQ ID NO: 5500 - DNA, 18 bp, synthetic construct
  misc_feature 1..18: note = Description of Artificial Sequence: Synthetic Antisense oligonucleotide
  misc_feature 1..18: note = Original Sequence: cagucgguaaguucugtc
  modified_base 1: mod_base = OTHER; note = 5-methyl
  modified_base 5: mod_base = OTHER; note = 5-methyl
  modified_base 14: mod_base = OTHER; note = 5-methyl
  modified_base 18: mod_base = OTHER; note = 5-methyl
  modified_base 17..18: mod_base = OTHER; note = bicyclic nucleic acid (BNA)
  source 1..18: mol_type = other DNA
  modified_base 4: mod_base = OTHER; note = Uracil
  modified_base 8: mod_base = OTHER; note = Uracil
  modified_base 12: mod_base = OTHER; note = Uracil
  modified_base 13: mod_base = OTHER; note = Uracil
  modified_base 15: mod_base = OTHER; note = Uracil
cagtcggtaagttctgtc

SEQ ID NO: 5501 - DNA, 17 bp, synthetic construct
  misc_feature 1..17: note = Description of Artificial Sequence: Synthetic Antisense oligonucleotide
  misc_feature 1..17: note = Original Sequence: cagucgguaaguucugt
  modified_base 1: mod_base = OTHER; note = 5-methyl
  modified_base 5: mod_base = OTHER; note = 5-methyl
  modified_base 14: mod_base = OTHER; note = 5-methyl
  modified_base 16..17: mod_base = OTHER; note = bicyclic nucleic acid (BNA)
  source 1..17: mol_type = other DNA
  modified_base 4: mod_base = OTHER; note = Uracil
  modified_base 8: mod_base = OTHER; note = Uracil
  modified_base 12: mod_base = OTHER; note = Uracil
  modified_base 13: mod_base = OTHER; note = Uracil
  modified_base 15: mod_base = OTHER; note = Uracil
cagtcggtaagttctgt

SEQ ID NO: 5502 - DNA, 16 bp, synthetic construct
  misc_feature 1..16: note = Description of Artificial Sequence: Synthetic Antisense oligonucleotide
  misc_feature 1..16: note = Original Sequence: cagucgguaaguuctg
  modified_base 1: mod_base = OTHER; note = 5-methyl
  modified_base 5: mod_base = OTHER; note = 5-methyl
  modified_base 14: mod_base = OTHER; note = 5-methyl
  modified_base 15..16: mod_base = OTHER; note = bicyclic nucleic acid (BNA)
  source 1..16: mol_type = other DNA
  modified_base 4: mod_base = OTHER; note = Uracil
  modified_base 8: mod_base = OTHER; note = Uracil
  modified_base 12: mod_base = OTHER; note = Uracil
  modified_base 13: mod_base = OTHER; note = Uracil
cagtcggtaagttctg

SEQ ID NO: 5503 - DNA, 15 bp, synthetic construct
  misc_feature 1..15: note = Description of Artificial Sequence: Synthetic Antisense oligonucleotide
  misc_feature 1..15: note = Original Sequence: cagucgguaaguuct
  modified_base 1: mod_base = OTHER; note = 5-methyl
  modified_base 5: mod_base = OTHER; note = 5-methyl
  modified_base 14: mod_base = OTHER; note = 5-methyl
  modified_base 14..15: mod_base = OTHER; note = bicyclic nucleic acid (BNA)
  source 1..15: mol_type = other DNA
  modified_base 4: mod_base = OTHER; note = Uracil
  modified_base 8: mod_base = OTHER; note = Uracil
  modified_base 12: mod_base = OTHER; note = Uracil
  modified_base 13: mod_base = OTHER; note = Uracil
cagtcggtaagttct

SEQ ID NO: 5504 - DNA, 14 bp, synthetic construct
  misc_feature 1..14: note = Description of Artificial Sequence: Synthetic Antisense oligonucleotide
  misc_feature 1..14: note = Original Sequence: cagucgguaagutc
  modified_base 1: mod_base = OTHER; note = 5-methyl
  modified_base 5: mod_base = OTHER; note = 5-methyl
  modified_base 14: mod_base = OTHER; note = 5-methyl
  modified_base 13..14: mod_base = OTHER; note = bicyclic nucleic acid (BNA)
  source 1..14: mol_type = other DNA
  modified_base 4: mod_base = OTHER; note = Uracil
  modified_base 8: mod_base = OTHER; note = Uracil
  modified_base 12: mod_base = OTHER; note = Uracil
cagtcggtaagttc

SEQ ID NO: 5505 - DNA, 13 bp, synthetic construct
  misc_feature 1..13: note = Description of Artificial Sequence: Synthetic Antisense oligonucleotide
  misc_feature 1..13: note = Original Sequence: cagucgguaagtt
  modified_base 1: mod_base = OTHER; note = 5-methyl
  modified_base 5: mod_base = OTHER; note = 5-methyl
  modified_base 12..13: mod_base = OTHER; note = bicyclic nucleic acid (BNA)
  source 1..13: mol_type = other DNA
  modified_base 4: mod_base = OTHER; note = Uracil
  modified_base 8: mod_base = OTHER; note = Uracil
cagtcggtaagtt

SEQ ID NO: 5506 - DNA, 12 bp, synthetic construct
  misc_feature 1..12: note = Description of Artificial Sequence: Synthetic Antisense oligonucleotide
  misc_feature 1..12: note = Original Sequence: cagucgguaagt
  modified_base 1: mod_base = OTHER; note = 5-methyl
  modified_base 5: mod_base = OTHER; note = 5-methyl
  modified_base 11..12: mod_base = OTHER; note = bicyclic nucleic acid (BNA)
  source 1..12: mol_type = other DNA
  modified_base 4: mod_base = OTHER; note = Uracil
  modified_base 8: mod_base = OTHER; note = Uracil
cagtcggtaagt

SEQ ID NO: 5507 - RNA, 20 nt, synthetic construct
  misc_feature 1..20: note = Description of Artificial Sequence: Synthetic Antisense oligonucleotide
  modified_base 1..2: mod_base = OTHER; note = 5-methyl
  modified_base 6: mod_base = OTHER; note = 5-methyl
  modified_base 15: mod_base = OTHER; note = 5-methyl
  modified_base 19..20: mod_base = OTHER; note = 5-methyl
  modified_base 19..20: mod_base = OTHER; note = bicyclic nucleic acid (BNA)
  source 1..20: mol_type = other RNA
ccagtcggtaagttctgtcc

SEQ ID NO: 5508 - DNA, 19 bp, synthetic construct
  misc_feature 1..19: note = Description of Artificial Sequence: Synthetic Antisense oligonucleotide
  misc_feature 1..19: note = Original Sequence: ccagucgguaaguucugtc
  modified_base 1..2: mod_base = OTHER; note = 5-methyl
  modified_base 6: mod_base = OTHER; note = 5-methyl
  modified_base 15: mod_base = OTHER; note = 5-methyl
  modified_base 19: mod_base = OTHER; note = 5-methyl
  modified_base 18..19: mod_base = OTHER; note = bicyclic nucleic acid (BNA)
  source 1..19: mol_type = other DNA
  modified_base 5: mod_base = OTHER; note = Uracil
  modified_base 9: mod_base = OTHER; note = Uracil
  modified_base 13: mod_base = OTHER; note = Uracil
  modified_base 14: mod_base = OTHER; note = Uracil
  modified_base 16: mod_base = OTHER; note = Uracil
ccagtcggtaagttctgtc

SEQ ID NO: 5509 - DNA, 18 bp, synthetic construct
  misc_feature 1..18: note = Description of Artificial Sequence: Synthetic Antisense oligonucleotide
  misc_feature 1..18: note = Original Sequence: ccagucgguaaguucugt
  modified_base 1..2: mod_base = OTHER; note = 5-methyl
  modified_base 6: mod_base = OTHER; note = 5-methyl
  modified_base 15: mod_base = OTHER; note = 5-methyl
  modified_base 17..18: mod_base = OTHER; note = bicyclic nucleic acid (BNA)
  source 1..18: mol_type = other DNA
  modified_base 5: mod_base = OTHER; note = Uracil
  modified_base 9: mod_base = OTHER; note = Uracil
  modified_base 13: mod_base = OTHER; note = Uracil
  modified_base 14: mod_base = OTHER; note = Uracil
  modified_base 16: mod_base = OTHER; note = Uracil
ccagtcggtaagttctgt

SEQ ID NO: 5510 - DNA, 17 bp, synthetic construct
  misc_feature 1..17: note = Description of Artificial Sequence: Synthetic Antisense oligonucleotide
  misc_feature 1..17: note = Original Sequence: ccagucgguaaguuctg
  modified_base 1..2: mod_base = OTHER; note = 5-methyl
  modified_base 6: mod_base = OTHER; note = 5-methyl
  modified_base 15: mod_base = OTHER; note = 5-methyl
  modified_base 16..17: mod_base = OTHER; note = bicyclic nucleic acid (BNA)
  source 1..17: mol_type = other DNA
  modified_base 5: mod_base = OTHER; note = Uracil
  modified_base 9: mod_base = OTHER; note = Uracil
  modified_base 13: mod_base = OTHER; note = Uracil
  modified_base 14: mod_base = OTHER; note = Uracil
ccagtcggtaagttctg

SEQ ID NO: 5511 - DNA, 16 bp, synthetic construct
  misc_feature 1..16: note = Description of Artificial Sequence: Synthetic Antisense oligonucleotide
  misc_feature 1..16: note = Original Sequence: ccagucgguaaguuct
  modified_base 1..2: mod_base = OTHER; note = 5-methyl
  modified_base 6: mod_base = OTHER; note = 5-methyl
  modified_base 15: mod_base = OTHER; note = 5-methyl
  modified_base 15..16: mod_base = OTHER; note = bicyclic nucleic acid (BNA)
  source 1..16: mol_type = other DNA
  modified_base 5: mod_base = OTHER; note = Uracil
  modified_base 9: mod_base = OTHER; note = Uracil
  modified_base 13: mod_base = OTHER; note = Uracil
  modified_base 14: mod_base = OTHER; note = Uracil
ccagtcggtaagttct

SEQ ID NO: 5512 - DNA, 15 bp, synthetic construct
  misc_feature 1..15: note = Description of Artificial Sequence: Synthetic Antisense oligonucleotide
  misc_feature 1..15: note = Original Sequence: ccagucgguaagutc
  modified_base 1..2: mod_base = OTHER; note = 5-methyl
  modified_base 6: mod_base = OTHER; note = 5-methyl
  modified_base 15: mod_base = OTHER; note = 5-methyl
  modified_base 14..15: mod_base = OTHER; note = bicyclic nucleic acid (BNA)
  source 1..15: mol_type = other DNA
  modified_base 5: mod_base = OTHER; note = Uracil
  modified_base 9: mod_base = OTHER; note = Uracil
  modified_base 13: mod_base = OTHER; note = Uracil
ccagtcggtaagttc

SEQ ID NO: 5513 - DNA, 14 bp, synthetic construct
  misc_feature 1..14: note = Description of Artificial Sequence: Synthetic Antisense oligonucleotide
  misc_feature 1..14: note = Original Sequence: ccagucgguaagtt
  modified_base 1..2: mod_base = OTHER; note = 5-methyl
  modified_base 6: mod_base = OTHER; note = 5-methyl
  modified_base 13..14: mod_base = OTHER; note = bicyclic nucleic acid (BNA)
  source 1..14: mol_type = other DNA
  modified_base 5: mod_base = OTHER; note = Uracil
  modified_base 9: mod_base = OTHER; note = Uracil
ccagtcggtaagtt

SEQ ID NO: 5514 - DNA, 13 bp, synthetic construct
  misc_feature 1..13: note = Description of Artificial Sequence: Synthetic Antisense oligonucleotide
  misc_feature 1..13: note = Original Sequence: ccagucgguaagt
  modified_base 1..2: mod_base = OTHER; note = 5-methyl
  modified_base 6: mod_base = OTHER; note = 5-methyl
  modified_base 12..13: mod_base = OTHER; note = bicyclic nucleic acid (BNA)
  source 1..13: mol_type = other DNA
  modified_base 5: mod_base = OTHER; note = Uracil
  modified_base 9: mod_base = OTHER; note = Uracil
ccagtcggtaagt

SEQ ID NO: 5515 - DNA, 20 bp, synthetic construct
  misc_feature 1..20: note = Description of Artificial Sequence: Synthetic Antisense oligonucleotide
  misc_feature 1..20: note = Original Sequence: gccagucgguaaguucugtc
  modified_base 2..3: mod_base = OTHER; note = 5-methyl
  modified_base 7: mod_base = OTHER; note = 5-methyl
  modified_base 16: mod_base = OTHER; note = 5-methyl
  modified_base 20: mod_base = OTHER; note = 5-methyl
  modified_base 19..20: mod_base = OTHER; note = bicyclic nucleic acid (BNA)
  source 1..20: mol_type = other DNA
  modified_base 6: mod_base = OTHER; note = Uracil
  modified_base 10: mod_base = OTHER; note = Uracil
  modified_base 14: mod_base = OTHER; note = Uracil
  modified_base 15: mod_base = OTHER; note = Uracil
  modified_base 17: mod_base = OTHER; note = Uracil
gccagtcggtaagttctgtc

SEQ ID NO: 5516 - DNA, 19 bp, synthetic construct
  misc_feature 1..19: note = Description of Artificial Sequence: Synthetic Antisense oligonucleotide
  misc_feature 1..19: note = Original Sequence: gccagucgguaaguucugt
  modified_base 2..3: mod_base = OTHER; note = 5-methyl
  modified_base 7: mod_base = OTHER; note = 5-methyl
  modified_base 16: mod_base = OTHER; note = 5-methyl
  modified_base 18..19: mod_base = OTHER; note = bicyclic nucleic acid (BNA)
  source 1..19: mol_type = other DNA
  modified_base 6: mod_base = OTHER; note = Uracil
  modified_base 10: mod_base = OTHER; note = Uracil
  modified_base 14: mod_base = OTHER; note = Uracil
  modified_base 15: mod_base = OTHER; note = Uracil
  modified_base 17: mod_base = OTHER; note = Uracil
gccagtcggtaagttctgt

SEQ ID NO: 5517 - DNA, 18 bp, synthetic construct
  misc_feature 1..18: note = Description of Artificial Sequence: Synthetic Antisense oligonucleotide
  misc_feature 1..18: note = Original Sequence: gccagucgguaaguuctg
  modified_base 2..3: mod_base = OTHER; note = 5-methyl
  modified_base 7: mod_base = OTHER; note = 5-methyl
  modified_base 16: mod_base = OTHER; note = 5-methyl
  modified_base 17..18: mod_base = OTHER; note = bicyclic nucleic acid (BNA)
  source 1..18: mol_type = other DNA
  modified_base 6: mod_base = OTHER; note = Uracil
  modified_base 10: mod_base = OTHER; note = Uracil
  modified_base 14: mod_base = OTHER; note = Uracil
  modified_base 15: mod_base = OTHER; note = Uracil
gccagtcggtaagttctg

SEQ ID NO: 5518 - DNA, 17 bp, synthetic construct
  misc_feature 1..17: note = Description of Artificial Sequence: Synthetic Antisense oligonucleotide
  misc_feature 1..17: note = Original Sequence: gccagucgguaaguuct
  modified_base 2..3: mod_base = OTHER; note = 5-methyl
  modified_base 7: mod_base = OTHER; note = 5-methyl
  modified_base 16: mod_base = OTHER; note = 5-methyl
  modified_base 16..17: mod_base = OTHER; note = bicyclic nucleic acid (BNA)
  source 1..17: mol_type = other DNA
  modified_base 6: mod_base = OTHER; note = Uracil
  modified_base 10: mod_base = OTHER; note = Uracil
  modified_base 14: mod_base = OTHER; note = Uracil
  modified_base 15: mod_base = OTHER; note = Uracil
gccagtcggtaagttct

SEQ ID NO: 5519 - DNA, 16 bp, synthetic construct
  misc_feature 1..16: note = Description of Artificial Sequence: Synthetic Antisense oligonucleotide
  misc_feature 1..16: note = Original Sequence: gccagucgguaagutc
  modified_base 2..3: mod_base = OTHER; note = 5-methyl
  modified_base 7: mod_base = OTHER; note = 5-methyl
  modified_base 16: mod_base = OTHER; note = 5-methyl
  modified_base 15..16: mod_base = OTHER; note = bicyclic nucleic acid (BNA)
  source 1..16: mol_type = other DNA
  modified_base 6: mod_base = OTHER; note = Uracil
  modified_base 10: mod_base = OTHER; note = Uracil
  modified_base 14: mod_base = OTHER; note = Uracil
gccagtcggtaagttc

SEQ ID NO: 5520 - DNA, 15 bp, synthetic construct
  misc_feature 1..15: note = Description of Artificial Sequence: Synthetic Antisense oligonucleotide
  misc_feature 1..15: note = Original Sequence: gccagucgguaagtt
  modified_base 2..3: mod_base = OTHER; note = 5-methyl
  modified_base 7: mod_base = OTHER; note = 5-methyl
  modified_base 14..15: mod_base = OTHER; note = bicyclic nucleic acid (BNA)
  source 1..15: mol_type = other DNA
  modified_base 6: mod_base = OTHER; note = Uracil
  modified_base 10: mod_base = OTHER; note = Uracil
gccagtcggtaagtt

SEQ ID NO: 5521 - DNA, 14 bp, synthetic construct
  misc_feature 1..14: note = Description of Artificial Sequence: Synthetic Antisense oligonucleotide
  misc_feature 1..14: note = Original Sequence: gccagucgguaagt
  modified_base 2..3: mod_base = OTHER; note = 5-methyl
  modified_base 7: mod_base = OTHER; note = 5-methyl
  modified_base 13..14: mod_base = OTHER; note = bicyclic nucleic acid (BNA)
  source 1..14: mol_type = other DNA
  modified_base 6: mod_base = OTHER; note = Uracil
  modified_base 10: mod_base = OTHER; note = Uracil
gccagtcggtaagt

SEQ ID NO: 5522 - DNA, 20 bp, synthetic construct
  misc_feature 1..20: note = Description of Artificial Sequence: Synthetic Antisense oligonucleotide
  misc_feature 1..20: note = Original Sequence: ucaaggaagauggcauuuct
  modified_base 2: mod_base = OTHER; note = 5-methyl
  modified_base 14: mod_base = OTHER; note = 5-methyl
  modified_base 19: mod_base = OTHER; note = 5-methyl
  modified_base 19..20: mod_base = OTHER; note = bicyclic nucleic acid (BNA)
  source 1..20: mol_type = other DNA
  modified_base 1: mod_base = OTHER; note = Uracil
  modified_base 11: mod_base = OTHER; note = Uracil
  modified_base 16: mod_base = OTHER; note = Uracil
  modified_base 17: mod_base = OTHER; note = Uracil
  modified_base 18: mod_base = OTHER; note = Uracil
tcaaggaagatggcatttct

SEQ ID NO: 5523 - RNA, 22 nt, synthetic construct
  misc_feature 1..22: note = Description of Artificial Sequence: Synthetic Antisense oligonucleotide
  modified_base 2: mod_base = OTHER; note = 5-methyl
  modified_base 14: mod_base = OTHER; note = 5-methyl
  modified_base 19: mod_base = OTHER; note = 5-methyl
  modified_base 21..22: mod_base = OTHER; note = bicyclic nucleic acid (BNA)
  source 1..22: mol_type = other RNA
tcaaggaagatggcatttctag

SEQ ID NO: 5524 - DNA, 16 bp, synthetic construct
  misc_feature 1..16: note = Description of Artificial Sequence: Synthetic Antisense oligonucleotide
  misc_feature 1..16: note = Original Sequence: ucaaggaagauggcat
  modified_base 2: mod_base = OTHER; note = 5-methyl
  modified_base 14: mod_base = OTHER; note = 5-methyl
  modified_base 15..16: mod_base = OTHER; note = bicyclic nucleic acid (BNA)
  source 1..16: mol_type = other DNA
  modified_base 1: mod_base = OTHER; note = Uracil
  modified_base 11: mod_base = OTHER; note = Uracil
tcaaggaagatggcat

SEQ ID NO: 5525 - DNA, 15 bp, synthetic construct
  misc_feature 1..15: note = Description of Artificial Sequence: Synthetic Antisense oligonucleotide
  misc_feature 1..15: note = Original Sequence: gaagauggcauuuct
  modified_base 9: mod_base = OTHER; note = 5-methyl
  modified_base 14: mod_base = OTHER; note = 5-methyl
  modified_base 14..15: mod_base = OTHER; note = bicyclic nucleic acid (BNA)
  source 1..15: mol_type = other DNA
  modified_base 6: mod_base = OTHER; note = Uracil
  modified_base 11: mod_base = OTHER; note = Uracil
  modified_base 12: mod_base = OTHER; note = Uracil
  modified_base 13: mod_base = OTHER; note = Uracil
gaagatggcatttct

SEQ ID NO: 5526 - DNA, 21 bp, synthetic construct
  misc_feature 1..21: note = Description of Artificial Sequence: Synthetic Antisense oligonucleotide
  misc_feature 1..21: note = Original Sequence: ucaaggaagauggcauuucta
  modified_base 2: mod_base = OTHER; note = 5-methyl
  modified_base 14: mod_base = OTHER; note = 5-methyl
  modified_base 19: mod_base = OTHER; note = 5-methyl
  modified_base 20..21: mod_base = OTHER; note = bicyclic nucleic acid (BNA)
  source 1..21: mol_type = other DNA
  modified_base 1: mod_base = OTHER; note = Uracil
  modified_base 11: mod_base = OTHER; note = Uracil
  modified_base 16: mod_base = OTHER; note = Uracil
  modified_base 17: mod_base = OTHER; note = Uracil
  modified_base 18: mod_base = OTHER; note = Uracil
tcaaggaagatggcatttcta

SEQ ID NO: 5527 - DNA, 19 bp, synthetic construct
  misc_feature 1..19: note = Description of Artificial Sequence: Synthetic Antisense oligonucleotide
  misc_feature 1..19: note = Original Sequence: ucaaggaagauggcauutc
  modified_base 2: mod_base = OTHER; note = 5-methyl
  modified_base 14: mod_base = OTHER; note = 5-methyl
  modified_base 19: mod_base = OTHER; note = 5-methyl
  modified_base 18..19: mod_base = OTHER; note = bicyclic nucleic acid (BNA)
  source 1..19: mol_type = other DNA
  modified_base 1: mod_base = OTHER; note = Uracil
  modified_base 11: mod_base = OTHER; note = Uracil
  modified_base 16: mod_base = OTHER; note = Uracil
  modified_base 17: mod_base = OTHER; note = Uracil
tcaaggaagatggcatttc

SEQ ID NO: 5528 - DNA, 18 bp, synthetic construct
  misc_feature 1..18: note = Description of Artificial Sequence: Synthetic Antisense oligonucleotide
  misc_feature 1..18: note = Original Sequence: ucaaggaagauggcautt
  modified_base 2: mod_base = OTHER; note = 5-methyl
  modified_base 14: mod_base = OTHER; note = 5-methyl
  modified_base 17..18: mod_base = OTHER; note = bicyclic nucleic acid (BNA)
  source 1..18: mol_type = other DNA
  modified_base 1: mod_base = OTHER; note = Uracil
  modified_base 11: mod_base = OTHER; note = Uracil
  modified_base 16: mod_base = OTHER; note = Uracil
tcaaggaagatggcattt

SEQ ID NO: 5529 - DNA, 17 bp, synthetic construct
  misc_feature 1..17: note = Description of Artificial Sequence: Synthetic Antisense oligonucleotide
  misc_feature 1..17: note = Original Sequence: ucaaggaagauggcatt
  modified_base 2: mod_base = OTHER; note = 5-methyl
  modified_base 14: mod_base = OTHER; note = 5-methyl
  modified_base 16..17: mod_base = OTHER; note = bicyclic nucleic acid (BNA)
  source 1..17: mol_type = other DNA
  modified_base 1: mod_base = OTHER; note = Uracil
  modified_base 11: mod_base = OTHER; note = Uracil
tcaaggaagatggcatt

SEQ ID NO: 5530 - RNA, 15 nt, synthetic construct
  misc_feature 1..15: note = Description of Artificial Sequence: Synthetic Antisense oligonucleotide
  modified_base 2: mod_base = OTHER; note = 5-methyl
  modified_base 14: mod_base = OTHER; note = 5-methyl
  modified_base 14..15: mod_base = OTHER; note = bicyclic nucleic acid (BNA)
  source 1..15: mol_type = other RNA
tcaaggaagatggca

SEQ ID NO: 5531 - RNA, 14 nt, synthetic construct
  misc_feature 1..14: note = Description of Artificial Sequence: Synthetic Antisense oligonucleotide
  modified_base 2: mod_base = OTHER; note = 5-methyl
  modified_base 14: mod_base = OTHER; note = 5-methyl
  modified_base 13..14: mod_base = OTHER; note = bicyclic nucleic acid (BNA)
  source 1..14: mol_type = other RNA
tcaaggaagatggc

SEQ ID NO: 5532 - RNA, 13 nt, synthetic construct
  misc_feature 1..13: note = Description of Artificial Sequence: Synthetic Antisense oligonucleotide
  modified_base 2: mod_base = OTHER; note = 5-methyl
  modified_base 12..13: mod_base = OTHER; note = bicyclic nucleic acid (BNA)
  source 1..13: mol_type = other RNA
tcaaggaagatgg

SEQ ID NO: 5533 - DNA, 12 bp, synthetic construct
  misc_feature 1..12: note = Description of Artificial Sequence: Synthetic Antisense oligonucleotide
  misc_feature 1..12: note = Original Sequence: ucaaggaagatg
  modified_base 2: mod_base = OTHER; note = 5-methyl
  modified_base 11..12: mod_base = OTHER; note = bicyclic nucleic acid (BNA)
  source 1..12: mol_type = other DNA
  modified_base 1: mod_base = OTHER; note = Uracil
tcaaggaagatg

SEQ ID NO: 5534 - DNA, 11 bp, synthetic construct
  misc_feature 1..11: note = Description of Artificial Sequence: Synthetic Antisense oligonucleotide
  misc_feature 1..11: note = Original Sequence: ucaaggaagat
  modified_base 2: mod_base = OTHER; note = 5-methyl
  modified_base 10..11: mod_base = OTHER; note = bicyclic nucleic acid (BNA)
  source 1..11: mol_type = other DNA
  modified_base 1: mod_base = OTHER; note = Uracil
tcaaggaagat

SEQ ID NO: 5535 - RNA, 10 nt, synthetic construct
  misc_feature 1..10: note = Description of Artificial Sequence: Synthetic Antisense oligonucleotide
  modified_base 2: mod_base = OTHER; note = 5-methyl
  modified_base 9..10: mod_base = OTHER; note = bicyclic nucleic acid (BNA)
  source 1..10: mol_type = other RNA
tcaaggaaga

SEQ ID NO: 5536 - skipped

SEQ ID NO: 5537 - RNA, 21 nt, synthetic construct
  misc_feature 1..21: note = Description of Artificial Sequence: Synthetic Antisense oligonucleotide
  modified_base 1: mod_base = OTHER; note = 5-methyl
  modified_base 13: mod_base = OTHER; note = 5-methyl
  modified_base 18: mod_base = OTHER; note = 5-methyl
  modified_base 20..21: mod_base = OTHER; note = bicyclic nucleic acid (BNA)
  source 1..21: mol_type = other RNA
caaggaagatggcatttctag

SEQ ID NO: 5538 - DNA, 20 bp, synthetic construct
  misc_feature 1..20: note = Description of Artificial Sequence: Synthetic Antisense oligonucleotide
  misc_feature 1..20: note = Original Sequence: caaggaagauggcauuucta
  modified_base 1: mod_base = OTHER; note = 5-methyl
  modified_base 13: mod_base = OTHER; note = 5-methyl
  modified_base 18: mod_base = OTHER; note = 5-methyl
  modified_base 19..20: mod_base = OTHER; note = bicyclic nucleic acid (BNA)
  source 1..20: mol_type = other DNA
  modified_base 10: mod_base = OTHER; note = Uracil
  modified_base 15: mod_base = OTHER; note = Uracil
  modified_base 16: mod_base = OTHER; note = Uracil
  modified_base 17: mod_base = OTHER; note = Uracil
caaggaagatggcatttcta

SEQ ID NO: 5539 - DNA, 19 bp, synthetic construct
  misc_feature 1..19: note = Description of Artificial Sequence: Synthetic Antisense oligonucleotide
  misc_feature 1..19: note = Original Sequence: caaggaagauggcauuuct
  modified_base 1: mod_base = OTHER; note = 5-methyl
  modified_base 13: mod_base = OTHER; note = 5-methyl
  modified_base 18: mod_base = OTHER; note = 5-methyl
  modified_base 18..19: mod_base = OTHER; note = bicyclic nucleic acid (BNA)
  source 1..19: mol_type = other DNA
  modified_base 10: mod_base = OTHER; note = Uracil
  modified_base 15: mod_base = OTHER; note = Uracil
  modified_base 16: mod_base = OTHER; note = Uracil
  modified_base 17: mod_base = OTHER; note = Uracil
caaggaagatggcatttct

SEQ ID NO: 5540 - DNA, 18 bp, synthetic construct
  misc_feature 1..18: note = Description of Artificial Sequence: Synthetic Antisense oligonucleotide
  misc_feature 1..18: note = Original Sequence: caaggaagauggcauutc
  modified_base 1: mod_base = OTHER; note = 5-methyl
  modified_base 13: mod_base = OTHER; note = 5-methyl
  modified_base 18: mod_base = OTHER; note = 5-methyl
  modified_base 17..18: mod_base = OTHER; note = bicyclic nucleic acid (BNA)
  source 1..18: mol_type = other DNA
  modified_base 10: mod_base = OTHER; note = Uracil
  modified_base 15: mod_base = OTHER; note = Uracil
  modified_base 16: mod_base = OTHER; note = Uracil
caaggaagatggcatttc

SEQ ID NO: 5541 - DNA, 17 bp, synthetic construct
  misc_feature 1..17: note = Description of Artificial Sequence: Synthetic Antisense oligonucleotide
  misc_feature 1..17: note = Original Sequence: caaggaagauggcautt
  modified_base 1: mod_base = OTHER; note = 5-methyl
  modified_base 13: mod_base = OTHER; note = 5-methyl
  modified_base 16..17: mod_base = OTHER; note = bicyclic nucleic acid (BNA)
  source 1..17: mol_type = other DNA
  modified_base 10: mod_base = OTHER; note = Uracil
  modified_base 15: mod_base = OTHER; note = Uracil
caaggaagatggcattt

SEQ ID NO: 5542 - DNA, 16 bp, synthetic construct
  misc_feature 1..16: note = Description of Artificial Sequence: Synthetic Antisense oligonucleotide
  misc_feature 1..16: note = Original Sequence: caaggaagauggcatt
  modified_base 1: mod_base = OTHER; note = 5-methyl
  modified_base 13: mod_base = OTHER; note = 5-methyl
  modified_base 15..16: mod_base = OTHER; note = bicyclic nucleic acid (BNA)
  source 1..16: mol_type = other DNA
  modified_base 10: mod_base = OTHER; note = Uracil
caaggaagatggcatt

SEQ ID NO: 5543 - DNA, 15 bp, synthetic construct
  misc_feature 1..15: note = Description of Artificial Sequence: Synthetic Antisense oligonucleotide
  misc_feature 1..15: note = Original Sequence: caaggaagauggcat
  modified_base 1: mod_base = OTHER; note = 5-methyl
  modified_base 13: mod_base = OTHER; note = 5-methyl
  modified_base 14..15: mod_base = OTHER; note = bicyclic nucleic acid (BNA)
  source 1..15: mol_type = other DNA
  modified_base 10: mod_base = OTHER; note = Uracil
caaggaagatggcat

SEQ ID NO: 5544 - RNA, 14 nt, synthetic construct
  misc_feature 1..14: note = Description of Artificial Sequence: Synthetic Antisense oligonucleotide
  modified_base 1: mod_base = OTHER; note = 5-methyl
  modified_base 13: mod_base = OTHER; note = 5-methyl
  modified_base 13..14: mod_base = OTHER; note = bicyclic nucleic acid (BNA)
  source 1..14: mol_type = other RNA
caaggaagatggca

SEQ ID NO: 5545 - RNA, 13 nt, synthetic construct
  misc_feature 1..13: note = Description of Artificial Sequence: Synthetic Antisense oligonucleotide
  modified_base 1: mod_base = OTHER; note = 5-methyl
  modified_base 13: mod_base = OTHER; note = 5-methyl
  modified_base 12..13: mod_base = OTHER; note = bicyclic nucleic acid (BNA)
  source 1..13: mol_type = other RNA
caaggaagatggc

SEQ ID NO: 5546 - RNA, 12 nt, synthetic construct
  misc_feature 1..12: note = Description of Artificial Sequence: Synthetic Antisense oligonucleotide
  modified_base 1: mod_base = OTHER; note = 5-methyl
  modified_base 11..12: mod_base = OTHER; note = bicyclic nucleic acid (BNA)
  source 1..12: mol_type = other RNA
caaggaagatgg

SEQ ID NO: 5547 - DNA, 11 bp, synthetic construct
  misc_feature 1..11: note = Description of Artificial Sequence: Synthetic Antisense oligonucleotide
  modified_base 1: mod_base = OTHER; note = 5-methyl
  modified_base 10..11: mod_base = OTHER; note = bicyclic nucleic acid (BNA)
  source 1..11: mol_type = other DNA
caaggaagatg

SEQ ID NO: 5548 - DNA, 10 bp, synthetic construct
  misc_feature 1..10: note = Description of Artificial Sequence: Synthetic Antisense oligonucleotide
  modified_base 1: mod_base = OTHER; note = 5-methyl
  modified_base 9..10: mod_base = OTHER; note = bicyclic nucleic acid (BNA)
  source 1..10: mol_type = other DNA
caaggaagat

SEQ ID NO: 5549-5550 - skipped (2 entries)

SEQ ID NO: 5551 - RNA, 20 nt, synthetic construct
  misc_feature 1..20: note = Description of Artificial Sequence: Synthetic Antisense oligonucleotide
  modified_base 12: mod_base = OTHER; note = 5-methyl
  modified_base 17: mod_base = OTHER; note = 5-methyl
  modified_base 19..20: mod_base = OTHER; note = bicyclic nucleic acid (BNA)
  source 1..20: mol_type = other RNA
aaggaagatggcatttctag

SEQ ID NO: 5552 - DNA, 19 bp, synthetic construct
  misc_feature 1..19: note = Description of Artificial Sequence: Synthetic Antisense oligonucleotide
  misc_feature 1..19: note = Original Sequence: aaggaagauggcauuucta
  modified_base 12: mod_base = OTHER; note = 5-methyl
  modified_base 17: mod_base = OTHER; note = 5-methyl
  modified_base 18..19: mod_base = OTHER; note = bicyclic nucleic acid (BNA)
  source 1..19: mol_type = other DNA
  modified_base 9: mod_base = OTHER; note = Uracil
  modified_base 14: mod_base = OTHER; note = Uracil
  modified_base 15: mod_base = OTHER; note = Uracil
  modified_base 16: mod_base = OTHER; note = Uracil
aaggaagatggcatttcta

SEQ ID NO: 5553 - DNA, 18 bp, synthetic construct
  misc_feature 1..18: note = Description of Artificial Sequence: Synthetic Antisense oligonucleotide
  misc_feature 1..18: note = Original Sequence: aaggaagauggcauuuct
  modified_base 12: mod_base = OTHER; note = 5-methyl
  modified_base 17: mod_base = OTHER; note = 5-methyl
  modified_base 17..18: mod_base = OTHER; note = bicyclic nucleic acid (BNA)
  source 1..18: mol_type = other DNA
  modified_base 9: mod_base = OTHER; note = Uracil
  modified_base 14: mod_base = OTHER; note = Uracil
  modified_base 15: mod_base = OTHER; note = Uracil
  modified_base 16: mod_base = OTHER; note = Uracil
aaggaagatggcatttct

SEQ ID NO: 5554 - DNA, 17 bp, synthetic construct
  misc_feature 1..17: note = Description of Artificial Sequence: Synthetic Antisense oligonucleotide
  misc_feature 1..17: note = Original Sequence: aaggaagauggcauutc
  modified_base 12: mod_base = OTHER; note = 5-methyl
  modified_base 17: mod_base = OTHER; note = 5-methyl
  modified_base 16..17: mod_base = OTHER; note = bicyclic nucleic acid (BNA)
  source 1..17: mol_type = other DNA
  modified_base 9: mod_base = OTHER; note = Uracil
  modified_base 14: mod_base = OTHER; note = Uracil
  modified_base 15: mod_base = OTHER; note = Uracil
aaggaagatggcatttc

SEQ ID NO: 5555 - DNA, 16 bp, synthetic construct
  misc_feature 1..16: note = Description of Artificial Sequence: Synthetic Antisense oligonucleotide
  misc_feature 1..16: note = Original Sequence: aaggaagauggcautt
  modified_base 12: mod_base = OTHER; note = 5-methyl
  modified_base 15..16: mod_base = OTHER; note = bicyclic nucleic acid (BNA)
  source 1..16: mol_type = other DNA
  modified_base 9: mod_base = OTHER; note = Uracil
  modified_base 14: mod_base = OTHER; note = Uracil
aaggaagatggcattt

SEQ ID NO: 5556 - DNA, 15 bp, synthetic construct
  misc_feature 1..15: note = Description of Artificial Sequence: Synthetic Antisense oligonucleotide
  misc_feature 1..15: note = Original Sequence: aaggaagauggcatt
  modified_base 12: mod_base = OTHER; note = 5-methyl
  modified_base 14..15: mod_base = OTHER; note = bicyclic nucleic acid (BNA)
  source 1..15: mol_type = other DNA
  modified_base 9: mod_base = OTHER; note = Uracil
aaggaagatggcatt

SEQ ID NO: 5557 - DNA, 14 bp, synthetic construct
  misc_feature 1..14: note = Description of Artificial Sequence: Synthetic Antisense oligonucleotide
  misc_feature 1..14: note = Original Sequence: aaggaagauggcat
  modified_base 12: mod_base = OTHER; note = 5-methyl
  modified_base 13..14: mod_base = OTHER; note = bicyclic nucleic acid (BNA)
  source 1..14: mol_type = other DNA
  modified_base 9: mod_base = OTHER; note = Uracil
aaggaagatggcat

SEQ ID NO: 5558 - RNA, 13 nt, synthetic construct
  misc_feature 1..13: note = Description of Artificial Sequence: Synthetic Antisense oligonucleotide
  modified_base 12: mod_base = OTHER; note = 5-methyl
  modified_base 12..13: mod_base = OTHER; note = bicyclic nucleic acid (BNA)
  source 1..13: mol_type = other RNA
aaggaagatggca

SEQ ID NO: 5559 - RNA, 12 nt, synthetic construct
  misc_feature 1..12: note = Description of Artificial Sequence: Synthetic Antisense oligonucleotide
  modified_base 11..12: mod_base = OTHER; note = bicyclic nucleic acid (BNA)
  modified_base 12: mod_base = OTHER; note = 5-methyl
  source 1..12: mol_type = other RNA
aaggaagatggc

SEQ ID NO: 5560 - RNA, 19 nt, synthetic construct
  misc_feature 1..19: note = Description of Artificial Sequence: Synthetic Antisense oligonucleotide
  modified_base 11: mod_base = OTHER; note = 5-methyl
  modified_base 16: mod_base = OTHER; note = 5-methyl
  modified_base 18..19: mod_base = OTHER; note = bicyclic nucleic acid (BNA)
  source 1..19: mol_type = other RNA
aggaagatggcatttctag

SEQ ID NO: 5561 - DNA, 18 bp, synthetic construct
  misc_feature 1..18: note = Description of Artificial Sequence: Synthetic Antisense oligonucleotide
  misc_feature 1..18: note = Original Sequence: aggaagauggcauuucta
  modified_base 11: mod_base = OTHER; note = 5-methyl
  modified_base 16: mod_base = OTHER; note = 5-methyl
  modified_base 17..18: mod_base = OTHER; note = bicyclic nucleic acid (BNA)
  source 1..18: mol_type = other DNA
  modified_base 8: mod_base = OTHER; note = Uracil
  modified_base 13: mod_base = OTHER; note = Uracil
  modified_base 14: mod_base = OTHER; note = Uracil
  modified_base 15: mod_base = OTHER; note = Uracil
aggaagatggcatttcta

SEQ ID NO: 5562 - DNA, 17 bp, synthetic construct
  misc_feature 1..17: note = Description of Artificial Sequence: Synthetic Antisense oligonucleotide
  misc_feature 1..17: note = Original Sequence: aggaagauggcauuuct
  modified_base 11: mod_base = OTHER; note = 5-methyl
  modified_base 16: mod_base = OTHER; note = 5-methyl
  modified_base 16..17: mod_base = OTHER; note = bicyclic nucleic acid (BNA)
  source 1..17: mol_type = other DNA
  modified_base 8: mod_base = OTHER; note = Uracil
  modified_base 13: mod_base = OTHER; note = Uracil
  modified_base 14: mod_base = OTHER; note = Uracil
  modified_base 15: mod_base = OTHER; note = Uracil
aggaagatggcatttct

SEQ ID NO: 5563 - DNA, 16 bp, synthetic construct
  misc_feature 1..16: note = Description of Artificial Sequence: Synthetic Antisense oligonucleotide
  misc_feature 1..16: note = Original Sequence: aggaagauggcauutc
  modified_base 11: mod_base = OTHER; note = 5-methyl
  modified_base 16: mod_base = OTHER; note = 5-methyl
  modified_base 15..16: mod_base = OTHER; note = bicyclic nucleic acid (BNA)
  source 1..16: mol_type = other DNA
  modified_base 8: mod_base = OTHER; note = Uracil
  modified_base 13: mod_base = OTHER; note = Uracil
  modified_base 14: mod_base = OTHER; note = Uracil
aggaagatggcatttc

SEQ ID NO: 5564 - DNA, 15 bp, synthetic construct
  misc_feature 1..15: note = Description of Artificial Sequence: Synthetic Antisense oligonucleotide
  misc_feature 1..15: note = Original Sequence: aggaagauggcautt
  modified_base 11: mod_base = OTHER; note = 5-methyl
  modified_base 14..15: mod_base = OTHER; note = bicyclic nucleic acid (BNA)
  source 1..15: mol_type = other DNA
  modified_base 8: mod_base = OTHER; note = Uracil
  modified_base 13: mod_base = OTHER; note = Uracil
aggaagatggcattt

SEQ ID NO: 5565 - DNA, 14 bp, synthetic construct
  misc_feature 1..14: note = Description of Artificial Sequence: Synthetic Antisense oligonucleotide
  misc_feature 1..14: note = Original Sequence: aggaagauggcatt
  modified_base 11: mod_base = OTHER; note = 5-methyl
  modified_base 13..14: mod_base = OTHER; note = bicyclic nucleic acid (BNA)
  source 1..14: mol_type = other DNA
  modified_base 8: mod_base = OTHER; note = Uracil
aggaagatggcatt

SEQ ID NO: 5566 - DNA, 13 bp, synthetic construct
  misc_feature 1..13: note = Description of Artificial Sequence: Synthetic Antisense oligonucleotide
  misc_feature 1..13: note = Original Sequence: aggaagauggcat
  modified_base 11: mod_base = OTHER; note = 5-methyl
  modified_base 12..13: mod_base = OTHER; note = bicyclic nucleic acid (BNA)
  source 1..13: mol_type = other DNA
  modified_base 8: mod_base = OTHER; note = Uracil
aggaagatggcat

SEQ ID NO: 5567 - RNA, 12 nt, synthetic construct
  misc_feature 1..12: note = Description of Artificial Sequence: Synthetic Antisense oligonucleotide
  modified_base 11: mod_base = OTHER; note = 5-methyl
  modified_base 11..12: mod_base = OTHER; note = bicyclic nucleic acid (BNA)
  source 1..12: mol_type = other RNA
aggaagatggca

SEQ ID NO: 5568 - RNA, 18 nt, synthetic construct
  misc_feature 1..18: note = Description of Artificial Sequence: Synthetic Antisense oligonucleotide
  modified_base 10: mod_base = OTHER; note = 5-methyl
  modified_base 15: mod_base = OTHER; note = 5-methyl
  modified_base 17..18: mod_base = OTHER; note = bicyclic nucleic acid (BNA)
  source 1..18: mol_type = other RNA
ggaagatggcatttctag

SEQ ID NO: 5569 - DNA, 17 bp, synthetic construct
  misc_feature 1..17: note = Description of Artificial Sequence: Synthetic Antisense oligonucleotide
  misc_feature 1..17: note = Original Sequence: ggaagauggcauuucta
  modified_base 10: mod_base = OTHER; note = 5-methyl
  modified_base 15: mod_base = OTHER; note = 5-methyl
  modified_base 16..17: mod_base = OTHER; note = bicyclic nucleic acid (BNA)
  source 1..17: mol_type = other DNA
  modified_base 7: mod_base = OTHER; note = Uracil
  modified_base 12: mod_base = OTHER; note = Uracil
  modified_base 13: mod_base = OTHER; note = Uracil
  modified_base 14: mod_base = OTHER; note = Uracil
ggaagatggcatttcta

SEQ ID NO: 5570 - DNA, 16 bp, synthetic construct
  misc_feature 1..16: note = Description of Artificial Sequence: Synthetic Antisense oligonucleotide
  misc_feature 1..16: note = Original Sequence: ggaagauggcauuuct
  modified_base 10: mod_base = OTHER; note = 5-methyl
  modified_base 15: mod_base = OTHER; note = 5-methyl
  modified_base 15..16: mod_base = OTHER; note = bicyclic nucleic acid (BNA)
  source 1..16: mol_type = other DNA
  modified_base 7: mod_base = OTHER; note = Uracil
  modified_base 12: mod_base = OTHER; note = Uracil
  modified_base 13: mod_base = OTHER; note = Uracil
  modified_base 14: mod_base = OTHER; note = Uracil
ggaagatggcatttct

SEQ ID NO: 5571 - DNA, 15 bp, synthetic construct
  misc_feature 1..15: note = Description of Artificial Sequence: Synthetic Antisense oligonucleotide
  misc_feature 1..15: note = Original Sequence: ggaagauggcauutc
  modified_base 10: mod_base = OTHER; note = 5-methyl
  modified_base 15: mod_base = OTHER; note = 5-methyl
  modified_base 14..15: mod_base = OTHER; note = bicyclic nucleic acid (BNA)
  source 1..15: mol_type = other DNA
  modified_base 7: mod_base = OTHER; note = Uracil
  modified_base 12: mod_base = OTHER; note = Uracil
  modified_base 13: mod_base = OTHER; note = Uracil
ggaagatggcatttc

SEQ ID NO: 5572 - DNA, 14 bp, synthetic construct
  misc_feature 1..14: note = Description of Artificial Sequence: Synthetic Antisense oligonucleotide
  misc_feature 1..14: note = Original Sequence: ggaagauggcautt
  modified_base 10: mod_base = OTHER; note = 5-methyl
  modified_base 13..14: mod_base = OTHER; note = bicyclic nucleic acid (BNA)
  source 1..14: mol_type = other DNA
  modified_base 7: mod_base = OTHER; note = Uracil
  modified_base 12: mod_base = OTHER; note = Uracil
ggaagatggcattt

SEQ ID NO: 5573 - DNA, 13 bp, synthetic construct
  misc_feature 1..13: note = Description of Artificial Sequence: Synthetic Antisense oligonucleotide
  misc_feature 1..13: note = Original Sequence: ggaagauggcatt
  modified_base 10: mod_base = OTHER; note = 5-methyl
  modified_base 12..13: mod_base = OTHER; note = bicyclic nucleic acid (BNA)
  source 1..13: mol_type = other DNA
  modified_base 7: mod_base = OTHER; note = Uracil
ggaagatggcatt

SEQ ID NO: 5574 - DNA, 12 bp, synthetic construct
  misc_feature 1..12: note = Description of Artificial Sequence: Synthetic Antisense oligonucleotide
  misc_feature 1..12: note = Original Sequence: ggaagauggcat
  modified_base 10: mod_base = OTHER; note = 5-methyl
  modified_base 11..12: mod_base = OTHER; note = bicyclic nucleic acid (BNA)
  source 1..12: mol_type = other DNA
  modified_base 7: mod_base = OTHER; note = Uracil
ggaagatggcat

SEQ ID NO: 5575 - RNA, 11 nt, synthetic construct
  misc_feature 1..11: note = Description of Artificial Sequence: Synthetic Antisense oligonucleotide
  modified_base 10: mod_base = OTHER; note = 5-methyl
  modified_base 10..11: mod_base = OTHER; note = bicyclic nucleic acid (BNA)
  source 1..11: mol_type = other RNA
ggaagatggca

SEQ ID NO: 5576 - RNA, 10 nt, synthetic construct
  misc_feature 1..10: note = Description of Artificial Sequence: Synthetic Antisense oligonucleotide
  modified_base 9..10: mod_base = OTHER; note = bicyclic nucleic acid (BNA)
  modified_base 10: mod_base = OTHER; note = 5-methyl
  source 1..10: mol_type = other RNA
ggaagatggc

SEQ ID NO: 5577 - RNA, 17 nt, synthetic construct
  misc_feature 1..17: note = Description of Artificial Sequence: Synthetic Antisense oligonucleotide
  modified_base 9: mod_base = OTHER; note = 5-methyl
  modified_base 14: mod_base = OTHER; note = 5-methyl
  modified_base 16..17: mod_base = OTHER; note = bicyclic nucleic acid (BNA)
  source 1..17: mol_type = other RNA
gaagatggcatttctag

SEQ ID NO: 5578 - DNA, 16 bp, synthetic construct
  misc_feature 1..16: note = Description of Artificial Sequence: Synthetic Antisense oligonucleotide
  misc_feature 1..16: note = Original Sequence: gaagauggcauuucta
  modified_base 9: mod_base = OTHER; note = 5-methyl
  modified_base 14: mod_base = OTHER; note = 5-methyl
  modified_base 15..16: mod_base = OTHER; note = bicyclic nucleic acid (BNA)
  source 1..16: mol_type = other DNA
  modified_base 6: mod_base = OTHER; note = Uracil
  modified_base 11: mod_base = OTHER; note = Uracil
  modified_base 12: mod_base = OTHER; note = Uracil
  modified_base 13: mod_base = OTHER; note = Uracil
gaagatggcatttcta

SEQ ID NO: 5579 - DNA, 14 bp, synthetic construct
  misc_feature 1..14: note = Description of Artificial Sequence: Synthetic Antisense oligonucleotide
  misc_feature 1..14: note = Original Sequence: gaagauggcauutc
  modified_base 9: mod_base = OTHER; note = 5-methyl
  modified_base 14: mod_base = OTHER; note = 5-methyl
  modified_base 13..14: mod_base = OTHER; note = bicyclic nucleic acid (BNA)
  source 1..14: mol_type = other DNA
  modified_base 6: mod_base = OTHER; note = Uracil
  modified_base 11: mod_base = OTHER; note = Uracil
  modified_base 12: mod_base = OTHER; note = Uracil
gaagatggcatttc

SEQ ID NO: 5580 - DNA, 13 bp, synthetic construct
  misc_feature 1..13: note = Description of Artificial Sequence: Synthetic Antisense oligonucleotide
  misc_feature 1..13: note = Original Sequence: gaagauggcautt
  modified_base 9: mod_base = OTHER; note = 5-methyl
  modified_base 12..13: mod_base = OTHER; note = bicyclic nucleic acid (BNA)
  source 1..13: mol_type = other DNA
  modified_base 6: mod_base = OTHER; note = Uracil
  modified_base 11: mod_base = OTHER; note = Uracil
gaagatggcattt

SEQ ID NO: 5581 - DNA, 12 bp, synthetic construct
  misc_feature 1..12: note = Description of Artificial Sequence: Synthetic Antisense oligonucleotide
  misc_feature 1..12: note = Original Sequence: gaagauggcatt
  modified_base 9: mod_base = OTHER; note = 5-methyl
  modified_base 11..12: mod_base = OTHER; note = bicyclic nucleic acid (BNA)
  source 1..12: mol_type = other DNA
  modified_base 6: mod_base = OTHER; note = Uracil
gaagatggcatt

SEQ ID NO: 5582 - DNA, 11 bp, synthetic construct
  misc_feature 1..11: note = Description of Artificial Sequence: Synthetic Antisense oligonucleotide
  misc_feature 1..11: note = Original Sequence: gaagauggcat
  modified_base 9: mod_base = OTHER; note = 5-methyl
  modified_base 10..11: mod_base = OTHER; note = bicyclic nucleic acid (BNA)
  source 1..11: mol_type = other DNA
  modified_base 6: mod_base = OTHER; note = Uracil
gaagatggcat

SEQ ID NO: 5583 - RNA, 10 nt, synthetic construct
  misc_feature 1..10: note = Description of Artificial Sequence: Synthetic Antisense oligonucleotide
  modified_base 9: mod_base = OTHER; note = 5-methyl
  modified_base 9..10: mod_base = OTHER; note = bicyclic nucleic acid (BNA)
  source 1..10: mol_type = other RNA
gaagatggca

SEQ ID NO: 5584 - skipped

SEQ ID NO: 5585 - RNA, 16 nt, synthetic construct
  misc_feature 1..16: note = Description of Artificial Sequence: Synthetic Antisense oligonucleotide
  modified_base 8: mod_base = OTHER; note = 5-methyl
  modified_base 13: mod_base = OTHER; note = 5-methyl
  modified_base 15..16: mod_base = OTHER; note = bicyclic nucleic acid (BNA)
  source 1..16: mol_type = other RNA
aagatggcatttctag

SEQ ID NO: 5586 - DNA, 15 bp, synthetic construct
  misc_feature 1..15: note = Description of Artificial Sequence: Synthetic Antisense oligonucleotide
  misc_feature 1..15: note = Original Sequence: aagauggcauuucta
  modified_base 8: mod_base = OTHER; note = 5-methyl
  modified_base 13: mod_base = OTHER; note = 5-methyl
  modified_base 14..15: mod_base = OTHER; note = bicyclic nucleic acid (BNA)
  source 1..15: mol_type = other DNA
  modified_base 5: mod_base = OTHER; note = Uracil
  modified_base 10: mod_base = OTHER; note = Uracil
  modified_base 11: mod_base = OTHER; note = Uracil
  modified_base 12: mod_base = OTHER; note = Uracil
aagatggcatttcta

SEQ ID NO: 5587 - DNA, 14 bp, synthetic construct
  misc_feature 1..14: note = Description of Artificial Sequence: Synthetic Antisense oligonucleotide
  misc_feature 1..14: note = Original Sequence: aagauggcauuuct
  modified_base 8: mod_base = OTHER; note = 5-methyl
  modified_base 13: mod_base = OTHER; note = 5-methyl
  modified_base 13..14: mod_base = OTHER; note = bicyclic nucleic acid (BNA)
  source 1..14: mol_type = other DNA
  modified_base 5: mod_base = OTHER; note = Uracil
  modified_base 10: mod_base = OTHER; note = Uracil
  modified_base 11: mod_base = OTHER; note = Uracil
  modified_base 12: mod_base = OTHER; note = Uracil
aagatggcatttct

SEQ ID NO: 5588 - DNA, 13 bp, synthetic construct
  misc_feature 1..13: note = Description of Artificial Sequence: Synthetic Antisense oligonucleotide
  misc_feature 1..13: note = Original Sequence: aagauggcauutc
  modified_base 8: mod_base = OTHER; note = 5-methyl
  modified_base 13: mod_base = OTHER; note = 5-methyl
  modified_base 12..13: mod_base = OTHER; note = bicyclic nucleic acid (BNA)
  source 1..13: mol_type = other DNA
  modified_base 5: mod_base = OTHER; note = Uracil
  modified_base 10: mod_base = OTHER; note = Uracil
  modified_base 11: mod_base = OTHER; note = Uracil
aagatggcatttc

SEQ ID NO: 5589 - DNA, 12 bp, synthetic construct
  misc_feature 1..12: note = Description of Artificial Sequence: Synthetic Antisense oligonucleotide
  misc_feature 1..12: note = Original Sequence: aagauggcautt
  modified_base 8: mod_base = OTHER; note = 5-methyl
  modified_base 11..12: mod_base = OTHER; note = bicyclic nucleic acid (BNA)
  source 1..12: mol_type = other DNA
  modified_base 5: mod_base = OTHER; note = Uracil
  modified_base 10: mod_base = OTHER; note = Uracil
aagatggcattt

SEQ ID NO: 5590 - DNA, 11 bp, synthetic construct
  misc_feature 1..11: note = Description of Artificial Sequence: Synthetic Antisense oligonucleotide
  misc_feature 1..11: note = Original Sequence: aagauggcatt
  modified_base 8: mod_base = OTHER; note = 5-methyl
  modified_base 10..11: mod_base = OTHER; note = bicyclic nucleic acid (BNA)
  source 1..11: mol_type = other DNA
  modified_base 5: mod_base = OTHER; note = Uracil
aagatggcatt

SEQ ID NO: 5591 - DNA, 10 bp, synthetic construct
  misc_feature 1..10: note = Description of Artificial Sequence: Synthetic Antisense oligonucleotide
  misc_feature 1..10: note = Original Sequence: aagauggcat
  modified_base 8: mod_base = OTHER; note = 5-methyl
  modified_base 9..10: mod_base = OTHER; note = bicyclic nucleic acid (BNA)
  source 1..10: mol_type = other DNA
  modified_base 5: mod_base = OTHER; note = Uracil
aagatggcat

SEQ ID NO: 5592-5593 - skipped (2 entries)

SEQ ID NO: 5594 - RNA, 15 nt, synthetic construct
  misc_feature 1..15: note = Description of Artificial Sequence: Synthetic Antisense oligonucleotide
  modified_base 7: mod_base = OTHER; note = 5-methyl
  modified_base 12: mod_base = OTHER; note = 5-methyl
  modified_base 14..15: mod_base = OTHER; note = bicyclic nucleic acid (BNA)
  source 1..15: mol_type = other RNA
agatggcatttctag

SEQ ID NO: 5595 - DNA, 14 bp, synthetic construct
  misc_feature 1..14: note = Description of Artificial Sequence: Synthetic Antisense oligonucleotide
  misc_feature 1..14: note = Original Sequence: agauggcauuucta
  modified_base 7: mod_base = OTHER; note = 5-methyl
  modified_base 12: mod_base = OTHER; note = 5-methyl
  modified_base 13..14: mod_base = OTHER; note = bicyclic nucleic acid (BNA)
  source 1..14: mol_type = other DNA
  modified_base 4: mod_base = OTHER; note = Uracil
  modified_base 9: mod_base = OTHER; note = Uracil
  modified_base 10: mod_base = OTHER; note = Uracil
  modified_base 11: mod_base = OTHER; note = Uracil
agatggcatttcta

SEQ ID NO: 5596 - DNA, 13 bp, synthetic construct
  misc_feature 1..13: note = Description of Artificial Sequence: Synthetic Antisense oligonucleotide
  misc_feature 1..13: note = Original Sequence: agauggcauuuct
  modified_base 7: mod_base = OTHER; note = 5-methyl
  modified_base 12: mod_base = OTHER; note = 5-methyl
  modified_base 12..13: mod_base = OTHER; note = bicyclic nucleic acid (BNA)
  source 1..13: mol_type = other DNA
  modified_base 4: mod_base = OTHER; note = Uracil
  modified_base 9: mod_base = OTHER; note = Uracil
  modified_base 10: mod_base = OTHER; note = Uracil
  modified_base 11: mod_base = OTHER; note = Uracil
agatggcatttct

SEQ ID NO: 5597 - DNA, 12 bp, synthetic construct
  misc_feature 1..12: note = Description of Artificial Sequence: Synthetic Antisense oligonucleotide
  misc_feature 1..12: note = Original Sequence: agauggcauutc
  modified_base 7: mod_base = OTHER; note = 5-methyl
  modified_base 12: mod_base = OTHER; note = 5-methyl
  modified_base 11..12: mod_base = OTHER; note = bicyclic nucleic acid (BNA)
  source 1..12: mol_type = other DNA
  modified_base 4: mod_base = OTHER; note = Uracil
  modified_base 9: mod_base = OTHER; note = Uracil
  modified_base 10: mod_base = OTHER; note = Uracil
agatggcatttc

SEQ ID NO: 5598 - DNA, 11 bp, synthetic construct
  misc_feature 1..11: note = Description of Artificial Sequence: Synthetic Antisense oligonucleotide
  misc_feature 1..11: note = Original Sequence: agauggcautt
  modified_base 7: mod_base = OTHER; note = 5-methyl
  modified_base 10..11: mod_base = OTHER; note = bicyclic nucleic acid (BNA)
  source 1..11: mol_type = other DNA
  modified_base 4: mod_base = OTHER; note = Uracil
  modified_base 9: mod_base = OTHER; note = Uracil
agatggcattt

SEQ ID NO: 5599 - DNA, 10 bp, synthetic construct
  misc_feature 1..10: note = Description of Artificial Sequence: Synthetic Antisense oligonucleotide
  misc_feature 1..10: note = Original Sequence: agauggcatt
  modified_base 7: mod_base = OTHER; note = 5-methyl
  modified_base 9..10: mod_base = OTHER; note = bicyclic nucleic acid (BNA)
  source 1..10: mol_type = other DNA
  modified_base 4: mod_base = OTHER; note = Uracil
agatggcatt

SEQ ID NO: 5600-5601 - skipped (2 entries)

SEQ ID NO: 5602 - RNA, 30 nt, synthetic construct; identical to SEQ ID NO: 287
  misc_feature 1..30: note = Description of Artificial Sequence: Synthetic Antisense oligonucleotide
  modified_base 1: mod_base = OTHER; note = 5-methyl
  modified_base 3..4: mod_base = OTHER; note = 5-methyl
  modified_base 7: mod_base = OTHER; note = 5-methyl
  modified_base 10: mod_base = OTHER; note = 5-methyl
  modified_base 22: mod_base = OTHER; note = 5-methyl
  modified_base 27: mod_base = OTHER; note = 5-methyl
  modified_base 29..30: mod_base = OTHER; note = bicyclic nucleic acid (BNA)
  source 1..30: mol_type = other RNA

SEQ ID NO: 5603 - DNA, 29 bp, synthetic construct
  misc_feature 1..29: note = Description of Artificial Sequence: Synthetic Antisense oligonucleotide
  misc_feature 1..29: note = Original Sequence: cuccaacaucaaggaagauggcauuucta
  modified_base 1: mod_base = OTHER; note = 5-methyl
  modified_base 3..4: mod_base = OTHER; note = 5-methyl
  modified_base 7: mod_base = OTHER; note = 5-methyl
  modified_base 10: mod_base = OTHER; note = 5-methyl
  modified_base 22: mod_base = OTHER; note = 5-methyl
  modified_base 27: mod_base = OTHER; note = 5-methyl
  modified_base 28..29: mod_base = OTHER; note = bicyclic nucleic acid (BNA)
  source 1..29: mol_type = other DNA
  modified_base 2: mod_base = OTHER; note = Uracil
  modified_base 9: mod_base = OTHER; note = Uracil
  modified_base 19: mod_base = OTHER; note = Uracil
  modified_base 24: mod_base = OTHER; note = Uracil
  modified_base 25: mod_base = OTHER; note = Uracil
  modified_base 26: mod_base = OTHER; note = Uracil
ctccaacatcaaggaagatggcatttcta

SEQ ID NO: 5604 - DNA, 28 bp, synthetic construct
  misc_feature 1..28: note = Description of Artificial Sequence: Synthetic Antisense oligonucleotide
  misc_feature 1..28: note = Original Sequence: cuccaacaucaaggaagauggcauuuct
  modified_base 1: mod_base = OTHER; note = 5-methyl
  modified_base 3..4: mod_base = OTHER; note = 5-methyl
  modified_base 7: mod_base = OTHER; note = 5-methyl
  modified_base 10: mod_base = OTHER; note = 5-methyl
  modified_base 22: mod_base = OTHER; note = 5-methyl
  modified_base 27: mod_base = OTHER; note = 5-methyl
  modified_base 27..28: mod_base = OTHER; note = bicyclic nucleic acid (BNA)
  source 1..28: mol_type = other DNA
  modified_base 2: mod_base = OTHER; note = Uracil
  modified_base 9: mod_base = OTHER; note = Uracil
  modified_base 19: mod_base = OTHER; note = Uracil
  modified_base 24: mod_base = OTHER; note = Uracil
  modified_base 25: mod_base = OTHER; note = Uracil
  modified_base 26: mod_base = OTHER; note = Uracil
ctccaacatcaaggaagatggcatttct

SEQ ID NO: 5605 - DNA, 27 bp, synthetic construct
  misc_feature 1..27: note = Description of Artificial Sequence: Synthetic Antisense oligonucleotide
  misc_feature 1..27: note = Original Sequence: cuccaacaucaaggaagauggcauutc
  modified_base 1: mod_base = OTHER; note = 5-methyl
  modified_base 3..4: mod_base = OTHER; note = 5-methyl
  modified_base 7: mod_base = OTHER; note = 5-methyl
  modified_base 10: mod_base = OTHER; note = 5-methyl
  modified_base 22: mod_base = OTHER; note = 5-methyl
  modified_base 27: mod_base = OTHER; note = 5-methyl
  modified_base 26..27: mod_base = OTHER; note = bicyclic nucleic acid (BNA)
  source 1..27: mol_type = other DNA
  modified_base 2: mod_base = OTHER; note = Uracil
  modified_base 9: mod_base = OTHER; note = Uracil
  modified_base 19: mod_base = OTHER; note = Uracil
  modified_base 24: mod_base = OTHER; note = Uracil
  modified_base 25: mod_base = OTHER; note = Uracil
ctccaacatcaaggaagatggcatttc

SEQ ID NO: 5606 - DNA, 26 bp, synthetic construct
  misc_feature 1..26: note = Description of Artificial Sequence: Synthetic Antisense oligonucleotide
  misc_feature 1..26: note = Original Sequence: cuccaacaucaaggaagauggcautt
  modified_base 1: mod_base = OTHER; note = 5-methyl
  modified_base 3..4: mod_base = OTHER; note = 5-methyl
  modified_base 7: mod_base = OTHER; note = 5-methyl
  modified_base 10: mod_base = OTHER; note = 5-methyl
  modified_base 22: mod_base = OTHER; note = 5-methyl
  modified_base 25..26: mod_base = OTHER; note = bicyclic nucleic acid (BNA)
  source 1..26: mol_type = other DNA
  modified_base 2: mod_base = OTHER; note = Uracil
  modified_base 9: mod_base = OTHER; note = Uracil
  modified_base 19: mod_base = OTHER; note = Uracil
  modified_base 24: mod_base = OTHER; note = Uracil
ctccaacatcaaggaagatggcattt

SEQ ID NO: 5607 - DNA, 25 bp, synthetic construct
  misc_feature 1..25: note = Description of Artificial Sequence: Synthetic Antisense oligonucleotide
  misc_feature 1..25: note = Original Sequence: cuccaacaucaaggaagauggcatt
  modified_base 1: mod_base = OTHER; note = 5-methyl
  modified_base 3..4: mod_base = OTHER; note = 5-methyl
  modified_base 7: mod_base = OTHER; note = 5-methyl
  modified_base 10: mod_base = OTHER; note = 5-methyl
  modified_base 22: mod_base = OTHER; note = 5-methyl
  modified_base 24..25: mod_base = OTHER; note = bicyclic nucleic acid (BNA)
  source 1..25: mol_type = other DNA
  modified_base 2: mod_base = OTHER; note = Uracil
  modified_base 9: mod_base = OTHER; note = Uracil
  modified_base 19: mod_base = OTHER; note = Uracil
ctccaacatcaaggaagatggcatt

SEQ ID NO: 5608 - DNA, 24 bp, synthetic construct
  misc_feature 1..24: note = Description of Artificial Sequence: Synthetic Antisense oligonucleotide
  misc_feature 1..24: note = Original Sequence: cuccaacaucaaggaagauggcat
  modified_base 1: mod_base = OTHER; note = 5-methyl
  modified_base 3..4: mod_base = OTHER; note = 5-methyl
  modified_base 7: mod_base = OTHER; note = 5-methyl
  modified_base 10: mod_base = OTHER; note = 5-methyl
  modified_base 22: mod_base = OTHER; note = 5-methyl
  modified_base 23..24: mod_base = OTHER; note = bicyclic nucleic acid (BNA)
  source 1..24: mol_type = other DNA
  modified_base 2: mod_base = OTHER; note = Uracil
  modified_base 9: mod_base = OTHER; note = Uracil
  modified_base 19: mod_base = OTHER; note = Uracil
ctccaacatcaaggaagatggcat

SEQ ID NO: 5609 - RNA, 23 nt, synthetic construct
  misc_feature 1..23: note = Description of Artificial Sequence: Synthetic Antisense oligonucleotide
  modified_base 1: mod_base = OTHER; note = 5-methyl
  modified_base 3..4: mod_base = OTHER; note = 5-methyl
  modified_base 7: mod_base = OTHER; note = 5-methyl
  modified_base 10: mod_base = OTHER; note = 5-methyl
  modified_base 22: mod_base = OTHER; note = 5-methyl
  modified_base 22..23: mod_base = OTHER; note = bicyclic nucleic acid (BNA)
  source 1..23: mol_type = other RNA
ctccaacatcaaggaagatggca

SEQ ID NO: 5610 - RNA, 22 nt, synthetic construct
  misc_feature 1..22: note = Description of Artificial Sequence: Synthetic Antisense oligonucleotide
  modified_base 1: mod_base = OTHER; note = 5-methyl
  modified_base 3..4: mod_base = OTHER; note = 5-methyl
  modified_base 7: mod_base = OTHER; note = 5-methyl
  modified_base 10: mod_base = OTHER; note = 5-methyl
  modified_base 22: mod_base = OTHER; note = 5-methyl
  modified_base 21..22: mod_base = OTHER; note = bicyclic nucleic acid (BNA)
  source 1..22: mol_type = other RNA
ctccaacatcaaggaagatggc

SEQ ID NO: 5611 - RNA, 21 nt, synthetic construct
  misc_feature 1..21: note = Description of Artificial Sequence: Synthetic Antisense oligonucleotide
  modified_base 1: mod_base = OTHER; note = 5-methyl
  modified_base 3..4: mod_base = OTHER; note = 5-methyl
  modified_base 7: mod_base = OTHER; note = 5-methyl
  modified_base 10: mod_base = OTHER; note = 5-methyl
  modified_base 20..21: mod_base = OTHER; note = bicyclic nucleic acid (BNA)
  source 1..21: mol_type = other RNA
ctccaacatcaaggaagatgg

SEQ ID NO: 5612 - DNA, 20 bp, synthetic construct
  misc_feature 1..20: note = Description of Artificial Sequence: Synthetic Antisense oligonucleotide
  misc_feature 1..20: note = Original Sequence: cuccaacaucaaggaagatg
  modified_base 1: mod_base = OTHER; note = 5-methyl
  modified_base 3..4: mod_base = OTHER; note = 5-methyl
  modified_base 7: mod_base = OTHER; note = 5-methyl
  modified_base 10: mod_base = OTHER; note = 5-methyl
  modified_base 19..20: mod_base = OTHER; note = bicyclic nucleic acid (BNA)
  source 1..20: mol_type = other DNA
  modified_base 2: mod_base = OTHER; note = Uracil
  modified_base 9: mod_base = OTHER; note = Uracil
ctccaacatcaaggaagatg

SEQ ID NO: 5613 - DNA, 19 bp, synthetic construct
  misc_feature 1..19: note = Description of Artificial Sequence: Synthetic Antisense oligonucleotide
  misc_feature 1..19: note = Original Sequence: cuccaacaucaaggaagat
  modified_base 1: mod_base = OTHER; note = 5-methyl
  modified_base 3..4: mod_base = OTHER; note = 5-methyl
  modified_base 7: mod_base = OTHER; note = 5-methyl
  modified_base 10: mod_base = OTHER; note = 5-methyl
  modified_base 18..19: mod_base = OTHER; note = bicyclic nucleic acid (BNA)
  source 1..19: mol_type = other DNA
  modified_base 2: mod_base = OTHER; note = Uracil
  modified_base 9: mod_base = OTHER; note = Uracil
ctccaacatcaaggaagat

SEQ ID NO: 5614 - RNA, 18 nt, synthetic construct
  misc_feature 1..18: note = Description of Artificial Sequence: Synthetic Antisense oligonucleotide
  modified_base 1: mod_base = OTHER; note = 5-methyl
  modified_base 3..4: mod_base = OTHER; note = 5-methyl
  modified_base 7: mod_base = OTHER; note = 5-methyl
  modified_base 10: mod_base = OTHER; note = 5-methyl
  modified_base 17..18: mod_base = OTHER; note = bicyclic nucleic acid (BNA)
  source 1..18: mol_type = other RNA
ctccaacatcaaggaaga

SEQ ID NO: 5615 - RNA, 17 nt, synthetic construct
  misc_feature 1..17: note = Description of Artificial Sequence: Synthetic Antisense oligonucleotide
  modified_base 1: mod_base = OTHER; note = 5-methyl
  modified_base 3..4: mod_base = OTHER; note = 5-methyl
  modified_base 7: mod_base = OTHER; note = 5-methyl
  modified_base 10: mod_base = OTHER; note = 5-methyl
  modified_base 16..17: mod_base = OTHER; note = bicyclic nucleic acid (BNA)
  source 1..17: mol_type = other RNA
ctccaacatcaaggaag

SEQ ID NO: 5616 - RNA, 29 nt, synthetic construct
  misc_feature 1..29: note = Description of Artificial Sequence: Synthetic Antisense oligonucleotide
  modified_base 2..3: mod_base = OTHER; note = 5-methyl
  modified_base 6: mod_base = OTHER; note = 5-methyl
  modified_base 9: mod_base = OTHER; note = 5-methyl
  modified_base 21: mod_base = OTHER; note = 5-methyl
  modified_base 26: mod_base = OTHER; note = 5-methyl
  modified_base 28..29: mod_base = OTHER; note = bicyclic nucleic acid (BNA)
  source 1..29: mol_type = other RNA
tccaacatcaaggaagatggcatttctag

SEQ ID NO: 5617 - DNA, 28 bp, synthetic construct
  misc_feature 1..28: note = Description of Artificial Sequence: Synthetic Antisense oligonucleotide
  misc_feature 1..28: note = Original Sequence: uccaacaucaaggaagauggcauuucta
  modified_base 2..3: mod_base = OTHER; note = 5-methyl
  modified_base 6: mod_base = OTHER; note = 5-methyl
  modified_base 9: mod_base = OTHER; note = 5-methyl
  modified_base 21: mod_base = OTHER; note = 5-methyl
  modified_base 26: mod_base = OTHER; note = 5-methyl
  modified_base 27..28: mod_base = OTHER; note = bicyclic nucleic acid (BNA)
  source 1..28: mol_type = other DNA
  modified_base 1: mod_base = OTHER; note = Uracil
  modified_base 8: mod_base = OTHER; note = Uracil
  modified_base 18: mod_base = OTHER; note = Uracil
  modified_base 23: mod_base = OTHER; note = Uracil
  modified_base 24: mod_base = OTHER; note = Uracil
  modified_base 25: mod_base = OTHER; note = Uracil
tccaacatcaaggaagatggcatttcta

SEQ ID NO: 5618 - DNA, 27 bp, synthetic construct
  misc_feature 1..27: note = Description of Artificial Sequence: Synthetic Antisense oligonucleotide
  misc_feature 1..27: note = Original Sequence: uccaacaucaaggaagauggcauuuct
  modified_base 2..3: mod_base = OTHER; note = 5-methyl
  modified_base 6: mod_base = OTHER; note = 5-methyl
  modified_base 9: mod_base = OTHER; note = 5-methyl
  modified_base 21: mod_base = OTHER; note = 5-methyl
  modified_base 26: mod_base = OTHER; note = 5-methyl
  modified_base 26..27: mod_base = OTHER; note = bicyclic nucleic acid (BNA)
  source 1..27: mol_type = other DNA
  modified_base 1: mod_base = OTHER; note = Uracil
  modified_base 8: mod_base = OTHER; note = Uracil
  modified_base 18: mod_base = OTHER; note = Uracil
  modified_base 23: mod_base = OTHER; note = Uracil
  modified_base 24: mod_base = OTHER; note = Uracil
  modified_base 25: mod_base = OTHER; note = Uracil
tccaacatcaaggaagatggcatttct

SEQ ID NO: 5619 - DNA, 26 bp, synthetic construct
  misc_feature 1..26: note = Description of Artificial Sequence: Synthetic Antisense oligonucleotide
  misc_feature 1..26: note = Original Sequence: uccaacaucaaggaagauggcauutc
  modified_base 2..3: mod_base = OTHER; note = 5-methyl
  modified_base 6: mod_base = OTHER; note = 5-methyl
  modified_base 9: mod_base = OTHER; note = 5-methyl
  modified_base 21: mod_base = OTHER; note = 5-methyl
  modified_base 26: mod_base = OTHER; note = 5-methyl
  modified_base 25..26: mod_base = OTHER; note = bicyclic nucleic acid (BNA)
  source 1..26: mol_type = other DNA
  modified_base 1: mod_base = OTHER; note = Uracil
  modified_base 8: mod_base = OTHER; note = Uracil
  modified_base 18: mod_base = OTHER; note = Uracil
  modified_base 23: mod_base = OTHER; note = Uracil
  modified_base 24: mod_base = OTHER; note = Uracil
tccaacatcaaggaagatggcatttc

SEQ ID NO: 5620 - DNA, 25 bp, synthetic construct
  misc_feature 1..25: note = Description of Artificial Sequence: Synthetic Antisense oligonucleotide
  misc_feature 1..25: note = Original Sequence: uccaacaucaaggaagauggcautt
  modified_base 2..3: mod_base = OTHER; note = 5-methyl
  modified_base 6: mod_base = OTHER; note = 5-methyl
  modified_base 9: mod_base = OTHER; note = 5-methyl
  modified_base 21: mod_base = OTHER; note = 5-methyl
  modified_base 24..25: mod_base = OTHER; note = bicyclic nucleic acid (BNA)
  source 1..25: mol_type = other DNA
  modified_base 1: mod_base = OTHER; note = Uracil
  modified_base 8: mod_base = OTHER; note = Uracil
  modified_base 18: mod_base = OTHER; note = Uracil
  modified_base 23: mod_base = OTHER; note = Uracil
tccaacatcaaggaagatggcattt

SEQ ID NO: 5621 - DNA, 24 bp, synthetic construct
  misc_feature 1..24: note = Description of Artificial Sequence: Synthetic Antisense oligonucleotide
  misc_feature 1..24: note = Original Sequence: uccaacaucaaggaagauggcatt
  modified_base 2..3: mod_base = OTHER; note = 5-methyl
  modified_base 6: mod_base = OTHER; note = 5-methyl
  modified_base 9: mod_base = OTHER; note = 5-methyl
  modified_base 21: mod_base = OTHER; note = 5-methyl
  modified_base 23..24: mod_base = OTHER; note = bicyclic nucleic acid (BNA)
  source 1..24: mol_type = other DNA
  modified_base 1: mod_base = OTHER; note = Uracil
  modified_base 8: mod_base = OTHER; note = Uracil
  modified_base 18: mod_base = OTHER; note = Uracil
tccaacatcaaggaagatggcatt

SEQ ID NO: 5622 - DNA, 23 bp, synthetic construct
  misc_feature 1..23: note = Description of Artificial Sequence: Synthetic Antisense oligonucleotide
  misc_feature 1..23: note = Original Sequence: uccaacaucaaggaagauggcat
  modified_base 2..3: mod_base = OTHER; note = 5-methyl
  modified_base 6: mod_base = OTHER; note = 5-methyl
  modified_base 9: mod_base = OTHER; note = 5-methyl
  modified_base 21: mod_base = OTHER; note = 5-methyl
  modified_base 22..23: mod_base = OTHER; note = bicyclic nucleic acid (BNA)
  source 1..23: mol_type = other DNA
  modified_base 1: mod_base = OTHER; note = Uracil
  modified_base 8: mod_base = OTHER; note = Uracil
  modified_base 18: mod_base = OTHER; note = Uracil
tccaacatcaaggaagatggcat

SEQ ID NO: 5623 - RNA, 22 nt, synthetic construct
  misc_feature 1..22: note = Description of Artificial Sequence: Synthetic Antisense oligonucleotide
  modified_base 2..3: mod_base = OTHER; note = 5-methyl
  modified_base 6: mod_base = OTHER; note = 5-methyl
  modified_base 9: mod_base = OTHER; note = 5-methyl
  modified_base 21: mod_base = OTHER; note = 5-methyl
  modified_base 21..22: mod_base = OTHER; note = bicyclic nucleic acid (BNA)
  source 1..22: mol_type = other RNA
tccaacatcaaggaagatggca

SEQ ID NO: 5624 - RNA, 21 nt, synthetic construct
  misc_feature 1..21: note = Description of Artificial Sequence: Synthetic Antisense oligonucleotide
  modified_base 2..3: mod_base = OTHER; note = 5-methyl
  modified_base 6: mod_base = OTHER; note = 5-methyl
  modified_base 9: mod_base = OTHER; note = 5-methyl
  modified_base 21: mod_base = OTHER; note = 5-methyl
  modified_base 20..21: mod_base = OTHER; note = bicyclic nucleic acid (BNA)
  source 1..21: mol_type = other RNA
tccaacatcaaggaagatggc

SEQ ID NO: 5625 - RNA, 20 nt, synthetic construct
  misc_feature 1..20: note = Description of Artificial Sequence: Synthetic Antisense oligonucleotide
  modified_base 2..3: mod_base = OTHER; note = 5-methyl
  modified_base 6: mod_base = OTHER; note = 5-methyl
  modified_base 9: mod_base = OTHER; note = 5-methyl
  modified_base 19..20: mod_base = OTHER; note = bicyclic nucleic acid (BNA)
  source 1..20: mol_type = other RNA
tccaacatcaaggaagatgg

SEQ ID NO: 5626 - DNA, 19 bp, synthetic construct
  misc_feature 1..19: note = Description of Artificial Sequence: Synthetic Antisense oligonucleotide
  misc_feature 1..19: note = Original Sequence: uccaacaucaaggaagatg
  modified_base 2..3: mod_base = OTHER; note = 5-methyl
  modified_base 6: mod_base = OTHER; note = 5-methyl
  modified_base 9: mod_base = OTHER; note = 5-methyl
  modified_base 18..19: mod_base = OTHER; note = bicyclic nucleic acid (BNA)
  source 1..19: mol_type = other DNA
  modified_base 1: mod_base = OTHER; note = Uracil
  modified_base 8: mod_base = OTHER; note = Uracil
tccaacatcaaggaagatg

SEQ ID NO: 5627 - DNA, 18 bp, synthetic construct
  misc_feature 1..18: note = Description of Artificial Sequence: Synthetic Antisense oligonucleotide
  misc_feature 1..18: note = Original Sequence: uccaacaucaaggaagat
  modified_base 2..3: mod_base = OTHER; note = 5-methyl
  modified_base 6: mod_base = OTHER; note = 5-methyl
  modified_base 9: mod_base = OTHER; note = 5-methyl
  modified_base 17..18: mod_base = OTHER; note = bicyclic nucleic acid (BNA)
  source 1..18: mol_type = other DNA
  modified_base 1: mod_base = OTHER; note = Uracil
  modified_base 8: mod_base = OTHER; note = Uracil
tccaacatcaaggaagat

SEQ ID NO: 5628 - RNA, 17 nt, synthetic construct
  misc_feature 1..17: note = Description of Artificial Sequence: Synthetic Antisense oligonucleotide
  modified_base 2..3: mod_base = OTHER; note = 5-methyl
  modified_base 6: mod_base = OTHER; note = 5-methyl
  modified_base 9: mod_base = OTHER; note = 5-methyl
  modified_base 16..17: mod_base = OTHER; note = bicyclic nucleic acid (BNA)
  source 1..17: mol_type = other RNA
tccaacatcaaggaaga

SEQ ID NO: 5629 - RNA, 16 nt, synthetic construct
  misc_feature 1..16: note = Description of Artificial Sequence: Synthetic Antisense oligonucleotide
  modified_base 2..3: mod_base = OTHER; note = 5-methyl
  modified_base 6: mod_base = OTHER; note = 5-methyl
  modified_base 9: mod_base = OTHER; note = 5-methyl
  modified_base 15..16: mod_base = OTHER; note = bicyclic nucleic acid (BNA)
  source 1..16: mol_type = other RNA
tccaacatcaaggaag

SEQ ID NO: 5630 - RNA, 28 nt, synthetic construct
  misc_feature 1..28: note = Description of Artificial Sequence: Synthetic Antisense oligonucleotide
  modified_base 1..2: mod_base = OTHER; note = 5-methyl
  modified_base 5: mod_base = OTHER; note = 5-methyl
  modified_base 8: mod_base = OTHER; note = 5-methyl
  modified_base 20: mod_base = OTHER; note = 5-methyl
  modified_base 25: mod_base = OTHER; note = 5-methyl
  modified_base 27..28: mod_base = OTHER; note = bicyclic nucleic acid (BNA)
  source 1..28: mol_type = other RNA
ccaacatcaaggaagatggcatttctag

SEQ ID NO: 5631 - DNA, 27 bp, synthetic construct
  misc_feature 1..27: note = Description of Artificial Sequence: Synthetic Antisense oligonucleotide
  misc_feature 1..27: note = Original Sequence: ccaacaucaaggaagauggcauuucta
  modified_base 1..2: mod_base = OTHER; note = 5-methyl
  modified_base 5: mod_base = OTHER; note = 5-methyl
  modified_base 8: mod_base = OTHER; note = 5-methyl
  modified_base 20: mod_base = OTHER; note = 5-methyl
  modified_base 25: mod_base = OTHER; note = 5-methyl
  modified_base 26..27: mod_base = OTHER; note = bicyclic nucleic acid (BNA)
  source 1..27: mol_type = other DNA
  modified_base 7: mod_base = OTHER; note = Uracil
  modified_base 17: mod_base = OTHER; note = Uracil
  modified_base 22: mod_base = OTHER; note = Uracil
  modified_base 23: mod_base = OTHER; note = Uracil
  modified_base 24: mod_base = OTHER; note = Uracil
ccaacatcaaggaagatggcatttcta

SEQ ID NO: 5632 - DNA, 26 bp, synthetic construct
  misc_feature 1..26: note = Description of Artificial Sequence: Synthetic Antisense oligonucleotide
  misc_feature 1..26: note = Original Sequence: ccaacaucaaggaagauggcauuuct
  modified_base 1..2: mod_base = OTHER; note = 5-methyl
  modified_base 5: mod_base = OTHER; note = 5-methyl
  modified_base 8: mod_base = OTHER; note = 5-methyl
  modified_base 20: mod_base = OTHER; note = 5-methyl
  modified_base 25: mod_base = OTHER; note = 5-methyl
  modified_base 25..26: mod_base = OTHER; note = bicyclic nucleic acid (BNA)
  source 1..26: mol_type = other DNA
  modified_base 7: mod_base = OTHER; note = Uracil
  modified_base 17: mod_base = OTHER; note = Uracil
  modified_base 22: mod_base = OTHER; note = Uracil
  modified_base 23: mod_base = OTHER; note = Uracil
  modified_base 24: mod_base = OTHER; note = Uracil
ccaacatcaaggaagatggcatttct

SEQ ID NO: 5633 - DNA, 25 bp, synthetic construct
  misc_feature 1..25: note = Description of Artificial Sequence: Synthetic Antisense oligonucleotide
  misc_feature 1..25: note = Original Sequence: ccaacaucaaggaagauggcauutc
  modified_base 1..2: mod_base = OTHER; note = 5-methyl
  modified_base 5: mod_base = OTHER; note = 5-methyl
  modified_base 8: mod_base = OTHER; note = 5-methyl
  modified_base 20: mod_base = OTHER; note = 5-methyl
  modified_base 25: mod_base = OTHER; note = 5-methyl
  modified_base 24..25: mod_base = OTHER; note = bicyclic nucleic acid (BNA)
  source 1..25: mol_type = other DNA
  modified_base 7: mod_base = OTHER; note = Uracil
  modified_base 17: mod_base = OTHER; note = Uracil
  modified_base 22: mod_base = OTHER; note = Uracil
  modified_base 23: mod_base = OTHER; note = Uracil
ccaacatcaaggaagatggcatttc

SEQ ID NO: 5634 - DNA, 24 bp, synthetic construct
  misc_feature 1..24: note = Description of Artificial Sequence: Synthetic Antisense oligonucleotide
  misc_feature 1..24: note = Original Sequence: ccaacaucaaggaagauggcautt
  modified_base 1..2: mod_base = OTHER; note = 5-methyl
  modified_base 5: mod_base = OTHER; note = 5-methyl
  modified_base 8: mod_base = OTHER; note = 5-methyl
  modified_base 20: mod_base = OTHER; note = 5-methyl
  modified_base 23..24: mod_base = OTHER; note = bicyclic nucleic acid (BNA)
  source 1..24: mol_type = other DNA
  modified_base 7: mod_base = OTHER; note = Uracil
  modified_base 17: mod_base = OTHER; note = Uracil
  modified_base 22: mod_base = OTHER; note = Uracil
ccaacatcaaggaagatggcattt

SEQ ID NO: 5635 - DNA, 23 bp, synthetic construct
  misc_feature 1..23: note = Description of Artificial Sequence: Synthetic Antisense oligonucleotide
  misc_feature 1..23: note = Original Sequence: ccaacaucaaggaagauggcatt
  modified_base 1..2: mod_base = OTHER; note = 5-methyl
  modified_base 5: mod_base = OTHER; note = 5-methyl
  modified_base 8: mod_base = OTHER; note = 5-methyl
  modified_base 20: mod_base = OTHER; note = 5-methyl
  modified_base 22..23: mod_base = OTHER; note = bicyclic nucleic acid (BNA)
  source 1..23: mol_type = other DNA
  modified_base 7: mod_base = OTHER; note = Uracil
  modified_base 17: mod_base = OTHER; note = Uracil
ccaacatcaaggaagatggcatt

SEQ ID NO: 5636 - DNA, 22 bp, synthetic construct
  misc_feature 1..22: note = Description of Artificial Sequence: Synthetic Antisense oligonucleotide
  misc_feature 1..22: note = Original Sequence: ccaacaucaaggaagauggcat
  modified_base 1..2: mod_base = OTHER; note = 5-methyl
  modified_base 5: mod_base = OTHER; note = 5-methyl
  modified_base 8: mod_base = OTHER; note = 5-methyl
  modified_base 20: mod_base = OTHER; note = 5-methyl
  modified_base 21..22: mod_base = OTHER; note = bicyclic nucleic acid (BNA)
  source 1..22: mol_type = other DNA
  modified_base 7: mod_base = OTHER; note = Uracil
  modified_base 17: mod_base = OTHER; note = Uracil
ccaacatcaaggaagatggcat

SEQ ID NO: 5637 - RNA, 21 nt, synthetic construct
  misc_feature 1..21: note = Description of Artificial Sequence: Synthetic Antisense oligonucleotide
  modified_base 1..2: mod_base = OTHER; note = 5-methyl
  modified_base 5: mod_base = OTHER; note = 5-methyl
  modified_base 8: mod_base = OTHER; note = 5-methyl
  modified_base 20: mod_base = OTHER; note = 5-methyl
  modified_base 20..21: mod_base = OTHER; note = bicyclic nucleic acid (BNA)
  source 1..21: mol_type = other RNA
ccaacatcaaggaagatggca

SEQ ID NO: 5638 - RNA, 20 nt, synthetic construct
  misc_feature 1..20: note = Description of Artificial Sequence: Synthetic Antisense oligonucleotide
  modified_base 1..2: mod_base = OTHER; note = 5-methyl
  modified_base 5: mod_base = OTHER; note = 5-methyl
  modified_base 8: mod_base = OTHER; note = 5-methyl
  modified_base 20: mod_base = OTHER; note = 5-methyl
  modified_base 19..20: mod_base = OTHER; note = bicyclic nucleic acid (BNA)
  source 1..20: mol_type = other RNA
ccaacatcaaggaagatggc

SEQ ID NO: 5639 - RNA, 19 nt, synthetic construct
  misc_feature 1..19: note = Description of Artificial Sequence: Synthetic Antisense oligonucleotide
  modified_base 1..2: mod_base = OTHER; note = 5-methyl
  modified_base 5: mod_base = OTHER; note = 5-methyl
  modified_base 8: mod_base = OTHER; note = 5-methyl
  modified_base 18..19: mod_base = OTHER; note = bicyclic nucleic acid (BNA)
  source 1..19: mol_type = other RNA
ccaacatcaaggaagatgg

SEQ ID NO: 5640 - DNA, 18 bp, synthetic construct
  misc_feature 1..18: note = Description of Artificial Sequence: Synthetic Antisense oligonucleotide
  misc_feature 1..18: note = Original Sequence: ccaacaucaaggaagatg
  modified_base 1..2: mod_base = OTHER; note = 5-methyl
  modified_base 5: mod_base = OTHER; note = 5-methyl
  modified_base 8: mod_base = OTHER; note = 5-methyl
  modified_base 17..18: mod_base = OTHER; note = bicyclic nucleic acid (BNA)
  source 1..18: mol_type = other DNA
  modified_base 7: mod_base = OTHER; note = Uracil
ccaacatcaaggaagatg

SEQ ID NO: 5641 - DNA, 17 bp, synthetic construct
  misc_feature 1..17: note = Description of Artificial Sequence: Synthetic Antisense oligonucleotide
  misc_feature 1..17: note = Original Sequence: ccaacaucaaggaagat
  modified_base 1..2: mod_base = OTHER; note = 5-methyl
  modified_base 5: mod_base = OTHER; note = 5-methyl
  modified_base 8: mod_base = OTHER; note = 5-methyl
  modified_base 16..17: mod_base = OTHER; note = bicyclic nucleic acid (BNA)
  source 1..17: mol_type = other DNA
  modified_base 7: mod_base = OTHER; note = Uracil
ccaacatcaaggaagat

SEQ ID NO: 5642 - RNA, 16 nt, synthetic construct
  misc_feature 1..16: note = Description of Artificial Sequence: Synthetic Antisense oligonucleotide
  modified_base 1..2: mod_base = OTHER; note = 5-methyl
  modified_base 5: mod_base = OTHER; note = 5-methyl
  modified_base 8: mod_base = OTHER; note = 5-methyl
  modified_base 15..16: mod_base = OTHER; note = bicyclic nucleic acid (BNA)
  source 1..16: mol_type = other RNA
ccaacatcaaggaaga

SEQ ID NO: 5643 - RNA, 15 nt, synthetic construct
  misc_feature 1..15: note = Description of Artificial Sequence: Synthetic Antisense oligonucleotide
  modified_base 1..2: mod_base = OTHER; note = 5-methyl
  modified_base 5: mod_base = OTHER; note = 5-methyl
  modified_base 8: mod_base = OTHER; note = 5-methyl
  modified_base 14..15: mod_base = OTHER; note = bicyclic nucleic acid (BNA)
  source 1..15: mol_type = other RNA
ccaacatcaaggaag

SEQ ID NO: 5644 - RNA, 27 nt, synthetic construct
  misc_feature 1..27: note = Description of Artificial Sequence: Synthetic Antisense oligonucleotide
  modified_base 1: mod_base = OTHER; note = 5-methyl
  modified_base 4: mod_base = OTHER; note = 5-methyl
  modified_base 7: mod_base = OTHER; note = 5-methyl
  modified_base 19: mod_base = OTHER; note = 5-methyl
  modified_base 24: mod_base = OTHER; note = 5-methyl
  modified_base 26..27: mod_base = OTHER; note = bicyclic nucleic acid (BNA)
  source 1..27: mol_type = other RNA
caacatcaaggaagatggcatttctag

SEQ ID NO: 5645 - DNA, 26 bp, synthetic construct
  misc_feature 1..26: note = Description of Artificial Sequence: Synthetic Antisense oligonucleotide
  misc_feature 1..26: note = Original Sequence: caacaucaaggaagauggcauuucta
  modified_base 1: mod_base = OTHER; note = 5-methyl
  modified_base 4: mod_base = OTHER; note = 5-methyl
  modified_base 7: mod_base = OTHER; note = 5-methyl
  modified_base 19: mod_base = OTHER; note = 5-methyl
  modified_base 24: mod_base = OTHER; note = 5-methyl
  modified_base 25..26: mod_base = OTHER; note = bicyclic nucleic acid (BNA)
  source 1..26: mol_type = other DNA
  modified_base 6: mod_base = OTHER; note = Uracil
  modified_base 16: mod_base = OTHER; note = Uracil
  modified_base 21: mod_base = OTHER; note = Uracil
  modified_base 22: mod_base = OTHER; note = Uracil
  modified_base 23: mod_base = OTHER; note = Uracil
caacatcaaggaagatggcatttcta

SEQ ID NO: 5646 - DNA, 25 bp, synthetic construct
  misc_feature 1..25: note = Description of Artificial Sequence: Synthetic Antisense oligonucleotide
  misc_feature 1..25: note = Original Sequence: caacaucaaggaagauggcauuuct
  modified_base 1: mod_base = OTHER; note = 5-methyl
  modified_base 4: mod_base = OTHER; note = 5-methyl
  modified_base 7: mod_base = OTHER; note = 5-methyl
  modified_base 19: mod_base = OTHER; note = 5-methyl
  modified_base 24: mod_base = OTHER; note = 5-methyl
  modified_base 24..25: mod_base = OTHER; note = bicyclic nucleic acid (BNA)
  source 1..25: mol_type = other DNA
  modified_base 6: mod_base = OTHER; note = Uracil
  modified_base 16: mod_base = OTHER; note = Uracil
  modified_base 21: mod_base = OTHER; note = Uracil
  modified_base 22: mod_base = OTHER; note = Uracil
  modified_base 23: mod_base = OTHER; note = Uracil
caacatcaaggaagatggcatttct

SEQ ID NO: 5647 - DNA, 24 bp, synthetic construct
  misc_feature 1..24: note = Description of Artificial Sequence: Synthetic Antisense oligonucleotide
  misc_feature 1..24: note = Original Sequence: caacaucaaggaagauggcauutc
  modified_base 1: mod_base = OTHER; note = 5-methyl
  modified_base 4: mod_base = OTHER; note = 5-methyl
  modified_base 7: mod_base = OTHER; note = 5-methyl
  modified_base 19: mod_base = OTHER; note = 5-methyl
  modified_base 24: mod_base = OTHER; note = 5-methyl
  modified_base 23..24: mod_base = OTHER; note = bicyclic nucleic acid (BNA)
  source 1..24: mol_type = other DNA
  modified_base 6: mod_base = OTHER; note = Uracil
  modified_base 16: mod_base = OTHER; note = Uracil
  modified_base 21: mod_base = OTHER; note = Uracil
  modified_base 22: mod_base = OTHER; note = Uracil
caacatcaaggaagatggcatttc

SEQ ID NO: 5648 - DNA, 23 bp, synthetic construct
  misc_feature 1..23: note = Description of Artificial Sequence: Synthetic Antisense oligonucleotide
  misc_feature 1..23: note = Original Sequence: caacaucaaggaagauggcautt
  modified_base 1: mod_base = OTHER; note = 5-methyl
  modified_base 4: mod_base = OTHER; note = 5-methyl
  modified_base 7: mod_base = OTHER; note = 5-methyl
  modified_base 19: mod_base = OTHER; note = 5-methyl
  modified_base 22..23: mod_base = OTHER; note = bicyclic nucleic acid (BNA)
  source 1..23: mol_type = other DNA
  modified_base 6: mod_base = OTHER; note = Uracil
  modified_base 16: mod_base = OTHER; note = Uracil
  modified_base 21: mod_base = OTHER; note = Uracil
caacatcaaggaagatggcattt

SEQ ID NO: 5649 - DNA, 22 bp, synthetic construct
  misc_feature 1..22: note = Description of Artificial Sequence: Synthetic Antisense oligonucleotide
  misc_feature 1..22: note = Original Sequence: caacaucaaggaagauggcatt
  modified_base 1: mod_base = OTHER; note = 5-methyl
  modified_base 4: mod_base = OTHER; note = 5-methyl
  modified_base 7: mod_base = OTHER; note = 5-methyl
  modified_base 19: mod_base = OTHER; note = 5-methyl
  modified_base 21..22: mod_base = OTHER; note = bicyclic nucleic acid (BNA)
  source 1..22: mol_type = other DNA
  modified_base 6: mod_base = OTHER; note = Uracil
  modified_base 16: mod_base = OTHER; note = Uracil
caacatcaaggaagatggcatt

SEQ ID NO: 5650 - DNA, 21 bp, synthetic construct
  misc_feature 1..21: note = Description of Artificial Sequence: Synthetic Antisense oligonucleotide
  misc_feature 1..21: note = Original Sequence: caacaucaaggaagauggcat
  modified_base 1: mod_base = OTHER; note = 5-methyl
  modified_base 4: mod_base = OTHER; note = 5-methyl
  modified_base 7: mod_base = OTHER; note = 5-methyl
  modified_base 19: mod_base = OTHER; note = 5-methyl
  modified_base 20..21: mod_base = OTHER; note = bicyclic nucleic acid (BNA)
  source 1..21: mol_type = other DNA
  modified_base 6: mod_base = OTHER; note = Uracil
  modified_base 16: mod_base = OTHER; note = Uracil
caacatcaaggaagatggcat

SEQ ID NO: 5651 - RNA, 20 nt, synthetic construct
  misc_feature 1..20: note = Description of Artificial Sequence: Synthetic Antisense oligonucleotide
  modified_base 1: mod_base = OTHER; note = 5-methyl
  modified_base 4: mod_base = OTHER; note = 5-methyl
  modified_base 7: mod_base = OTHER; note = 5-methyl
  modified_base 19: mod_base = OTHER; note = 5-methyl
  modified_base 19..20: mod_base = OTHER; note = bicyclic nucleic acid (BNA)
  source 1..20: mol_type = other RNA
caacatcaaggaagatggca

SEQ ID NO: 5652 - RNA, 19 nt, synthetic construct
  misc_feature 1..19: note = Description of Artificial Sequence: Synthetic Antisense oligonucleotide
  modified_base 1: mod_base = OTHER; note = 5-methyl
  modified_base 4: mod_base = OTHER; note = 5-methyl
  modified_base 7: mod_base = OTHER; note = 5-methyl
  modified_base 19: mod_base = OTHER; note = 5-methyl
  modified_base 18..19: mod_base = OTHER; note = bicyclic nucleic acid (BNA)
  source 1..19: mol_type = other RNA
caacatcaaggaagatggc

SEQ ID NO: 5653 - RNA, 18 nt, synthetic construct
  misc_feature 1..18: note = Description of Artificial Sequence: Synthetic Antisense oligonucleotide
  modified_base 1: mod_base = OTHER; note = 5-methyl
  modified_base 4: mod_base = OTHER; note = 5-methyl
  modified_base 7: mod_base = OTHER; note = 5-methyl
  modified_base 17..18: mod_base = OTHER; note = bicyclic nucleic acid (BNA)
  source 1..18: mol_type = other RNA
caacatcaaggaagatgg

SEQ ID NO: 5654 - DNA, 17 bp, synthetic construct
  misc_feature 1..17: note = Description of Artificial Sequence: Synthetic Antisense oligonucleotide
  misc_feature 1..17: note = Original Sequence: caacaucaaggaagatg
  modified_base 1: mod_base = OTHER; note = 5-methyl
  modified_base 4: mod_base = OTHER; note = 5-methyl
  modified_base 7: mod_base = OTHER; note = 5-methyl
  modified_base 16..17: mod_base = OTHER; note = bicyclic nucleic acid (BNA)
  source 1..17: mol_type = other DNA
  modified_base 6: mod_base = OTHER; note = Uracil
caacatcaaggaagatg

SEQ ID NO: 5655 - DNA, 16 bp, synthetic construct
  misc_feature 1..16: note = Description of Artificial Sequence: Synthetic Antisense oligonucleotide
  misc_feature 1..16: note = Original Sequence: caacaucaaggaagat
  modified_base 1: mod_base = OTHER; note = 5-methyl
  modified_base 4: mod_base = OTHER; note = 5-methyl
  modified_base 7: mod_base = OTHER; note = 5-methyl
  modified_base 15..16: mod_base = OTHER; note = bicyclic nucleic acid (BNA)
  source 1..16: mol_type = other DNA
  modified_base 6: mod_base = OTHER; note = Uracil
caacatcaaggaagat

SEQ ID NO: 5656 - RNA, 15 nt, synthetic construct
  misc_feature 1..15: note = Description of Artificial Sequence: Synthetic Antisense oligonucleotide
  modified_base 1: mod_base = OTHER; note = 5-methyl
  modified_base 4: mod_base = OTHER; note = 5-methyl
  modified_base 7: mod_base = OTHER; note = 5-methyl
  modified_base 14..15: mod_base = OTHER; note = bicyclic nucleic acid (BNA)
  source 1..15: mol_type = other RNA
caacatcaaggaaga

SEQ ID NO: 5657 - RNA, 14 nt, synthetic construct
  misc_feature 1..14: note = Description of Artificial Sequence: Synthetic Antisense oligonucleotide
  modified_base 1: mod_base = OTHER; note = 5-methyl
  modified_base 4: mod_base = OTHER; note = 5-methyl
  modified_base 7: mod_base = OTHER; note = 5-methyl
  modified_base 13..14: mod_base = OTHER; note = bicyclic nucleic acid (BNA)
  source 1..14: mol_type = other RNA
caacatcaaggaag

SEQ ID NO: 5658 - RNA, 26 nt, synthetic construct
  misc_feature 1..26: note = Description of Artificial Sequence: Synthetic Antisense oligonucleotide
  modified_base 3: mod_base = OTHER; note = 5-methyl
  modified_base 6: mod_base = OTHER; note = 5-methyl
  modified_base 18: mod_base = OTHER; note = 5-methyl
  modified_base 23: mod_base = OTHER; note = 5-methyl
  modified_base 25..26: mod_base = OTHER; note = bicyclic nucleic acid (BNA)
  source 1..26: mol_type = other RNA
aacatcaaggaagatggcatttctag

SEQ ID NO: 5659 - DNA, 25 bp, synthetic construct
  misc_feature 1..25: note = Description of Artificial Sequence: Synthetic Antisense oligonucleotide
  misc_feature 1..25: note = Original Sequence: aacaucaaggaagauggcauuucta
  modified_base 3: mod_base = OTHER; note = 5-methyl
  modified_base 6: mod_base = OTHER; note = 5-methyl
  modified_base 18: mod_base = OTHER; note = 5-methyl
  modified_base 23: mod_base = OTHER; note = 5-methyl
  modified_base 24..25: mod_base = OTHER; note = bicyclic nucleic acid (BNA)
  source 1..25: mol_type = other DNA
  modified_base 5: mod_base = OTHER; note = Uracil
  modified_base 15: mod_base = OTHER; note = Uracil
  modified_base 20: mod_base = OTHER; note = Uracil
  modified_base 21: mod_base = OTHER; note = Uracil
  modified_base 22: mod_base = OTHER; note = Uracil
aacatcaaggaagatggcatttcta

SEQ ID NO: 5660 - DNA, 24 bp, synthetic construct
  misc_feature 1..24: note = Description of Artificial Sequence: Synthetic Antisense oligonucleotide
  misc_feature 1..24: note = Original Sequence: aacaucaaggaagauggcauuuct
  modified_base 3: mod_base = OTHER; note = 5-methyl
  modified_base 6: mod_base = OTHER; note = 5-methyl
  modified_base 18: mod_base = OTHER; note = 5-methyl
  modified_base 23: mod_base = OTHER; note = 5-methyl
  modified_base 23..24: mod_base = OTHER; note = bicyclic nucleic acid (BNA)
  source 1..24: mol_type = other DNA
  modified_base 5: mod_base = OTHER; note = Uracil
  modified_base 15: mod_base = OTHER; note = Uracil
  modified_base 20: mod_base = OTHER; note = Uracil
  modified_base 21: mod_base = OTHER; note = Uracil
  modified_base 22: mod_base = OTHER; note = Uracil
aacatcaaggaagatggcatttct

SEQ ID NO: 5661 - DNA, 23 bp, synthetic construct
  misc_feature 1..23: note = Description of Artificial Sequence: Synthetic Antisense oligonucleotide
  misc_feature 1..23: note = Original Sequence: aacaucaaggaagauggcauutc
  modified_base 3: mod_base = OTHER; note = 5-methyl
  modified_base 6: mod_base = OTHER; note = 5-methyl
  modified_base 18: mod_base = OTHER; note = 5-methyl
  modified_base 23: mod_base = OTHER; note = 5-methyl
  modified_base 22..23: mod_base = OTHER; note = bicyclic nucleic acid (BNA)
  source 1..23: mol_type = other DNA
  modified_base 5: mod_base = OTHER; note = Uracil
  modified_base 15: mod_base = OTHER; note = Uracil
  modified_base 20: mod_base = OTHER; note = Uracil
  modified_base 21: mod_base = OTHER; note = Uracil
aacatcaaggaagatggcatttc

SEQ ID NO: 5662 - DNA, 22 bp, synthetic construct
  misc_feature 1..22: note = Description of Artificial Sequence: Synthetic Antisense oligonucleotide
  misc_feature 1..22: note = Original Sequence: aacaucaaggaagauggcautt
  modified_base 3: mod_base = OTHER; note = 5-methyl
  modified_base 6: mod_base = OTHER; note = 5-methyl
  modified_base 18: mod_base = OTHER; note = 5-methyl
  modified_base 21..22: mod_base = OTHER; note = bicyclic nucleic acid (BNA)
  source 1..22: mol_type = other DNA
  modified_base 5: mod_base = OTHER; note = Uracil
  modified_base 15: mod_base = OTHER; note = Uracil
  modified_base 20: mod_base = OTHER; note = Uracil
aacatcaaggaagatggcattt

SEQ ID NO: 5663 - DNA, 21 bp, synthetic construct
  misc_feature 1..21: note = Description of Artificial Sequence: Synthetic Antisense oligonucleotide
  misc_feature 1..21: note = Original Sequence: aacaucaaggaagauggcatt
  modified_base 3: mod_base = OTHER; note = 5-methyl
  modified_base 6: mod_base = OTHER; note = 5-methyl
  modified_base 18: mod_base = OTHER; note = 5-methyl
  modified_base 20..21: mod_base = OTHER; note = bicyclic nucleic acid (BNA)
  source 1..21: mol_type = other DNA
  modified_base 5: mod_base = OTHER; note = Uracil
  modified_base 15: mod_base = OTHER; note = Uracil
aacatcaaggaagatggcatt

SEQ ID NO: 5664 - DNA, 20 bp, synthetic construct
  misc_feature 1..20: note = Description of Artificial Sequence: Synthetic Antisense oligonucleotide
  misc_feature 1..20: note = Original Sequence: aacaucaaggaagauggcat
  modified_base 3: mod_base = OTHER; note = 5-methyl
  modified_base 6: mod_base = OTHER; note = 5-methyl
  modified_base 18: mod_base = OTHER; note = 5-methyl
  modified_base 19..20: mod_base = OTHER; note = bicyclic nucleic acid (BNA)
  source 1..20: mol_type = other DNA
  modified_base 5: mod_base = OTHER; note = Uracil
  modified_base 15: mod_base = OTHER; note = Uracil
aacatcaaggaagatggcat

SEQ ID NO: 5665 - RNA, 19 nt, synthetic construct
  misc_feature 1..19: note = Description of Artificial Sequence: Synthetic Antisense oligonucleotide
  modified_base 3: mod_base = OTHER; note = 5-methyl
  modified_base 6: mod_base = OTHER; note = 5-methyl
  modified_base 18: mod_base = OTHER; note = 5-methyl
  modified_base 18..19: mod_base = OTHER; note = bicyclic nucleic acid (BNA)
  source 1..19: mol_type = other RNA
aacatcaaggaagatggca

SEQ ID NO: 5666 - RNA, 18 nt, synthetic construct
  misc_feature 1..18: note = Description of Artificial Sequence: Synthetic Antisense oligonucleotide
  modified_base 3: mod_base = OTHER; note = 5-methyl
  modified_base 6: mod_base = OTHER; note = 5-methyl
  modified_base 18: mod_base = OTHER; note = 5-methyl
  modified_base 17..18: mod_base = OTHER; note = bicyclic nucleic acid (BNA)
  source 1..18: mol_type = other RNA
aacatcaaggaagatggc

SEQ ID NO: 5667 - RNA, 17 nt, synthetic construct
  misc_feature 1..17: note = Description of Artificial Sequence: Synthetic Antisense oligonucleotide
  modified_base 3: mod_base = OTHER; note = 5-methyl
  modified_base 6: mod_base = OTHER; note = 5-methyl
  modified_base 16..17: mod_base = OTHER; note = bicyclic nucleic acid (BNA)
  source 1..17: mol_type = other RNA
aacatcaaggaagatgg

SEQ ID NO: 5668 - DNA, 16 bp, synthetic construct
  misc_feature 1..16: note = Description of Artificial Sequence: Synthetic Antisense oligonucleotide
  misc_feature 1..16: note = Original Sequence: aacaucaaggaagatg
  modified_base 3: mod_base = OTHER; note = 5-methyl
  modified_base 6: mod_base = OTHER; note = 5-methyl
  modified_base 15..16: mod_base = OTHER; note = bicyclic nucleic acid (BNA)
  source 1..16: mol_type = other DNA
  modified_base 5: mod_base = OTHER; note = Uracil
aacatcaaggaagatg

SEQ ID NO: 5669 - DNA, 15 bp, synthetic construct
  misc_feature 1..15: note = Description of Artificial Sequence: Synthetic Antisense oligonucleotide
  misc_feature 1..15: note = Original Sequence: aacaucaaggaagat
  modified_base 3: mod_base = OTHER; note = 5-methyl
  modified_base 6: mod_base = OTHER; note = 5-methyl
  modified_base 14..15: mod_base = OTHER; note = bicyclic nucleic acid (BNA)
  source 1..15: mol_type = other DNA
  modified_base 5: mod_base = OTHER; note = Uracil
aacatcaaggaagat

SEQ ID NO: 5670 - RNA, 14 nt, synthetic construct
  misc_feature 1..14: note = Description of Artificial Sequence: Synthetic Antisense oligonucleotide
  modified_base 3: mod_base = OTHER; note = 5-methyl
  modified_base 6: mod_base = OTHER; note = 5-methyl
  modified_base 13..14: mod_base = OTHER; note = bicyclic nucleic acid (BNA)
  source 1..14: mol_type = other RNA
aacatcaaggaaga

SEQ ID NO: 5671 - RNA, 13 nt, synthetic construct
  misc_feature 1..13: note = Description of Artificial Sequence: Synthetic Antisense oligonucleotide
  modified_base 3: mod_base = OTHER; note = 5-methyl
  modified_base 6: mod_base = OTHER; note = 5-methyl
  modified_base 12..13: mod_base = OTHER; note = bicyclic nucleic acid (BNA)
  source 1..13: mol_type = other RNA
aacatcaaggaag

SEQ ID NO: 5672 - RNA, 25 nt, synthetic construct
  misc_feature 1..25: note = Description of Artificial Sequence: Synthetic Antisense oligonucleotide
  modified_base 2: mod_base = OTHER; note = 5-methyl
  modified_base 5: mod_base = OTHER; note = 5-methyl
  modified_base 17: mod_base = OTHER; note = 5-methyl
  modified_base 22: mod_base = OTHER; note = 5-methyl
  modified_base 24..25: mod_base = OTHER; note = bicyclic nucleic acid (BNA)
  source 1..25: mol_type = other RNA
acatcaaggaagatggcatttctag

SEQ ID NO: 5673 - DNA, 24 bp, synthetic construct
  misc_feature 1..24: note = Description of Artificial Sequence: Synthetic Antisense oligonucleotide
  misc_feature 1..24: note = Original Sequence: acaucaaggaagauggcauuucta
  modified_base 2: mod_base = OTHER; note = 5-methyl
  modified_base 5: mod_base = OTHER; note = 5-methyl
  modified_base 17: mod_base = OTHER; note = 5-methyl
  modified_base 22: mod_base = OTHER; note = 5-methyl
  modified_base 23..24: mod_base = OTHER; note = bicyclic nucleic acid (BNA)
  source 1..24: mol_type = other DNA
  modified_base 4: mod_base = OTHER; note = Uracil
  modified_base 14: mod_base = OTHER; note = Uracil
  modified_base 19: mod_base = OTHER; note = Uracil
  modified_base 20: mod_base = OTHER; note = Uracil
  modified_base 21: mod_base = OTHER; note = Uracil
acatcaaggaagatggcatttcta

SEQ ID NO: 5674 - DNA, 23 bp, synthetic construct
  misc_feature 1..23: note = Description of Artificial Sequence: Synthetic Antisense oligonucleotide
  misc_feature 1..23: note = Original Sequence: acaucaaggaagauggcauuuct
  modified_base 2: mod_base = OTHER; note = 5-methyl
  modified_base 5: mod_base = OTHER; note = 5-methyl
  modified_base 17: mod_base = OTHER; note = 5-methyl
  modified_base 22: mod_base = OTHER; note = 5-methyl
  modified_base 22..23: mod_base = OTHER; note = bicyclic nucleic acid (BNA)
  source 1..23: mol_type = other DNA
  modified_base 4: mod_base = OTHER; note = Uracil
  modified_base 14: mod_base = OTHER; note = Uracil
  modified_base 19: mod_base = OTHER; note = Uracil
  modified_base 20: mod_base = OTHER; note = Uracil
  modified_base 21: mod_base = OTHER; note = Uracil
acatcaaggaagatggcatttct

SEQ ID NO: 5675 - DNA, 22 bp, synthetic construct
  misc_feature 1..22: note = Description of Artificial Sequence: Synthetic Antisense oligonucleotide
  misc_feature 1..22: note = Original Sequence: acaucaaggaagauggcauutc
  modified_base 2: mod_base = OTHER; note = 5-methyl
  modified_base 5: mod_base = OTHER; note = 5-methyl
  modified_base 17: mod_base = OTHER; note = 5-methyl
  modified_base 22: mod_base = OTHER; note = 5-methyl
  modified_base 21..22: mod_base = OTHER; note = bicyclic nucleic acid (BNA)
  source 1..22: mol_type = other DNA
  modified_base 4: mod_base = OTHER; note = Uracil
  modified_base 14: mod_base = OTHER; note = Uracil
  modified_base 19: mod_base = OTHER; note = Uracil
  modified_base 20: mod_base = OTHER; note = Uracil
acatcaaggaagatggcatttc

SEQ ID NO: 5676 - DNA, 21 bp, synthetic construct
  misc_feature 1..21: note = Description of Artificial Sequence: Synthetic Antisense oligonucleotide
  misc_feature 1..21: note = Original Sequence: acaucaaggaagauggcautt
  modified_base 2: mod_base = OTHER; note = 5-methyl
  modified_base 5: mod_base = OTHER; note = 5-methyl
  modified_base 17: mod_base = OTHER; note = 5-methyl
  modified_base 20..21: mod_base = OTHER; note = bicyclic nucleic acid (BNA)
  source 1..21: mol_type = other DNA
  modified_base 4: mod_base = OTHER; note = Uracil
  modified_base 14: mod_base = OTHER; note = Uracil
  modified_base 19: mod_base = OTHER; note = Uracil
acatcaaggaagatggcattt

SEQ ID NO: 5677 - DNA, 20 bp, synthetic construct
  misc_feature 1..20: note = Description of Artificial Sequence: Synthetic Antisense oligonucleotide
  misc_feature 1..20: note = Original Sequence: acaucaaggaagauggcatt
  modified_base 2: mod_base = OTHER; note = 5-methyl
  modified_base 5: mod_base = OTHER; note = 5-methyl
  modified_base 17: mod_base = OTHER; note = 5-methyl
  modified_base 19..20: mod_base = OTHER; note = bicyclic nucleic acid (BNA)
  source 1..20: mol_type = other DNA
  modified_base 4: mod_base = OTHER; note = Uracil
  modified_base 14: mod_base = OTHER; note = Uracil
acatcaaggaagatggcatt

SEQ ID NO: 5678 - DNA, 19 bp, synthetic construct
  misc_feature 1..19: note = Description of Artificial Sequence: Synthetic Antisense oligonucleotide
  misc_feature 1..19: note = Original Sequence: acaucaaggaagauggcat
  modified_base 2: mod_base = OTHER; note = 5-methyl
  modified_base 5: mod_base = OTHER; note = 5-methyl
  modified_base 17: mod_base = OTHER; note = 5-methyl
  modified_base 18..19: mod_base = OTHER; note = bicyclic nucleic acid (BNA)
  source 1..19: mol_type = other DNA
  modified_base 4: mod_base = OTHER; note = Uracil
  modified_base 14: mod_base = OTHER; note = Uracil
acatcaaggaagatggcat

SEQ ID NO: 5679 - RNA, 18 nt, synthetic construct
  misc_feature 1..18: note = Description of Artificial Sequence: Synthetic Antisense oligonucleotide
  modified_base 2: mod_base = OTHER; note = 5-methyl
  modified_base 5: mod_base = OTHER; note = 5-methyl
  modified_base 17: mod_base = OTHER; note = 5-methyl
  modified_base 17..18: mod_base = OTHER; note = bicyclic nucleic acid (BNA)
  source 1..18: mol_type = other RNA
acatcaaggaagatggca

SEQ ID NO: 5680 - RNA, 17 nt, synthetic construct
  misc_feature 1..17: note = Description of Artificial Sequence: Synthetic Antisense oligonucleotide
  modified_base 2: mod_base = OTHER; note = 5-methyl
  modified_base 5: mod_base = OTHER; note = 5-methyl
  modified_base 17: mod_base = OTHER; note = 5-methyl
  modified_base 16..17: mod_base = OTHER; note = bicyclic nucleic acid (BNA)
  source 1..17: mol_type = other RNA
acatcaaggaagatggc

SEQ ID NO: 5681 - RNA, 16 nt, synthetic construct
  misc_feature 1..16: note = Description of Artificial Sequence: Synthetic Antisense oligonucleotide
  modified_base 2: mod_base = OTHER; note = 5-methyl
  modified_base 5: mod_base = OTHER; note = 5-methyl
  modified_base 15..16: mod_base = OTHER; note = bicyclic nucleic acid (BNA)
  source 1..16: mol_type = other RNA
acatcaaggaagatgg

SEQ ID NO: 5682 - DNA, 15 bp, synthetic construct
  misc_feature 1..15: note = Description of Artificial Sequence: Synthetic Antisense oligonucleotide
  misc_feature 1..15: note = Original Sequence: acaucaaggaagatg
  modified_base 2: mod_base = OTHER; note = 5-methyl
  modified_base 5: mod_base = OTHER; note = 5-methyl
  modified_base 14..15: mod_base = OTHER; note = bicyclic nucleic acid (BNA)
  source 1..15: mol_type = other DNA
  modified_base 4: mod_base = OTHER; note = Uracil
acatcaaggaagatg

SEQ ID NO: 5683 - DNA, 14 bp, synthetic construct
  misc_feature 1..14: note = Description of Artificial Sequence: Synthetic Antisense oligonucleotide
  misc_feature 1..14: note = Original Sequence: acaucaaggaagat
  modified_base 2: mod_base = OTHER; note = 5-methyl
  modified_base 5: mod_base = OTHER; note = 5-methyl
  modified_base 13..14: mod_base = OTHER; note = bicyclic nucleic acid (BNA)
  source 1..14: mol_type = other DNA
  modified_base 4: mod_base = OTHER; note = Uracil
acatcaaggaagat

SEQ ID NO: 5684 - RNA, 13 nt, synthetic construct
  misc_feature 1..13: note = Description of Artificial Sequence: Synthetic Antisense oligonucleotide
  modified_base 2: mod_base = OTHER; note = 5-methyl
  modified_base 5: mod_base = OTHER; note = 5-methyl
  modified_base 12..13: mod_base = OTHER; note = bicyclic nucleic acid (BNA)
  source 1..13: mol_type = other RNA
acatcaaggaaga

SEQ ID NO: 5685 - RNA, 12 nt, synthetic construct
  misc_feature 1..12: note = Description of Artificial Sequence: Synthetic Antisense oligonucleotide
  modified_base 2: mod_base = OTHER; note = 5-methyl
  modified_base 5: mod_base = OTHER; note = 5-methyl
  modified_base 11..12: mod_base = OTHER; note = bicyclic nucleic acid (BNA)
  source 1..12: mol_type = other RNA
acatcaaggaag

SEQ ID NO: 5686 - RNA, 24 nt, synthetic construct
  misc_feature 1..24: note = Description of Artificial Sequence: Synthetic Antisense oligonucleotide
  modified_base 1: mod_base = OTHER; note = 5-methyl
  modified_base 4: mod_base = OTHER; note = 5-methyl
  modified_base 16: mod_base = OTHER; note = 5-methyl
  modified_base 21: mod_base = OTHER; note = 5-methyl
  modified_base 23..24: mod_base = OTHER; note = bicyclic nucleic acid (BNA)
  source 1..24: mol_type = other RNA
catcaaggaagatggcatttctag

SEQ ID NO: 5687 - DNA, 23 bp, synthetic construct
  misc_feature 1..23: note = Description of Artificial Sequence: Synthetic Antisense oligonucleotide
  misc_feature 1..23: note = Original Sequence: caucaaggaagauggcauuucta
  modified_base 1: mod_base = OTHER; note = 5-methyl
  modified_base 4: mod_base = OTHER; note = 5-methyl
  modified_base 16: mod_base = OTHER; note = 5-methyl
  modified_base 21: mod_base = OTHER; note = 5-methyl
  modified_base 22..23: mod_base = OTHER; note = bicyclic nucleic acid (BNA)
  source 1..23: mol_type = other DNA
  modified_base 3: mod_base = OTHER; note = Uracil
  modified_base 13: mod_base = OTHER; note = Uracil
  modified_base 18: mod_base = OTHER; note = Uracil
  modified_base 19: mod_base = OTHER; note = Uracil
  modified_base 20: mod_base = OTHER; note = Uracil
catcaaggaagatggcatttcta

SEQ ID NO: 5688 - DNA, 22 bp, synthetic construct
  misc_feature 1..22: note = Description of Artificial Sequence: Synthetic Antisense oligonucleotide
  misc_feature 1..22: note = Original Sequence: caucaaggaagauggcauuuct
  modified_base 1: mod_base = OTHER; note = 5-methyl
  modified_base 4: mod_base = OTHER; note = 5-methyl
  modified_base 16: mod_base = OTHER; note = 5-methyl
  modified_base 21: mod_base = OTHER; note = 5-methyl
  modified_base 21..22: mod_base = OTHER; note = bicyclic nucleic acid (BNA)
  source 1..22: mol_type = other DNA
  modified_base 3: mod_base = OTHER; note = Uracil
  modified_base 13: mod_base = OTHER; note = Uracil
  modified_base 18: mod_base = OTHER; note = Uracil
  modified_base 19: mod_base = OTHER; note = Uracil
  modified_base 20: mod_base = OTHER; note = Uracil
catcaaggaagatggcatttct

SEQ ID NO: 5689 - DNA, 21 bp, synthetic construct
  misc_feature 1..21: note = Description of Artificial Sequence: Synthetic Antisense oligonucleotide
  misc_feature 1..21: note = Original Sequence: caucaaggaagauggcauutc
  modified_base 1: mod_base = OTHER; note = 5-methyl
  modified_base 4: mod_base = OTHER; note = 5-methyl
  modified_base 16: mod_base = OTHER; note = 5-methyl
  modified_base 21: mod_base = OTHER; note = 5-methyl
  modified_base 20..21: mod_base = OTHER; note = bicyclic nucleic acid (BNA)
  source 1..21: mol_type = other DNA
  modified_base 3: mod_base = OTHER; note = Uracil
  modified_base 13: mod_base = OTHER; note = Uracil
  modified_base 18: mod_base = OTHER; note = Uracil
  modified_base 19: mod_base = OTHER; note = Uracil
catcaaggaagatggcatttc

SEQ ID NO: 5690 - DNA, 20 bp, synthetic construct
  misc_feature 1..20: note = Description of Artificial Sequence: Synthetic Antisense oligonucleotide
  misc_feature 1..20: note = Original Sequence: caucaaggaagauggcautt
  modified_base 1: mod_base = OTHER; note = 5-methyl
  modified_base 4: mod_base = OTHER; note = 5-methyl
  modified_base 16: mod_base = OTHER; note = 5-methyl
  modified_base 19..20: mod_base = OTHER; note = bicyclic nucleic acid (BNA)
  source 1..20: mol_type = other DNA
  modified_base 3: mod_base = OTHER; note = Uracil
  modified_base 13: mod_base = OTHER; note = Uracil
  modified_base 18: mod_base = OTHER; note = Uracil
catcaaggaagatggcattt

SEQ ID NO: 5691 - DNA, 19 bp, synthetic construct
  misc_feature 1..19: note = Description of Artificial Sequence: Synthetic Antisense oligonucleotide
  misc_feature 1..19: note = Original Sequence: caucaaggaagauggcatt
  modified_base 1: mod_base = OTHER; note = 5-methyl
  modified_base 4: mod_base = OTHER; note = 5-methyl
  modified_base 16: mod_base = OTHER; note = 5-methyl
  modified_base 18..19: mod_base = OTHER; note = bicyclic nucleic acid (BNA)
  source 1..19: mol_type = other DNA
  modified_base 3: mod_base = OTHER; note = Uracil
  modified_base 13: mod_base = OTHER; note = Uracil
catcaaggaagatggcatt

SEQ ID NO: 5692 - DNA, 18 bp, synthetic construct
  misc_feature 1..18: note = Description of Artificial Sequence: Synthetic Antisense oligonucleotide
  misc_feature 1..18: note = Original Sequence: caucaaggaagauggcat
  modified_base 1: mod_base = OTHER; note = 5-methyl
  modified_base 4: mod_base = OTHER; note = 5-methyl
  modified_base 16: mod_base = OTHER; note = 5-methyl
  modified_base 17..18: mod_base = OTHER; note = bicyclic nucleic acid (BNA)
  source 1..18: mol_type = other DNA
  modified_base 3: mod_base = OTHER; note = Uracil
  modified_base 13: mod_base = OTHER; note = Uracil
catcaaggaagatggcat

SEQ ID NO: 5693 - RNA, 17 nt, synthetic construct
  misc_feature 1..17: note = Description of Artificial Sequence: Synthetic Antisense oligonucleotide
  modified_base 1: mod_base = OTHER; note = 5-methyl
  modified_base 4: mod_base = OTHER; note = 5-methyl
  modified_base 16: mod_base = OTHER; note = 5-methyl
  modified_base 16..17: mod_base = OTHER; note = bicyclic nucleic acid (BNA)
  source 1..17: mol_type = other RNA
catcaaggaagatggca

SEQ ID NO: 5694 - RNA, 16 nt, synthetic construct
  misc_feature 1..16: note = Description of Artificial Sequence: Synthetic Antisense oligonucleotide
  modified_base 1: mod_base = OTHER; note = 5-methyl
  modified_base 4: mod_base = OTHER; note = 5-methyl
  modified_base 16: mod_base = OTHER; note = 5-methyl
  modified_base 15..16: mod_base = OTHER; note = bicyclic nucleic acid (BNA)
  source 1..16: mol_type = other RNA
catcaaggaagatggc

SEQ ID NO: 5695 - RNA, 15 nt, synthetic construct
  misc_feature 1..15: note = Description of Artificial Sequence: Synthetic Antisense oligonucleotide
  modified_base 1: mod_base = OTHER; note = 5-methyl
  modified_base 4: mod_base = OTHER; note = 5-methyl
  modified_base 14..15: mod_base = OTHER; note = bicyclic nucleic acid (BNA)
  source 1..15: mol_type = other RNA
catcaaggaagatgg

SEQ ID NO: 5696 - DNA, 14 bp, synthetic construct
  misc_feature 1..14: note = Description of Artificial Sequence: Synthetic Antisense oligonucleotide
  misc_feature 1..14: note = Original Sequence: caucaaggaagatg
  modified_base 1: mod_base = OTHER; note = 5-methyl
  modified_base 4: mod_base = OTHER; note = 5-methyl
  modified_base 13..14: mod_base = OTHER; note = bicyclic nucleic acid (BNA)
  source 1..14: mol_type = other DNA
  modified_base 3: mod_base = OTHER; note = Uracil
catcaaggaagatg

SEQ ID NO: 5697 - DNA, 13 bp, synthetic construct
  misc_feature 1..13: note = Description of Artificial Sequence: Synthetic Antisense oligonucleotide
  misc_feature 1..13: note = Original Sequence: caucaaggaagat
  modified_base 1: mod_base = OTHER; note = 5-methyl
  modified_base 4: mod_base = OTHER; note = 5-methyl
  modified_base 12..13: mod_base = OTHER; note = bicyclic nucleic acid (BNA)
  source 1..13: mol_type = other DNA
  modified_base 3: mod_base = OTHER; note = Uracil
catcaaggaagat

SEQ ID NO: 5698 - RNA, 12 nt, synthetic construct
  misc_feature 1..12: note = Description of Artificial Sequence: Synthetic Antisense oligonucleotide
  modified_base 1: mod_base = OTHER; note = 5-methyl
  modified_base 4: mod_base = OTHER; note = 5-methyl
  modified_base 11..12: mod_base = OTHER; note = bicyclic nucleic acid (BNA)
  source 1..12: mol_type = other RNA
catcaaggaaga

SEQ ID NO: 5699 - RNA, 11 nt, synthetic construct
  misc_feature 1..11: note = Description of Artificial Sequence: Synthetic Antisense oligonucleotide
  modified_base 1: mod_base = OTHER; note = 5-methyl
  modified_base 4: mod_base = OTHER; note = 5-methyl
  modified_base 10..11: mod_base = OTHER; note = bicyclic nucleic acid (BNA)
  source 1..11: mol_type = other RNA
catcaaggaag

SEQ ID NO: 5700 - RNA, 23 nt, synthetic construct
  misc_feature 1..23: note = Description of Artificial Sequence: Synthetic Antisense oligonucleotide
  modified_base 3: mod_base = OTHER; note = 5-methyl
  modified_base 15: mod_base = OTHER; note = 5-methyl
  modified_base 20: mod_base = OTHER; note = 5-methyl
  modified_base 22..23: mod_base = OTHER; note = bicyclic nucleic acid (BNA)
  source 1..23: mol_type = other RNA
atcaaggaagatggcatttctag

SEQ ID NO: 5701 - DNA, 22 bp, synthetic construct
  misc_feature 1..22: note = Description of Artificial Sequence: Synthetic Antisense oligonucleotide
  misc_feature 1..22: note = Original Sequence: aucaaggaagauggcauuucta
  modified_base 3: mod_base = OTHER; note = 5-methyl
  modified_base 15: mod_base = OTHER; note = 5-methyl
  modified_base 20: mod_base = OTHER; note = 5-methyl
  modified_base 21..22: mod_base = OTHER; note = bicyclic nucleic acid (BNA)
  source 1..22: mol_type = other DNA
  modified_base 2: mod_base = OTHER; note = Uracil
  modified_base 12: mod_base = OTHER; note = Uracil
  modified_base 17: mod_base = OTHER; note = Uracil
  modified_base 18: mod_base = OTHER; note = Uracil
  modified_base 19: mod_base = OTHER; note = Uracil
atcaaggaagatggcatttcta

SEQ ID NO: 5702 - DNA, 21 bp, synthetic construct
  misc_feature 1..21: note = Description of Artificial Sequence: Synthetic Antisense oligonucleotide
  misc_feature 1..21: note = Original Sequence: aucaaggaagauggcauuuct
  modified_base 3: mod_base = OTHER; note = 5-methyl
  modified_base 15: mod_base = OTHER; note = 5-methyl
  modified_base 20: mod_base = OTHER; note = 5-methyl
  modified_base 20..21: mod_base = OTHER; note = bicyclic nucleic acid (BNA)
  source 1..21: mol_type = other DNA
  modified_base 2: mod_base = OTHER; note = Uracil
  modified_base 12: mod_base = OTHER; note = Uracil
  modified_base 17: mod_base = OTHER; note = Uracil
  modified_base 18: mod_base = OTHER; note = Uracil
  modified_base 19: mod_base = OTHER; note = Uracil
atcaaggaagatggcatttct

SEQ ID NO: 5703 - DNA, 20 bp, synthetic construct
  misc_feature 1..20: note = Description of Artificial Sequence: Synthetic Antisense oligonucleotide
  misc_feature 1..20: note = Original Sequence: aucaaggaagauggcauutc
  modified_base 3: mod_base = OTHER; note = 5-methyl
  modified_base 15: mod_base = OTHER; note = 5-methyl
  modified_base 20: mod_base = OTHER; note = 5-methyl
  modified_base 19..20: mod_base = OTHER; note = bicyclic nucleic acid (BNA)
  source 1..20: mol_type = other DNA
  modified_base 2: mod_base = OTHER; note = Uracil
  modified_base 12: mod_base = OTHER; note = Uracil
  modified_base 17: mod_base = OTHER; note = Uracil
  modified_base 18: mod_base = OTHER; note = Uracil
atcaaggaagatggcatttc

SEQ ID NO: 5704 - DNA, 19 bp, synthetic construct
  misc_feature 1..19: note = Description of Artificial Sequence: Synthetic Antisense oligonucleotide
  misc_feature 1..19: note = Original Sequence: aucaaggaagauggcautt
  modified_base 3: mod_base = OTHER; note = 5-methyl
  modified_base 15: mod_base = OTHER; note = 5-methyl
  modified_base 18..19: mod_base = OTHER; note = bicyclic nucleic acid (BNA)
  source 1..19: mol_type = other DNA
  modified_base 2: mod_base = OTHER; note = Uracil
  modified_base 12: mod_base = OTHER; note = Uracil
  modified_base 17: mod_base = OTHER; note = Uracil
atcaaggaagatggcattt

SEQ ID NO: 5705 - DNA, 18 bp, synthetic construct
  misc_feature 1..18: note = Description of Artificial Sequence: Synthetic Antisense oligonucleotide
  misc_feature 1..18: note = Original Sequence: aucaaggaagauggcatt
  modified_base 3: mod_base = OTHER; note = 5-methyl
  modified_base 15: mod_base = OTHER; note = 5-methyl
  modified_base 17..18: mod_base = OTHER; note = bicyclic nucleic acid (BNA)
  source 1..18: mol_type = other DNA
  modified_base 2: mod_base = OTHER; note = Uracil
  modified_base 12: mod_base = OTHER; note = Uracil
atcaaggaagatggcatt

SEQ ID NO: 5706 - DNA, 17 bp, synthetic construct
  misc_feature 1..17: note = Description of Artificial Sequence: Synthetic Antisense oligonucleotide
  misc_feature 1..17: note = Original Sequence: aucaaggaagauggcat
  modified_base 3: mod_base = OTHER; note = 5-methyl
  modified_base 15: mod_base = OTHER; note = 5-methyl
  modified_base 16..17: mod_base = OTHER; note = bicyclic nucleic acid (BNA)
  source 1..17: mol_type = other DNA
  modified_base 2: mod_base = OTHER; note = Uracil
  modified_base 12: mod_base = OTHER; note = Uracil
atcaaggaagatggcat

SEQ ID NO: 5707 - RNA, 16 nt, synthetic construct
  misc_feature 1..16: note = Description of Artificial Sequence: Synthetic Antisense oligonucleotide
  modified_base 3: mod_base = OTHER; note = 5-methyl
  modified_base 15: mod_base = OTHER; note = 5-methyl
  modified_base 15..16: mod_base = OTHER; note = bicyclic nucleic acid (BNA)
  source 1..16: mol_type = other RNA
atcaaggaagatggca

SEQ ID NO: 5708 - RNA, 15 nt, synthetic construct
  misc_feature 1..15: note = Description of Artificial Sequence: Synthetic Antisense oligonucleotide
  modified_base 3: mod_base = OTHER; note = 5-methyl
  modified_base 15: mod_base = OTHER; note = 5-methyl
  modified_base 14..15: mod_base = OTHER; note = bicyclic nucleic acid (BNA)
  source 1..15: mol_type = other RNA
atcaaggaagatggc

SEQ ID NO: 5709 - RNA, 14 nt, synthetic construct
  misc_feature 1..14: note = Description of Artificial Sequence: Synthetic Antisense oligonucleotide
  modified_base 3: mod_base = OTHER; note = 5-methyl
  modified_base 13..14: mod_base = OTHER; note = bicyclic nucleic acid (BNA)
  source 1..14: mol_type = other RNA
atcaaggaagatgg

SEQ ID NO: 5710 - DNA, 13 bp, synthetic construct
  misc_feature 1..13: note = Description of Artificial Sequence: Synthetic Antisense oligonucleotide
  misc_feature 1..13: note = Original Sequence: aucaaggaagatg
  modified_base 3: mod_base = OTHER; note = 5-methyl
  modified_base 12..13: mod_base = OTHER; note = bicyclic nucleic acid (BNA)
  source 1..13: mol_type = other DNA
  modified_base 2: mod_base = OTHER; note = Uracil
atcaaggaagatg

SEQ ID NO: 5711 - DNA, 12 bp, synthetic construct
  misc_feature 1..12: note = Description of Artificial Sequence: Synthetic Antisense oligonucleotide
  misc_feature 1..12: note = Original Sequence: aucaaggaagat
  modified_base 3: mod_base = OTHER; note = 5-methyl
  modified_base 11..12: mod_base = OTHER; note = bicyclic nucleic acid (BNA)
  source 1..12: mol_type = other DNA
  modified_base 2: mod_base = OTHER; note = Uracil
atcaaggaagat

SEQ ID NO: 5712 - RNA, 11 nt, synthetic construct
  misc_feature 1..11: note = Description of Artificial Sequence: Synthetic Antisense oligonucleotide
  modified_base 3: mod_base = OTHER; note = 5-methyl
  modified_base 10..11: mod_base = OTHER; note = bicyclic nucleic acid (BNA)
  source 1..11: mol_type = other RNA
atcaaggaaga

SEQ ID NO: 5713 - RNA, 10 nt, synthetic construct
  misc_feature 1..10: note = Description of Artificial Sequence: Synthetic Antisense oligonucleotide
  modified_base 3: mod_base = OTHER; note = 5-methyl
  modified_base 9..10: mod_base = OTHER; note = bicyclic nucleic acid (BNA)
  source 1..10: mol_type = other RNA
atcaaggaag

SEQ ID NO: 5714 - RNA, 18 nt, synthetic construct
  misc_feature 1..18: note = Description of Artificial Sequence: Synthetic Antisense oligonucleotide
  modified_base 1..2: mod_base = OTHER; note = bicyclic nucleic acid (BNA)
  modified_base 17..18: mod_base = OTHER; note = bicyclic nucleic acid (BNA)
  modified_base 9: mod_base = OTHER; note = 5-methyl
  modified_base 13..14: mod_base = OTHER; note = 5-methyl
  modified_base 18: mod_base = OTHER; note = 5-methyl
  source 1..18: mol_type = other RNA
ggtaagttctgtccaagc

SEQ ID NO: 5715 - DNA, 18 bp, synthetic construct
  misc_feature 1..18: note = Description of Artificial Sequence: Synthetic Antisense oligonucleotide
  misc_feature 1..18: note = Original Sequence: gtaaguucuguccaagcc
  modified_base 1..2: mod_base = OTHER; note = bicyclic nucleic acid (BNA)
  modified_base 17..18: mod_base = OTHER; note = bicyclic nucleic acid (BNA)
  modified_base 8: mod_base = OTHER; note = 5-methyl
  modified_base 12..13: mod_base = OTHER; note = 5-methyl
  modified_base 17..18: mod_base = OTHER; note = 5-methyl
  source 1..18: mol_type = other DNA
  modified_base 6: mod_base = OTHER; note = Uracil
  modified_base 7: mod_base = OTHER; note = Uracil
  modified_base 9: mod_base = OTHER; note = Uracil
  modified_base 11: mod_base = OTHER; note = Uracil
gtaagttctgtccaagcc

SEQ ID NO: 5716 - RNA, 18 nt, synthetic construct
  misc_feature 1..18: note = Description of Artificial Sequence: Synthetic Antisense oligonucleotide
  modified_base 1..2: mod_base = OTHER; note = bicyclic nucleic acid (BNA)
  modified_base 17..18: mod_base = OTHER; note = bicyclic nucleic acid (BNA)
  modified_base 4: mod_base = OTHER; note = 5-methyl
  modified_base 13: mod_base = OTHER; note = 5-methyl
  modified_base 17..18: mod_base = OTHER; note = 5-methyl
  source 1..18: mol_type = other RNA
agtcggtaagttctgtcc

SEQ ID NO: 5717 - DNA, 18 bp, synthetic construct
  misc_feature 1..18: note = Description of Artificial Sequence: Synthetic Antisense oligonucleotide
  misc_feature 1..18: note = Original Sequence: ctguccaagcccgguuga
  modified_base 1: mod_base = OTHER; note = 5-methyl
  modified_base 5..6: mod_base = OTHER; note = 5-methyl
  modified_base 10..12: mod_base = OTHER; note = 5-methyl
  modified_base 1..2: mod_base = OTHER; note = bicyclic nucleic acid (BNA)
  modified_base 17..18: mod_base = OTHER; note = bicyclic nucleic acid (BNA)
  source 1..18: mol_type = other DNA
  modified_base 4: mod_base = OTHER; note = Uracil
  modified_base 15: mod_base = OTHER; note = Uracil
  modified_base 16: mod_base = OTHER; note = Uracil
ctgtccaagcccggttga

SEQ ID NO: 5718 - DNA, 15 bp, synthetic construct
  misc_feature 1..15: note = Description of Artificial Sequence: Synthetic Antisense oligonucleotide
  misc_feature 1..15: note = Original Sequence: taaguucuguccaag
  modified_base 1..2: mod_base = OTHER; note = bicyclic nucleic acid (BNA)
  modified_base 14..15: mod_base = OTHER; note = bicyclic nucleic acid (BNA)
  modified_base 7: mod_base = OTHER; note = 5-methyl
  modified_base 11..12: mod_base = OTHER; note = 5-methyl
  source 1..15: mol_type = other DNA
  modified_base 5: mod_base = OTHER; note = Uracil
  modified_base 6: mod_base = OTHER; note = Uracil
  modified_base 8: mod_base = OTHER; note = Uracil
  modified_base 10: mod_base = OTHER; note = Uracil
taagttctgtccaag

SEQ ID NO: 5719 - DNA, 20 bp, synthetic construct
  misc_feature 1..20: note = Description of Artificial Sequence: Synthetic Antisense oligonucleotide
  misc_feature 1..20: note = Original Sequence: ttcuguccaagcccgguuga
  modified_base 1..2: mod_base = OTHER; note = bicyclic nucleic acid (BNA)
  modified_base 19..20: mod_base = OTHER; note = bicyclic nucleic acid (BNA)
  modified_base 3: mod_base = OTHER; note = 5-methyl
  modified_base 7..8: mod_base = OTHER; note = 5-methyl
  modified_base 12..14: mod_base = OTHER; note = 5-methyl
  source 1..20: mol_type = other DNA
  modified_base 4: mod_base = OTHER; note = Uracil
  modified_base 6: mod_base = OTHER; note = Uracil
  modified_base 17: mod_base = OTHER; note = Uracil
  modified_base 18: mod_base = OTHER; note = Uracil
ttctgtccaagcccggttga

SEQ ID NO: 5720 - DNA, 19 bp, synthetic construct
  misc_feature 1..19: note = Description of Artificial Sequence: Synthetic Antisense oligonucleotide
  misc_feature 1..19: note = Original Sequence: ttcuguccaagcccggutg
  modified_base 1..2: mod_base = OTHER; note = bicyclic nucleic acid (BNA)
  modified_base 18..19: mod_base = OTHER; note = bicyclic nucleic acid (BNA)
  modified_base 3: mod_base = OTHER; note = 5-methyl
  modified_base 7..8: mod_base = OTHER; note = 5-methyl
  modified_base 12..14: mod_base = OTHER; note = 5-methyl
  source 1..19: mol_type = other DNA
  modified_base 4: mod_base = OTHER; note = Uracil
  modified_base 6: mod_base = OTHER; note = Uracil
  modified_base 17: mod_base = OTHER; note = Uracil
ttctgtccaagcccggttg

SEQ ID NO: 5721 - DNA, 18 bp, synthetic construct
  misc_feature 1..18: note = Description of Artificial Sequence: Synthetic Antisense oligonucleotide
  misc_feature 1..18: note = Original Sequence: ttcuguccaagcccggtt
  modified_base 1..2: mod_base = OTHER; note = bicyclic nucleic acid (BNA)
  modified_base 17..18: mod_base = OTHER; note = bicyclic nucleic acid (BNA)
  modified_base 3: mod_base = OTHER; note = 5-methyl
  modified_base 7..8: mod_base = OTHER; note = 5-methyl
  modified_base 12..14: mod_base = OTHER; note = 5-methyl
  source 1..18: mol_type = other DNA
  modified_base 4: mod_base = OTHER; note = Uracil
  modified_base 6: mod_base = OTHER; note = Uracil
ttctgtccaagcccggtt

SEQ ID NO: 5722 - DNA, 17 bp, synthetic construct
  misc_feature 1..17: note = Description of Artificial Sequence: Synthetic Antisense oligonucleotide
  misc_feature 1..17: note = Original Sequence: ttcuguccaagcccggt
  modified_base 1..2: mod_base = OTHER; note = bicyclic nucleic acid (BNA)
  modified_base 16..17: mod_base = OTHER; note = bicyclic nucleic acid (BNA)
  modified_base 3: mod_base = OTHER; note = 5-methyl
  modified_base 7..8: mod_base = OTHER; note = 5-methyl
  modified_base 12..14: mod_base = OTHER; note = 5-methyl
  source 1..17: mol_type = other DNA
  modified_base 4: mod_base = OTHER; note = Uracil
  modified_base 6: mod_base = OTHER; note = Uracil
ttctgtccaagcccggt

SEQ ID NO: 5723 - DNA, 16 bp, synthetic construct
  misc_feature 1..16: note = Description of Artificial Sequence: Synthetic Antisense oligonucleotide
  misc_feature 1..16: note = Original Sequence: ttcuguccaagcccgg
  modified_base 1..2: mod_base = OTHER; note = bicyclic nucleic acid (BNA)
  modified_base 15..16: mod_base = OTHER; note = bicyclic nucleic acid (BNA)
  modified_base 3: mod_base = OTHER; note = 5-methyl
  modified_base 7..8: mod_base = OTHER; note = 5-methyl
  modified_base 12..14: mod_base = OTHER; note = 5-methyl
  source 1..16: mol_type = other DNA
  modified_base 4: mod_base = OTHER; note = Uracil
  modified_base 6: mod_base = OTHER; note = Uracil
ttctgtccaagcccgg

SEQ ID NO: 5724 - DNA, 15 bp, synthetic construct
  misc_feature 1..15: note = Description of Artificial Sequence: Synthetic Antisense oligonucleotide
  misc_feature 1..15: note = Original Sequence: ttcuguccaagcccg
  modified_base 1..2: mod_base = OTHER; note = bicyclic nucleic acid (BNA)
  modified_base 14..15: mod_base = OTHER; note = bicyclic nucleic acid (BNA)
  modified_base 3: mod_base = OTHER; note = 5-methyl
  modified_base 7..8: mod_base = OTHER; note = 5-methyl
  modified_base 12..14: mod_base = OTHER; note = 5-methyl
  source 1..15: mol_type = other DNA
  modified_base 4: mod_base = OTHER; note = Uracil
  modified_base 6: mod_base = OTHER; note = Uracil
ttctgtccaagcccg

SEQ ID NO: 5725 - DNA, 14 bp, synthetic construct
  misc_feature 1..14: note = Description of Artificial Sequence: Synthetic Antisense oligonucleotide
  misc_feature 1..14: note = Original Sequence: ttcuguccaagccc
  modified_base 1..2: mod_base = OTHER; note = bicyclic nucleic acid (BNA)
  modified_base 13..14: mod_base = OTHER; note = bicyclic nucleic acid (BNA)
  modified_base 3: mod_base = OTHER; note = 5-methyl
  modified_base 7..8: mod_base = OTHER; note = 5-methyl
  modified_base 12..14: mod_base = OTHER; note = 5-methyl
  source 1..14: mol_type = other DNA
  modified_base 4: mod_base = OTHER; note = Uracil
  modified_base 6: mod_base = OTHER; note = Uracil
ttctgtccaagccc

SEQ ID NO: 5726 - DNA, 13 bp, synthetic construct
  misc_feature 1..13: note = Description of Artificial Sequence: Synthetic Antisense oligonucleotide
  misc_feature 1..13: note = Original Sequence: ttcuguccaagcc
  modified_base 1..2: mod_base = OTHER; note = bicyclic nucleic acid (BNA)
  modified_base 12..13: mod_base = OTHER; note = bicyclic nucleic acid (BNA)
  modified_base 3: mod_base = OTHER; note = 5-methyl
  modified_base 7..8: mod_base = OTHER; note = 5-methyl
  modified_base 12..13: mod_base = OTHER; note = 5-methyl
  source 1..13: mol_type = other DNA
  modified_base 4: mod_base = OTHER; note = Uracil
  modified_base 6: mod_base = OTHER; note = Uracil
ttctgtccaagcc

SEQ ID NO: 5727 - DNA, 12 bp, synthetic construct
  misc_feature 1..12: note = Description of Artificial Sequence: Synthetic Antisense oligonucleotide
  misc_feature 1..12: note = Original Sequence: ttcuguccaagc
  modified_base 1..2: mod_base = OTHER; note = bicyclic nucleic acid (BNA)
  modified_base 11..12: mod_base = OTHER; note = bicyclic nucleic acid (BNA)
  modified_base 3: mod_base = OTHER; note = 5-methyl
  modified_base 7..8: mod_base = OTHER; note = 5-methyl
  modified_base 12: mod_base = OTHER; note = 5-methyl
  source 1..12: mol_type = other DNA
  modified_base 4: mod_base = OTHER; note = Uracil
  modified_base 6: mod_base = OTHER; note = Uracil
ttctgtccaagc

SEQ ID NO: 5728 - DNA, 11 bp, synthetic construct
  misc_feature 1..11: note = Description of Artificial Sequence: Synthetic Antisense oligonucleotide
  misc_feature 1..11: note = Original Sequence: ttcuguccaag
  modified_base 1..2: mod_base = OTHER; note = bicyclic nucleic acid (BNA)
  modified_base 10..11: mod_base = OTHER; note = bicyclic nucleic acid (BNA)
  modified_base 3: mod_base = OTHER; note = 5-methyl
  modified_base 7..8: mod_base = OTHER; note = 5-methyl
  source 1..11: mol_type = other DNA
  modified_base 4: mod_base = OTHER; note = Uracil
  modified_base 6: mod_base = OTHER; note = Uracil
ttctgtccaag

SEQ ID NO: 5729 - DNA, 10 bp, synthetic construct
  misc_feature 1..10: note = Description of Artificial Sequence: Synthetic Antisense oligonucleotide
  misc_feature 1..10: note = Original Sequence: ttcuguccaa
  modified_base 1..2: mod_base = OTHER; note = bicyclic nucleic acid (BNA)
  modified_base 9..10: mod_base = OTHER; note = bicyclic nucleic acid (BNA)
  modified_base 3: mod_base = OTHER; note = 5-methyl
  modified_base 7..8: mod_base = OTHER; note = 5-methyl
  source 1..10: mol_type = other DNA
  modified_base 4: mod_base = OTHER; note = Uracil
  modified_base 6: mod_base = OTHER; note = Uracil
ttctgtccaa

SEQ ID NO: 5730-5731 - skipped (2 entries)

SEQ ID NO: 5732 - DNA, 19 bp, synthetic construct
  misc_feature 1..19: note = Description of Artificial Sequence: Synthetic Antisense oligonucleotide
  misc_feature 1..19: note = Original Sequence: tcuguccaagcccgguuga
  modified_base 1..2: mod_base = OTHER; note = bicyclic nucleic acid (BNA)
  modified_base 18..19: mod_base = OTHER; note = bicyclic nucleic acid (BNA)
  modified_base 2: mod_base = OTHER; note = 5-methyl
  modified_base 6..7: mod_base = OTHER; note = 5-methyl
  modified_base 11..13: mod_base = OTHER; note = 5-methyl
  source 1..19: mol_type = other DNA
  modified_base 3: mod_base = OTHER; note = Uracil
  modified_base 5: mod_base = OTHER; note = Uracil
  modified_base 16: mod_base = OTHER; note = Uracil
  modified_base 17: mod_base = OTHER; note = Uracil
tctgtccaagcccggttga

SEQ ID NO: 5733 - DNA, 18 bp, synthetic construct
  misc_feature 1..18: note = Description of Artificial Sequence: Synthetic Antisense oligonucleotide
  misc_feature 1..18: note = Original Sequence: tcuguccaagcccggutg
  modified_base 1..2: mod_base = OTHER; note = bicyclic nucleic acid (BNA)
  modified_base 17..18: mod_base = OTHER; note = bicyclic nucleic acid (BNA)
  modified_base 2: mod_base = OTHER; note = 5-methyl
  modified_base 6..7: mod_base = OTHER; note = 5-methyl
  modified_base 11..13: mod_base = OTHER; note = 5-methyl
  source 1..18: mol_type = other DNA
  modified_base 3: mod_base = OTHER; note = Uracil
  modified_base 5: mod_base = OTHER; note = Uracil
  modified_base 16: mod_base = OTHER; note = Uracil
tctgtccaagcccggttg

SEQ ID NO: 5734 - DNA, 17 bp, synthetic construct
  misc_feature 1..17: note = Description of Artificial Sequence: Synthetic Antisense oligonucleotide
  misc_feature 1..17: note = Original Sequence: tcuguccaagcccggtt
  modified_base 1..2: mod_base = OTHER; note = bicyclic nucleic acid (BNA)
  modified_base 16..17: mod_base = OTHER; note = bicyclic nucleic acid (BNA)
  modified_base 2: mod_base = OTHER; note = 5-methyl
  modified_base 6..7: mod_base = OTHER; note = 5-methyl
  modified_base 11..13: mod_base = OTHER; note = 5-methyl
  source 1..17: mol_type = other DNA
  modified_base 3: mod_base = OTHER; note = Uracil
  modified_base 5: mod_base = OTHER; note = Uracil
tctgtccaagcccggtt

SEQ ID NO: 5735 - DNA, 16 bp, synthetic construct
  misc_feature 1..16: note = Description of Artificial Sequence: Synthetic Antisense oligonucleotide
  misc_feature 1..16: note = Original Sequence: tcuguccaagcccggt
  modified_base 1..2: mod_base = OTHER; note = bicyclic nucleic acid (BNA)
  modified_base 15..16: mod_base = OTHER; note = bicyclic nucleic acid (BNA)
  modified_base 2: mod_base = OTHER; note = 5-methyl
  modified_base 6..7: mod_base = OTHER; note = 5-methyl
  modified_base 11..13: mod_base = OTHER; note = 5-methyl
  source 1..16: mol_type = other DNA
  modified_base 3: mod_base = OTHER; note = Uracil
  modified_base 5: mod_base = OTHER; note = Uracil
tctgtccaagcccggt

SEQ ID NO: 5736 - DNA, 15 bp, synthetic construct
  misc_feature 1..15: note = Description of Artificial Sequence: Synthetic Antisense oligonucleotide
  misc_feature 1..15: note = Original Sequence: tcuguccaagcccgg
  modified_base 1..2: mod_base = OTHER; note = bicyclic nucleic acid (BNA)
  modified_base 14..15: mod_base = OTHER; note = bicyclic nucleic acid (BNA)
  modified_base 2: mod_base = OTHER; note = 5-methyl
  modified_base 6..7: mod_base = OTHER; note = 5-methyl
  modified_base 11..13: mod_base = OTHER; note = 5-methyl
  source 1..15: mol_type = other DNA
  modified_base 3: mod_base = OTHER; note = Uracil
  modified_base 5: mod_base = OTHER; note = Uracil
tctgtccaagcccgg

SEQ ID NO: 5737 - DNA, 14 bp, synthetic construct
  misc_feature 1..14: note = Description of Artificial Sequence: Synthetic Antisense oligonucleotide
  misc_feature 1..14: note = Original Sequence: tcuguccaagcccg
  modified_base 1..2: mod_base = OTHER; note = bicyclic nucleic acid (BNA)
  modified_base 13..14: mod_base = OTHER; note = bicyclic nucleic acid (BNA)
  modified_base 2: mod_base = OTHER; note = 5-methyl
  modified_base 6..7: mod_base = OTHER; note = 5-methyl
  modified_base 11..13: mod_base = OTHER; note = 5-methyl
  source 1..14: mol_type = other DNA
  modified_base 3: mod_base = OTHER; note = Uracil
  modified_base 5: mod_base = OTHER; note = Uracil
tctgtccaagcccg

SEQ ID NO: 5738 - DNA, 13 bp, synthetic construct
  misc_feature 1..13: note = Description of Artificial Sequence: Synthetic Antisense oligonucleotide
  misc_feature 1..13: note = Original Sequence: tcuguccaagccc
  modified_base 1..2: mod_base = OTHER; note = bicyclic nucleic acid (BNA)
  modified_base 12..13: mod_base = OTHER; note = bicyclic nucleic acid (BNA)
  modified_base 2: mod_base = OTHER; note = 5-methyl
  modified_base 6..7: mod_base = OTHER; note = 5-methyl
  modified_base 11..13: mod_base = OTHER; note = 5-methyl
  source 1..13: mol_type = other DNA
  modified_base 3: mod_base = OTHER; note = Uracil
  modified_base 5: mod_base = OTHER; note = Uracil
tctgtccaagccc

SEQ ID NO: 5739 - DNA, 12 bp, synthetic construct
  misc_feature 1..12: note = Description of Artificial Sequence: Synthetic Antisense oligonucleotide
  misc_feature 1..12: note = Original Sequence: tcuguccaagcc
  modified_base 1..2: mod_base = OTHER; note = bicyclic nucleic acid (BNA)
  modified_base 11..12: mod_base = OTHER; note = bicyclic nucleic acid (BNA)
  modified_base 2: mod_base = OTHER; note = 5-methyl
  modified_base 6..7: mod_base = OTHER; note = 5-methyl
  modified_base 11..12: mod_base = OTHER; note = 5-methyl
  source 1..12: mol_type = other DNA
  modified_base 3: mod_base = OTHER; note = Uracil
  modified_base 5: mod_base = OTHER; note = Uracil
tctgtccaagcc

SEQ ID NO: 5740 - DNA, 11 bp, synthetic construct
  misc_feature 1..11: note = Description of Artificial Sequence: Synthetic Antisense oligonucleotide
  misc_feature 1..11: note = Original Sequence: tcuguccaagc
  modified_base 1..2: mod_base = OTHER; note = bicyclic nucleic acid (BNA)
  modified_base 10..11: mod_base = OTHER; note = bicyclic nucleic acid (BNA)
  modified_base 2: mod_base = OTHER; note = 5-methyl
  modified_base 6..7: mod_base = OTHER; note = 5-methyl
  modified_base 11: mod_base = OTHER; note = 5-methyl
  source 1..11: mol_type = other DNA
  modified_base 3: mod_base = OTHER; note = Uracil
  modified_base 5: mod_base = OTHER; note = Uracil
tctgtccaagc

SEQ ID NO: 5741 - DNA, 10 bp, synthetic construct
  misc_feature 1..10: note = Description of Artificial Sequence: Synthetic Antisense oligonucleotide
  misc_feature 1..10: note = Original Sequence: tcuguccaag
  modified_base 1..2: mod_base = OTHER; note = bicyclic nucleic acid (BNA)
  modified_base 9..10: mod_base = OTHER; note = bicyclic nucleic acid (BNA)
  modified_base 2: mod_base = OTHER; note = 5-methyl
  modified_base 6..7: mod_base = OTHER; note = 5-methyl
  source 1..10: mol_type = other DNA
  modified_base 3: mod_base = OTHER; note = Uracil
  modified_base 5: mod_base = OTHER; note = Uracil
tctgtccaag

SEQ ID NO: 5742-5743 - skipped (2 entries)

SEQ ID NO: 5744 - DNA, 17 bp, synthetic construct
  misc_feature 1..17: note = Description of Artificial Sequence: Synthetic Antisense oligonucleotide
  misc_feature 1..17: note = Original Sequence: ctguccaagcccggutg
  modified_base 1: mod_base = OTHER; note = 5-methyl
  modified_base 5..6: mod_base = OTHER; note = 5-methyl
  modified_base 10..12: mod_base = OTHER; note = 5-methyl
  modified_base 1..2: mod_base = OTHER; note = bicyclic nucleic acid (BNA)
  modified_base 16..17: mod_base = OTHER; note = bicyclic nucleic acid (BNA)
  source 1..17: mol_type = other DNA
  modified_base 4: mod_base = OTHER; note = Uracil
  modified_base 15: mod_base = OTHER; note = Uracil
ctgtccaagcccggttg

SEQ ID NO: 5745 - DNA, 16 bp, synthetic construct
  misc_feature 1..16: note = Description of Artificial Sequence: Synthetic Antisense oligonucleotide
  misc_feature 1..16: note = Original Sequence: ctguccaagcccggtt
  modified_base 1: mod_base = OTHER; note = 5-methyl
  modified_base 5..6: mod_base = OTHER; note = 5-methyl
  modified_base 10..12: mod_base = OTHER; note = 5-methyl
  modified_base 1..2: mod_base = OTHER; note = bicyclic nucleic acid (BNA)
  modified_base 15..16: mod_base = OTHER; note = bicyclic nucleic acid (BNA)
  source 1..16: mol_type = other DNA
  modified_base 4: mod_base = OTHER; note = Uracil
ctgtccaagcccggtt

SEQ ID NO: 5746 - DNA, 15 bp, synthetic construct
  misc_feature 1..15: note = Description of Artificial Sequence: Synthetic Antisense oligonucleotide
  misc_feature 1..15: note = Original Sequence: ctguccaagcccggt
  modified_base 1: mod_base = OTHER; note = 5-methyl
  modified_base 5..6: mod_base = OTHER; note = 5-methyl
  modified_base 10..12: mod_base = OTHER; note = 5-methyl
  modified_base 1..2: mod_base = OTHER; note = bicyclic nucleic acid (BNA)
  modified_base 14..15: mod_base = OTHER; note = bicyclic nucleic acid (BNA)
  source 1..15: mol_type = other DNA
  modified_base 4: mod_base = OTHER; note = Uracil
ctgtccaagcccggt

SEQ ID NO: 5747 - DNA, 14 bp, synthetic construct
  misc_feature 1..14: note = Description of Artificial Sequence: Synthetic Antisense oligonucleotide
  misc_feature 1..14: note = Original Sequence: ctguccaagcccgg
  modified_base 1: mod_base = OTHER; note = 5-methyl
  modified_base 5..6: mod_base = OTHER; note = 5-methyl
  modified_base 10..12: mod_base = OTHER; note = 5-methyl
  modified_base 1..2: mod_base = OTHER; note = bicyclic nucleic acid (BNA)
  modified_base 13..14: mod_base = OTHER; note = bicyclic nucleic acid (BNA)
  source 1..14: mol_type = other DNA
  modified_base 4: mod_base = OTHER; note = Uracil
ctgtccaagcccgg

SEQ ID NO: 5748 - DNA, 13 bp, synthetic construct
  misc_feature 1..13: note = Description of Artificial Sequence: Synthetic Antisense oligonucleotide
  misc_feature 1..13: note = Original Sequence: ctguccaagcccg
  modified_base 1: mod_base = OTHER; note = 5-methyl
  modified_base 5..6: mod_base = OTHER; note = 5-methyl
  modified_base 10..12: mod_base = OTHER; note = 5-methyl
  modified_base 1..2: mod_base = OTHER; note = bicyclic nucleic acid (BNA)
  modified_base 12..13: mod_base = OTHER; note = bicyclic nucleic acid (BNA)
  source 1..13: mol_type = other DNA
  modified_base 4: mod_base = OTHER; note = Uracil
ctgtccaagcccg

SEQ ID NO: 5749 - DNA, 12 bp, synthetic construct
  misc_feature 1..12: note = Description of Artificial Sequence: Synthetic Antisense oligonucleotide
  misc_feature 1..12: note = Original Sequence: ctguccaagccc
  modified_base 1: mod_base = OTHER; note = 5-methyl
  modified_base 5..6: mod_base = OTHER; note = 5-methyl
  modified_base 10..12: mod_base = OTHER; note = 5-methyl
  modified_base 1..2: mod_base = OTHER; note = bicyclic nucleic acid (BNA)
  modified_base 11..12: mod_base = OTHER; note = bicyclic nucleic acid (BNA)
  source 1..12: mol_type = other DNA
  modified_base 4: mod_base = OTHER; note = Uracil
ctgtccaagccc

SEQ ID NO: 5750 - DNA, 11 bp, synthetic construct
  misc_feature 1..11: note = Description of Artificial Sequence: Synthetic Antisense oligonucleotide
  misc_feature 1..11: note = Original Sequence: ctguccaagcc
  modified_base 1: mod_base = OTHER; note = 5-methyl
  modified_base 5..6: mod_base = OTHER; note = 5-methyl
  modified_base 10..11: mod_base = OTHER; note = 5-methyl
  modified_base 1..2: mod_base = OTHER; note = bicyclic nucleic acid (BNA)
  modified_base 10..11: mod_base = OTHER; note = bicyclic nucleic acid (BNA)
  source 1..11: mol_type = other DNA
  modified_base 4: mod_base = OTHER; note = Uracil
ctgtccaagcc

SEQ ID NO: 5751 - DNA, 10 bp, synthetic construct
  misc_feature 1..10: note = Description of Artificial Sequence: Synthetic Antisense oligonucleotide
  misc_feature 1..10: note = Original Sequence: ctguccaagc
  modified_base 1: mod_base = OTHER; note = 5-methyl
  modified_base 5..6: mod_base = OTHER; note = 5-methyl
  modified_base 10: mod_base = OTHER; note = 5-methyl
  modified_base 1..2: mod_base = OTHER; note = bicyclic nucleic acid (BNA)
  modified_base 9..10: mod_base = OTHER; note = bicyclic nucleic acid (BNA)
  source 1..10: mol_type = other DNA
  modified_base 4: mod_base = OTHER; note = Uracil
ctgtccaagc

SEQ ID NO: 5752-5753 - skipped (2 entries)

SEQ ID NO: 5754 - DNA, 20 bp, synthetic construct
  misc_feature 1..20: note = Description of Artificial Sequence: Synthetic Antisense oligonucleotide
  misc_feature 1..20: note = Original Sequence: gtucuguccaagcccggutg
  modified_base 1..2: mod_base = OTHER; note = bicyclic nucleic acid (BNA)
  modified_base 19..20: mod_base = OTHER; note = bicyclic nucleic acid (BNA)
  modified_base 4: mod_base = OTHER; note = 5-methyl
  modified_base 8..9: mod_base = OTHER; note = 5-methyl
  modified_base 13..15: mod_base = OTHER; note = 5-methyl
  source 1..20: mol_type = other DNA
  modified_base 3: mod_base = OTHER; note = Uracil
  modified_base 5: mod_base = OTHER; note = Uracil
  modified_base 7: mod_base = OTHER; note = Uracil
  modified_base 18: mod_base = OTHER; note = Uracil
gttctgtccaagcccggttg

SEQ ID NO: 5755 - DNA, 19 bp, synthetic construct
  misc_feature 1..19: note = Description of Artificial Sequence: Synthetic Antisense oligonucleotide
  misc_feature 1..19: note = Original Sequence: gtucuguccaagcccggtt
  modified_base 1..2: mod_base = OTHER; note = bicyclic nucleic acid (BNA)
  modified_base 18..19: mod_base = OTHER; note = bicyclic nucleic acid (BNA)
  modified_base 4: mod_base = OTHER; note = 5-methyl
  modified_base 8..9: mod_base = OTHER; note = 5-methyl
  modified_base 13..15: mod_base = OTHER; note = 5-methyl
  source 1..19: mol_type = other DNA
  modified_base 3: mod_base = OTHER; note = Uracil
  modified_base 5: mod_base = OTHER; note = Uracil
  modified_base 7: mod_base = OTHER; note = Uracil
gttctgtccaagcccggtt

SEQ ID NO: 5756 - DNA, 18 bp, synthetic construct
  misc_feature 1..18: note = Description of Artificial Sequence: Synthetic Antisense oligonucleotide
  misc_feature 1..18: note = Original Sequence: gtucuguccaagcccggt
  modified_base 1..2: mod_base = OTHER; note = bicyclic nucleic acid (BNA)
  modified_base 17..18: mod_base = OTHER; note = bicyclic nucleic acid (BNA)
  modified_base 4: mod_base = OTHER; note = 5-methyl
  modified_base 8..9: mod_base = OTHER; note = 5-methyl
  modified_base 13..15: mod_base = OTHER; note = 5-methyl
  source 1..18: mol_type = other DNA
  modified_base 3: mod_base = OTHER; note = Uracil
  modified_base 5: mod_base = OTHER; note = Uracil
  modified_base 7: mod_base = OTHER; note = Uracil
gttctgtccaagcccggt

SEQ ID NO: 5757 - DNA, 17 bp, synthetic construct
  misc_feature 1..17: note = Description of Artificial Sequence: Synthetic Antisense oligonucleotide
  misc_feature 1..17: note = Original Sequence: gtucuguccaagcccgg
  modified_base 1..2: mod_base = OTHER; note = bicyclic nucleic acid (BNA)
  modified_base 16..17: mod_base = OTHER; note = bicyclic nucleic acid (BNA)
  modified_base 4: mod_base = OTHER; note = 5-methyl
  modified_base 8..9: mod_base = OTHER; note = 5-methyl
  modified_base 13..15: mod_base = OTHER; note = 5-methyl
  source 1..17: mol_type = other DNA
  modified_base 3: mod_base = OTHER; note = Uracil
  modified_base 5: mod_base = OTHER; note = Uracil
  modified_base 7: mod_base = OTHER; note = Uracil
gttctgtccaagcccgg

SEQ ID NO: 5758 - DNA, 16 bp, synthetic construct
  misc_feature 1..16: note = Description of Artificial Sequence: Synthetic Antisense oligonucleotide
  misc_feature 1..16: note = Original Sequence: gtucuguccaagcccg
  modified_base 1..2: mod_base = OTHER; note = bicyclic nucleic acid (BNA)
  modified_base 15..16: mod_base = OTHER; note = bicyclic nucleic acid (BNA)
  modified_base 4: mod_base = OTHER; note = 5-methyl
  modified_base 8..9: mod_base = OTHER; note = 5-methyl
  modified_base 13..15: mod_base = OTHER; note = 5-methyl
  source 1..16: mol_type = other DNA
  modified_base 3: mod_base = OTHER; note = Uracil
  modified_base 5: mod_base = OTHER; note = Uracil
  modified_base 7: mod_base = OTHER; note = Uracil
gttctgtccaagcccg

SEQ ID NO: 5759 - DNA, 15 bp, synthetic construct
  misc_feature 1..15: note = Description of Artificial Sequence: Synthetic Antisense oligonucleotide
  misc_feature 1..15: note = Original Sequence: gtucuguccaagccc
  modified_base 1..2: mod_base = OTHER; note = bicyclic nucleic acid (BNA)
  modified_base 14..15: mod_base = OTHER; note = bicyclic nucleic acid (BNA)
  modified_base 4: mod_base = OTHER; note = 5-methyl
  modified_base 8..9: mod_base = OTHER; note = 5-methyl
  modified_base 13..15: mod_base = OTHER; note = 5-methyl
  source 1..15: mol_type = other DNA
  modified_base 3: mod_base = OTHER; note = Uracil
  modified_base 5: mod_base = OTHER; note = Uracil
  modified_base 7: mod_base = OTHER; note = Uracil
gttctgtccaagccc

SEQ ID NO: 5760 - DNA, 14 bp, synthetic construct
  misc_feature 1..14: note = Description of Artificial Sequence: Synthetic Antisense oligonucleotide
  misc_feature 1..14: note = Original Sequence: gtucuguccaagcc
  modified_base 1..2: mod_base = OTHER; note = bicyclic nucleic acid (BNA)
  modified_base 13..14: mod_base = OTHER; note = bicyclic nucleic acid (BNA)
  modified_base 4: mod_base = OTHER; note = 5-methyl
  modified_base 8..9: mod_base = OTHER; note = 5-methyl
  modified_base 13..14: mod_base = OTHER; note = 5-methyl
  source 1..14: mol_type = other DNA
  modified_base 3: mod_base = OTHER; note = Uracil
  modified_base 5: mod_base = OTHER; note = Uracil
  modified_base 7: mod_base = OTHER; note = Uracil
gttctgtccaagcc

SEQ ID NO: 5761 - DNA, 13 bp, synthetic construct
  misc_feature 1..13: note = Description of Artificial Sequence: Synthetic Antisense oligonucleotide
  misc_feature 1..13: note = Original Sequence: gtucuguccaagc
  modified_base 1..2: mod_base = OTHER; note = bicyclic nucleic acid (BNA)
  modified_base 12..13: mod_base = OTHER; note = bicyclic nucleic acid (BNA)
  modified_base 4: mod_base = OTHER; note = 5-methyl
  modified_base 8..9: mod_base = OTHER; note = 5-methyl
  modified_base 13: mod_base = OTHER; note = 5-methyl
  source 1..13: mol_type = other DNA
  modified_base 3: mod_base = OTHER; note = Uracil
  modified_base 5: mod_base = OTHER; note = Uracil
  modified_base 7: mod_base = OTHER; note = Uracil
gttctgtccaagc

SEQ ID NO: 5762 - DNA, 12 bp, synthetic construct
  misc_feature 1..12: note = Description of Artificial Sequence: Synthetic Antisense oligonucleotide
  misc_feature 1..12: note = Original Sequence: gtucuguccaag
  modified_base 1..2: mod_base = OTHER; note = bicyclic nucleic acid (BNA)
  modified_base 11..12: mod_base = OTHER; note = bicyclic nucleic acid (BNA)
  modified_base 4: mod_base = OTHER; note = 5-methyl
  modified_base 8..9: mod_base = OTHER; note = 5-methyl
  source 1..12: mol_type = other DNA
  modified_base 3: mod_base = OTHER; note = Uracil
  modified_base 5: mod_base = OTHER; note = Uracil
  modified_base 7: mod_base = OTHER; note = Uracil
gttctgtccaag

SEQ ID NO: 5763 - DNA, 11 bp, synthetic construct
  misc_feature 1..11: note = Description of Artificial Sequence: Synthetic Antisense oligonucleotide
  misc_feature 1..11: note = Original Sequence: gtucuguccaa
  modified_base 1..2: mod_base = OTHER; note = bicyclic nucleic acid (BNA)
  modified_base 10..11: mod_base = OTHER; note = bicyclic nucleic acid (BNA)
  modified_base 4: mod_base = OTHER; note = 5-methyl
  modified_base 8..9: mod_base = OTHER; note = 5-methyl
  source 1..11: mol_type = other DNA
  modified_base 3: mod_base = OTHER; note = Uracil
  modified_base 5: mod_base = OTHER; note = Uracil
  modified_base 7: mod_base = OTHER; note = Uracil
gttctgtccaa

SEQ ID NO: 5764 - DNA, 10 bp, synthetic construct
  misc_feature 1..10: note = Description of Artificial Sequence: Synthetic Antisense oligonucleotide
  misc_feature 1..10: note = Original Sequence: gtucugucca
  modified_base 1..2: mod_base = OTHER; note = bicyclic nucleic acid (BNA)
  modified_base 9..10: mod_base = OTHER; note = bicyclic nucleic acid (BNA)
  modified_base 4: mod_base = OTHER; note = 5-methyl
  modified_base 8..9: mod_base = OTHER; note = 5-methyl
  source 1..10: mol_type = other DNA
  modified_base 3: mod_base = OTHER; note = Uracil
  modified_base 5: mod_base = OTHER; note = Uracil
  modified_base 7: mod_base = OTHER; note = Uracil
gttctgtcca

SEQ ID NO: 5765-5766 - skipped (2 entries)

SEQ ID NO: 5767 - DNA, 20 bp, synthetic construct
  misc_feature 1..20: note = Description of Artificial Sequence: Synthetic Antisense oligonucleotide
  misc_feature 1..20: note = Original Sequence: aguucuguccaagcccggtt
  modified_base 1..2: mod_base = OTHER; note = bicyclic nucleic acid (BNA)
  modified_base 19..20: mod_base = OTHER; note = bicyclic nucleic acid (BNA)
  modified_base 5: mod_base = OTHER; note = 5-methyl
  modified_base 9..10: mod_base = OTHER; note = 5-methyl
  modified_base 14..16: mod_base = OTHER; note = 5-methyl
  source 1..20: mol_type = other DNA
  modified_base 3: mod_base = OTHER; note = Uracil
  modified_base 4: mod_base = OTHER; note = Uracil
  modified_base 6: mod_base = OTHER; note = Uracil
  modified_base 8: mod_base = OTHER; note = Uracil
agttctgtccaagcccggtt

SEQ ID NO: 5768 - DNA, 19 bp, synthetic construct
  misc_feature 1..19: note = Description of Artificial Sequence: Synthetic Antisense oligonucleotide
  misc_feature 1..19: note = Original Sequence: aguucuguccaagcccggt
  modified_base 1..2: mod_base = OTHER; note = bicyclic nucleic acid (BNA)
  modified_base 18..19: mod_base = OTHER; note = bicyclic nucleic acid (BNA)
  modified_base 5: mod_base = OTHER; note = 5-methyl
  modified_base 9..10: mod_base = OTHER; note = 5-methyl
  modified_base 14..16: mod_base = OTHER; note = 5-methyl
  source 1..19: mol_type = other DNA
  modified_base 3: mod_base = OTHER; note = Uracil
  modified_base 4: mod_base = OTHER; note = Uracil
  modified_base 6: mod_base = OTHER; note = Uracil
  modified_base 8: mod_base = OTHER; note = Uracil
agttctgtccaagcccggt

SEQ ID NO: 5769 - RNA, 18 nt, synthetic construct
  misc_feature 1..18: note = Description of Artificial Sequence: Synthetic Antisense oligonucleotide
  modified_base 1..2: mod_base = OTHER; note = bicyclic nucleic acid (BNA)
  modified_base 17..18: mod_base = OTHER; note = bicyclic nucleic acid (BNA)
  modified_base 5: mod_base = OTHER; note = 5-methyl
  modified_base 9..10: mod_base = OTHER; note = 5-methyl
  modified_base 14..16: mod_base = OTHER; note = 5-methyl
  source 1..18: mol_type = other RNA
agttctgtccaagcccgg

SEQ ID NO: 5770 - RNA, 17 nt, synthetic construct
  misc_feature 1..17: note = Description of Artificial Sequence: Synthetic Antisense oligonucleotide
  modified_base 1..2: mod_base = OTHER; note = bicyclic nucleic acid (BNA)
  modified_base 16..17: mod_base = OTHER; note = bicyclic nucleic acid (BNA)
  modified_base 5: mod_base = OTHER; note = 5-methyl
  modified_base 9..10: mod_base = OTHER; note = 5-methyl
  modified_base 14..16: mod_base = OTHER; note = 5-methyl
  source 1..17: mol_type = other RNA
agttctgtccaagcccg

SEQ ID NO: 5771 - RNA, 16 nt, synthetic construct
  misc_feature 1..16: note = Description of Artificial Sequence: Synthetic Antisense oligonucleotide
  modified_base 1..2: mod_base = OTHER; note = bicyclic nucleic acid (BNA)
  modified_base 15..16: mod_base = OTHER; note = bicyclic nucleic acid (BNA)
  modified_base 5: mod_base = OTHER; note = 5-methyl
  modified_base 9..10: mod_base = OTHER; note = 5-methyl
  modified_base 14..16: mod_base = OTHER; note = 5-methyl
  source 1..16: mol_type = other RNA
agttctgtccaagccc

SEQ ID NO: 5772 - RNA, 15 nt, synthetic construct
  misc_feature 1..15: note = Description of Artificial Sequence: Synthetic Antisense oligonucleotide
  modified_base 1..2: mod_base = OTHER; note = bicyclic nucleic acid (BNA)
  modified_base 14..15: mod_base = OTHER; note = bicyclic nucleic acid (BNA)
  modified_base 5: mod_base = OTHER; note = 5-methyl
  modified_base 9..10: mod_base = OTHER; note = 5-methyl
  modified_base 14..15: mod_base = OTHER; note = 5-methyl
  source 1..15: mol_type = other RNA
agttctgtccaagcc

SEQ ID NO: 5773 - RNA, 14 nt, synthetic construct
  misc_feature 1..14: note = Description of Artificial Sequence: Synthetic Antisense oligonucleotide
  modified_base 1..2: mod_base = OTHER; note = bicyclic nucleic acid (BNA)
  modified_base 13..14: mod_base = OTHER; note = bicyclic nucleic acid (BNA)
  modified_base 5: mod_base = OTHER; note = 5-methyl
  modified_base 9..10: mod_base = OTHER; note = 5-methyl
  modified_base 14: mod_base = OTHER; note = 5-methyl
  source 1..14: mol_type = other RNA
agttctgtccaagc

SEQ ID NO: 5774 - RNA, 13 nt, synthetic construct
  misc_feature 1..13: note = Description of Artificial Sequence: Synthetic Antisense oligonucleotide
  modified_base 1..2: mod_base = OTHER; note = bicyclic nucleic acid (BNA)
  modified_base 12..13: mod_base = OTHER; note = bicyclic nucleic acid (BNA)
  modified_base 5: mod_base = OTHER; note = 5-methyl
  modified_base 9..10: mod_base = OTHER; note = 5-methyl
  source 1..13: mol_type = other RNA
agttctgtccaag

SEQ ID NO: 5775 - RNA, 12 nt, synthetic construct
  misc_feature 1..12: note = Description of Artificial Sequence: Synthetic Antisense oligonucleotide
  modified_base 1..2: mod_base = OTHER; note = bicyclic nucleic acid (BNA)
  modified_base 11..12: mod_base = OTHER; note = bicyclic nucleic acid (BNA)
  modified_base 5: mod_base = OTHER; note = 5-methyl
  modified_base 9..10: mod_base = OTHER; note = 5-methyl
  source 1..12: mol_type = other RNA
agttctgtccaa

SEQ ID NO: 5776 - RNA, 11 nt, synthetic construct
  misc_feature 1..11: note = Description of Artificial Sequence: Synthetic Antisense oligonucleotide
  modified_base 1..2: mod_base = OTHER; note = bicyclic nucleic acid (BNA)
  modified_base 10..11: mod_base = OTHER; note = bicyclic nucleic acid (BNA)
  modified_base 5: mod_base = OTHER; note = 5-methyl
  modified_base 9..10: mod_base = OTHER; note = 5-methyl
  source 1..11: mol_type = other RNA
agttctgtcca

SEQ ID NO: 5777 - RNA, 10 nt, synthetic construct
  misc_feature 1..10: note = Description of Artificial Sequence: Synthetic Antisense oligonucleotide
  modified_base 1..2: mod_base = OTHER; note = bicyclic nucleic acid (BNA)
  modified_base 9..10: mod_base = OTHER; note = bicyclic nucleic acid (BNA)
  modified_base 5: mod_base = OTHER; note = 5-methyl
  modified_base 9..10: mod_base = OTHER; note = 5-methyl
  source 1..10: mol_type = other RNA
agttctgtcc

SEQ ID NO: 5778-5779 - skipped (2 entries)

SEQ ID NO: 5780 - DNA, 20 bp, synthetic construct
  misc_feature 1..20: note = Description of Artificial Sequence: Synthetic Antisense oligonucleotide
  misc_feature 1..20: note = Original Sequence: aaguucuguccaagcccggt
  modified_base 1..2: mod_base = OTHER; note = bicyclic nucleic acid (BNA)
  modified_base 19..20: mod_base = OTHER; note = bicyclic nucleic acid (BNA)
  modified_base 6: mod_base = OTHER; note = 5-methyl
  modified_base 10..11: mod_base = OTHER; note = 5-methyl
  modified_base 15..17: mod_base = OTHER; note = 5-methyl
  source 1..20: mol_type = other DNA
  modified_base 4: mod_base = OTHER; note = Uracil
  modified_base 5: mod_base = OTHER; note = Uracil
  modified_base 7: mod_base = OTHER; note = Uracil
  modified_base 9: mod_base = OTHER; note = Uracil
aagttctgtccaagcccggt

SEQ ID NO: 5781 - RNA, 19 nt, synthetic construct
  misc_feature 1..19: note = Description of Artificial Sequence: Synthetic Antisense oligonucleotide
  modified_base 1..2: mod_base = OTHER; note = bicyclic nucleic acid (BNA)
  modified_base 18..19: mod_base = OTHER; note = bicyclic nucleic acid (BNA)
  modified_base 6: mod_base = OTHER; note = 5-methyl
  modified_base 10..11: mod_base = OTHER; note = 5-methyl
  modified_base 15..17: mod_base = OTHER; note = 5-methyl
  source 1..19: mol_type = other RNA
aagttctgtccaagcccgg

SEQ ID NO: 5782 - RNA, 18 nt, synthetic construct
  misc_feature 1..18: note = Description of Artificial Sequence: Synthetic Antisense oligonucleotide
  modified_base 1..2: mod_base = OTHER; note = bicyclic nucleic acid (BNA)
  modified_base 17..18: mod_base = OTHER; note = bicyclic nucleic acid (BNA)
  modified_base 6: mod_base = OTHER; note = 5-methyl
  modified_base 10..11: mod_base = OTHER; note = 5-methyl
  modified_base 15..17: mod_base = OTHER; note = 5-methyl
  source 1..18: mol_type = other RNA
aagttctgtccaagcccg

SEQ ID NO: 5783 - RNA, 17 nt, synthetic construct
  misc_feature 1..17: note = Description of Artificial Sequence: Synthetic Antisense oligonucleotide
  modified_base 1..2: mod_base = OTHER; note = bicyclic nucleic acid (BNA)
  modified_base 16..17: mod_base = OTHER; note = bicyclic nucleic acid (BNA)
  modified_base 6: mod_base = OTHER; note = 5-methyl
  modified_base 10..11: mod_base = OTHER; note = 5-methyl
  modified_base 15..17: mod_base = OTHER; note = 5-methyl
  source 1..17: mol_type = other RNA
aagttctgtccaagccc

SEQ ID NO: 5784 - RNA, 16 nt, synthetic construct
  misc_feature 1..16: note = Description of Artificial Sequence: Synthetic Antisense oligonucleotide
  modified_base 1..2: mod_base = OTHER; note = bicyclic nucleic acid (BNA)
  modified_base 15..16: mod_base = OTHER; note = bicyclic nucleic acid (BNA)
  modified_base 6: mod_base = OTHER; note = 5-methyl
  modified_base 10..11: mod_base = OTHER; note = 5-methyl
  modified_base 15..16: mod_base = OTHER; note = 5-methyl
  source 1..16: mol_type = other RNA
aagttctgtccaagcc

SEQ ID NO: 5785 - RNA, 15 nt, synthetic construct
  misc_feature 1..15: note = Description of Artificial Sequence: Synthetic Antisense oligonucleotide
  modified_base 1..2: mod_base = OTHER; note = bicyclic nucleic acid (BNA)
  modified_base 14..15: mod_base = OTHER; note = bicyclic nucleic acid (BNA)
  modified_base 6: mod_base = OTHER; note = 5-methyl
  modified_base 10..11: mod_base = OTHER; note = 5-methyl
  modified_base 15: mod_base = OTHER; note = 5-methyl
  source 1..15: mol_type = other RNA
aagttctgtccaagc

SEQ ID NO: 5786 - RNA, 14 nt, synthetic construct
  misc_feature 1..14: note = Description of Artificial Sequence: Synthetic Antisense oligonucleotide
  modified_base 1..2: mod_base = OTHER; note = bicyclic nucleic acid (BNA)
  modified_base 13..14: mod_base = OTHER; note = bicyclic nucleic acid (BNA)
  modified_base 6: mod_base = OTHER; note = 5-methyl
  modified_base 10..11: mod_base = OTHER; note = 5-methyl
  source 1..14: mol_type = other RNA
aagttctgtccaag

SEQ ID NO: 5787 - RNA, 13 nt, synthetic construct
  misc_feature 1..13: note = Description of Artificial Sequence: Synthetic Antisense oligonucleotide
  modified_base 1..2: mod_base = OTHER; note = bicyclic nucleic acid (BNA)
  modified_base 12..13: mod_base = OTHER; note = bicyclic nucleic acid (BNA)
  modified_base 6: mod_base = OTHER; note = 5-methyl
  modified_base 10..11: mod_base = OTHER; note = 5-methyl
  source 1..13: mol_type = other RNA
aagttctgtccaa

SEQ ID NO: 5788 - RNA, 12 nt, synthetic construct
  misc_feature 1..12: note = Description of Artificial Sequence: Synthetic Antisense oligonucleotide
  modified_base 1..2: mod_base = OTHER; note = bicyclic nucleic acid (BNA)
  modified_base 11..12: mod_base = OTHER; note = bicyclic nucleic acid (BNA)
  modified_base 6: mod_base = OTHER; note = 5-methyl
  modified_base 10..11: mod_base = OTHER; note = 5-methyl
  source 1..12: mol_type = other RNA
aagttctgtcca

SEQ ID NO: 5789 - RNA, 11 nt, synthetic construct
  misc_feature 1..11: note = Description of Artificial Sequence: Synthetic Antisense oligonucleotide
  modified_base 1..2: mod_base = OTHER; note = bicyclic nucleic acid (BNA)
  modified_base 10..11: mod_base = OTHER; note = bicyclic nucleic acid (BNA)
  modified_base 6: mod_base = OTHER; note = 5-methyl
  modified_base 10..11: mod_base = OTHER; note = 5-methyl
  source 1..11: mol_type = other RNA
aagttctgtcc

SEQ ID NO: 5790 - DNA, 10 bp, synthetic construct
  misc_feature 1..10: note = Description of Artificial Sequence: Synthetic Antisense oligonucleotide
  misc_feature 1..10: note = Original Sequence: aaguucugtc
  modified_base 1..2: mod_base = OTHER; note = bicyclic nucleic acid (BNA)
  modified_base 9..10: mod_base = OTHER; note = bicyclic nucleic acid (BNA)
  modified_base 6: mod_base = OTHER; note = 5-methyl
  modified_base 10: mod_base = OTHER; note = 5-methyl
  source 1..10: mol_type = other DNA
  modified_base 4: mod_base = OTHER; note = Uracil
  modified_base 5: mod_base = OTHER; note = Uracil
  modified_base 7: mod_base = OTHER; note = Uracil
aagttctgtc

SEQ ID NO: 5791-5792 - skipped (2 entries)

SEQ ID NO: 5793 - DNA, 20 bp, synthetic construct
  misc_feature 1..20: note = Description of Artificial Sequence: Synthetic Antisense oligonucleotide
  misc_feature 1..20: note = Original Sequence: taaguucuguccaagcccgg
  modified_base 1..2: mod_base = OTHER; note = bicyclic nucleic acid (BNA)
  modified_base 19..20: mod_base = OTHER; note = bicyclic nucleic acid (BNA)
  modified_base 7: mod_base = OTHER; note = 5-methyl
  modified_base 11..12: mod_base = OTHER; note = 5-methyl
  modified_base 16..18: mod_base = OTHER; note = 5-methyl
  source 1..20: mol_type = other DNA
  modified_base 5: mod_base = OTHER; note = Uracil
  modified_base 6: mod_base = OTHER; note = Uracil
  modified_base 8: mod_base = OTHER; note = Uracil
  modified_base 10: mod_base = OTHER; note = Uracil
taagttctgtccaagcccgg

SEQ ID NO: 5794 - DNA, 19 bp, synthetic construct
  misc_feature 1..19: note = Description of Artificial Sequence: Synthetic Antisense oligonucleotide
  misc_feature 1..19: note = Original Sequence: taaguucuguccaagcccg
  modified_base 1..2: mod_base = OTHER; note = bicyclic nucleic acid (BNA)
  modified_base 18..19: mod_base = OTHER; note = bicyclic nucleic acid (BNA)
  modified_base 7: mod_base = OTHER; note = 5-methyl
  modified_base 11..12: mod_base = OTHER; note = 5-methyl
  modified_base 16..18: mod_base = OTHER; note = 5-methyl
  source 1..19: mol_type = other DNA
  modified_base 5: mod_base = OTHER; note = Uracil
  modified_base 6: mod_base = OTHER; note = Uracil
  modified_base 8: mod_base = OTHER; note = Uracil
  modified_base 10: mod_base = OTHER; note = Uracil
taagttctgtccaagcccg

SEQ ID NO: 5795 - DNA, 18 bp, synthetic construct
  misc_feature 1..18: note = Description of Artificial Sequence: Synthetic Antisense oligonucleotide
  misc_feature 1..18: note = Original Sequence: taaguucuguccaagccc
  modified_base 1..2: mod_base = OTHER; note = bicyclic nucleic acid (BNA)
  modified_base 17..18: mod_base = OTHER; note = bicyclic nucleic acid (BNA)
  modified_base 7: mod_base = OTHER; note = 5-methyl
  modified_base 11..12: mod_base = OTHER; note = 5-methyl
  modified_base 16..18: mod_base = OTHER; note = 5-methyl
  source 1..18: mol_type = other DNA
  modified_base 5: mod_base = OTHER; note = Uracil
  modified_base 6: mod_base = OTHER; note = Uracil
  modified_base 8: mod_base = OTHER; note = Uracil
  modified_base 10: mod_base = OTHER; note = Uracil
taagttctgtccaagccc

SEQ ID NO: 5796 - DNA, 17 bp, synthetic construct
  misc_feature 1..17: note = Description of Artificial Sequence: Synthetic Antisense oligonucleotide
  misc_feature 1..17: note = Original Sequence: taaguucuguccaagcc
  modified_base 1..2: mod_base = OTHER; note = bicyclic nucleic acid (BNA)
  modified_base 16..17: mod_base = OTHER; note = bicyclic nucleic acid (BNA)
  modified_base 7: mod_base = OTHER; note = 5-methyl
  modified_base 11..12: mod_base = OTHER; note = 5-methyl
  modified_base 16..17: mod_base = OTHER; note = 5-methyl
  source 1..17: mol_type = other DNA
  modified_base 5: mod_base = OTHER; note = Uracil
  modified_base 6: mod_base = OTHER; note = Uracil
  modified_base 8: mod_base = OTHER; note = Uracil
  modified_base 10: mod_base = OTHER; note = Uracil
taagttctgtccaagcc

SEQ ID NO: 5797 - DNA, 16 bp, synthetic construct
  misc_feature 1..16: note = Description of Artificial Sequence: Synthetic Antisense oligonucleotide
  misc_feature 1..16: note = Original Sequence: taaguucuguccaagc
  modified_base 1..2: mod_base = OTHER; note = bicyclic nucleic acid (BNA)
  modified_base 15..16: mod_base = OTHER; note = bicyclic nucleic acid (BNA)
  modified_base 7: mod_base = OTHER; note = 5-methyl
  modified_base 11..12: mod_base = OTHER; note = 5-methyl
  modified_base 16: mod_base = OTHER; note = 5-methyl
  source 1..16: mol_type = other DNA
  modified_base 5: mod_base = OTHER; note = Uracil
  modified_base 6: mod_base = OTHER; note = Uracil
  modified_base 8: mod_base = OTHER; note = Uracil
  modified_base 10: mod_base = OTHER; note = Uracil
taagttctgtccaagc

SEQ ID NO: 5798 - DNA, 14 bp, synthetic construct
  misc_feature 1..14: note = Description of Artificial Sequence: Synthetic Antisense oligonucleotide
  misc_feature 1..14: note = Original Sequence: taaguucuguccaa
  modified_base 1..2: mod_base = OTHER; note = bicyclic nucleic acid (BNA)
  modified_base 13..14: mod_base = OTHER; note = bicyclic nucleic acid (BNA)
  modified_base 7: mod_base = OTHER; note = 5-methyl
  modified_base 11..12: mod_base = OTHER; note = 5-methyl
  source 1..14: mol_type = other DNA
  modified_base 5: mod_base = OTHER; note = Uracil
  modified_base 6: mod_base = OTHER; note = Uracil
  modified_base 8: mod_base = OTHER; note = Uracil
  modified_base 10: mod_base = OTHER; note = Uracil
taagttctgtccaa

SEQ ID NO: 5799 - DNA, 13 bp, synthetic construct
  misc_feature 1..13: note = Description of Artificial Sequence: Synthetic Antisense oligonucleotide
  misc_feature 1..13: note = Original Sequence: taaguucugucca
  modified_base 1..2: mod_base = OTHER; note = bicyclic nucleic acid (BNA)
  modified_base 12..13: mod_base = OTHER; note = bicyclic nucleic acid (BNA)
  modified_base 7: mod_base = OTHER; note = 5-methyl
  modified_base 11..12: mod_base = OTHER; note = 5-methyl
  source 1..13: mol_type = other DNA
  modified_base 5: mod_base = OTHER; note = Uracil
  modified_base 6: mod_base = OTHER; note = Uracil
  modified_base 8: mod_base = OTHER; note = Uracil
  modified_base 10: mod_base = OTHER; note = Uracil
taagttctgtcca

SEQ ID NO: 5800 - DNA, 12 bp, synthetic construct
  misc_feature 1..12: note = Description of Artificial Sequence: Synthetic Antisense oligonucleotide
  misc_feature 1..12: note = Original Sequence: taaguucugucc
  modified_base 1..2: mod_base = OTHER; note = bicyclic nucleic acid (BNA)
  modified_base 11..12: mod_base = OTHER; note = bicyclic nucleic acid (BNA)
  modified_base 7: mod_base = OTHER; note = 5-methyl
  modified_base 11..12: mod_base = OTHER; note = 5-methyl
  source 1..12: mol_type = other DNA
  modified_base 5: mod_base = OTHER; note = Uracil
  modified_base 6: mod_base = OTHER; note = Uracil
  modified_base 8: mod_base = OTHER; note = Uracil
  modified_base 10: mod_base = OTHER; note = Uracil
taagttctgtcc

SEQ ID NO: 5801 - DNA, 11 bp, synthetic construct
  misc_feature 1..11: note = Description of Artificial Sequence: Synthetic Antisense oligonucleotide
  misc_feature 1..11: note = Original Sequence: taaguucugtc
  modified_base 1..2: mod_base = OTHER; note = bicyclic nucleic acid (BNA)
  modified_base 10..11: mod_base = OTHER; note = bicyclic nucleic acid (BNA)
  modified_base 7: mod_base = OTHER; note = 5-methyl
  modified_base 11: mod_base = OTHER; note = 5-methyl
  source 1..11: mol_type = other DNA
  modified_base 5: mod_base = OTHER; note = Uracil
  modified_base 6: mod_base = OTHER; note = Uracil
  modified_base 8: mod_base = OTHER; note = Uracil
taagttctgtc

SEQ ID NO: 5802 - DNA, 10 bp, synthetic construct
  misc_feature 1..10: note = Description of Artificial Sequence: Synthetic Antisense oligonucleotide
  misc_feature 1..10: note = Original Sequence: taaguucugt
  modified_base 1..2: mod_base = OTHER; note = bicyclic nucleic acid (BNA)
  modified_base 9..10: mod_base = OTHER; note = bicyclic nucleic acid (BNA)
  modified_base 7: mod_base = OTHER; note = 5-methyl
  source 1..10: mol_type = other DNA
  modified_base 5: mod_base = OTHER; note = Uracil
  modified_base 6: mod_base = OTHER; note = Uracil
  modified_base 8: mod_base = OTHER; note = Uracil
taagttctgt

SEQ ID NO: 5803-5804 - skipped (2 entries)

SEQ ID NO: 5805 - DNA, 20 bp, synthetic construct
  misc_feature 1..20: note = Description of Artificial Sequence: Synthetic Antisense oligonucleotide
  misc_feature 1..20: note = Original Sequence: gtaaguucuguccaagcccg
  modified_base 1..2: mod_base = OTHER; note = bicyclic nucleic acid (BNA)
  modified_base 19..20: mod_base = OTHER; note = bicyclic nucleic acid (BNA)
  modified_base 8: mod_base = OTHER; note = 5-methyl
  modified_base 12..13: mod_base = OTHER; note = 5-methyl
  modified_base 17..19: mod_base = OTHER; note = 5-methyl
  source 1..20: mol_type = other DNA
  modified_base 6: mod_base = OTHER; note = Uracil
  modified_base 7: mod_base = OTHER; note = Uracil
  modified_base 9: mod_base = OTHER; note = Uracil
  modified_base 11: mod_base = OTHER; note = Uracil
gtaagttctgtccaagcccg

SEQ ID NO: 5806 - DNA, 19 bp, synthetic construct
  misc_feature 1..19: note = Description of Artificial Sequence: Synthetic Antisense oligonucleotide
  misc_feature 1..19: note = Original Sequence: gtaaguucuguccaagccc
  modified_base 1..2: mod_base = OTHER; note = bicyclic nucleic acid (BNA)
  modified_base 18..19: mod_base = OTHER; note = bicyclic nucleic acid (BNA)
  modified_base 8: mod_base = OTHER; note = 5-methyl
  modified_base 12..13: mod_base = OTHER; note = 5-methyl
  modified_base 17..19: mod_base = OTHER; note = 5-methyl
  source 1..19: mol_type = other DNA
  modified_base 6: mod_base = OTHER; note = Uracil
  modified_base 7: mod_base = OTHER; note = Uracil
  modified_base 9: mod_base = OTHER; note = Uracil
  modified_base 11: mod_base = OTHER; note = Uracil
gtaagttctgtccaagccc

SEQ ID NO: 5807 - DNA, 17 bp, synthetic construct
  misc_feature 1..17: note = Description of Artificial Sequence: Synthetic Antisense oligonucleotide
  misc_feature 1..17: note = Original Sequence: gtaaguucuguccaagc
  modified_base 1..2: mod_base = OTHER; note = bicyclic nucleic acid (BNA)
  modified_base 16..17: mod_base = OTHER; note = bicyclic nucleic acid (BNA)
  modified_base 8: mod_base = OTHER; note = 5-methyl
  modified_base 12..13: mod_base = OTHER; note = 5-methyl
  modified_base 17: mod_base = OTHER; note = 5-methyl
  source 1..17: mol_type = other DNA
  modified_base 6: mod_base = OTHER; note = Uracil
  modified_base 7: mod_base = OTHER; note = Uracil
  modified_base 9: mod_base = OTHER; note = Uracil
  modified_base 11: mod_base = OTHER; note = Uracil
gtaagttctgtccaagc

SEQ ID NO: 5808 - DNA, 16 bp, synthetic construct
  misc_feature 1..16: note = Description of Artificial Sequence: Synthetic Antisense oligonucleotide
  misc_feature 1..16: note = Original Sequence: gtaaguucuguccaag
  modified_base 1..2: mod_base = OTHER; note = bicyclic nucleic acid (BNA)
  modified_base 15..16: mod_base = OTHER; note = bicyclic nucleic acid (BNA)
  modified_base 8: mod_base = OTHER; note = 5-methyl
  modified_base 12..13: mod_base = OTHER; note = 5-methyl
  source 1..16: mol_type = other DNA
  modified_base 6: mod_base = OTHER; note = Uracil
  modified_base 7: mod_base = OTHER; note = Uracil
  modified_base 9: mod_base = OTHER; note = Uracil
  modified_base 11: mod_base = OTHER; note = Uracil
gtaagttctgtccaag

SEQ ID NO: 5809 - DNA, 15 bp, synthetic construct
  misc_feature 1..15: note = Description of Artificial Sequence: Synthetic Antisense oligonucleotide
  misc_feature 1..15: note = Original Sequence: gtaaguucuguccaa
  modified_base 1..2: mod_base = OTHER; note = bicyclic nucleic acid (BNA)
  modified_base 14..15: mod_base = OTHER; note = bicyclic nucleic acid (BNA)
  modified_base 8: mod_base = OTHER; note = 5-methyl
  modified_base 12..13: mod_base = OTHER; note = 5-methyl
  source 1..15: mol_type = other DNA
  modified_base 6: mod_base = OTHER; note = Uracil
  modified_base 7: mod_base = OTHER; note = Uracil
  modified_base 9: mod_base = OTHER; note = Uracil
  modified_base 11: mod_base = OTHER; note = Uracil
gtaagttctgtccaa

SEQ ID NO: 5810 - DNA, 14 bp, synthetic construct
  misc_feature 1..14: note = Description of Artificial Sequence: Synthetic Antisense oligonucleotide
  misc_feature 1..14: note = Original Sequence: gtaaguucugucca
  modified_base 1..2: mod_base = OTHER; note = bicyclic nucleic acid (BNA)
  modified_base 13..14: mod_base = OTHER; note = bicyclic nucleic acid (BNA)
  modified_base 8: mod_base = OTHER; note = 5-methyl
  modified_base 12..13: mod_base = OTHER; note = 5-methyl
  source 1..14: mol_type = other DNA
  modified_base 6: mod_base = OTHER; note = Uracil
  modified_base 7: mod_base = OTHER; note = Uracil
  modified_base 9: mod_base = OTHER; note = Uracil
  modified_base 11: mod_base = OTHER; note = Uracil
gtaagttctgtcca

SEQ ID NO: 5811 - DNA, 13 bp, synthetic construct
  misc_feature 1..13: note = Description of Artificial Sequence: Synthetic Antisense oligonucleotide
  misc_feature 1..13: note = Original Sequence: gtaaguucugucc
  modified_base 1..2: mod_base = OTHER; note = bicyclic nucleic acid (BNA)
  modified_base 12..13: mod_base = OTHER; note = bicyclic nucleic acid (BNA)
  modified_base 8: mod_base = OTHER; note = 5-methyl
  modified_base 12..13: mod_base = OTHER; note = 5-methyl
  source 1..13: mol_type = other DNA
  modified_base 6: mod_base = OTHER; note = Uracil
  modified_base 7: mod_base = OTHER; note = Uracil
  modified_base 9: mod_base = OTHER; note = Uracil
  modified_base 11: mod_base = OTHER; note = Uracil
gtaagttctgtcc

SEQ ID NO: 5812 - DNA, 12 bp, synthetic construct
  misc_feature 1..12: note = Description of Artificial Sequence: Synthetic Antisense oligonucleotide
  misc_feature 1..12: note = Original Sequence: gtaaguucugtc
  modified_base 1..2: mod_base = OTHER; note = bicyclic nucleic acid (BNA)
  modified_base 11..12: mod_base = OTHER; note = bicyclic nucleic acid (BNA)
  modified_base 8: mod_base = OTHER; note = 5-methyl
  modified_base 12: mod_base = OTHER; note = 5-methyl
  source 1..12: mol_type = other DNA
  modified_base 6: mod_base = OTHER; note = Uracil
  modified_base 7: mod_base = OTHER; note = Uracil
  modified_base 9: mod_base = OTHER; note = Uracil
gtaagttctgtc

SEQ ID NO: 5813 - DNA, 11 bp, synthetic construct
  misc_feature 1..11: note = Description of Artificial Sequence: Synthetic Antisense oligonucleotide
  misc_feature 1..11: note = Original Sequence: gtaaguucugt
  modified_base 1..2: mod_base = OTHER; note = bicyclic nucleic acid (BNA)
  modified_base 10..11: mod_base = OTHER; note = bicyclic nucleic acid (BNA)
  modified_base 8: mod_base = OTHER; note = 5-methyl
  source 1..11: mol_type = other DNA
  modified_base 6: mod_base = OTHER; note = Uracil
  modified_base 7: mod_base = OTHER; note = Uracil
  modified_base 9: mod_base = OTHER; note = Uracil
gtaagttctgt

SEQ ID NO: 5814 - DNA, 10 bp, synthetic construct
  misc_feature 1..10: note = Description of Artificial Sequence: Synthetic Antisense oligonucleotide
  misc_feature 1..10: note = Original Sequence: gtaaguuctg
  modified_base 1..2: mod_base = OTHER; note = bicyclic nucleic acid (BNA)
  modified_base 9..10: mod_base = OTHER; note = bicyclic nucleic acid (BNA)
  modified_base 8: mod_base = OTHER; note = 5-methyl
  source 1..10: mol_type = other DNA
  modified_base 6: mod_base = OTHER; note = Uracil
  modified_base 7: mod_base = OTHER; note = Uracil
gtaagttctg

SEQ ID NO: 5815-5816 - skipped (2 entries)

SEQ ID NO: 5817 - RNA, 20 nt, synthetic construct
  misc_feature 1..20: note = Description of Artificial Sequence: Synthetic Antisense oligonucleotide
  modified_base 1..2: mod_base = OTHER; note = bicyclic nucleic acid (BNA)
  modified_base 19..20: mod_base = OTHER; note = bicyclic nucleic acid (BNA)
  modified_base 9: mod_base = OTHER; note = 5-methyl
  modified_base 13..14: mod_base = OTHER; note = 5-methyl
  modified_base 18..20: mod_base = OTHER; note = 5-methyl
  source 1..20: mol_type = other RNA
ggtaagttctgtccaagccc

SEQ ID NO: 5818 - RNA, 19 nt, synthetic construct
  misc_feature 1..19: note = Description of Artificial Sequence: Synthetic Antisense oligonucleotide
  modified_base 1..2: mod_base = OTHER; note = bicyclic nucleic acid (BNA)
  modified_base 18..19: mod_base = OTHER; note = bicyclic nucleic acid (BNA)
  modified_base 9: mod_base = OTHER; note = 5-methyl
  modified_base 13..14: mod_base = OTHER; note = 5-methyl
  modified_base 18..19: mod_base = OTHER; note = 5-methyl
  source 1..19: mol_type = other RNA
ggtaagttctgtccaagcc

SEQ ID NO: 5819 - RNA, 17 nt, synthetic construct
  misc_feature 1..17: note = Description of Artificial Sequence: Synthetic Antisense oligonucleotide
  modified_base 1..2: mod_base = OTHER; note = bicyclic nucleic acid (BNA)
  modified_base 16..17: mod_base = OTHER; note = bicyclic nucleic acid (BNA)
  modified_base 9: mod_base = OTHER; note = 5-methyl
  modified_base 13..14: mod_base = OTHER; note = 5-methyl
  source 1..17: mol_type = other RNA
ggtaagttctgtccaag

SEQ ID NO: 5820 - RNA, 16 nt, synthetic construct
  misc_feature 1..16: note = Description of Artificial Sequence: Synthetic Antisense oligonucleotide
  modified_base 1..2: mod_base = OTHER; note = bicyclic nucleic acid (BNA)
  modified_base 15..16: mod_base = OTHER; note = bicyclic nucleic acid (BNA)
  modified_base 9: mod_base = OTHER; note = 5-methyl
  modified_base 13..14: mod_base = OTHER; note = 5-methyl
  source 1..16: mol_type = other RNA
ggtaagttctgtccaa

SEQ ID NO: 5821 - RNA, 15 nt, synthetic construct
  misc_feature 1..15: note = Description of Artificial Sequence: Synthetic Antisense oligonucleotide
  modified_base 1..2: mod_base = OTHER; note = bicyclic nucleic acid (BNA)
  modified_base 14..15: mod_base = OTHER; note = bicyclic nucleic acid (BNA)
  modified_base 9: mod_base = OTHER; note = 5-methyl
  modified_base 13..14: mod_base = OTHER; note = 5-methyl
  source 1..15: mol_type = other RNA
ggtaagttctgtcca

SEQ ID NO: 5822 - RNA, 14 nt, synthetic construct
  misc_feature 1..14: note = Description of Artificial Sequence: Synthetic Antisense oligonucleotide
  modified_base 1..2: mod_base = OTHER; note = bicyclic nucleic acid (BNA)
  modified_base 13..14: mod_base = OTHER; note = bicyclic nucleic acid (BNA)
  modified_base 9: mod_base = OTHER; note = 5-methyl
  modified_base 13..14: mod_base = OTHER; note = 5-methyl
  source 1..14: mol_type = other RNA
ggtaagttctgtcc

SEQ ID NO: 5823 - DNA, 13 bp, synthetic construct
  misc_feature 1..13: note = Description of Artificial Sequence: Synthetic Antisense oligonucleotide
  misc_feature 1..13: note = Original Sequence: gguaaguucugtc
  modified_base 1..2: mod_base = OTHER; note = bicyclic nucleic acid (BNA)
  modified_base 12..13: mod_base = OTHER; note = bicyclic nucleic acid (BNA)
  modified_base 9: mod_base = OTHER; note = 5-methyl
  modified_base 13: mod_base = OTHER; note = 5-methyl
  source 1..13: mol_type = other DNA
  modified_base 3: mod_base = OTHER; note = Uracil
  modified_base 7: mod_base = OTHER; note = Uracil
  modified_base 8: mod_base = OTHER; note = Uracil
  modified_base 10: mod_base = OTHER; note = Uracil
ggtaagttctgtc

SEQ ID NO: 5824 - DNA, 12 bp, synthetic construct
  misc_feature 1..12: note = Description of Artificial Sequence: Synthetic Antisense oligonucleotide
  misc_feature 1..12: note = Original Sequence: gguaaguucugt
  modified_base 1..2: mod_base = OTHER; note = bicyclic nucleic acid (BNA)
  modified_base 11..12: mod_base = OTHER; note = bicyclic nucleic acid (BNA)
  modified_base 9: mod_base = OTHER; note = 5-methyl
  source 1..12: mol_type = other DNA
  modified_base 3: mod_base = OTHER; note = Uracil
  modified_base 7: mod_base = OTHER; note = Uracil
  modified_base 8: mod_base = OTHER; note = Uracil
  modified_base 10: mod_base = OTHER; note = Uracil
ggtaagttctgt

SEQ ID NO: 5825 - DNA, 11 bp, synthetic construct
  misc_feature 1..11: note = Description of Artificial Sequence: Synthetic Antisense oligonucleotide
  misc_feature 1..11: note = Original Sequence: gguaaguuctg
  modified_base 1..2: mod_base = OTHER; note = bicyclic nucleic acid (BNA)
  modified_base 10..11: mod_base = OTHER; note = bicyclic nucleic acid (BNA)
  modified_base 9: mod_base = OTHER; note = 5-methyl
  source 1..11: mol_type = other DNA
  modified_base 3: mod_base = OTHER; note = Uracil
  modified_base 7: mod_base = OTHER; note = Uracil
  modified_base 8: mod_base = OTHER; note = Uracil
ggtaagttctg

SEQ ID NO: 5826 - DNA, 10 bp, synthetic construct
  misc_feature 1..10: note = Description of Artificial Sequence: Synthetic Antisense oligonucleotide
  misc_feature 1..10: note = Original Sequence: gguaaguuct
  modified_base 1..2: mod_base = OTHER; note = bicyclic nucleic acid (BNA)
  modified_base 9..10: mod_base = OTHER; note = bicyclic nucleic acid (BNA)
  modified_base 9: mod_base = OTHER; note = 5-methyl
  source 1..10: mol_type = other DNA
  modified_base 3: mod_base = OTHER; note = Uracil
  modified_base 7: mod_base = OTHER; note = Uracil
  modified_base 8: mod_base = OTHER; note = Uracil
ggtaagttct

SEQ ID NO: 5827 - skipped

SEQ ID NO: 5828 - RNA, 20 nt, synthetic construct
  misc_feature 1..20: note = Description of Artificial Sequence: Synthetic Antisense oligonucleotide
  modified_base 1: mod_base = OTHER; note = 5-methyl
  modified_base 10: mod_base = OTHER; note = 5-methyl
  modified_base 14..15: mod_base = OTHER; note = 5-methyl
  modified_base 19..20: mod_base = OTHER; note = 5-methyl
  modified_base 1..2: mod_base = OTHER; note = bicyclic nucleic acid (BNA)
  modified_base 19..20: mod_base = OTHER; note = bicyclic nucleic acid (BNA)
  source 1..20: mol_type = other RNA
cggtaagttctgtccaagcc

SEQ ID NO: 5829 - RNA, 19 nt, synthetic construct
  misc_feature 1..19: note = Description of Artificial Sequence: Synthetic Antisense oligonucleotide
  modified_base 1: mod_base = OTHER; note = 5-methyl
  modified_base 10: mod_base = OTHER; note = 5-methyl
  modified_base 14..15: mod_base = OTHER; note = 5-methyl
  modified_base 19: mod_base = OTHER; note = 5-methyl
  modified_base 1..2: mod_base = OTHER; note = bicyclic nucleic acid (BNA)
  modified_base 18..19: mod_base = OTHER; note = bicyclic nucleic acid (BNA)
  source 1..19: mol_type = other RNA
cggtaagttctgtccaagc

SEQ ID NO: 5830 - RNA, 18 nt, synthetic construct
  misc_feature 1..18: note = Description of Artificial Sequence: Synthetic Antisense oligonucleotide
  modified_base 1: mod_base = OTHER; note = 5-methyl
  modified_base 10: mod_base = OTHER; note = 5-methyl
  modified_base 14..15: mod_base = OTHER; note = 5-methyl
  modified_base 1..2: mod_base = OTHER; note = bicyclic nucleic acid (BNA)
  modified_base 17..18: mod_base = OTHER; note = bicyclic nucleic acid (BNA)
  source 1..18: mol_type = other RNA
cggtaagttctgtccaag

SEQ ID NO: 5831 - RNA, 17 nt, synthetic construct
  misc_feature 1..17: note = Description of Artificial Sequence: Synthetic Antisense oligonucleotide
  modified_base 1: mod_base = OTHER; note = 5-methyl
  modified_base 10: mod_base = OTHER; note = 5-methyl
  modified_base 14..15: mod_base = OTHER; note = 5-methyl
  modified_base 1..2: mod_base = OTHER; note = bicyclic nucleic acid (BNA)
  modified_base 16..17: mod_base = OTHER; note = bicyclic nucleic acid (BNA)
  source 1..17: mol_type = other RNA
cggtaagttctgtccaa

SEQ ID NO: 5832 - RNA, 16 nt, synthetic construct
  misc_feature 1..16: note = Description of Artificial Sequence: Synthetic Antisense oligonucleotide
  modified_base 1: mod_base = OTHER; note = 5-methyl
  modified_base 10: mod_base = OTHER; note = 5-methyl
  modified_base 14..15: mod_base = OTHER; note = 5-methyl
  modified_base 1..2: mod_base = OTHER; note = bicyclic nucleic acid (BNA)
  modified_base 15..16: mod_base = OTHER; note = bicyclic nucleic acid (BNA)
  source 1..16: mol_type = other RNA
cggtaagttctgtcca

SEQ ID NO: 5833 - RNA, 15 nt, synthetic construct
  misc_feature 1..15: note = Description of Artificial Sequence: Synthetic Antisense oligonucleotide
  modified_base 1: mod_base = OTHER; note = 5-methyl
  modified_base 10: mod_base = OTHER; note = 5-methyl
  modified_base 14..15: mod_base = OTHER; note = 5-methyl
  modified_base 1..2: mod_base = OTHER; note = bicyclic nucleic acid (BNA)
  modified_base 14..15: mod_base = OTHER; note = bicyclic nucleic acid (BNA)
  source 1..15: mol_type = other RNA
cggtaagttctgtcc

SEQ ID NO: 5834 - DNA, 14 bp, synthetic construct
  misc_feature 1..14: note = Description of Artificial Sequence: Synthetic Antisense oligonucleotide
  misc_feature 1..14: note = Original Sequence: cgguaaguucugtc
  modified_base 1: mod_base = OTHER; note = 5-methyl
  modified_base 10: mod_base = OTHER; note = 5-methyl
  modified_base 14: mod_base = OTHER; note = 5-methyl
  modified_base 1..2: mod_base = OTHER; note = bicyclic nucleic acid (BNA)
  modified_base 13..14: mod_base = OTHER; note = bicyclic nucleic acid (BNA)
  source 1..14: mol_type = other DNA
  modified_base 4: mod_base = OTHER; note = Uracil
  modified_base 8: mod_base = OTHER; note = Uracil
  modified_base 9: mod_base = OTHER; note = Uracil
  modified_base 11: mod_base = OTHER; note = Uracil
cggtaagttctgtc

SEQ ID NO: 5835 - DNA, 13 bp, synthetic construct
  misc_feature 1..13: note = Description of Artificial Sequence: Synthetic Antisense oligonucleotide
  misc_feature 1..13: note = Original Sequence: cgguaaguucugt
  modified_base 1: mod_base = OTHER; note = 5-methyl
  modified_base 10: mod_base = OTHER; note = 5-methyl
  modified_base 1..2: mod_base = OTHER; note = bicyclic nucleic acid (BNA)
  modified_base 12..13: mod_base = OTHER; note = bicyclic nucleic acid (BNA)
  source 1..13: mol_type = other DNA
  modified_base 4: mod_base = OTHER; note = Uracil
  modified_base 8: mod_base = OTHER; note = Uracil
  modified_base 9: mod_base = OTHER; note = Uracil
  modified_base 11: mod_base = OTHER; note = Uracil
cggtaagttctgt

SEQ ID NO: 5836 - DNA, 12 bp, synthetic construct
  misc_feature 1..12: note = Description of Artificial Sequence: Synthetic Antisense oligonucleotide
  misc_feature 1..12: note = Original Sequence: cgguaaguuctg
  modified_base 1: mod_base = OTHER; note = 5-methyl
  modified_base 10: mod_base = OTHER; note = 5-methyl
  modified_base 1..2: mod_base = OTHER; note = bicyclic nucleic acid (BNA)
  modified_base 11..12: mod_base = OTHER; note = bicyclic nucleic acid (BNA)
  source 1..12: mol_type = other DNA
  modified_base 4: mod_base = OTHER; note = Uracil
  modified_base 8: mod_base = OTHER; note = Uracil
  modified_base 9: mod_base = OTHER; note = Uracil
cggtaagttctg

SEQ ID NO: 5837 - DNA, 11 bp, synthetic construct
  misc_feature 1..11: note = Description of Artificial Sequence: Synthetic Antisense oligonucleotide
  misc_feature 1..11: note = Original Sequence: cgguaaguuct
  modified_base 1: mod_base = OTHER; note = 5-methyl
  modified_base 10: mod_base = OTHER; note = 5-methyl
  modified_base 1..2: mod_base = OTHER; note = bicyclic nucleic acid (BNA)
  modified_base 10..11: mod_base = OTHER; note = bicyclic nucleic acid (BNA)
  source 1..11: mol_type = other DNA
  modified_base 4: mod_base = OTHER; note = Uracil
  modified_base 8: mod_base = OTHER; note = Uracil
  modified_base 9: mod_base = OTHER; note = Uracil
cggtaagttct

SEQ ID NO: 5838 - DNA, 10 bp, synthetic construct
  misc_feature 1..10: note = Description of Artificial Sequence: Synthetic Antisense oligonucleotide
  misc_feature 1..10: note = Original Sequence: cgguaagutc
  modified_base 1: mod_base = OTHER; note = 5-methyl
  modified_base 10: mod_base = OTHER; note = 5-methyl
  modified_base 1..2: mod_base = OTHER; note = bicyclic nucleic acid (BNA)
  modified_base 9..10: mod_base = OTHER; note = bicyclic nucleic acid (BNA)
  source 1..10: mol_type = other DNA
  modified_base 4: mod_base = OTHER; note = Uracil
  modified_base 8: mod_base = OTHER; note = Uracil
cggtaagttc

SEQ ID NO: 5839-5840 - skipped (2 entries)

SEQ ID NO: 5841 - DNA, 20 bp, synthetic construct
  misc_feature 1..20: note = Description of Artificial Sequence: Synthetic Antisense oligonucleotide
  misc_feature 1..20: note = Original Sequence: tcgguaaguucuguccaagc
  modified_base 1..2: mod_base = OTHER; note = bicyclic nucleic acid (BNA)
  modified_base 19..20: mod_base = OTHER; note = bicyclic nucleic acid (BNA)
  modified_base 2: mod_base = OTHER; note = 5-methyl
  modified_base 11: mod_base = OTHER; note = 5-methyl
  modified_base 15..16: mod_base = OTHER; note = 5-methyl
  modified_base 20: mod_base = OTHER; note = 5-methyl
  source 1..20: mol_type = other DNA
  modified_base 5: mod_base = OTHER; note = Uracil
  modified_base 9: mod_base = OTHER; note = Uracil
  modified_base 10: mod_base = OTHER; note = Uracil
  modified_base 12: mod_base = OTHER; note = Uracil
  modified_base 14: mod_base = OTHER; note = Uracil
tcggtaagttctgtccaagc

SEQ ID NO: 5842 - DNA, 19 bp, synthetic construct
  misc_feature 1..19: note = Description of Artificial Sequence: Synthetic Antisense oligonucleotide
  misc_feature 1..19: note = Original Sequence: tcgguaaguucuguccaag
  modified_base 1..2: mod_base = OTHER; note = bicyclic nucleic acid (BNA)
  modified_base 18..19: mod_base = OTHER; note = bicyclic nucleic acid (BNA)
  modified_base 2: mod_base = OTHER; note = 5-methyl
  modified_base 11: mod_base = OTHER; note = 5-methyl
  modified_base 15..16: mod_base = OTHER; note = 5-methyl
  source 1..19: mol_type = other DNA
  modified_base 5: mod_base = OTHER; note = Uracil
  modified_base 9: mod_base = OTHER; note = Uracil
  modified_base 10: mod_base = OTHER; note = Uracil
  modified_base 12: mod_base = OTHER; note = Uracil
  modified_base 14: mod_base = OTHER; note = Uracil
tcggtaagttctgtccaag

SEQ ID NO: 5843 - DNA, 18 bp, synthetic construct
  misc_feature 1..18: note = Description of Artificial Sequence: Synthetic Antisense oligonucleotide
  misc_feature 1..18: note = Original Sequence: tcgguaaguucuguccaa
  modified_base 1..2: mod_base = OTHER; note = bicyclic nucleic acid (BNA)
  modified_base 17..18: mod_base = OTHER; note = bicyclic nucleic acid (BNA)
  modified_base 2: mod_base = OTHER; note = 5-methyl
  modified_base 11: mod_base = OTHER; note = 5-methyl
  modified_base 15..16: mod_base = OTHER; note = 5-methyl
  source 1..18: mol_type = other DNA
  modified_base 5: mod_base = OTHER; note = Uracil
  modified_base 9: mod_base = OTHER; note = Uracil
  modified_base 10: mod_base = OTHER; note = Uracil
  modified_base 12: mod_base = OTHER; note = Uracil
  modified_base 14: mod_base = OTHER; note = Uracil
tcggtaagttctgtccaa

SEQ ID NO: 5844 - DNA, 17 bp, synthetic construct
  misc_feature 1..17: note = Description of Artificial Sequence: Synthetic Antisense oligonucleotide
  misc_feature 1..17: note = Original Sequence: tcgguaaguucugucca
  modified_base 1..2: mod_base = OTHER; note = bicyclic nucleic acid (BNA)
  modified_base 16..17: mod_base = OTHER; note = bicyclic nucleic acid (BNA)
  modified_base 2: mod_base = OTHER; note = 5-methyl
  modified_base 11: mod_base = OTHER; note = 5-methyl
  modified_base 15..16: mod_base = OTHER; note = 5-methyl
  source 1..17: mol_type = other DNA
  modified_base 5: mod_base = OTHER; note = Uracil
  modified_base 9: mod_base = OTHER; note = Uracil
  modified_base 10: mod_base = OTHER; note = Uracil
  modified_base 12: mod_base = OTHER; note = Uracil
  modified_base 14: mod_base = OTHER; note = Uracil
tcggtaagttctgtcca

SEQ ID NO: 5845 - DNA, 16 bp, synthetic construct
  misc_feature 1..16: note = Description of Artificial Sequence: Synthetic Antisense oligonucleotide
  misc_feature 1..16: note = Original Sequence: tcgguaaguucugucc
  modified_base 1..2: mod_base = OTHER; note = bicyclic nucleic acid (BNA)
  modified_base 15..16: mod_base = OTHER; note = bicyclic nucleic acid (BNA)
  modified_base 2: mod_base = OTHER; note = 5-methyl
  modified_base 11: mod_base = OTHER; note = 5-methyl
  modified_base 15..16: mod_base = OTHER; note = 5-methyl
  source 1..16: mol_type = other DNA
  modified_base 5: mod_base = OTHER; note = Uracil
  modified_base 9: mod_base = OTHER; note = Uracil
  modified_base 10: mod_base = OTHER; note = Uracil
  modified_base 12: mod_base = OTHER; note = Uracil
  modified_base 14: mod_base = OTHER; note = Uracil
tcggtaagttctgtcc

SEQ ID NO: 5846 - DNA, 15 bp, synthetic construct
  misc_feature 1..15: note = Description of Artificial Sequence: Synthetic Antisense oligonucleotide
  misc_feature 1..15: note = Original Sequence: tcgguaaguucugtc
  modified_base 1..2: mod_base = OTHER; note = bicyclic nucleic acid (BNA)
  modified_base 14..15: mod_base = OTHER; note = bicyclic nucleic acid (BNA)
  modified_base 2: mod_base = OTHER; note = 5-methyl
  modified_base 11: mod_base = OTHER; note = 5-methyl
  modified_base 15: mod_base = OTHER; note = 5-methyl
  source 1..15: mol_type = other DNA
  modified_base 5: mod_base = OTHER; note = Uracil
  modified_base 9: mod_base = OTHER; note = Uracil
  modified_base 10: mod_base = OTHER; note = Uracil
  modified_base 12: mod_base = OTHER; note = Uracil
tcggtaagttctgtc

SEQ ID NO: 5847 - DNA, 14 bp, synthetic construct
  misc_feature 1..14: note = Description of Artificial Sequence: Synthetic Antisense oligonucleotide
  misc_feature 1..14: note = Original Sequence: tcgguaaguucugt
  modified_base 1..2: mod_base = OTHER; note = bicyclic nucleic acid (BNA)
  modified_base 13..14: mod_base = OTHER; note = bicyclic nucleic acid (BNA)
  modified_base 2: mod_base = OTHER; note = 5-methyl
  modified_base 11: mod_base = OTHER; note = 5-methyl
  source 1..14: mol_type = other DNA
  modified_base 5: mod_base = OTHER; note = Uracil
  modified_base 9: mod_base = OTHER; note = Uracil
  modified_base 10: mod_base = OTHER; note = Uracil
  modified_base 12: mod_base = OTHER; note = Uracil
tcggtaagttctgt

SEQ ID NO: 5848 - DNA, 13 bp, synthetic construct
  misc_feature 1..13: note = Description of Artificial Sequence: Synthetic Antisense oligonucleotide
  misc_feature 1..13: note = Original Sequence: tcgguaaguuctg
  modified_base 1..2: mod_base = OTHER; note = bicyclic nucleic acid (BNA)
  modified_base 12..13: mod_base = OTHER; note = bicyclic nucleic acid (BNA)
  modified_base 2: mod_base = OTHER; note = 5-methyl
  modified_base 11: mod_base = OTHER; note = 5-methyl
  source 1..13: mol_type = other DNA
  modified_base 5: mod_base = OTHER; note = Uracil
  modified_base 9: mod_base = OTHER; note = Uracil
  modified_base 10: mod_base = OTHER; note = Uracil
tcggtaagttctg

SEQ ID NO: 5849 - DNA, 12 bp, synthetic construct
  misc_feature 1..12: note = Description of Artificial Sequence: Synthetic Antisense oligonucleotide
  misc_feature 1..12: note = Original Sequence: tcgguaaguuct
  modified_base 1..2: mod_base = OTHER; note = bicyclic nucleic acid (BNA)
  modified_base 11..12: mod_base = OTHER; note = bicyclic nucleic acid (BNA)
  modified_base 2: mod_base = OTHER; note = 5-methyl
  modified_base 11: mod_base = OTHER; note = 5-methyl
  source 1..12: mol_type = other DNA
  modified_base 5: mod_base = OTHER; note = Uracil
  modified_base 9: mod_base = OTHER; note = Uracil
  modified_base 10: mod_base = OTHER; note = Uracil
tcggtaagttct

SEQ ID NO: 5850 - DNA, 11 bp, synthetic construct
  misc_feature 1..11: note = Description of Artificial Sequence: Synthetic Antisense oligonucleotide
  misc_feature 1..11: note = Original Sequence: tcgguaagutc
  modified_base 1..2: mod_base = OTHER; note = bicyclic nucleic acid (BNA)
  modified_base 10..11: mod_base = OTHER; note = bicyclic nucleic acid (BNA)
  modified_base 2: mod_base = OTHER; note = 5-methyl
  modified_base 11: mod_base = OTHER; note = 5-methyl
  source 1..11: mol_type = other DNA
  modified_base 5: mod_base = OTHER; note = Uracil
  modified_base 9: mod_base = OTHER; note = Uracil
tcggtaagttc

SEQ ID NO: 5851 - DNA, 10 bp, synthetic construct
  misc_feature 1..10: note = Description of Artificial Sequence: Synthetic Antisense oligonucleotide
  misc_feature 1..10: note = Original Sequence: tcgguaagtt
  modified_base 1..2: mod_base = OTHER; note = bicyclic nucleic acid (BNA)
  modified_base 9..10: mod_base = OTHER; note = bicyclic nucleic acid (BNA)
  modified_base 2: mod_base = OTHER; note = 5-methyl
  source 1..10: mol_type = other DNA
  modified_base 5: mod_base = OTHER; note = Uracil
tcggtaagtt

SEQ ID NO: 5852 - skipped

SEQ ID NO: 5853 - DNA, 20 bp, synthetic construct
  misc_feature 1..20: note = Description of Artificial Sequence: Synthetic Antisense oligonucleotide
  misc_feature 1..20: note = Original Sequence: gtcgguaaguucuguccaag
  modified_base 1..2: mod_base = OTHER; note = bicyclic nucleic acid (BNA)
  modified_base 19..20: mod_base = OTHER; note = bicyclic nucleic acid (BNA)
  modified_base 3: mod_base = OTHER; note = 5-methyl
  modified_base 12: mod_base = OTHER; note = 5-methyl
  modified_base 16..17: mod_base = OTHER; note = 5-methyl
  source 1..20: mol_type = other DNA
  modified_base 6: mod_base = OTHER; note = Uracil
  modified_base 10: mod_base = OTHER; note = Uracil
  modified_base 11: mod_base = OTHER; note = Uracil
  modified_base 13: mod_base = OTHER; note = Uracil
  modified_base 15: mod_base = OTHER; note = Uracil
gtcggtaagttctgtccaag

SEQ ID NO: 5854 - DNA, 19 bp, synthetic construct
  misc_feature 1..19: note = Description of Artificial Sequence: Synthetic Antisense oligonucleotide
  misc_feature 1..19: note = Original Sequence: gtcgguaaguucuguccaa
  modified_base 1..2: mod_base = OTHER; note = bicyclic nucleic acid (BNA)
  modified_base 18..19: mod_base = OTHER; note = bicyclic nucleic acid (BNA)
  modified_base 3: mod_base = OTHER; note = 5-methyl
  modified_base 12: mod_base = OTHER; note = 5-methyl
  modified_base 16..17: mod_base = OTHER; note = 5-methyl
  source 1..19: mol_type = other DNA
  modified_base 6: mod_base = OTHER; note = Uracil
  modified_base 10: mod_base = OTHER; note = Uracil
  modified_base 11: mod_base = OTHER; note = Uracil
  modified_base 13: mod_base = OTHER; note = Uracil
  modified_base 15: mod_base = OTHER; note = Uracil
gtcggtaagttctgtccaa

SEQ ID NO: 5855 - DNA, 18 bp, synthetic construct
  misc_feature 1..18: note = Description of Artificial Sequence: Synthetic Antisense oligonucleotide
  misc_feature 1..18: note = Original Sequence: gtcgguaaguucugucca
  modified_base 1..2: mod_base = OTHER; note = bicyclic nucleic acid (BNA)
  modified_base 17..18: mod_base = OTHER; note = bicyclic nucleic acid (BNA)
  modified_base 3: mod_base = OTHER; note = 5-methyl
  modified_base 12: mod_base = OTHER; note = 5-methyl
  modified_base 16..17: mod_base = OTHER; note = 5-methyl
  source 1..18: mol_type = other DNA
  modified_base 6: mod_base = OTHER; note = Uracil
  modified_base 10: mod_base = OTHER; note = Uracil
  modified_base 11: mod_base = OTHER; note = Uracil
  modified_base 13: mod_base = OTHER; note = Uracil
  modified_base 15: mod_base = OTHER; note = Uracil
gtcggtaagttctgtcca

SEQ ID NO: 5856 - DNA, 17 bp, synthetic construct
  misc_feature 1..17: note = Description of Artificial Sequence: Synthetic Antisense oligonucleotide
  misc_feature 1..17: note = Original Sequence: gtcgguaaguucugucc
  modified_base 1..2: mod_base = OTHER; note = bicyclic nucleic acid (BNA)
  modified_base 16..17: mod_base = OTHER; note = bicyclic nucleic acid (BNA)
  modified_base 3: mod_base = OTHER; note = 5-methyl
  modified_base 12: mod_base = OTHER; note = 5-methyl
  modified_base 16..17: mod_base = OTHER; note = 5-methyl
  source 1..17: mol_type = other DNA
  modified_base 6: mod_base = OTHER; note = Uracil
  modified_base 10: mod_base = OTHER; note = Uracil
  modified_base 11: mod_base = OTHER; note = Uracil
  modified_base 13: mod_base = OTHER; note = Uracil
  modified_base 15: mod_base = OTHER; note = Uracil
gtcggtaagttctgtcc

SEQ ID NO: 5857 - DNA, 16 bp, synthetic construct
  misc_feature 1..16: note = Description of Artificial Sequence: Synthetic Antisense oligonucleotide
  misc_feature 1..16: note = Original Sequence: gtcgguaaguucugtc
  modified_base 1..2: mod_base = OTHER; note = bicyclic nucleic acid (BNA)
  modified_base 15..16: mod_base = OTHER; note = bicyclic nucleic acid (BNA)
  modified_base 3: mod_base = OTHER; note = 5-methyl
  modified_base 12: mod_base = OTHER; note = 5-methyl
  modified_base 16: mod_base = OTHER; note = 5-methyl
  source 1..16: mol_type = other DNA
  modified_base 6: mod_base = OTHER; note = Uracil
  modified_base 10: mod_base = OTHER; note = Uracil
  modified_base 11: mod_base = OTHER; note = Uracil
  modified_base 13: mod_base = OTHER; note = Uracil
gtcggtaagttctgtc

SEQ ID NO: 5858 - DNA, 15 bp, synthetic construct
  misc_feature 1..15: note = Description of Artificial Sequence: Synthetic Antisense oligonucleotide
  misc_feature 1..15: note = Original Sequence: gtcgguaaguucugt
  modified_base 1..2: mod_base = OTHER; note = bicyclic nucleic acid (BNA)
  modified_base 14..15: mod_base = OTHER; note = bicyclic nucleic acid (BNA)
  modified_base 3: mod_base = OTHER; note = 5-methyl
  modified_base 12: mod_base = OTHER; note = 5-methyl
  source 1..15: mol_type = other DNA
  modified_base 6: mod_base = OTHER; note = Uracil
  modified_base 10: mod_base = OTHER; note = Uracil
  modified_base 11: mod_base = OTHER; note = Uracil
  modified_base 13: mod_base = OTHER; note = Uracil
gtcggtaagttctgt

SEQ ID NO: 5859 - DNA, 14 bp, synthetic construct
  misc_feature 1..14: note = Description of Artificial Sequence: Synthetic Antisense oligonucleotide
  misc_feature 1..14: note = Original Sequence: gtcgguaaguuctg
  modified_base 1..2: mod_base = OTHER; note = bicyclic nucleic acid (BNA)
  modified_base 13..14: mod_base = OTHER; note = bicyclic nucleic acid (BNA)
  modified_base 3: mod_base = OTHER; note = 5-methyl
  modified_base 12: mod_base = OTHER; note = 5-methyl
  source 1..14: mol_type = other DNA
  modified_base 6: mod_base = OTHER; note = Uracil
  modified_base 10: mod_base = OTHER; note = Uracil
  modified_base 11: mod_base = OTHER; note = Uracil
gtcggtaagttctg

SEQ ID NO: 5860 - DNA, 13 bp, synthetic construct
  misc_feature 1..13: note = Description of Artificial Sequence: Synthetic Antisense oligonucleotide
  misc_feature 1..13: note = Original Sequence: gtcgguaaguuct
  modified_base 1..2: mod_base = OTHER; note = bicyclic nucleic acid (BNA)
  modified_base 12..13: mod_base = OTHER; note = bicyclic nucleic acid (BNA)
  modified_base 3: mod_base = OTHER; note = 5-methyl
  modified_base 12: mod_base = OTHER; note = 5-methyl
  source 1..13: mol_type = other DNA
  modified_base 6: mod_base = OTHER; note = Uracil
  modified_base 10: mod_base = OTHER; note = Uracil
  modified_base 11: mod_base = OTHER; note = Uracil
gtcggtaagttct

SEQ ID NO: 5861 - DNA, 12 bp, synthetic construct
  misc_feature 1..12: note = Description of Artificial Sequence: Synthetic Antisense oligonucleotide
  misc_feature 1..12: note = Original Sequence: gtcgguaagutc
  modified_base 1..2: mod_base = OTHER; note = bicyclic nucleic acid (BNA)
  modified_base 11..12: mod_base = OTHER; note = bicyclic nucleic acid (BNA)
  modified_base 3: mod_base = OTHER; note = 5-methyl
  modified_base 12: mod_base = OTHER; note = 5-methyl
  source 1..12: mol_type = other DNA
  modified_base 6: mod_base = OTHER; note = Uracil
  modified_base 10: mod_base = OTHER; note = Uracil
gtcggtaagttc

SEQ ID NO: 5862 - DNA, 11 bp, synthetic construct
  misc_feature 1..11: note = Description of Artificial Sequence: Synthetic Antisense oligonucleotide
  misc_feature 1..11: note = Original Sequence: gtcgguaagtt
  modified_base 1..2: mod_base = OTHER; note = bicyclic nucleic acid (BNA)
  modified_base 10..11: mod_base = OTHER; note = bicyclic nucleic acid (BNA)
  modified_base 3: mod_base = OTHER; note = 5-methyl
  source 1..11: mol_type = other DNA
  modified_base 6: mod_base = OTHER; note = Uracil
gtcggtaagtt

SEQ ID NO: 5863 - DNA, 10 bp, synthetic construct
  misc_feature 1..10: note = Description of Artificial Sequence: Synthetic Antisense oligonucleotide
  misc_feature 1..10: note = Original Sequence: gtcgguaagt
  modified_base 1..2: mod_base = OTHER; note = bicyclic nucleic acid (BNA)
  modified_base 9..10: mod_base = OTHER; note = bicyclic nucleic acid (BNA)
  modified_base 3: mod_base = OTHER; note = 5-methyl
  source 1..10: mol_type = other DNA
  modified_base 6: mod_base = OTHER; note = Uracil
gtcggtaagt

SEQ ID NO: 5864 - RNA, 20 nt, synthetic construct
  misc_feature 1..20: note = Description of Artificial Sequence: Synthetic Antisense oligonucleotide
  modified_base 1..2: mod_base = OTHER; note = bicyclic nucleic acid (BNA)
  modified_base 19..20: mod_base = OTHER; note = bicyclic nucleic acid (BNA)
  modified_base 4: mod_base = OTHER; note = 5-methyl
  modified_base 13: mod_base = OTHER; note = 5-methyl
  modified_base 17..18: mod_base = OTHER; note = 5-methyl
  source 1..20: mol_type = other RNA
agtcggtaagttctgtccaa

SEQ ID NO: 5865 - RNA, 19 nt, synthetic construct
  misc_feature 1..19: note = Description of Artificial Sequence: Synthetic Antisense oligonucleotide
  modified_base 1..2: mod_base = OTHER; note = bicyclic nucleic acid (BNA)
  modified_base 18..19: mod_base = OTHER; note = bicyclic nucleic acid (BNA)
  modified_base 4: mod_base = OTHER; note = 5-methyl
  modified_base 13: mod_base = OTHER; note = 5-methyl
  modified_base 17..18: mod_base = OTHER; note = 5-methyl
  source 1..19: mol_type = other RNA
agtcggtaagttctgtcca

SEQ ID NO: 5866 - DNA, 17 bp, synthetic construct
  misc_feature 1..17: note = Description of Artificial Sequence: Synthetic Antisense oligonucleotide
  misc_feature 1..17: note = Original Sequence: agucgguaaguucugtc
  modified_base 1..2: mod_base = OTHER; note = bicyclic nucleic acid (BNA)
  modified_base 16..17: mod_base = OTHER; note = bicyclic nucleic acid (BNA)
  modified_base 4: mod_base = OTHER; note = 5-methyl
  modified_base 13: mod_base = OTHER; note = 5-methyl
  modified_base 17: mod_base = OTHER; note = 5-methyl
  source 1..17: mol_type = other DNA
  modified_base 3: mod_base = OTHER; note = Uracil
  modified_base 7: mod_base = OTHER; note = Uracil
  modified_base 11: mod_base = OTHER; note = Uracil
  modified_base 12: mod_base = OTHER; note = Uracil
  modified_base 14: mod_base = OTHER; note = Uracil
agtcggtaagttctgtc

SEQ ID NO: 5867 - DNA, 16 bp, synthetic construct
  misc_feature 1..16: note = Description of Artificial Sequence: Synthetic Antisense oligonucleotide
  misc_feature 1..16: note = Original Sequence: agucgguaaguucugt
  modified_base 1..2: mod_base = OTHER; note = bicyclic nucleic acid (BNA)
  modified_base 15..16: mod_base = OTHER; note = bicyclic nucleic acid (BNA)
  modified_base 4: mod_base = OTHER; note = 5-methyl
  modified_base 13: mod_base = OTHER; note = 5-methyl
  source 1..16: mol_type = other DNA
  modified_base 3: mod_base = OTHER; note = Uracil
  modified_base 7: mod_base = OTHER; note = Uracil
  modified_base 11: mod_base = OTHER; note = Uracil
  modified_base 12: mod_base = OTHER; note = Uracil
  modified_base 14: mod_base = OTHER; note = Uracil
agtcggtaagttctgt

SEQ ID NO: 5868 - DNA, 15 bp, synthetic construct
  misc_feature 1..15: note = Description of Artificial Sequence: Synthetic Antisense oligonucleotide
  misc_feature 1..15: note = Original Sequence: agucgguaaguuctg
  modified_base 1..2: mod_base = OTHER; note = bicyclic nucleic acid (BNA)
  modified_base 14..15: mod_base = OTHER; note = bicyclic nucleic acid (BNA)
  modified_base 4: mod_base = OTHER; note = 5-methyl
  modified_base 13: mod_base = OTHER; note = 5-methyl
  source 1..15: mol_type = other DNA
  modified_base 3: mod_base = OTHER; note = Uracil
  modified_base 7: mod_base = OTHER; note = Uracil
  modified_base 11: mod_base = OTHER; note = Uracil
  modified_base 12: mod_base = OTHER; note = Uracil
agtcggtaagttctg

SEQ ID NO: 5869 - DNA, 14 bp, synthetic construct
  misc_feature 1..14: note = Description of Artificial Sequence: Synthetic Antisense oligonucleotide
  misc_feature 1..14: note = Original Sequence: agucgguaaguuct
  modified_base 1..2: mod_base = OTHER; note = bicyclic nucleic acid (BNA)
  modified_base 13..14: mod_base = OTHER; note = bicyclic nucleic acid (BNA)
  modified_base 4: mod_base = OTHER; note = 5-methyl
  modified_base 13: mod_base = OTHER; note = 5-methyl
  source 1..14: mol_type = other DNA
  modified_base 3: mod_base = OTHER; note = Uracil
  modified_base 7: mod_base = OTHER; note = Uracil
  modified_base 11: mod_base = OTHER; note = Uracil
  modified_base 12: mod_base = OTHER; note = Uracil
agtcggtaagttct

SEQ ID NO: 5870 - DNA, 13 bp, synthetic construct
  misc_feature 1..13: note = Description of Artificial Sequence: Synthetic Antisense oligonucleotide
  misc_feature 1..13: note = Original Sequence: agucgguaagutc
  modified_base 1..2: mod_base = OTHER; note = bicyclic nucleic acid (BNA)
  modified_base 12..13: mod_base = OTHER; note = bicyclic nucleic acid (BNA)
  modified_base 4: mod_base = OTHER; note = 5-methyl
  modified_base 13: mod_base = OTHER; note = 5-methyl
  source 1..13: mol_type = other DNA
  modified_base 3: mod_base = OTHER; note = Uracil
  modified_base 7: mod_base = OTHER; note = Uracil
  modified_base 11: mod_base = OTHER; note = Uracil
agtcggtaagttc

SEQ ID NO: 5871 - DNA, 12 bp, synthetic construct
  misc_feature 1..12: note = Description of Artificial Sequence: Synthetic Antisense oligonucleotide
  misc_feature 1..12: note = Original Sequence: agucgguaagtt
  modified_base 1..2: mod_base = OTHER; note = bicyclic nucleic acid (BNA)
  modified_base 11..12: mod_base = OTHER; note = bicyclic nucleic acid (BNA)
  modified_base 4: mod_base = OTHER; note = 5-methyl
  source 1..12: mol_type = other DNA
  modified_base 3: mod_base = OTHER; note = Uracil
  modified_base 7: mod_base = OTHER; note = Uracil
agtcggtaagtt

SEQ ID NO: 5872 - DNA, 11 bp, synthetic construct
  misc_feature 1..11: note = Description of Artificial Sequence: Synthetic Antisense oligonucleotide
  misc_feature 1..11: note = Original Sequence: agucgguaagt
  modified_base 1..2: mod_base = OTHER; note = bicyclic nucleic acid (BNA)
  modified_base 10..11: mod_base = OTHER; note = bicyclic nucleic acid (BNA)
  modified_base 4: mod_base = OTHER; note = 5-methyl
  source 1..11: mol_type = other DNA
  modified_base 3: mod_base = OTHER; note = Uracil
  modified_base 7: mod_base = OTHER; note = Uracil
agtcggtaagt

SEQ ID NO: 5873 - RNA, 20 nt, synthetic construct
  misc_feature 1..20: note = Description of Artificial Sequence: Synthetic Antisense oligonucleotide
  modified_base 1: mod_base = OTHER; note = 5-methyl
  modified_base 5: mod_base = OTHER; note = 5-methyl
  modified_base 14: mod_base = OTHER; note = 5-methyl
  modified_base 18..19: mod_base = OTHER; note = 5-methyl
  modified_base 1..2: mod_base = OTHER; note = bicyclic nucleic acid (BNA)
  modified_base 19..20: mod_base = OTHER; note = bicyclic nucleic acid (BNA)
  source 1..20: mol_type = other RNA
cagtcggtaagttctgtcca

SEQ ID NO: 5874 - RNA, 19 nt, synthetic construct
  misc_feature 1..19: note = Description of Artificial Sequence: Synthetic Antisense oligonucleotide
  modified_base 1: mod_base = OTHER; note = 5-methyl
  modified_base 5: mod_base = OTHER; note = 5-methyl
  modified_base 14: mod_base = OTHER; note = 5-methyl
  modified_base 18..19: mod_base = OTHER; note = 5-methyl
  modified_base 1..2: mod_base = OTHER; note = bicyclic nucleic acid (BNA)
  modified_base 18..19: mod_base = OTHER; note = bicyclic nucleic acid (BNA)
  source 1..19: mol_type = other RNA
cagtcggtaagttctgtcc

SEQ ID NO: 5875 - DNA, 18 bp, synthetic construct
  misc_feature 1..18: note = Description of Artificial Sequence: Synthetic Antisense oligonucleotide
  misc_feature 1..18: note = Original Sequence: cagucgguaaguucugtc
  modified_base 1: mod_base = OTHER; note = 5-methyl
  modified_base 5: mod_base = OTHER; note = 5-methyl
  modified_base 14: mod_base = OTHER; note = 5-methyl
  modified_base 18: mod_base = OTHER; note = 5-methyl
  modified_base 1..2: mod_base = OTHER; note = bicyclic nucleic acid (BNA)
  modified_base 17..18: mod_base = OTHER; note = bicyclic nucleic acid (BNA)
  source 1..18: mol_type = other DNA
  modified_base 4: mod_base = OTHER; note = Uracil
  modified_base 8: mod_base = OTHER; note = Uracil
  modified_base 12: mod_base = OTHER; note = Uracil
  modified_base 13: mod_base = OTHER; note = Uracil
  modified_base 15: mod_base = OTHER; note = Uracil
cagtcggtaagttctgtc

SEQ ID NO: 5876 - DNA, 17 bp, synthetic construct
  misc_feature 1..17: note = Description of Artificial Sequence: Synthetic Antisense oligonucleotide
  misc_feature 1..17: note = Original Sequence: cagucgguaaguucugt
  modified_base 1: mod_base = OTHER; note = 5-methyl
  modified_base 5: mod_base = OTHER; note = 5-methyl
  modified_base 14: mod_base = OTHER; note = 5-methyl
  modified_base 1..2: mod_base = OTHER; note = bicyclic nucleic acid (BNA)
  modified_base 16..17: mod_base = OTHER; note = bicyclic nucleic acid (BNA)
  source 1..17: mol_type = other DNA
  modified_base 4: mod_base = OTHER; note = Uracil
  modified_base 8: mod_base = OTHER; note = Uracil
  modified_base 12: mod_base = OTHER; note = Uracil
  modified_base 13: mod_base = OTHER; note = Uracil
  modified_base 15: mod_base = OTHER; note = Uracil
cagtcggtaagttctgt

SEQ ID NO: 5877 - DNA, 16 bp, synthetic construct
  misc_feature 1..16: note = Description of Artificial Sequence: Synthetic Antisense oligonucleotide
  misc_feature 1..16: note = Original Sequence: cagucgguaaguuctg
  modified_base 1: mod_base = OTHER; note = 5-methyl
  modified_base 5: mod_base = OTHER; note = 5-methyl
  modified_base 14: mod_base = OTHER; note = 5-methyl
  modified_base 1..2: mod_base = OTHER; note = bicyclic nucleic acid (BNA)
  modified_base 15..16: mod_base = OTHER; note = bicyclic nucleic acid (BNA)
  source 1..16: mol_type = other DNA
  modified_base 4: mod_base = OTHER; note = Uracil
  modified_base 8: mod_base = OTHER; note = Uracil
  modified_base 12: mod_base = OTHER; note = Uracil
  modified_base 13: mod_base = OTHER; note = Uracil
cagtcggtaagttctg

SEQ ID NO: 5878 - DNA, 15 bp, synthetic construct
  misc_feature 1..15: note = Description of Artificial Sequence: Synthetic Antisense oligonucleotide
  misc_feature 1..15: note = Original Sequence: cagucgguaaguuct
  modified_base 1: mod_base = OTHER; note = 5-methyl
  modified_base 5: mod_base = OTHER; note = 5-methyl
  modified_base 14: mod_base = OTHER; note = 5-methyl
  modified_base 1..2: mod_base = OTHER; note = bicyclic nucleic acid (BNA)
  modified_base 14..15: mod_base = OTHER; note = bicyclic nucleic acid (BNA)
  source 1..15: mol_type = other DNA
  modified_base 4: mod_base = OTHER; note = Uracil
  modified_base 8: mod_base = OTHER; note = Uracil
  modified_base 12: mod_base = OTHER; note = Uracil
  modified_base 13: mod_base = OTHER; note = Uracil
cagtcggtaagttct

SEQ ID NO: 5879 - DNA, 14 bp, synthetic construct
  misc_feature 1..14: note = Description of Artificial Sequence: Synthetic Antisense oligonucleotide
  misc_feature 1..14: note = Original Sequence: cagucgguaagutc
  modified_base 1: mod_base = OTHER; note = 5-methyl
  modified_base 5: mod_base = OTHER; note = 5-methyl
  modified_base 14: mod_base = OTHER; note = 5-methyl
  modified_base 1..2: mod_base = OTHER; note = bicyclic nucleic acid (BNA)
  modified_base 13..14: mod_base = OTHER; note = bicyclic nucleic acid (BNA)
  source 1..14: mol_type = other DNA
  modified_base 4: mod_base = OTHER; note = Uracil
  modified_base 8: mod_base = OTHER; note = Uracil
  modified_base 12: mod_base = OTHER; note = Uracil
cagtcggtaagttc

SEQ ID NO: 5880 - DNA, 13 bp, synthetic construct
  misc_feature 1..13: note = Description of Artificial Sequence: Synthetic Antisense oligonucleotide
  misc_feature 1..13: note = Original Sequence: cagucgguaagtt
  modified_base 1: mod_base = OTHER; note = 5-methyl
  modified_base 5: mod_base = OTHER; note = 5-methyl
  modified_base 1..2: mod_base = OTHER; note = bicyclic nucleic acid (BNA)
  modified_base 12..13: mod_base = OTHER; note = bicyclic nucleic acid (BNA)
  source 1..13: mol_type = other DNA
  modified_base 4: mod_base = OTHER; note = Uracil
  modified_base 8: mod_base = OTHER; note = Uracil
cagtcggtaagtt

SEQ ID NO: 5881 - DNA, 12 bp, synthetic construct
  misc_feature 1..12: note = Description of Artificial Sequence: Synthetic Antisense oligonucleotide
  misc_feature 1..12: note = Original Sequence: cagucgguaagt
  modified_base 1: mod_base = OTHER; note = 5-methyl
  modified_base 5: mod_base = OTHER; note = 5-methyl
  modified_base 1..2: mod_base = OTHER; note = bicyclic nucleic acid (BNA)
  modified_base 11..12: mod_base = OTHER; note = bicyclic nucleic acid (BNA)
  source 1..12: mol_type = other DNA
  modified_base 4: mod_base = OTHER; note = Uracil
  modified_base 8: mod_base = OTHER; note = Uracil
cagtcggtaagt

SEQ ID NO: 5882 - RNA, 20 nt, synthetic construct
  misc_feature 1..20: note = Description of Artificial Sequence: Synthetic Antisense oligonucleotide
  modified_base 1..2: mod_base = OTHER; note = 5-methyl
  modified_base 6: mod_base = OTHER; note = 5-methyl
  modified_base 15: mod_base = OTHER; note = 5-methyl
  modified_base 19..20: mod_base = OTHER; note = 5-methyl
  modified_base 1..2: mod_base = OTHER; note = bicyclic nucleic acid (BNA)
  modified_base 19..20: mod_base = OTHER; note = bicyclic nucleic acid (BNA)
  source 1..20: mol_type = other RNA
ccagtcggtaagttctgtcc

SEQ ID NO: 5883 - DNA, 19 bp, synthetic construct
  misc_feature 1..19: note = Description of Artificial Sequence: Synthetic Antisense oligonucleotide
  misc_feature 1..19: note = Original Sequence: ccagucgguaaguucugtc
  modified_base 1..2: mod_base = OTHER; note = 5-methyl
  modified_base 6: mod_base = OTHER; note = 5-methyl
  modified_base 15: mod_base = OTHER; note = 5-methyl
  modified_base 19: mod_base = OTHER; note = 5-methyl
  modified_base 1..2: mod_base = OTHER; note = bicyclic nucleic acid (BNA)
  modified_base 18..19: mod_base = OTHER; note = bicyclic nucleic acid (BNA)
  source 1..19: mol_type = other DNA
  modified_base 5: mod_base = OTHER; note = Uracil
  modified_base 9: mod_base = OTHER; note = Uracil
  modified_base 13: mod_base = OTHER; note = Uracil
  modified_base 14: mod_base = OTHER; note = Uracil
  modified_base 16: mod_base = OTHER; note = Uracil
ccagtcggtaagttctgtc

SEQ ID NO: 5884 - DNA, 18 bp, synthetic construct
  misc_feature 1..18: note = Description of Artificial Sequence: Synthetic Antisense oligonucleotide
  misc_feature 1..18: note = Original Sequence: ccagucgguaaguucugt
  modified_base 1..2: mod_base = OTHER; note = 5-methyl
  modified_base 6: mod_base = OTHER; note = 5-methyl
  modified_base 15: mod_base = OTHER; note = 5-methyl
  modified_base 1..2: mod_base = OTHER; note = bicyclic nucleic acid (BNA)
  modified_base 17..18: mod_base = OTHER; note = bicyclic nucleic acid (BNA)
  source 1..18: mol_type = other DNA
  modified_base 5: mod_base = OTHER; note = Uracil
  modified_base 9: mod_base = OTHER; note = Uracil
  modified_base 13: mod_base = OTHER; note = Uracil
  modified_base 14: mod_base = OTHER; note = Uracil
  modified_base 16: mod_base = OTHER; note = Uracil
ccagtcggtaagttctgt

SEQ ID NO: 5885 - DNA, 17 bp, synthetic construct
  misc_feature 1..17: note = Description of Artificial Sequence: Synthetic Antisense oligonucleotide
  misc_feature 1..17: note = Original Sequence: ccagucgguaaguuctg
  modified_base 1..2: mod_base = OTHER; note = 5-methyl
  modified_base 6: mod_base = OTHER; note = 5-methyl
  modified_base 15: mod_base = OTHER; note = 5-methyl
  modified_base 1..2: mod_base = OTHER; note = bicyclic nucleic acid (BNA)
  modified_base 16..17: mod_base = OTHER; note = bicyclic nucleic acid (BNA)
  source 1..17: mol_type = other DNA
  modified_base 5: mod_base = OTHER; note = Uracil
  modified_base 9: mod_base = OTHER; note = Uracil
  modified_base 13: mod_base = OTHER; note = Uracil
  modified_base 14: mod_base = OTHER; note = Uracil
ccagtcggtaagttctg

SEQ ID NO: 5886 - DNA, 16 bp, synthetic construct
  misc_feature 1..16: note = Description of Artificial Sequence: Synthetic Antisense oligonucleotide
  misc_feature 1..16: note = Original Sequence: ccagucgguaaguuct
  modified_base 1..2: mod_base = OTHER; note = 5-methyl
  modified_base 6: mod_base = OTHER; note = 5-methyl
  modified_base 15: mod_base = OTHER; note = 5-methyl
  modified_base 1..2: mod_base = OTHER; note = bicyclic nucleic acid (BNA)
  modified_base 15..16: mod_base = OTHER; note = bicyclic nucleic acid (BNA)
  source 1..16: mol_type = other DNA
  modified_base 5: mod_base = OTHER; note = Uracil
  modified_base 9: mod_base = OTHER; note = Uracil
  modified_base 13: mod_base = OTHER; note = Uracil
  modified_base 14: mod_base = OTHER; note = Uracil
ccagtcggtaagttct

SEQ ID NO: 5887 - DNA, 15 bp, synthetic construct
  misc_feature 1..15: note = Description of Artificial Sequence: Synthetic Antisense oligonucleotide
  misc_feature 1..15: note = Original Sequence: ccagucgguaagutc
  modified_base 1..2: mod_base = OTHER; note = 5-methyl
  modified_base 6: mod_base = OTHER; note = 5-methyl
  modified_base 15: mod_base = OTHER; note = 5-methyl
  modified_base 1..2: mod_base = OTHER; note = bicyclic nucleic acid (BNA)
  modified_base 14..15: mod_base = OTHER; note = bicyclic nucleic acid (BNA)
  source 1..15: mol_type = other DNA
  modified_base 5: mod_base = OTHER; note = Uracil
  modified_base 9: mod_base = OTHER; note = Uracil
  modified_base 13: mod_base = OTHER; note = Uracil
ccagtcggtaagttc

SEQ ID NO: 5888 - DNA, 14 bp, synthetic construct
  misc_feature 1..14: note = Description of Artificial Sequence: Synthetic Antisense oligonucleotide
  misc_feature 1..14: note = Original Sequence: ccagucgguaagtt
  modified_base 1..2: mod_base = OTHER; note = 5-methyl
  modified_base 6: mod_base = OTHER; note = 5-methyl
  modified_base 1..2: mod_base = OTHER; note = bicyclic nucleic acid (BNA)
  modified_base 13..14: mod_base = OTHER; note = bicyclic nucleic acid (BNA)
  source 1..14: mol_type = other DNA
  modified_base 5: mod_base = OTHER; note = Uracil
  modified_base 9: mod_base = OTHER; note = Uracil
ccagtcggtaagtt

SEQ ID NO: 5889 - DNA, 13 bp, synthetic construct
  misc_feature 1..13: note = Description of Artificial Sequence: Synthetic Antisense oligonucleotide
  misc_feature 1..13: note = Original Sequence: ccagucgguaagt
  modified_base 1..2: mod_base = OTHER; note = 5-methyl
  modified_base 6: mod_base = OTHER; note = 5-methyl
  modified_base 1..2: mod_base = OTHER; note = bicyclic nucleic acid (BNA)
  modified_base 12..13: mod_base = OTHER; note = bicyclic nucleic acid (BNA)
  source 1..13: mol_type = other DNA
  modified_base 5: mod_base = OTHER; note = Uracil
  modified_base 9: mod_base = OTHER; note = Uracil
ccagtcggtaagt

SEQ ID NO: 5890 - DNA, 20 bp, synthetic construct
  misc_feature 1..20: note = Description of Artificial Sequence: Synthetic Antisense oligonucleotide
  misc_feature 1..20: note = Original Sequence: gccagucgguaaguucugtc
  modified_base 1..2: mod_base = OTHER; note = bicyclic nucleic acid (BNA)
  modified_base 19..20: mod_base = OTHER; note = bicyclic nucleic acid (BNA)
  modified_base 2..3: mod_base = OTHER; note = 5-methyl
  modified_base 7: mod_base = OTHER; note = 5-methyl
  modified_base 16: mod_base = OTHER; note = 5-methyl
  modified_base 20: mod_base = OTHER; note = 5-methyl
  source 1..20: mol_type = other DNA
  modified_base 6: mod_base = OTHER; note = Uracil
  modified_base 10: mod_base = OTHER; note = Uracil
  modified_base 14: mod_base = OTHER; note = Uracil
  modified_base 15: mod_base = OTHER; note = Uracil
  modified_base 17: mod_base = OTHER; note = Uracil
gccagtcggtaagttctgtc

SEQ ID NO: 5891 - DNA, 19 bp, synthetic construct
  misc_feature 1..19: note = Description of Artificial Sequence: Synthetic Antisense oligonucleotide
  misc_feature 1..19: note = Original Sequence: gccagucgguaaguucugt
  modified_base 1..2: mod_base = OTHER; note = bicyclic nucleic acid (BNA)
  modified_base 18..19: mod_base = OTHER; note = bicyclic nucleic acid (BNA)
  modified_base 2..3: mod_base = OTHER; note = 5-methyl
  modified_base 7: mod_base = OTHER; note = 5-methyl
  modified_base 16: mod_base = OTHER; note = 5-methyl
  source 1..19: mol_type = other DNA
  modified_base 6: mod_base = OTHER; note = Uracil
  modified_base 10: mod_base = OTHER; note = Uracil
  modified_base 14: mod_base = OTHER; note = Uracil
  modified_base 15: mod_base = OTHER; note = Uracil
  modified_base 17: mod_base = OTHER; note = Uracil
gccagtcggtaagttctgt

SEQ ID NO: 5892 - DNA, 18 bp, synthetic construct
  misc_feature 1..18: note = Description of Artificial Sequence: Synthetic Antisense oligonucleotide
  misc_feature 1..18: note = Original Sequence: gccagucgguaaguuctg
  modified_base 1..2: mod_base = OTHER; note = bicyclic nucleic acid (BNA)
  modified_base 17..18: mod_base = OTHER; note = bicyclic nucleic acid (BNA)
  modified_base 2..3: mod_base = OTHER; note = 5-methyl
  modified_base 7: mod_base = OTHER; note = 5-methyl
  modified_base 16: mod_base = OTHER; note = 5-methyl
  source 1..18: mol_type = other DNA
  modified_base 6: mod_base = OTHER; note = Uracil
  modified_base 10: mod_base = OTHER; note = Uracil
  modified_base 14: mod_base = OTHER; note = Uracil
  modified_base 15: mod_base = OTHER; note = Uracil
gccagtcggtaagttctg

SEQ ID NO: 5893 - DNA, 17 bp, synthetic construct
  misc_feature 1..17: note = Description of Artificial Sequence: Synthetic Antisense oligonucleotide
  misc_feature 1..17: note = Original Sequence: gccagucgguaaguuct
  modified_base 1..2: mod_base = OTHER; note = bicyclic nucleic acid (BNA)
  modified_base 16..17: mod_base = OTHER; note = bicyclic nucleic acid (BNA)
  modified_base 2..3: mod_base = OTHER; note = 5-methyl
  modified_base 7: mod_base = OTHER; note = 5-methyl
  modified_base 16: mod_base = OTHER; note = 5-methyl
  source 1..17: mol_type = other DNA
  modified_base 6: mod_base = OTHER; note = Uracil
  modified_base 10: mod_base = OTHER; note = Uracil
  modified_base 14: mod_base = OTHER; note = Uracil
  modified_base 15: mod_base = OTHER; note = Uracil
gccagtcggtaagttct

SEQ ID NO: 5894 - DNA, 16 bp, synthetic construct
  misc_feature 1..16: note = Description of Artificial Sequence: Synthetic Antisense oligonucleotide
  misc_feature 1..16: note = Original Sequence: gccagucgguaagutc
  modified_base 1..2: mod_base = OTHER; note = bicyclic nucleic acid (BNA)
  modified_base 15..16: mod_base = OTHER; note = bicyclic nucleic acid (BNA)
  modified_base 2..3: mod_base = OTHER; note = 5-methyl
  modified_base 7: mod_base = OTHER; note = 5-methyl
  modified_base 16: mod_base = OTHER; note = 5-methyl
  source 1..16: mol_type = other DNA
  modified_base 6: mod_base = OTHER; note = Uracil
  modified_base 10: mod_base = OTHER; note = Uracil
  modified_base 14: mod_base = OTHER; note = Uracil
gccagtcggtaagttc

SEQ ID NO: 5895 - DNA, 15 bp, synthetic construct
  misc_feature 1..15: note = Description of Artificial Sequence: Synthetic Antisense oligonucleotide
  misc_feature 1..15: note = Original Sequence: gccagucgguaagtt
  modified_base 1..2: mod_base = OTHER; note = bicyclic nucleic acid (BNA)
  modified_base 14..15: mod_base = OTHER; note = bicyclic nucleic acid (BNA)
  modified_base 2..3: mod_base = OTHER; note = 5-methyl
  modified_base 7: mod_base = OTHER; note = 5-methyl
  source 1..15: mol_type = other DNA
  modified_base 6: mod_base = OTHER; note = Uracil
  modified_base 10: mod_base = OTHER; note = Uracil
gccagtcggtaagtt

SEQ ID NO: 5896 - DNA, 14 bp, synthetic construct
  misc_feature 1..14: note = Description of Artificial Sequence: Synthetic Antisense oligonucleotide
  misc_feature 1..14: note = Original Sequence: gccagucgguaagt
  modified_base 1..2: mod_base = OTHER; note = bicyclic nucleic acid (BNA)
  modified_base 13..14: mod_base = OTHER; note = bicyclic nucleic acid (BNA)
  modified_base 2..3: mod_base = OTHER; note = 5-methyl
  modified_base 7: mod_base = OTHER; note = 5-methyl
  source 1..14: mol_type = other DNA
  modified_base 6: mod_base = OTHER; note = Uracil
  modified_base 10: mod_base = OTHER; note = Uracil
gccagtcggtaagt

SEQ ID NO: 5897 - DNA, 20 bp, synthetic construct
  misc_feature 1..20: note = Description of Artificial Sequence: Synthetic Antisense oligonucleotide
  misc_feature 1..20: note = Original Sequence: tcaaggaagauggcauuuct
  modified_base 1..2: mod_base = OTHER; note = bicyclic nucleic acid (BNA)
  modified_base 19..20: mod_base = OTHER; note = bicyclic nucleic acid (BNA)
  modified_base 2: mod_base = OTHER; note = 5-methyl
  modified_base 14: mod_base = OTHER; note = 5-methyl
  modified_base 19: mod_base = OTHER; note = 5-methyl
  source 1..20: mol_type = other DNA
  modified_base 11: mod_base = OTHER; note = Uracil
  modified_base 16: mod_base = OTHER; note = Uracil
  modified_base 17: mod_base = OTHER; note = Uracil
  modified_base 18: mod_base = OTHER; note = Uracil
tcaaggaagatggcatttct

SEQ ID NO: 5898 - DNA, 22 bp, synthetic construct
  misc_feature 1..22: note = Description of Artificial Sequence: Synthetic Antisense oligonucleotide
  misc_feature 1..22: note = Original Sequence: tcaaggaagauggcauuucuag
  modified_base 1..2: mod_base = OTHER; note = bicyclic nucleic acid (BNA)
  modified_base 21..22: mod_base = OTHER; note = bicyclic nucleic acid (BNA)
  modified_base 2: mod_base = OTHER; note = 5-methyl
  modified_base 14: mod_base = OTHER; note = 5-methyl
  modified_base 19: mod_base = OTHER; note = 5-methyl
  source 1..22: mol_type = other DNA
  modified_base 11: mod_base = OTHER; note = Uracil
  modified_base 16: mod_base = OTHER; note = Uracil
  modified_base 17: mod_base = OTHER; note = Uracil
  modified_base 18: mod_base = OTHER; note = Uracil
  modified_base 20: mod_base = OTHER; note = Uracil
tcaaggaagatggcatttctag

SEQ ID NO: 5899 - DNA, 16 bp, synthetic construct
  misc_feature 1..16: note = Description of Artificial Sequence: Synthetic Antisense oligonucleotide
  misc_feature 1..16: note = Original Sequence: tcaaggaagauggcat
  modified_base 1..2: mod_base = OTHER; note = bicyclic nucleic acid (BNA)
  modified_base 15..16: mod_base = OTHER; note = bicyclic nucleic acid (BNA)
  modified_base 2: mod_base = OTHER; note = 5-methyl
  modified_base 14: mod_base = OTHER; note = 5-methyl
  source 1..16: mol_type = other DNA
  modified_base 11: mod_base = OTHER; note = Uracil
tcaaggaagatggcat

SEQ ID NO: 5900 - DNA, 15 bp, synthetic construct
  misc_feature 1..15: note = Description of Artificial Sequence: Synthetic Antisense oligonucleotide
  misc_feature 1..15: note = Original Sequence: gaagauggcauuuct
  modified_base 1..2: mod_base = OTHER; note = bicyclic nucleic acid (BNA)
  modified_base 14..15: mod_base = OTHER; note = bicyclic nucleic acid (BNA)
  modified_base 9: mod_base = OTHER; note = 5-methyl
  modified_base 14: mod_base = OTHER; note = 5-methyl
  source 1..15: mol_type = other DNA
  modified_base 6: mod_base = OTHER; note = Uracil
  modified_base 11: mod_base = OTHER; note = Uracil
  modified_base 12: mod_base = OTHER; note = Uracil
  modified_base 13: mod_base = OTHER; note = Uracil
gaagatggcatttct

SEQ ID NO: 5901 - DNA, 21 bp, synthetic construct
  misc_feature 1..21: note = Description of Artificial Sequence: Synthetic Antisense oligonucleotide
  misc_feature 1..21: note = Original Sequence: tcaaggaagauggcauuucta
  modified_base 1..2: mod_base = OTHER; note = bicyclic nucleic acid (BNA)
  modified_base 20..21: mod_base = OTHER; note = bicyclic nucleic acid (BNA)
  modified_base 2: mod_base = OTHER; note = 5-methyl
  modified_base 14: mod_base = OTHER; note = 5-methyl
  modified_base 19: mod_base = OTHER; note = 5-methyl
  source 1..21: mol_type = other DNA
  modified_base 11: mod_base = OTHER; note = Uracil
  modified_base 16: mod_base = OTHER; note = Uracil
  modified_base 17: mod_base = OTHER; note = Uracil
  modified_base 18: mod_base = OTHER; note = Uracil
tcaaggaagatggcatttcta

SEQ ID NO: 5902 - DNA, 19 bp, synthetic construct
  misc_feature 1..19: note = Description of Artificial Sequence: Synthetic Antisense oligonucleotide
  misc_feature 1..19: note = Original Sequence: tcaaggaagauggcauutc
  modified_base 1..2: mod_base = OTHER; note = bicyclic nucleic acid (BNA)
  modified_base 18..19: mod_base = OTHER; note = bicyclic nucleic acid (BNA)
  modified_base 2: mod_base = OTHER; note = 5-methyl
  modified_base 14: mod_base = OTHER; note = 5-methyl
  modified_base 19: mod_base = OTHER; note = 5-methyl
  source 1..19: mol_type = other DNA
  modified_base 11: mod_base = OTHER; note = Uracil
  modified_base 16: mod_base = OTHER; note = Uracil
  modified_base 17: mod_base = OTHER; note = Uracil
tcaaggaagatggcatttc

SEQ ID NO: 5903 - DNA, 18 bp, synthetic construct
  misc_feature 1..18: note = Description of Artificial Sequence: Synthetic Antisense oligonucleotide
  misc_feature 1..18: note = Original Sequence: tcaaggaagauggcautt
  modified_base 1..2: mod_base = OTHER; note = bicyclic nucleic acid (BNA)
  modified_base 17..18: mod_base = OTHER; note = bicyclic nucleic acid (BNA)
  modified_base 2: mod_base = OTHER; note = 5-methyl
  modified_base 14: mod_base = OTHER; note = 5-methyl
  source 1..18: mol_type = other DNA
  modified_base 11: mod_base = OTHER; note = Uracil
  modified_base 16: mod_base = OTHER; note = Uracil
tcaaggaagatggcattt

SEQ ID NO: 5904 - DNA, 17 bp, synthetic construct
  misc_feature 1..17: note = Description of Artificial Sequence: Synthetic Antisense oligonucleotide
  misc_feature 1..17: note = Original Sequence: tcaaggaagauggcatt
  modified_base 1..2: mod_base = OTHER; note = bicyclic nucleic acid (BNA)
  modified_base 16..17: mod_base = OTHER; note = bicyclic nucleic acid (BNA)
  modified_base 2: mod_base = OTHER; note = 5-methyl
  modified_base 14: mod_base = OTHER; note = 5-methyl
  source 1..17: mol_type = other DNA
  modified_base 11: mod_base = OTHER; note = Uracil
tcaaggaagatggcatt

SEQ ID NO: 5905 - DNA, 15 bp, synthetic construct
  misc_feature 1..15: note = Description of Artificial Sequence: Synthetic Antisense oligonucleotide
  misc_feature 1..15: note = Original Sequence: tcaaggaagauggca
  modified_base 1..2: mod_base = OTHER; note = bicyclic nucleic acid (BNA)
  modified_base 14..15: mod_base = OTHER; note = bicyclic nucleic acid (BNA)
  modified_base 2: mod_base = OTHER; note = 5-methyl
  modified_base 14: mod_base = OTHER; note = 5-methyl
  source 1..15: mol_type = other DNA
  modified_base 11: mod_base = OTHER; note = Uracil
tcaaggaagatggca

SEQ ID NO: 5906 - DNA, 14 bp, synthetic construct
  misc_feature 1..14: note = Description of Artificial Sequence: Synthetic Antisense oligonucleotide
  misc_feature 1..14: note = Original Sequence: tcaaggaagauggc
  modified_base 1..2: mod_base = OTHER; note = bicyclic nucleic acid (BNA)
  modified_base 13..14: mod_base = OTHER; note = bicyclic nucleic acid (BNA)
  modified_base 2: mod_base = OTHER; note = 5-methyl
  modified_base 14: mod_base = OTHER; note = 5-methyl
  source 1..14: mol_type = other DNA
  modified_base 11: mod_base = OTHER; note = Uracil
tcaaggaagatggc

SEQ ID NO: 5907 - DNA, 13 bp, synthetic construct
  misc_feature 1..13: note = Description of Artificial Sequence: Synthetic Antisense oligonucleotide
  misc_feature 1..13: note = Original Sequence: tcaaggaagaugg
  modified_base 1..2: mod_base = OTHER; note = bicyclic nucleic acid (BNA)
  modified_base 12..13: mod_base = OTHER; note = bicyclic nucleic acid (BNA)
  modified_base 2: mod_base = OTHER; note = 5-methyl
  source 1..13: mol_type = other DNA
  modified_base 11: mod_base = OTHER; note = Uracil
tcaaggaagatgg

SEQ ID NO: 5908 - DNA, 12 bp, synthetic construct
  misc_feature 1..12: note = Description of Artificial Sequence: Synthetic Antisense oligonucleotide
  modified_base 1..2: mod_base = OTHER; note = bicyclic nucleic acid (BNA)
  modified_base 11..12: mod_base = OTHER; note = bicyclic nucleic acid (BNA)
  modified_base 2: mod_base = OTHER; note = 5-methyl
  source 1..12: mol_type = other DNA
tcaaggaagatg

SEQ ID NO: 5909 - DNA, 11 bp, synthetic construct
  misc_feature 1..11: note = Description of Artificial Sequence: Synthetic Antisense oligonucleotide
  modified_base 1..2: mod_base = OTHER; note = bicyclic nucleic acid (BNA)
  modified_base 10..11: mod_base = OTHER; note = bicyclic nucleic acid (BNA)
  modified_base 2: mod_base = OTHER; note = 5-methyl
  source 1..11: mol_type = other DNA
tcaaggaagat

SEQ ID NO: 5910 - DNA, 10 bp, synthetic construct
  misc_feature 1..10: note = Description of Artificial Sequence: Synthetic Antisense oligonucleotide
  modified_base 1..2: mod_base = OTHER; note = bicyclic nucleic acid (BNA)
  modified_base 9..10: mod_base = OTHER; note = bicyclic nucleic acid (BNA)
  modified_base 2: mod_base = OTHER; note = 5-methyl
  source 1..10: mol_type = other DNA
tcaaggaaga

SEQ ID NO: 5911 - skipped

SEQ ID NO: 5912 - RNA, 21 nt, synthetic construct
  misc_feature 1..21: note = Description of Artificial Sequence: Synthetic Antisense oligonucleotide
  modified_base 1: mod_base = OTHER; note = 5-methyl
  modified_base 13: mod_base = OTHER; note = 5-methyl
  modified_base 18: mod_base = OTHER; note = 5-methyl
  modified_base 1..2: mod_base = OTHER; note = bicyclic nucleic acid (BNA)
  modified_base 20..21: mod_base = OTHER; note = bicyclic nucleic acid (BNA)
  source 1..21: mol_type = other RNA
caaggaagatggcatttctag

SEQ ID NO: 5913 - DNA, 20 bp, synthetic construct
  misc_feature 1..20: note = Description of Artificial Sequence: Synthetic Antisense oligonucleotide
  misc_feature 1..20: note = Original Sequence: caaggaagauggcauuucta
  modified_base 1: mod_base = OTHER; note = 5-methyl
  modified_base 13: mod_base = OTHER; note = 5-methyl
  modified_base 18: mod_base = OTHER; note = 5-methyl
  modified_base 1..2: mod_base = OTHER; note = bicyclic nucleic acid (BNA)
  modified_base 19..20: mod_base = OTHER; note = bicyclic nucleic acid (BNA)
  source 1..20: mol_type = other DNA
  modified_base 10: mod_base = OTHER; note = Uracil
  modified_base 15: mod_base = OTHER; note = Uracil
  modified_base 16: mod_base = OTHER; note = Uracil
  modified_base 17: mod_base = OTHER; note = Uracil
caaggaagatggcatttcta

SEQ ID NO: 5914 - DNA, 19 bp, synthetic construct
  misc_feature 1..19: note = Description of Artificial Sequence: Synthetic Antisense oligonucleotide
  misc_feature 1..19: note = Original Sequence: caaggaagauggcauuuct
  modified_base 1: mod_base = OTHER; note = 5-methyl
  modified_base 13: mod_base = OTHER; note = 5-methyl
  modified_base 18: mod_base = OTHER; note = 5-methyl
  modified_base 1..2: mod_base = OTHER; note = bicyclic nucleic acid (BNA)
  modified_base 18..19: mod_base = OTHER; note = bicyclic nucleic acid (BNA)
  source 1..19: mol_type = other DNA
  modified_base 10: mod_base = OTHER; note = Uracil
  modified_base 15: mod_base = OTHER; note = Uracil
  modified_base 16: mod_base = OTHER; note = Uracil
  modified_base 17: mod_base = OTHER; note = Uracil
caaggaagatggcatttct

SEQ ID NO: 5915 - DNA, 18 bp, synthetic construct
  misc_feature 1..18: note = Description of Artificial Sequence: Synthetic Antisense oligonucleotide
  misc_feature 1..18: note = Original Sequence: caaggaagauggcauutc
  modified_base 1: mod_base = OTHER; note = 5-methyl
  modified_base 13: mod_base = OTHER; note = 5-methyl
  modified_base 18: mod_base = OTHER; note = 5-methyl
  modified_base 1..2: mod_base = OTHER; note = bicyclic nucleic acid (BNA)
  modified_base 17..18: mod_base = OTHER; note = bicyclic nucleic acid (BNA)
  source 1..18: mol_type = other DNA
  modified_base 10: mod_base = OTHER; note = Uracil
  modified_base 15: mod_base = OTHER; note = Uracil
  modified_base 16: mod_base = OTHER; note = Uracil
caaggaagatggcatttc

SEQ ID NO: 5916 - DNA, 17 bp, synthetic construct
  misc_feature 1..17: note = Description of Artificial Sequence: Synthetic Antisense oligonucleotide
  misc_feature 1..17: note = Original Sequence: caaggaagauggcautt
  modified_base 1: mod_base = OTHER; note = 5-methyl
  modified_base 13: mod_base = OTHER; note = 5-methyl
  modified_base 1..2: mod_base = OTHER; note = bicyclic nucleic acid (BNA)
  modified_base 16..17: mod_base = OTHER; note = bicyclic nucleic acid (BNA)
  source 1..17: mol_type = other DNA
  modified_base 10: mod_base = OTHER; note = Uracil
  modified_base 15: mod_base = OTHER; note = Uracil
caaggaagatggcattt

SEQ ID NO: 5917 - DNA, 16 bp, synthetic construct
  misc_feature 1..16: note = Description of Artificial Sequence: Synthetic Antisense oligonucleotide
  misc_feature 1..16: note = Original Sequence: caaggaagauggcatt
  modified_base 1: mod_base = OTHER; note = 5-methyl
  modified_base 13: mod_base = OTHER; note = 5-methyl
  modified_base 1..2: mod_base = OTHER; note = bicyclic nucleic acid (BNA)
  modified_base 15..16: mod_base = OTHER; note = bicyclic nucleic acid (BNA)
  source 1..16: mol_type = other DNA
  modified_base 10: mod_base = OTHER; note = Uracil
caaggaagatggcatt

SEQ ID NO: 5918 - DNA, 15 bp, synthetic construct
  misc_feature 1..15: note = Description of Artificial Sequence: Synthetic Antisense oligonucleotide
  misc_feature 1..15: note = Original Sequence: caaggaagauggcat
  modified_base 1: mod_base = OTHER; note = 5-methyl
  modified_base 13: mod_base = OTHER; note = 5-methyl
  modified_base 1..2: mod_base = OTHER; note = bicyclic nucleic acid (BNA)
  modified_base 14..15: mod_base = OTHER; note = bicyclic nucleic acid (BNA)
  source 1..15: mol_type = other DNA
  modified_base 10: mod_base = OTHER; note = Uracil
caaggaagatggcat

SEQ ID NO: 5919 - RNA, 14 nt, synthetic construct
  misc_feature 1..14: note = Description of Artificial Sequence: Synthetic Antisense oligonucleotide
  modified_base 1: mod_base = OTHER; note = 5-methyl
  modified_base 13: mod_base = OTHER; note = 5-methyl
  modified_base 1..2: mod_base = OTHER; note = bicyclic nucleic acid (BNA)
  modified_base 13..14: mod_base = OTHER; note = bicyclic nucleic acid (BNA)
  source 1..14: mol_type = other RNA
caaggaagatggca

SEQ ID NO: 5920 - RNA, 13 nt, synthetic construct
  misc_feature 1..13: note = Description of Artificial Sequence: Synthetic Antisense oligonucleotide
  modified_base 1: mod_base = OTHER; note = 5-methyl
  modified_base 13: mod_base = OTHER; note = 5-methyl
  modified_base 1..2: mod_base = OTHER; note = bicyclic nucleic acid (BNA)
  modified_base 12..13: mod_base = OTHER; note = bicyclic nucleic acid (BNA)
  source 1..13: mol_type = other RNA
caaggaagatggc

SEQ ID NO: 5921 - RNA, 12 nt, synthetic construct
  misc_feature 1..12: note = Description of Artificial Sequence: Synthetic Antisense oligonucleotide
  modified_base 1: mod_base = OTHER; note = 5-methyl
  modified_base 1..2: mod_base = OTHER; note = bicyclic nucleic acid (BNA)
  modified_base 11..12: mod_base = OTHER; note = bicyclic nucleic acid (BNA)
  source 1..12: mol_type = other RNA
caaggaagatgg

SEQ ID NO: 5922 - DNA, 11 bp, synthetic construct
  misc_feature 1..11: note = Description of Artificial Sequence: Synthetic Antisense oligonucleotide
  modified_base 1: mod_base = OTHER; note = 5-methyl
  modified_base 1..2: mod_base = OTHER; note = bicyclic nucleic acid (BNA)
  modified_base 10..11: mod_base = OTHER; note = bicyclic nucleic acid (BNA)
  source 1..11: mol_type = other DNA
caaggaagatg

SEQ ID NO: 5923 - DNA, 10 bp, synthetic construct
  misc_feature 1..10: note = Description of Artificial Sequence: Synthetic Antisense oligonucleotide
  modified_base 1: mod_base = OTHER; note = 5-methyl
  modified_base 1..2: mod_base = OTHER; note = bicyclic nucleic acid (BNA)
  modified_base 9..10: mod_base = OTHER; note = bicyclic nucleic acid (BNA)
  source 1..10: mol_type = other DNA
caaggaagat

SEQ ID NO: 5924-5925 - skipped (2 entries)

SEQ ID NO: 5926 - RNA, 20 nt, synthetic construct
  misc_feature 1..20: note = Description of Artificial Sequence: Synthetic Antisense oligonucleotide
  modified_base 1..2: mod_base = OTHER; note = bicyclic nucleic acid (BNA)
  modified_base 19..20: mod_base = OTHER; note = bicyclic nucleic acid (BNA)
  modified_base 12: mod_base = OTHER; note = 5-methyl
  modified_base 17: mod_base = OTHER; note = 5-methyl
  source 1..20: mol_type = other RNA
aaggaagatggcatttctag

SEQ ID NO: 5927 - DNA, 19 bp, synthetic construct
  misc_feature 1..19: note = Description of Artificial Sequence: Synthetic Antisense oligonucleotide
  misc_feature 1..19: note = Original Sequence: aaggaagauggcauuucta
  modified_base 1..2: mod_base = OTHER; note = bicyclic nucleic acid (BNA)
  modified_base 18..19: mod_base = OTHER; note = bicyclic nucleic acid (BNA)
  modified_base 12: mod_base = OTHER; note = 5-methyl
  modified_base 17: mod_base = OTHER; note = 5-methyl
  source 1..19: mol_type = other DNA
  modified_base 9: mod_base = OTHER; note = Uracil
  modified_base 14: mod_base = OTHER; note = Uracil
  modified_base 15: mod_base = OTHER; note = Uracil
  modified_base 16: mod_base = OTHER; note = Uracil
aaggaagatggcatttcta

SEQ ID NO: 5928 - DNA, 18 bp, synthetic construct
  misc_feature 1..18: note = Description of Artificial Sequence: Synthetic Antisense oligonucleotide
  misc_feature 1..18: note = Original Sequence: aaggaagauggcauuuct
  modified_base 1..2: mod_base = OTHER; note = bicyclic nucleic acid (BNA)
  modified_base 17..18: mod_base = OTHER; note = bicyclic nucleic acid (BNA)
  modified_base 12: mod_base = OTHER; note = 5-methyl
  modified_base 17: mod_base = OTHER; note = 5-methyl
  source 1..18: mol_type = other DNA
  modified_base 9: mod_base = OTHER; note = Uracil
  modified_base 14: mod_base = OTHER; note = Uracil
  modified_base 15: mod_base = OTHER; note = Uracil
  modified_base 16: mod_base = OTHER; note = Uracil
aaggaagatggcatttct

SEQ ID NO: 5929 - DNA, 17 bp, synthetic construct
  misc_feature 1..17: note = Description of Artificial Sequence: Synthetic Antisense oligonucleotide
  misc_feature 1..17: note = Original Sequence: aaggaagauggcauutc
  modified_base 1..2: mod_base = OTHER; note = bicyclic nucleic acid (BNA)
  modified_base 16..17: mod_base = OTHER; note = bicyclic nucleic acid (BNA)
  modified_base 12: mod_base = OTHER; note = 5-methyl
  modified_base 17: mod_base = OTHER; note = 5-methyl
  source 1..17: mol_type = other DNA
  modified_base 9: mod_base = OTHER; note = Uracil
  modified_base 14: mod_base = OTHER; note = Uracil
  modified_base 15: mod_base = OTHER; note = Uracil
aaggaagatggcatttc

SEQ ID NO: 5930 - DNA, 16 bp, synthetic construct
  misc_feature 1..16: note = Description of Artificial Sequence: Synthetic Antisense oligonucleotide
  misc_feature 1..16: note = Original Sequence: aaggaagauggcautt
  modified_base 1..2: mod_base = OTHER; note = bicyclic nucleic acid (BNA)
  modified_base 15..16: mod_base = OTHER; note = bicyclic nucleic acid (BNA)
  modified_base 12: mod_base = OTHER; note = 5-methyl
  source 1..16: mol_type = other DNA
  modified_base 9: mod_base = OTHER; note = Uracil
  modified_base 14: mod_base = OTHER; note = Uracil
aaggaagatggcattt

SEQ ID NO: 5931 - DNA, 15 bp, synthetic construct
  misc_feature 1..15: note = Description of Artificial Sequence: Synthetic Antisense oligonucleotide
  misc_feature 1..15: note = Original Sequence: aaggaagauggcatt
  modified_base 1..2: mod_base = OTHER; note = bicyclic nucleic acid (BNA)
  modified_base 14..15: mod_base = OTHER; note = bicyclic nucleic acid (BNA)
  modified_base 12: mod_base = OTHER; note = 5-methyl
  source 1..15: mol_type = other DNA
  modified_base 9: mod_base = OTHER; note = Uracil
aaggaagatggcatt

SEQ ID NO: 5932 - DNA, 14 bp, synthetic construct
  misc_feature 1..14: note = Description of Artificial Sequence: Synthetic Antisense oligonucleotide
  misc_feature 1..14: note = Original Sequence: aaggaagauggcat
  modified_base 1..2: mod_base = OTHER; note = bicyclic nucleic acid (BNA)
  modified_base 13..14: mod_base = OTHER; note = bicyclic nucleic acid (BNA)
  modified_base 12: mod_base = OTHER; note = 5-methyl
  source 1..14: mol_type = other DNA
  modified_base 9: mod_base = OTHER; note = Uracil
aaggaagatggcat

SEQ ID NO: 5933 - RNA, 13 nt, synthetic construct
  misc_feature 1..13: note = Description of Artificial Sequence: Synthetic Antisense oligonucleotide
  modified_base 1..2: mod_base = OTHER; note = bicyclic nucleic acid (BNA)
  modified_base 12..13: mod_base = OTHER; note = bicyclic nucleic acid (BNA)
  modified_base 12: mod_base = OTHER; note = 5-methyl
  source 1..13: mol_type = other RNA
aaggaagatggca

SEQ ID NO: 5934 - RNA, 12 nt, synthetic construct
  misc_feature 1..12: note = Description of Artificial Sequence: Synthetic Antisense oligonucleotide
  modified_base 1..2: mod_base = OTHER; note = bicyclic nucleic acid (BNA)
  modified_base 11..12: mod_base = OTHER; note = bicyclic nucleic acid (BNA)
  modified_base 12: mod_base = OTHER; note = 5-methyl
  source 1..12: mol_type = other RNA
aaggaagatggc

SEQ ID NO: 5935 - RNA, 19 nt, synthetic construct
  misc_feature 1..19: note = Description of Artificial Sequence: Synthetic Antisense oligonucleotide
  modified_base 1..2: mod_base = OTHER; note = bicyclic nucleic acid (BNA)
  modified_base 18..19: mod_base = OTHER; note = bicyclic nucleic acid (BNA)
  modified_base 11: mod_base = OTHER; note = 5-methyl
  modified_base 16: mod_base = OTHER; note = 5-methyl
  source 1..19: mol_type = other RNA
aggaagatggcatttctag

SEQ ID NO: 5936 - DNA, 18 bp, synthetic construct
  misc_feature 1..18: note = Description of Artificial Sequence: Synthetic Antisense oligonucleotide
  misc_feature 1..18: note = Original Sequence: aggaagauggcauuucta
  modified_base 1..2: mod_base = OTHER; note = bicyclic nucleic acid (BNA)
  modified_base 17..18: mod_base = OTHER; note = bicyclic nucleic acid (BNA)
  modified_base 11: mod_base = OTHER; note = 5-methyl
  modified_base 16: mod_base = OTHER; note = 5-methyl
  source 1..18: mol_type = other DNA
  modified_base 8: mod_base = OTHER; note = Uracil
  modified_base 13: mod_base = OTHER; note = Uracil
  modified_base 14: mod_base = OTHER; note = Uracil
  modified_base 15: mod_base = OTHER; note = Uracil
aggaagatggcatttcta

SEQ ID NO: 5937 - DNA, 17 bp, synthetic construct
  misc_feature 1..17: note = Description of Artificial Sequence: Synthetic Antisense oligonucleotide
  misc_feature 1..17: note = Original Sequence: aggaagauggcauuuct
  modified_base 1..2: mod_base = OTHER; note = bicyclic nucleic acid (BNA)
  modified_base 16..17: mod_base = OTHER; note = bicyclic nucleic acid (BNA)
  modified_base 11: mod_base = OTHER; note = 5-methyl
  modified_base 16: mod_base = OTHER; note = 5-methyl
  source 1..17: mol_type = other DNA
  modified_base 8: mod_base = OTHER; note = Uracil
  modified_base 13: mod_base = OTHER; note = Uracil
  modified_base 14: mod_base = OTHER; note = Uracil
  modified_base 15: mod_base = OTHER; note = Uracil
aggaagatggcatttct

SEQ ID NO: 5938 - DNA, 16 bp, synthetic construct
  misc_feature 1..16: note = Description of Artificial Sequence: Synthetic Antisense oligonucleotide
  misc_feature 1..16: note = Original Sequence: aggaagauggcauutc
  modified_base 1..2: mod_base = OTHER; note = bicyclic nucleic acid (BNA)
  modified_base 15..16: mod_base = OTHER; note = bicyclic nucleic acid (BNA)
  modified_base 11: mod_base = OTHER; note = 5-methyl
  modified_base 16: mod_base = OTHER; note = 5-methyl
  source 1..16: mol_type = other DNA
  modified_base 8: mod_base = OTHER; note = Uracil
  modified_base 13: mod_base = OTHER; note = Uracil
  modified_base 14: mod_base = OTHER; note = Uracil
aggaagatggcatttc

SEQ ID NO: 5939 - DNA, 15 bp, synthetic construct
  misc_feature 1..15: note = Description of Artificial Sequence: Synthetic Antisense oligonucleotide
  misc_feature 1..15: note = Original Sequence: aggaagauggcautt
  modified_base 1..2: mod_base = OTHER; note = bicyclic nucleic acid (BNA)
  modified_base 14..15: mod_base = OTHER; note = bicyclic nucleic acid (BNA)
  modified_base 11: mod_base = OTHER; note = 5-methyl
  source 1..15: mol_type = other DNA
  modified_base 8: mod_base = OTHER; note = Uracil
  modified_base 13: mod_base = OTHER; note = Uracil
aggaagatggcattt

SEQ ID NO: 5940 - DNA, 14 bp, synthetic construct
  misc_feature 1..14: note = Description of Artificial Sequence: Synthetic Antisense oligonucleotide
  misc_feature 1..14: note = Original Sequence: aggaagauggcatt
  modified_base 1..2: mod_base = OTHER; note = bicyclic nucleic acid (BNA)
  modified_base 13..14: mod_base = OTHER; note = bicyclic nucleic acid (BNA)
  modified_base 11: mod_base = OTHER; note = 5-methyl
  source 1..14: mol_type = other DNA
  modified_base 8: mod_base = OTHER; note = Uracil
aggaagatggcatt

SEQ ID NO: 5941 - DNA, 13 bp, synthetic construct
  misc_feature 1..13: note = Description of Artificial Sequence: Synthetic Antisense oligonucleotide
  misc_feature 1..13: note = Original Sequence: aggaagauggcat
  modified_base 1..2: mod_base = OTHER; note = bicyclic nucleic acid (BNA)
  modified_base 12..13: mod_base = OTHER; note = bicyclic nucleic acid (BNA)
  modified_base 11: mod_base = OTHER; note = 5-methyl
  source 1..13: mol_type = other DNA
  modified_base 8: mod_base = OTHER; note = Uracil
aggaagatggcat

SEQ ID NO: 5942 - RNA, 12 nt, synthetic construct
  misc_feature 1..12: note = Description of Artificial Sequence: Synthetic Antisense oligonucleotide
  modified_base 1..2: mod_base = OTHER; note = bicyclic nucleic acid (BNA)
  modified_base 11..12: mod_base = OTHER; note = bicyclic nucleic acid (BNA)
  modified_base 11: mod_base = OTHER; note = 5-methyl
  source 1..12: mol_type = other RNA
aggaagatggca

SEQ ID NO: 5943 - RNA, 18 nt, synthetic construct
  misc_feature 1..18: note = Description of Artificial Sequence: Synthetic Antisense oligonucleotide
  modified_base 1..2: mod_base = OTHER; note = bicyclic nucleic acid (BNA)
  modified_base 17..18: mod_base = OTHER; note = bicyclic nucleic acid (BNA)
  modified_base 10: mod_base = OTHER; note = 5-methyl
  modified_base 15: mod_base = OTHER; note = 5-methyl
  source 1..18: mol_type = other RNA
ggaagatggcatttctag

SEQ ID NO: 5944 - DNA, 17 bp, synthetic construct
  misc_feature 1..17: note = Description of Artificial Sequence: Synthetic Antisense oligonucleotide
  misc_feature 1..17: note = Original Sequence: ggaagauggcauuucta
  modified_base 1..2: mod_base = OTHER; note = bicyclic nucleic acid (BNA)
  modified_base 16..17: mod_base = OTHER; note = bicyclic nucleic acid (BNA)
  modified_base 10: mod_base = OTHER; note = 5-methyl
  modified_base 15: mod_base = OTHER; note = 5-methyl
  source 1..17: mol_type = other DNA
  modified_base 7: mod_base = OTHER; note = Uracil
  modified_base 12: mod_base = OTHER; note = Uracil
  modified_base 13: mod_base = OTHER; note = Uracil
  modified_base 14: mod_base = OTHER; note = Uracil
ggaagatggcatttcta

SEQ ID NO: 5945 - DNA, 16 bp, synthetic construct
  misc_feature 1..16: note = Description of Artificial Sequence: Synthetic Antisense oligonucleotide
  misc_feature 1..16: note = Original Sequence: ggaagauggcauuuct
  modified_base 1..2: mod_base = OTHER; note = bicyclic nucleic acid (BNA)
  modified_base 15..16: mod_base = OTHER; note = bicyclic nucleic acid (BNA)
  modified_base 10: mod_base = OTHER; note = 5-methyl
  modified_base 15: mod_base = OTHER; note = 5-methyl
  source 1..16: mol_type = other DNA
  modified_base 7: mod_base = OTHER; note = Uracil
  modified_base 12: mod_base = OTHER; note = Uracil
  modified_base 13: mod_base = OTHER; note = Uracil
  modified_base 14: mod_base = OTHER; note = Uracil
ggaagatggcatttct

SEQ ID NO: 5946 - DNA, 15 bp, synthetic construct
  misc_feature 1..15: note = Description of Artificial Sequence: Synthetic Antisense oligonucleotide
  misc_feature 1..15: note = Original Sequence: ggaagauggcauutc
  modified_base 1..2: mod_base = OTHER; note = bicyclic nucleic acid (BNA)
  modified_base 14..15: mod_base = OTHER; note = bicyclic nucleic acid (BNA)
  modified_base 10: mod_base = OTHER; note = 5-methyl
  modified_base 15: mod_base = OTHER; note = 5-methyl
  source 1..15: mol_type = other DNA
  modified_base 7: mod_base = OTHER; note = Uracil
  modified_base 12: mod_base = OTHER; note = Uracil
  modified_base 13: mod_base = OTHER; note = Uracil
ggaagatggcatttc

SEQ ID NO: 5947 - DNA, 14 bp, synthetic construct
  misc_feature 1..14: note = Description of Artificial Sequence: Synthetic Antisense oligonucleotide
  misc_feature 1..14: note = Original Sequence: ggaagauggcautt
  modified_base 1..2: mod_base = OTHER; note = bicyclic nucleic acid (BNA)
  modified_base 13..14: mod_base = OTHER; note = bicyclic nucleic acid (BNA)
  modified_base 10: mod_base = OTHER; note = 5-methyl
  source 1..14: mol_type = other DNA
  modified_base 7: mod_base = OTHER; note = Uracil
  modified_base 12: mod_base = OTHER; note = Uracil
ggaagatggcattt

SEQ ID NO: 5948 - DNA, 13 bp, synthetic construct
  misc_feature 1..13: note = Description of Artificial Sequence: Synthetic Antisense oligonucleotide
  misc_feature 1..13: note = Original Sequence: ggaagauggcatt
  modified_base 1..2: mod_base = OTHER; note = bicyclic nucleic acid (BNA)
  modified_base 12..13: mod_base = OTHER; note = bicyclic nucleic acid (BNA)
  modified_base 10: mod_base = OTHER; note = 5-methyl
  source 1..13: mol_type = other DNA
  modified_base 7: mod_base = OTHER; note = Uracil
ggaagatggcatt

SEQ ID NO: 5949 - DNA, 12 bp, synthetic construct
  misc_feature 1..12: note = Description of Artificial Sequence: Synthetic Antisense oligonucleotide
  misc_feature 1..12: note = Original Sequence: ggaagauggcat
  modified_base 1..2: mod_base = OTHER; note = bicyclic nucleic acid (BNA)
  modified_base 11..12: mod_base = OTHER; note = bicyclic nucleic acid (BNA)
  modified_base 10: mod_base = OTHER; note = 5-methyl
  source 1..12: mol_type = other DNA
  modified_base 7: mod_base = OTHER; note = Uracil
ggaagatggcat

SEQ ID NO: 5950 - RNA, 11 nt, synthetic construct
  misc_feature 1..11: note = Description of Artificial Sequence: Synthetic Antisense oligonucleotide
  modified_base 1..2: mod_base = OTHER; note = bicyclic nucleic acid (BNA)
  modified_base 10..11: mod_base = OTHER; note = bicyclic nucleic acid (BNA)
  modified_base 10: mod_base = OTHER; note = 5-methyl
  source 1..11: mol_type = other RNA
ggaagatggca

SEQ ID NO: 5951 - RNA, 10 nt, synthetic construct
  misc_feature 1..10: note = Description of Artificial Sequence: Synthetic Antisense oligonucleotide
  modified_base 1..2: mod_base = OTHER; note = bicyclic nucleic acid (BNA)
  modified_base 9..10: mod_base = OTHER; note = bicyclic nucleic acid (BNA)
  modified_base 10: mod_base = OTHER; note = 5-methyl
  source 1..10: mol_type = other RNA
ggaagatggc

SEQ ID NO: 5952 - RNA, 17 nt, synthetic construct
  misc_feature 1..17: note = Description of Artificial Sequence: Synthetic Antisense oligonucleotide
  modified_base 1..2: mod_base = OTHER; note = bicyclic nucleic acid (BNA)
  modified_base 16..17: mod_base = OTHER; note = bicyclic nucleic acid (BNA)
  modified_base 9: mod_base = OTHER; note = 5-methyl
  modified_base 14: mod_base = OTHER; note = 5-methyl
  source 1..17: mol_type = other RNA
gaagatggcatttctag

SEQ ID NO: 5953 - DNA, 16 bp, synthetic construct
  misc_feature 1..16: note = Description of Artificial Sequence: Synthetic Antisense oligonucleotide
  misc_feature 1..16: note = Original Sequence: gaagauggcauuucta
  modified_base 1..2: mod_base = OTHER; note = bicyclic nucleic acid (BNA)
  modified_base 15..16: mod_base = OTHER; note = bicyclic nucleic acid (BNA)
  modified_base 9: mod_base = OTHER; note = 5-methyl
  modified_base 14: mod_base = OTHER; note = 5-methyl
  source 1..16: mol_type = other DNA
  modified_base 6: mod_base = OTHER; note = Uracil
  modified_base 11: mod_base = OTHER; note = Uracil
  modified_base 12: mod_base = OTHER; note = Uracil
  modified_base 13: mod_base = OTHER; note = Uracil
gaagatggcatttcta

SEQ ID NO: 5954 - DNA, 14 bp, synthetic construct
  misc_feature 1..14: note = Description of Artificial Sequence: Synthetic Antisense oligonucleotide
  misc_feature 1..14: note = Original Sequence: gaagauggcauutc
  modified_base 1..2: mod_base = OTHER; note = bicyclic nucleic acid (BNA)
  modified_base 13..14: mod_base = OTHER; note = bicyclic nucleic acid (BNA)
  modified_base 9: mod_base = OTHER; note = 5-methyl
  modified_base 14: mod_base = OTHER; note = 5-methyl
  source 1..14: mol_type = other DNA
  modified_base 6: mod_base = OTHER; note = Uracil
  modified_base 11: mod_base = OTHER; note = Uracil
  modified_base 12: mod_base = OTHER; note = Uracil
gaagatggcatttc

SEQ ID NO: 5955 - DNA, 13 bp, synthetic construct
  misc_feature 1..13: note = Description of Artificial Sequence: Synthetic Antisense oligonucleotide
  misc_feature 1..13: note = Original Sequence: gaagauggcautt
  modified_base 1..2: mod_base = OTHER; note = bicyclic nucleic acid (BNA)
  modified_base 12..13: mod_base = OTHER; note = bicyclic nucleic acid (BNA)
  modified_base 9: mod_base = OTHER; note = 5-methyl
  source 1..13: mol_type = other DNA
  modified_base 6: mod_base = OTHER; note = Uracil
  modified_base 11: mod_base = OTHER; note = Uracil
gaagatggcattt

SEQ ID NO: 5956 - DNA, 12 bp, synthetic construct
  misc_feature 1..12: note = Description of Artificial Sequence: Synthetic Antisense oligonucleotide
  misc_feature 1..12: note = Original Sequence: gaagauggcatt
  modified_base 1..2: mod_base = OTHER; note = bicyclic nucleic acid (BNA)
  modified_base 11..12: mod_base = OTHER; note = bicyclic nucleic acid (BNA)
  modified_base 9: mod_base = OTHER; note = 5-methyl
  source 1..12: mol_type = other DNA
  modified_base 6: mod_base = OTHER; note = Uracil
gaagatggcatt

SEQ ID NO: 5957 - DNA, 11 bp, synthetic construct
  misc_feature 1..11: note = Description of Artificial Sequence: Synthetic Antisense oligonucleotide
  misc_feature 1..11: note = Original Sequence: gaagauggcat
  modified_base 1..2: mod_base = OTHER; note = bicyclic nucleic acid (BNA)
  modified_base 10..11: mod_base = OTHER; note = bicyclic nucleic acid (BNA)
  modified_base 9: mod_base = OTHER; note = 5-methyl
  source 1..11: mol_type = other DNA
  modified_base 6: mod_base = OTHER; note = Uracil
gaagatggcat

SEQ ID NO: 5958 - RNA, 10 nt, synthetic construct
  misc_feature 1..10: note = Description of Artificial Sequence: Synthetic Antisense oligonucleotide
  modified_base 1..2: mod_base = OTHER; note = bicyclic nucleic acid (BNA)
  modified_base 9..10: mod_base = OTHER; note = bicyclic nucleic acid (BNA)
  modified_base 9: mod_base = OTHER; note = 5-methyl
  source 1..10: mol_type = other RNA
gaagatggca

SEQ ID NO: 5959 - skipped

SEQ ID NO: 5960 - RNA, 16 nt, synthetic construct
  misc_feature 1..16: note = Description of Artificial Sequence: Synthetic Antisense oligonucleotide
  modified_base 1..2: mod_base = OTHER; note = bicyclic nucleic acid (BNA)
  modified_base 15..16: mod_base = OTHER; note = bicyclic nucleic acid (BNA)
  modified_base 8: mod_base = OTHER; note = 5-methyl
  modified_base 13: mod_base = OTHER; note = 5-methyl
  source 1..16: mol_type = other RNA
aagatggcatttctag

SEQ ID NO: 5961 - DNA, 15 bp, synthetic construct
  misc_feature 1..15: note = Description of Artificial Sequence: Synthetic Antisense oligonucleotide
  misc_feature 1..15: note = Original Sequence: aagauggcauuucta
  modified_base 1..2: mod_base = OTHER; note = bicyclic nucleic acid (BNA)
  modified_base 14..15: mod_base = OTHER; note = bicyclic nucleic acid (BNA)
  modified_base 8: mod_base = OTHER; note = 5-methyl
  modified_base 13: mod_base = OTHER; note = 5-methyl
  source 1..15: mol_type = other DNA
  modified_base 5: mod_base = OTHER; note = Uracil
  modified_base 10: mod_base = OTHER; note = Uracil
  modified_base 11: mod_base = OTHER; note = Uracil
  modified_base 12: mod_base = OTHER; note = Uracil
aagatggcatttcta

SEQ ID NO: 5962 - DNA, 14 bp, synthetic construct
  misc_feature 1..14: note = Description of Artificial Sequence: Synthetic Antisense oligonucleotide
  misc_feature 1..14: note = Original Sequence: aagauggcauuuct
  modified_base 1..2: mod_base = OTHER; note = bicyclic nucleic acid (BNA)
  modified_base 13..14: mod_base = OTHER; note = bicyclic nucleic acid (BNA)
  modified_base 8: mod_base = OTHER; note = 5-methyl
  modified_base 13: mod_base = OTHER; note = 5-methyl
  source 1..14: mol_type = other DNA
  modified_base 5: mod_base = OTHER; note = Uracil
  modified_base 10: mod_base = OTHER; note = Uracil
  modified_base 11: mod_base = OTHER; note = Uracil
  modified_base 12: mod_base = OTHER; note = Uracil
aagatggcatttct

SEQ ID NO: 5963 - DNA, 13 bp, synthetic construct
  misc_feature 1..13: note = Description of Artificial Sequence: Synthetic Antisense oligonucleotide
  misc_feature 1..13: note = Original Sequence: aagauggcauutc
  modified_base 1..2: mod_base = OTHER; note = bicyclic nucleic acid (BNA)
  modified_base 12..13: mod_base = OTHER; note = bicyclic nucleic acid (BNA)
  modified_base 8: mod_base = OTHER; note = 5-methyl
  modified_base 13: mod_base = OTHER; note = 5-methyl
  source 1..13: mol_type = other DNA
  modified_base 5: mod_base = OTHER; note = Uracil
  modified_base 10: mod_base = OTHER; note = Uracil
  modified_base 11: mod_base = OTHER; note = Uracil
aagatggcatttc

SEQ ID NO: 5964 - DNA, 12 bp, synthetic construct
  misc_feature 1..12: note = Description of Artificial Sequence: Synthetic Antisense oligonucleotide
  misc_feature 1..12: note = Original Sequence: aagauggcautt
  modified_base 1..2: mod_base = OTHER; note = bicyclic nucleic acid (BNA)
  modified_base 11..12: mod_base = OTHER; note = bicyclic nucleic acid (BNA)
  modified_base 8: mod_base = OTHER; note = 5-methyl
  source 1..12: mol_type = other DNA
  modified_base 5: mod_base = OTHER; note = Uracil
  modified_base 10: mod_base = OTHER; note = Uracil
aagatggcattt

SEQ ID NO: 5965 - DNA, 11 bp, synthetic construct
  misc_feature 1..11: note = Description of Artificial Sequence: Synthetic Antisense oligonucleotide
  misc_feature 1..11: note = Original Sequence: aagauggcatt
  modified_base 1..2: mod_base = OTHER; note = bicyclic nucleic acid (BNA)
  modified_base 10..11: mod_base = OTHER; note = bicyclic nucleic acid (BNA)
  modified_base 8: mod_base = OTHER; note = 5-methyl
  source 1..11: mol_type = other DNA
  modified_base 5: mod_base = OTHER; note = Uracil
aagatggcatt

SEQ ID NO: 5966 - DNA, 10 bp, synthetic construct
  misc_feature 1..10: note = Description of Artificial Sequence: Synthetic Antisense oligonucleotide
  misc_feature 1..10: note = Original Sequence: aagauggcat
  modified_base 1..2: mod_base = OTHER; note = bicyclic nucleic acid (BNA)
  modified_base 9..10: mod_base = OTHER; note = bicyclic nucleic acid (BNA)
  modified_base 8: mod_base = OTHER; note = 5-methyl
  source 1..10: mol_type = other DNA
  modified_base 5: mod_base = OTHER; note = Uracil
aagatggcat

SEQ ID NO: 5967-5968 - skipped (2 entries)

SEQ ID NO: 5969 - RNA, 15 nt, synthetic construct
  misc_feature 1..15: note = Description of Artificial Sequence: Synthetic Antisense oligonucleotide
  modified_base 1..2: mod_base = OTHER; note = bicyclic nucleic acid (BNA)
  modified_base 14..15: mod_base = OTHER; note = bicyclic nucleic acid (BNA)
  modified_base 7: mod_base = OTHER; note = 5-methyl
  modified_base 12: mod_base = OTHER; note = 5-methyl
  source 1..15: mol_type = other RNA
agatggcatttctag

SEQ ID NO: 5970 - DNA, 14 bp, synthetic construct
  misc_feature 1..14: note = Description of Artificial Sequence: Synthetic Antisense oligonucleotide
  misc_feature 1..14: note = Original Sequence: agauggcauuucta
  modified_base 1..2: mod_base = OTHER; note = bicyclic nucleic acid (BNA)
  modified_base 13..14: mod_base = OTHER; note = bicyclic nucleic acid (BNA)
  modified_base 7: mod_base = OTHER; note = 5-methyl
  modified_base 12: mod_base = OTHER; note = 5-methyl
  source 1..14: mol_type = other DNA
  modified_base 4: mod_base = OTHER; note = Uracil
  modified_base 9: mod_base = OTHER; note = Uracil
  modified_base 10: mod_base = OTHER; note = Uracil
  modified_base 11: mod_base = OTHER; note = Uracil
agatggcatttcta

SEQ ID NO: 5971 - DNA, 13 bp, synthetic construct
  misc_feature 1..13: note = Description of Artificial Sequence: Synthetic Antisense oligonucleotide
  misc_feature 1..13: note = Original Sequence: agauggcauuuct
  modified_base 1..2: mod_base = OTHER; note = bicyclic nucleic acid (BNA)
  modified_base 12..13: mod_base = OTHER; note = bicyclic nucleic acid (BNA)
  modified_base 7: mod_base = OTHER; note = 5-methyl
  modified_base 12: mod_base = OTHER; note = 5-methyl
  source 1..13: mol_type = other DNA
  modified_base 4: mod_base = OTHER; note = Uracil
  modified_base 9: mod_base = OTHER; note = Uracil
  modified_base 10: mod_base = OTHER; note = Uracil
  modified_base 11: mod_base = OTHER; note = Uracil
agatggcatttct

SEQ ID NO: 5972 - DNA, 12 bp, synthetic construct
  misc_feature 1..12: note = Description of Artificial Sequence: Synthetic Antisense oligonucleotide
  misc_feature 1..12: note = Original Sequence: agauggcauutc
  modified_base 1..2: mod_base = OTHER; note = bicyclic nucleic acid (BNA)
  modified_base 11..12: mod_base = OTHER; note = bicyclic nucleic acid (BNA)
  modified_base 7: mod_base = OTHER; note = 5-methyl
  modified_base 12: mod_base = OTHER; note = 5-methyl
  source 1..12: mol_type = other DNA
  modified_base 4: mod_base = OTHER; note = Uracil
  modified_base 9: mod_base = OTHER; note = Uracil
  modified_base 10: mod_base = OTHER; note = Uracil
agatggcatttc

SEQ ID NO: 5973 - DNA, 11 bp, synthetic construct
  misc_feature 1..11: note = Description of Artificial Sequence: Synthetic Antisense oligonucleotide
  misc_feature 1..11: note = Original Sequence: agauggcautt
  modified_base 1..2: mod_base = OTHER; note = bicyclic nucleic acid (BNA)
  modified_base 10..11: mod_base = OTHER; note = bicyclic nucleic acid (BNA)
  modified_base 7: mod_base = OTHER; note = 5-methyl
  source 1..11: mol_type = other DNA
  modified_base 4: mod_base = OTHER; note = Uracil
  modified_base 9: mod_base = OTHER; note = Uracil
agatggcattt

SEQ ID NO: 5974 - DNA, 10 bp, synthetic construct
  misc_feature 1..10: note = Description of Artificial Sequence: Synthetic Antisense oligonucleotide
  misc_feature 1..10: note = Original Sequence: agauggcatt
  modified_base 1..2: mod_base = OTHER; note = bicyclic nucleic acid (BNA)
  modified_base 9..10: mod_base = OTHER; note = bicyclic nucleic acid (BNA)
  modified_base 7: mod_base = OTHER; note = 5-methyl
  source 1..10: mol_type = other DNA
  modified_base 4: mod_base = OTHER; note = Uracil
agatggcatt

SEQ ID NO: 5975-5976 - skipped (2 entries)

SEQ ID NO: 5977 - DNA, 30 bp, synthetic construct; identical to SEQ ID NO: 8
  misc_feature 1..30: note = Description of Artificial Sequence: Synthetic Antisense oligonucleotide
  misc_feature 1..30: note = Original Sequence: ctccaacaucaaggaagauggcauuucuag
  modified_base 1: mod_base = OTHER; note = 5-methyl
  modified_base 3..4: mod_base = OTHER; note = 5-methyl
  modified_base 7: mod_base = OTHER; note = 5-methyl
  modified_base 10: mod_base = OTHER; note = 5-methyl
  modified_base 22: mod_base = OTHER; note = 5-methyl
  modified_base 27: mod_base = OTHER; note = 5-methyl
  modified_base 1..2: mod_base = OTHER; note = bicyclic nucleic acid (BNA)
  modified_base 29..30: mod_base = OTHER; note = bicyclic nucleic acid (BNA)
  source 1..30: mol_type = other DNA
  modified_base 9: mod_base = OTHER; note = Uracil
  modified_base 19: mod_base = OTHER; note = Uracil
  modified_base 24: mod_base = OTHER; note = Uracil
  modified_base 25: mod_base = OTHER; note = Uracil
  modified_base 26: mod_base = OTHER; note = Uracil
  modified_base 28: mod_base = OTHER; note = Uracil

SEQ ID NO: 5978 - DNA, 29 bp, synthetic construct
  misc_feature 1..29: note = Description of Artificial Sequence: Synthetic Antisense oligonucleotide
  misc_feature 1..29: note = Original Sequence: ctccaacaucaaggaagauggcauuucta
  modified_base 1: mod_base = OTHER; note = 5-methyl
  modified_base 3..4: mod_base = OTHER; note = 5-methyl
  modified_base 7: mod_base = OTHER; note = 5-methyl
  modified_base 10: mod_base = OTHER; note = 5-methyl
  modified_base 22: mod_base = OTHER; note = 5-methyl
  modified_base 27: mod_base = OTHER; note = 5-methyl
  modified_base 1..2: mod_base = OTHER; note = bicyclic nucleic acid (BNA)
  modified_base 28..29: mod_base = OTHER; note = bicyclic nucleic acid (BNA)
  source 1..29: mol_type = other DNA
  modified_base 9: mod_base = OTHER; note = Uracil
  modified_base 19: mod_base = OTHER; note = Uracil
  modified_base 24: mod_base = OTHER; note = Uracil
  modified_base 25: mod_base = OTHER; note = Uracil
  modified_base 26: mod_base = OTHER; note = Uracil
ctccaacatcaaggaagatggcatttcta

SEQ ID NO: 5979 - DNA, 28 bp, synthetic construct
  misc_feature 1..28: note = Description of Artificial Sequence: Synthetic Antisense oligonucleotide
  misc_feature 1..28: note = Original Sequence: ctccaacaucaaggaagauggcauuuct
  modified_base 1: mod_base = OTHER; note = 5-methyl
  modified_base 3..4: mod_base = OTHER; note = 5-methyl
  modified_base 7: mod_base = OTHER; note = 5-methyl
  modified_base 10: mod_base = OTHER; note = 5-methyl
  modified_base 22: mod_base = OTHER; note = 5-methyl
  modified_base 27: mod_base = OTHER; note = 5-methyl
  modified_base 1..2: mod_base = OTHER; note = bicyclic nucleic acid (BNA)
  modified_base 27..28: mod_base = OTHER; note = bicyclic nucleic acid (BNA)
  source 1..28: mol_type = other DNA
  modified_base 9: mod_base = OTHER; note = Uracil
  modified_base 19: mod_base = OTHER; note = Uracil
  modified_base 24: mod_base = OTHER; note = Uracil
  modified_base 25: mod_base = OTHER; note = Uracil
  modified_base 26: mod_base = OTHER; note = Uracil
ctccaacatcaaggaagatggcatttct

SEQ ID NO: 5980 - DNA, 27 bp, synthetic construct
  misc_feature 1..27: note = Description of Artificial Sequence: Synthetic Antisense oligonucleotide
  misc_feature 1..27: note = Original Sequence: ctccaacaucaaggaagauggcauutc
  modified_base 1: mod_base = OTHER; note = 5-methyl
  modified_base 3..4: mod_base = OTHER; note = 5-methyl
  modified_base 7: mod_base = OTHER; note = 5-methyl
  modified_base 10: mod_base = OTHER; note = 5-methyl
  modified_base 22: mod_base = OTHER; note = 5-methyl
  modified_base 27: mod_base = OTHER; note = 5-methyl
  modified_base 1..2: mod_base = OTHER; note = bicyclic nucleic acid (BNA)
  modified_base 26..27: mod_base = OTHER; note = bicyclic nucleic acid (BNA)
  source 1..27: mol_type = other DNA
  modified_base 9: mod_base = OTHER; note = Uracil
  modified_base 19: mod_base = OTHER; note = Uracil
  modified_base 24: mod_base = OTHER; note = Uracil
  modified_base 25: mod_base = OTHER; note = Uracil
ctccaacatcaaggaagatggcatttc

SEQ ID NO: 5981 - DNA, 26 bp, synthetic construct
  misc_feature 1..26: note = Description of Artificial Sequence: Synthetic Antisense oligonucleotide
  misc_feature 1..26: note = Original Sequence: ctccaacaucaaggaagauggcautt
  modified_base 1: mod_base = OTHER; note = 5-methyl
  modified_base 3..4: mod_base = OTHER; note = 5-methyl
  modified_base 7: mod_base = OTHER; note = 5-methyl
  modified_base 10: mod_base = OTHER; note = 5-methyl
  modified_base 22: mod_base = OTHER; note = 5-methyl
  modified_base 1..2: mod_base = OTHER; note = bicyclic nucleic acid (BNA)
  modified_base 25..26: mod_base = OTHER; note = bicyclic nucleic acid (BNA)
  source 1..26: mol_type = other DNA
  modified_base 9: mod_base = OTHER; note = Uracil
  modified_base 19: mod_base = OTHER; note = Uracil
  modified_base 24: mod_base = OTHER; note = Uracil
ctccaacatcaaggaagatggcattt

SEQ ID NO: 5982 - DNA, 25 bp, synthetic construct
  misc_feature 1..25: note = Description of Artificial Sequence: Synthetic Antisense oligonucleotide
  misc_feature 1..25: note = Original Sequence: ctccaacaucaaggaagauggcatt
  modified_base 1: mod_base = OTHER; note = 5-methyl
  modified_base 3..4: mod_base = OTHER; note = 5-methyl
  modified_base 7: mod_base = OTHER; note = 5-methyl
  modified_base 10: mod_base = OTHER; note = 5-methyl
  modified_base 22: mod_base = OTHER; note = 5-methyl
  modified_base 1..2: mod_base = OTHER; note = bicyclic nucleic acid (BNA)
  modified_base 24..25: mod_base = OTHER; note = bicyclic nucleic acid (BNA)
  source 1..25: mol_type = other DNA
  modified_base 9: mod_base = OTHER; note = Uracil
  modified_base 19: mod_base = OTHER; note = Uracil
ctccaacatcaaggaagatggcatt

SEQ ID NO: 5983 - DNA, 24 bp, synthetic construct
  misc_feature 1..24: note = Description of Artificial Sequence: Synthetic Antisense oligonucleotide
  misc_feature 1..24: note = Original Sequence: ctccaacaucaaggaagauggcat
  modified_base 1: mod_base = OTHER; note = 5-methyl
  modified_base 3..4: mod_base = OTHER; note = 5-methyl
  modified_base 7: mod_base = OTHER; note = 5-methyl
  modified_base 10: mod_base = OTHER; note = 5-methyl
  modified_base 22: mod_base = OTHER; note = 5-methyl
  modified_base 1..2: mod_base = OTHER; note = bicyclic nucleic acid (BNA)
  modified_base 23..24: mod_base = OTHER; note = bicyclic nucleic acid (BNA)
  source 1..24: mol_type = other DNA
  modified_base 9: mod_base = OTHER; note = Uracil
  modified_base 19: mod_base = OTHER; note = Uracil
ctccaacatcaaggaagatggcat

SEQ ID NO: 5984 - DNA, 23 bp, synthetic construct
  misc_feature 1..23: note = Description of Artificial Sequence: Synthetic Antisense oligonucleotide
  misc_feature 1..23: note = Original Sequence: ctccaacaucaaggaagauggca
  modified_base 1: mod_base = OTHER; note = 5-methyl
  modified_base 3..4: mod_base = OTHER; note = 5-methyl
  modified_base 7: mod_base = OTHER; note = 5-methyl
  modified_base 10: mod_base = OTHER; note = 5-methyl
  modified_base 22: mod_base = OTHER; note = 5-methyl
  modified_base 1..2: mod_base = OTHER; note = bicyclic nucleic acid (BNA)
  modified_base 22..23: mod_base = OTHER; note = bicyclic nucleic acid (BNA)
  source 1..23: mol_type = other DNA
  modified_base 9: mod_base = OTHER; note = Uracil
  modified_base 19: mod_base = OTHER; note = Uracil
ctccaacatcaaggaagatggca

SEQ ID NO: 5985 - DNA, 22 bp, synthetic construct
  misc_feature 1..22: note = Description of Artificial Sequence: Synthetic Antisense oligonucleotide
  misc_feature 1..22: note = Original Sequence: ctccaacaucaaggaagauggc
  modified_base 1: mod_base = OTHER; note = 5-methyl
  modified_base 3..4: mod_base = OTHER; note = 5-methyl
  modified_base 7: mod_base = OTHER; note = 5-methyl
  modified_base 10: mod_base = OTHER; note = 5-methyl
  modified_base 22: mod_base = OTHER; note = 5-methyl
  modified_base 1..2: mod_base = OTHER; note = bicyclic nucleic acid (BNA)
  modified_base 21..22: mod_base = OTHER; note = bicyclic nucleic acid (BNA)
  source 1..22: mol_type = other DNA
  modified_base 9: mod_base = OTHER; note = Uracil
  modified_base 19: mod_base = OTHER; note = Uracil
ctccaacatcaaggaagatggc

SEQ ID NO: 5986 - DNA, 21 bp, synthetic construct
  misc_feature 1..21: note = Description of Artificial Sequence: Synthetic Antisense oligonucleotide
  misc_feature 1..21: note = Original Sequence: ctccaacaucaaggaagaugg
  modified_base 1: mod_base = OTHER; note = 5-methyl
  modified_base 3..4: mod_base = OTHER; note = 5-methyl
  modified_base 7: mod_base = OTHER; note = 5-methyl
  modified_base 10: mod_base = OTHER; note = 5-methyl
  modified_base 1..2: mod_base = OTHER; note = bicyclic nucleic acid (BNA)
  modified_base 20..21: mod_base = OTHER; note = bicyclic nucleic acid (BNA)
  source 1..21: mol_type = other DNA
  modified_base 9: mod_base = OTHER; note = Uracil
  modified_base 19: mod_base = OTHER; note = Uracil
ctccaacatcaaggaagatgg

SEQ ID NO: 5987 - DNA, 20 bp, synthetic construct
  misc_feature 1..20: note = Description of Artificial Sequence: Synthetic Antisense oligonucleotide
  misc_feature 1..20: note = Original Sequence: ctccaacaucaaggaagatg
  modified_base 1: mod_base = OTHER; note = 5-methyl
  modified_base 3..4: mod_base = OTHER; note = 5-methyl
  modified_base 7: mod_base = OTHER; note = 5-methyl
  modified_base 10: mod_base = OTHER; note = 5-methyl
  modified_base 1..2: mod_base = OTHER; note = bicyclic nucleic acid (BNA)
  modified_base 19..20: mod_base = OTHER; note = bicyclic nucleic acid (BNA)
  source 1..20: mol_type = other DNA
  modified_base 9: mod_base = OTHER; note = Uracil
ctccaacatcaaggaagatg

SEQ ID NO: 5988 - DNA, 19 bp, synthetic construct
  misc_feature 1..19: note = Description of Artificial Sequence: Synthetic Antisense oligonucleotide
  misc_feature 1..19: note = Original Sequence: ctccaacaucaaggaagat
  modified_base 1: mod_base = OTHER; note = 5-methyl
  modified_base 3..4: mod_base = OTHER; note = 5-methyl
  modified_base 7: mod_base = OTHER; note = 5-methyl
  modified_base 10: mod_base = OTHER; note = 5-methyl
  modified_base 1..2: mod_base = OTHER; note = bicyclic nucleic acid (BNA)
  modified_base 18..19: mod_base = OTHER; note = bicyclic nucleic acid (BNA)
  source 1..19: mol_type = other DNA
  modified_base 9: mod_base = OTHER; note = Uracil
ctccaacatcaaggaagat

SEQ ID NO: 5989 - DNA, 18 bp, synthetic construct
  misc_feature 1..18: note = Description of Artificial Sequence: Synthetic Antisense oligonucleotide
  misc_feature 1..18: note = Original Sequence: ctccaacaucaaggaaga
  modified_base 1: mod_base = OTHER; note = 5-methyl
  modified_base 3..4: mod_base = OTHER; note = 5-methyl
  modified_base 7: mod_base = OTHER; note = 5-methyl
  modified_base 10: mod_base = OTHER; note = 5-methyl
  modified_base 1..2: mod_base = OTHER; note = bicyclic nucleic acid (BNA)
  modified_base 17..18: mod_base = OTHER; note = bicyclic nucleic acid (BNA)
  source 1..18: mol_type = other DNA
  modified_base 9: mod_base = OTHER; note = Uracil
ctccaacatcaaggaaga

SEQ ID NO: 5990 - DNA, 17 bp, synthetic construct
  misc_feature 1..17: note = Description of Artificial Sequence: Synthetic Antisense oligonucleotide
  misc_feature 1..17: note = Original Sequence: ctccaacaucaaggaag
  modified_base 1: mod_base = OTHER; note = 5-methyl
  modified_base 3..4: mod_base = OTHER; note = 5-methyl
  modified_base 7: mod_base = OTHER; note = 5-methyl
  modified_base 10: mod_base = OTHER; note = 5-methyl
  modified_base 1..2: mod_base = OTHER; note = bicyclic nucleic acid (BNA)
  modified_base 16..17: mod_base = OTHER; note = bicyclic nucleic acid (BNA)
  source 1..17: mol_type = other DNA
  modified_base 9: mod_base = OTHER; note = Uracil
ctccaacatcaaggaag

SEQ ID NO: 5991 - DNA, 29 bp, synthetic construct
  misc_feature 1..29: note = Description of Artificial Sequence: Synthetic Antisense oligonucleotide
  misc_feature 1..29: note = Original Sequence: tccaacaucaaggaagauggcauuucuag
  modified_base 1..2: mod_base = OTHER; note = bicyclic nucleic acid (BNA)
  modified_base 28..29: mod_base = OTHER; note = bicyclic nucleic acid (BNA)
  modified_base 2..3: mod_base = OTHER; note = 5-methyl
  modified_base 6: mod_base = OTHER; note = 5-methyl
  modified_base 9: mod_base = OTHER; note = 5-methyl
  modified_base 21: mod_base = OTHER; note = 5-methyl
  modified_base 26: mod_base = OTHER; note = 5-methyl
  source 1..29: mol_type = other DNA
  modified_base 8: mod_base = OTHER; note = Uracil
  modified_base 18: mod_base = OTHER; note = Uracil
  modified_base 23: mod_base = OTHER; note = Uracil
  modified_base 24: mod_base = OTHER; note = Uracil
  modified_base 25: mod_base = OTHER; note = Uracil
  modified_base 27: mod_base = OTHER; note = Uracil
tccaacatcaaggaagatggcatttctag

SEQ ID NO: 5992 - DNA, 28 bp, synthetic construct
  misc_feature 1..28: note = Description of Artificial Sequence: Synthetic Antisense oligonucleotide
  misc_feature 1..28: note = Original Sequence: tccaacaucaaggaagauggcauuucta
  modified_base 1..2: mod_base = OTHER; note = bicyclic nucleic acid (BNA)
  modified_base 27..28: mod_base = OTHER; note = bicyclic nucleic acid (BNA)
  modified_base 2..3: mod_base = OTHER; note = 5-methyl
  modified_base 6: mod_base = OTHER; note = 5-methyl
  modified_base 9: mod_base = OTHER; note = 5-methyl
  modified_base 21: mod_base = OTHER; note = 5-methyl
  modified_base 26: mod_base = OTHER; note = 5-methyl
  source 1..28: mol_type = other DNA
  modified_base 8: mod_base = OTHER; note = Uracil
  modified_base 18: mod_base = OTHER; note = Uracil
  modified_base 23: mod_base = OTHER; note = Uracil
  modified_base 24: mod_base = OTHER; note = Uracil
  modified_base 25: mod_base = OTHER; note = Uracil
tccaacatcaaggaagatggcatttcta

SEQ ID NO: 5993 - DNA, 27 bp, synthetic construct
  misc_feature 1..27: note = Description of Artificial Sequence: Synthetic Antisense oligonucleotide
  misc_feature 1..27: note = Original Sequence: tccaacaucaaggaagauggcauuuct
  modified_base 1..2: mod_base = OTHER; note = bicyclic nucleic acid (BNA)
  modified_base 26..27: mod_base = OTHER; note = bicyclic nucleic acid (BNA)
  modified_base 2..3: mod_base = OTHER; note = 5-methyl
  modified_base 6: mod_base = OTHER; note = 5-methyl
  modified_base 9: mod_base = OTHER; note = 5-methyl
  modified_base 21: mod_base = OTHER; note = 5-methyl
  modified_base 26: mod_base = OTHER; note = 5-methyl
  source 1..27: mol_type = other DNA
  modified_base 8: mod_base = OTHER; note = Uracil
  modified_base 18: mod_base = OTHER; note = Uracil
  modified_base 23: mod_base = OTHER; note = Uracil
  modified_base 24: mod_base = OTHER; note = Uracil
  modified_base 25: mod_base = OTHER; note = Uracil
tccaacatcaaggaagatggcatttct

SEQ ID NO: 5994 - DNA, 26 bp, synthetic construct
  misc_feature 1..26: note = Description of Artificial Sequence: Synthetic Antisense oligonucleotide
  misc_feature 1..26: note = Original Sequence: tccaacaucaaggaagauggcauutc
  modified_base 1..2: mod_base = OTHER; note = bicyclic nucleic acid (BNA)
  modified_base 25..26: mod_base = OTHER; note = bicyclic nucleic acid (BNA)
  modified_base 2..3: mod_base = OTHER; note = 5-methyl
  modified_base 6: mod_base = OTHER; note = 5-methyl
  modified_base 9: mod_base = OTHER; note = 5-methyl
  modified_base 21: mod_base = OTHER; note = 5-methyl
  modified_base 26: mod_base = OTHER; note = 5-methyl
  source 1..26: mol_type = other DNA
  modified_base 8: mod_base = OTHER; note = Uracil
  modified_base 18: mod_base = OTHER; note = Uracil
  modified_base 23: mod_base = OTHER; note = Uracil
  modified_base 24: mod_base = OTHER; note = Uracil
tccaacatcaaggaagatggcatttc

SEQ ID NO: 5995 - DNA, 25 bp, synthetic construct
  misc_feature 1..25: note = Description of Artificial Sequence: Synthetic Antisense oligonucleotide
  misc_feature 1..25: note = Original Sequence: tccaacaucaaggaagauggcautt
  modified_base 1..2: mod_base = OTHER; note = bicyclic nucleic acid (BNA)
  modified_base 24..25: mod_base = OTHER; note = bicyclic nucleic acid (BNA)
  modified_base 2..3: mod_base = OTHER; note = 5-methyl
  modified_base 6: mod_base = OTHER; note = 5-methyl
  modified_base 9: mod_base = OTHER; note = 5-methyl
  modified_base 21: mod_base = OTHER; note = 5-methyl
  source 1..25: mol_type = other DNA
  modified_base 8: mod_base = OTHER; note = Uracil
  modified_base 18: mod_base = OTHER; note = Uracil
  modified_base 23: mod_base = OTHER; note = Uracil
tccaacatcaaggaagatggcattt

SEQ ID NO: 5996 - DNA, 24 bp, synthetic construct
  misc_feature 1..24: note = Description of Artificial Sequence: Synthetic Antisense oligonucleotide
  misc_feature 1..24: note = Original Sequence: tccaacaucaaggaagauggcatt
  modified_base 1..2: mod_base = OTHER; note = bicyclic nucleic acid (BNA)
  modified_base 23..24: mod_base = OTHER; note = bicyclic nucleic acid (BNA)
  modified_base 2..3: mod_base = OTHER; note = 5-methyl
  modified_base 6: mod_base = OTHER; note = 5-methyl
  modified_base 9: mod_base = OTHER; note = 5-methyl
  modified_base 21: mod_base = OTHER; note = 5-methyl
  source 1..24: mol_type = other DNA
  modified_base 8: mod_base = OTHER; note = Uracil
  modified_base 18: mod_base = OTHER; note = Uracil
tccaacatcaaggaagatggcatt

SEQ ID NO: 5997 - DNA, 23 bp, synthetic construct
  misc_feature 1..23: note = Description of Artificial Sequence: Synthetic Antisense oligonucleotide
  misc_feature 1..23: note = Original Sequence: tccaacaucaaggaagauggcat
  modified_base 1..2: mod_base = OTHER; note = bicyclic nucleic acid (BNA)
  modified_base 22..23: mod_base = OTHER; note = bicyclic nucleic acid (BNA)
  modified_base 2..3: mod_base = OTHER; note = 5-methyl
  modified_base 6: mod_base = OTHER; note = 5-methyl
  modified_base 9: mod_base = OTHER; note = 5-methyl
  modified_base 21: mod_base = OTHER; note = 5-methyl
  source 1..23: mol_type = other DNA
  modified_base 8: mod_base = OTHER; note = Uracil
  modified_base 18: mod_base = OTHER; note = Uracil
tccaacatcaaggaagatggcat

SEQ ID NO: 5998 - DNA, 22 bp, synthetic construct
  misc_feature 1..22: note = Description of Artificial Sequence: Synthetic Antisense oligonucleotide
  misc_feature 1..22: note = Original Sequence: tccaacaucaaggaagauggca
  modified_base 1..2: mod_base = OTHER; note = bicyclic nucleic acid (BNA)
  modified_base 21..22: mod_base = OTHER; note = bicyclic nucleic acid (BNA)
  modified_base 2..3: mod_base = OTHER; note = 5-methyl
  modified_base 6: mod_base = OTHER; note = 5-methyl
  modified_base 9: mod_base = OTHER; note = 5-methyl
  modified_base 21: mod_base = OTHER; note = 5-methyl
  source 1..22: mol_type = other DNA
  modified_base 8: mod_base = OTHER; note = Uracil
  modified_base 18: mod_base = OTHER; note = Uracil
tccaacatcaaggaagatggca

SEQ ID NO: 5999 - DNA, 21 bp, synthetic construct
  misc_feature 1..21: note = Description of Artificial Sequence: Synthetic Antisense oligonucleotide
  misc_feature 1..21: note = Original Sequence: tccaacaucaaggaagauggc
  modified_base 1..2: mod_base = OTHER; note = bicyclic nucleic acid (BNA)
  modified_base 20..21: mod_base = OTHER; note = bicyclic nucleic acid (BNA)
  modified_base 2..3: mod_base = OTHER; note = 5-methyl
  modified_base 6: mod_base = OTHER; note = 5-methyl
  modified_base 9: mod_base = OTHER; note = 5-methyl
  modified_base 21: mod_base = OTHER; note = 5-methyl
  source 1..21: mol_type = other DNA
  modified_base 8: mod_base = OTHER; note = Uracil
  modified_base 18: mod_base = OTHER; note = Uracil
tccaacatcaaggaagatggc

SEQ ID NO: 6000 - DNA, 20 bp, synthetic construct
  misc_feature 1..20: note = Description of Artificial Sequence: Synthetic Antisense oligonucleotide
  misc_feature 1..20: note = Original Sequence: tccaacaucaaggaagaugg
  modified_base 1..2: mod_base = OTHER; note = bicyclic nucleic acid (BNA)
  modified_base 19..20: mod_base = OTHER; note = bicyclic nucleic acid (BNA)
  modified_base 2..3: mod_base = OTHER; note = 5-methyl
  modified_base 6: mod_base = OTHER; note = 5-methyl
  modified_base 9: mod_base = OTHER; note = 5-methyl
  source 1..20: mol_type = other DNA
  modified_base 8: mod_base = OTHER; note = Uracil
  modified_base 18: mod_base = OTHER; note = Uracil
tccaacatcaaggaagatgg

SEQ ID NO: 6001 - DNA, 19 bp, synthetic construct
  misc_feature 1..19: note = Description of Artificial Sequence: Synthetic Antisense oligonucleotide
  misc_feature 1..19: note = Original Sequence: tccaacaucaaggaagatg
  modified_base 1..2: mod_base = OTHER; note = bicyclic nucleic acid (BNA)
  modified_base 18..19: mod_base = OTHER; note = bicyclic nucleic acid (BNA)
  modified_base 2..3: mod_base = OTHER; note = 5-methyl
  modified_base 6: mod_base = OTHER; note = 5-methyl
  modified_base 9: mod_base = OTHER; note = 5-methyl
  source 1..19: mol_type = other DNA
  modified_base 8: mod_base = OTHER; note = Uracil
tccaacatcaaggaagatg

SEQ ID NO: 6002 - DNA, 18 bp, synthetic construct
  misc_feature 1..18: note = Description of Artificial Sequence: Synthetic Antisense oligonucleotide
  misc_feature 1..18: note = Original Sequence: tccaacaucaaggaagat
  modified_base 1..2: mod_base = OTHER; note = bicyclic nucleic acid (BNA)
  modified_base 17..18: mod_base = OTHER; note = bicyclic nucleic acid (BNA)
  modified_base 2..3: mod_base = OTHER; note = 5-methyl
  modified_base 6: mod_base = OTHER; note = 5-methyl
  modified_base 9: mod_base = OTHER; note = 5-methyl
  source 1..18: mol_type = other DNA
  modified_base 8: mod_base = OTHER; note = Uracil
tccaacatcaaggaagat

SEQ ID NO: 6003 - DNA, 17 bp, synthetic construct
  misc_feature 1..17: note = Description of Artificial Sequence: Synthetic Antisense oligonucleotide
  misc_feature 1..17: note = Original Sequence: tccaacaucaaggaaga
  modified_base 1..2: mod_base = OTHER; note = bicyclic nucleic acid (BNA)
  modified_base 16..17: mod_base = OTHER; note = bicyclic nucleic acid (BNA)
  modified_base 2..3: mod_base = OTHER; note = 5-methyl
  modified_base 6: mod_base = OTHER; note = 5-methyl
  modified_base 9: mod_base = OTHER; note = 5-methyl
  source 1..17: mol_type = other DNA
  modified_base 8: mod_base = OTHER; note = Uracil
tccaacatcaaggaaga

SEQ ID NO: 6004 - DNA, 16 bp, synthetic construct
  misc_feature 1..16: note = Description of Artificial Sequence: Synthetic Antisense oligonucleotide
  misc_feature 1..16: note = Original Sequence: tccaacaucaaggaag
  modified_base 1..2: mod_base = OTHER; note = bicyclic nucleic acid (BNA)
  modified_base 15..16: mod_base = OTHER; note = bicyclic nucleic acid (BNA)
  modified_base 2..3: mod_base = OTHER; note = 5-methyl
  modified_base 6: mod_base = OTHER; note = 5-methyl
  modified_base 9: mod_base = OTHER; note = 5-methyl
  source 1..16: mol_type = other DNA
  modified_base 8: mod_base = OTHER; note = Uracil
tccaacatcaaggaag

SEQ ID NO: 6005 - RNA, 28 nt, synthetic construct
  misc_feature 1..28: note = Description of Artificial Sequence: Synthetic Antisense oligonucleotide
  modified_base 1..2: mod_base = OTHER; note = 5-methyl
  modified_base 5: mod_base = OTHER; note = 5-methyl
  modified_base 8: mod_base = OTHER; note = 5-methyl
  modified_base 20: mod_base = OTHER; note = 5-methyl
  modified_base 25: mod_base = OTHER; note = 5-methyl
  modified_base 1..2: mod_base = OTHER; note = bicyclic nucleic acid (BNA)
  modified_base 27..28: mod_base = OTHER; note = bicyclic nucleic acid (BNA)
  source 1..28: mol_type = other RNA
ccaacatcaaggaagatggcatttctag

SEQ ID NO: 6006 - DNA, 27 bp, synthetic construct
  misc_feature 1..27: note = Description of Artificial Sequence: Synthetic Antisense oligonucleotide
  misc_feature 1..27: note = Original Sequence: ccaacaucaaggaagauggcauuucta
  modified_base 1..2: mod_base = OTHER; note = 5-methyl
  modified_base 5: mod_base = OTHER; note = 5-methyl
  modified_base 8: mod_base = OTHER; note = 5-methyl
  modified_base 20: mod_base = OTHER; note = 5-methyl
  modified_base 25: mod_base = OTHER; note = 5-methyl
  modified_base 1..2: mod_base = OTHER; note = bicyclic nucleic acid (BNA)
  modified_base 26..27: mod_base = OTHER; note = bicyclic nucleic acid (BNA)
  source 1..27: mol_type = other DNA
  modified_base 7: mod_base = OTHER; note = Uracil
  modified_base 17: mod_base = OTHER; note = Uracil
  modified_base 22: mod_base = OTHER; note = Uracil
  modified_base 23: mod_base = OTHER; note = Uracil
  modified_base 24: mod_base = OTHER; note = Uracil
ccaacatcaaggaagatggcatttcta

SEQ ID NO: 6007 - DNA, 26 bp, synthetic construct
  misc_feature 1..26: note = Description of Artificial Sequence: Synthetic Antisense oligonucleotide
  misc_feature 1..26: note = Original Sequence: ccaacaucaaggaagauggcauuuct
  modified_base 1..2: mod_base = OTHER; note = 5-methyl
  modified_base 5: mod_base = OTHER; note = 5-methyl
  modified_base 8: mod_base = OTHER; note = 5-methyl
  modified_base 20: mod_base = OTHER; note = 5-methyl
  modified_base 25: mod_base = OTHER; note = 5-methyl
  modified_base 1..2: mod_base = OTHER; note = bicyclic nucleic acid (BNA)
  modified_base 25..26: mod_base = OTHER; note = bicyclic nucleic acid (BNA)
  source 1..26: mol_type = other DNA
  modified_base 7: mod_base = OTHER; note = Uracil
  modified_base 17: mod_base = OTHER; note = Uracil
  modified_base 22: mod_base = OTHER; note = Uracil
  modified_base 23: mod_base = OTHER; note = Uracil
  modified_base 24: mod_base = OTHER; note = Uracil
ccaacatcaaggaagatggcatttct

SEQ ID NO: 6008 - DNA, 25 bp, synthetic construct
  misc_feature 1..25: note = Description of Artificial Sequence: Synthetic Antisense oligonucleotide
  misc_feature 1..25: note = Original Sequence: ccaacaucaaggaagauggcauutc
  modified_base 1..2: mod_base = OTHER; note = 5-methyl
  modified_base 5: mod_base = OTHER; note = 5-methyl
  modified_base 8: mod_base = OTHER; note = 5-methyl
  modified_base 20: mod_base = OTHER; note = 5-methyl
  modified_base 25: mod_base = OTHER; note = 5-methyl
  modified_base 1..2: mod_base = OTHER; note = bicyclic nucleic acid (BNA)
  modified_base 24..25: mod_base = OTHER; note = bicyclic nucleic acid (BNA)
  source 1..25: mol_type = other DNA
  modified_base 7: mod_base = OTHER; note = Uracil
  modified_base 17: mod_base = OTHER; note = Uracil
  modified_base 22: mod_base = OTHER; note = Uracil
  modified_base 23: mod_base = OTHER; note = Uracil
ccaacatcaaggaagatggcatttc

SEQ ID NO: 6009 - DNA, 24 bp, synthetic construct
  misc_feature 1..24: note = Description of Artificial Sequence: Synthetic Antisense oligonucleotide
  misc_feature 1..24: note = Original Sequence: ccaacaucaaggaagauggcautt
  modified_base 1..2: mod_base = OTHER; note = 5-methyl
  modified_base 5: mod_base = OTHER; note = 5-methyl
  modified_base 8: mod_base = OTHER; note = 5-methyl
  modified_base 20: mod_base = OTHER; note = 5-methyl
  modified_base 1..2: mod_base = OTHER; note = bicyclic nucleic acid (BNA)
  modified_base 23..24: mod_base = OTHER; note = bicyclic nucleic acid (BNA)
  source 1..24: mol_type = other DNA
  modified_base 7: mod_base = OTHER; note = Uracil
  modified_base 17: mod_base = OTHER; note = Uracil
  modified_base 22: mod_base = OTHER; note = Uracil
ccaacatcaaggaagatggcattt

SEQ ID NO: 6010 - DNA, 23 bp, synthetic construct
  misc_feature 1..23: note = Description of Artificial Sequence: Synthetic Antisense oligonucleotide
  misc_feature 1..23: note = Original Sequence: ccaacaucaaggaagauggcatt
  modified_base 1..2: mod_base = OTHER; note = 5-methyl
  modified_base 5: mod_base = OTHER; note = 5-methyl
  modified_base 8: mod_base = OTHER; note = 5-methyl
  modified_base 20: mod_base = OTHER; note = 5-methyl
  modified_base 1..2: mod_base = OTHER; note = bicyclic nucleic acid (BNA)
  modified_base 22..23: mod_base = OTHER; note = bicyclic nucleic acid (BNA)
  source 1..23: mol_type = other DNA
  modified_base 7: mod_base = OTHER; note = Uracil
  modified_base 17: mod_base = OTHER; note = Uracil
ccaacatcaaggaagatggcatt

SEQ ID NO: 6011 - DNA, 22 bp, synthetic construct
  misc_feature 1..22: note = Description of Artificial Sequence: Synthetic Antisense oligonucleotide
  misc_feature 1..22: note = Original Sequence: ccaacaucaaggaagauggcat
  modified_base 1..2: mod_base = OTHER; note = 5-methyl
  modified_base 5: mod_base = OTHER; note = 5-methyl
  modified_base 8: mod_base = OTHER; note = 5-methyl
  modified_base 20: mod_base = OTHER; note = 5-methyl
  modified_base 1..2: mod_base = OTHER; note = bicyclic nucleic acid (BNA)
  modified_base 21..22: mod_base = OTHER; note = bicyclic nucleic acid (BNA)
  source 1..22: mol_type = other DNA
  modified_base 7: mod_base = OTHER; note = Uracil
  modified_base 17: mod_base = OTHER; note = Uracil
ccaacatcaaggaagatggcat

SEQ ID NO: 6012 - RNA, 21 nt, synthetic construct
  misc_feature 1..21: note = Description of Artificial Sequence: Synthetic Antisense oligonucleotide
  modified_base 1..2: mod_base = OTHER; note = 5-methyl
  modified_base 5: mod_base = OTHER; note = 5-methyl
  modified_base 8: mod_base = OTHER; note = 5-methyl
  modified_base 20: mod_base = OTHER; note = 5-methyl
  modified_base 1..2: mod_base = OTHER; note = bicyclic nucleic acid (BNA)
  modified_base 20..21: mod_base = OTHER; note = bicyclic nucleic acid (BNA)
  source 1..21: mol_type = other RNA
ccaacatcaaggaagatggca

SEQ ID NO: 6013 - RNA, 20 nt, synthetic construct
  misc_feature 1..20: note = Description of Artificial Sequence: Synthetic Antisense oligonucleotide
  modified_base 1..2: mod_base = OTHER; note = 5-methyl
  modified_base 5: mod_base = OTHER; note = 5-methyl
  modified_base 8: mod_base = OTHER; note = 5-methyl
  modified_base 20: mod_base = OTHER; note = 5-methyl
  modified_base 1..2: mod_base = OTHER; note = bicyclic nucleic acid (BNA)
  modified_base 19..20: mod_base = OTHER; note = bicyclic nucleic acid (BNA)
  source 1..20: mol_type = other RNA
ccaacatcaaggaagatggc

SEQ ID NO: 6014 - RNA, 19 nt, synthetic construct
  misc_feature 1..19: note = Description of Artificial Sequence: Synthetic Antisense oligonucleotide
  modified_base 1..2: mod_base = OTHER; note = 5-methyl
  modified_base 5: mod_base = OTHER; note = 5-methyl
  modified_base 8: mod_base = OTHER; note = 5-methyl
  modified_base 1..2: mod_base = OTHER; note = bicyclic nucleic acid (BNA)
  modified_base 18..19: mod_base = OTHER; note = bicyclic nucleic acid (BNA)
  source 1..19: mol_type = other RNA
ccaacatcaaggaagatgg

SEQ ID NO: 6015 - DNA, 18 bp, synthetic construct
  misc_feature 1..18: note = Description of Artificial Sequence: Synthetic Antisense oligonucleotide
  misc_feature 1..18: note = Original Sequence: ccaacaucaaggaagatg
  modified_base 1..2: mod_base = OTHER; note = 5-methyl
  modified_base 5: mod_base = OTHER; note = 5-methyl
  modified_base 8: mod_base = OTHER; note = 5-methyl
  modified_base 1..2: mod_base = OTHER; note = bicyclic nucleic acid (BNA)
  modified_base 17..18: mod_base = OTHER; note = bicyclic nucleic acid (BNA)
  source 1..18: mol_type = other DNA
  modified_base 7: mod_base = OTHER; note = Uracil
ccaacatcaaggaagatg

SEQ ID NO: 6016 - DNA, 17 bp, synthetic construct
  misc_feature 1..17: note = Description of Artificial Sequence: Synthetic Antisense oligonucleotide
  misc_feature 1..17: note = Original Sequence: ccaacaucaaggaagat
  modified_base 1..2: mod_base = OTHER; note = 5-methyl
  modified_base 5: mod_base = OTHER; note = 5-methyl
  modified_base 8: mod_base = OTHER; note = 5-methyl
  modified_base 1..2: mod_base = OTHER; note = bicyclic nucleic acid (BNA)
  modified_base 16..17: mod_base = OTHER; note = bicyclic nucleic acid (BNA)
  source 1..17: mol_type = other DNA
  modified_base 7: mod_base = OTHER; note = Uracil
ccaacatcaaggaagat

SEQ ID NO: 6017 - RNA, 16 nt, synthetic construct
  misc_feature 1..16: note = Description of Artificial Sequence: Synthetic Antisense oligonucleotide
  modified_base 1..2: mod_base = OTHER; note = 5-methyl
  modified_base 5: mod_base = OTHER; note = 5-methyl
  modified_base 8: mod_base = OTHER; note = 5-methyl
  modified_base 1..2: mod_base = OTHER; note = bicyclic nucleic acid (BNA)
  modified_base 15..16: mod_base = OTHER; note = bicyclic nucleic acid (BNA)
  source 1..16: mol_type = other RNA
ccaacatcaaggaaga

SEQ ID NO: 6018 - RNA, 15 nt, synthetic construct
  misc_feature 1..15: note = Description of Artificial Sequence: Synthetic Antisense oligonucleotide
  modified_base 1..2: mod_base = OTHER; note = 5-methyl
  modified_base 5: mod_base = OTHER; note = 5-methyl
  modified_base 8: mod_base = OTHER; note = 5-methyl
  modified_base 1..2: mod_base = OTHER; note = bicyclic nucleic acid (BNA)
  modified_base 14..15: mod_base = OTHER; note = bicyclic nucleic acid (BNA)
  source 1..15: mol_type = other RNA
ccaacatcaaggaag

SEQ ID NO: 6019 - RNA, 27 nt, synthetic construct
  misc_feature 1..27: note = Description of Artificial Sequence: Synthetic Antisense oligonucleotide
  modified_base 1: mod_base = OTHER; note = 5-methyl
  modified_base 4: mod_base = OTHER; note = 5-methyl
  modified_base 7: mod_base = OTHER; note = 5-methyl
  modified_base 19: mod_base = OTHER; note = 5-methyl
  modified_base 24: mod_base = OTHER; note = 5-methyl
  modified_base 1..2: mod_base = OTHER; note = bicyclic nucleic acid (BNA)
  modified_base 26..27: mod_base = OTHER; note = bicyclic nucleic acid (BNA)
  source 1..27: mol_type = other RNA
caacatcaaggaagatggcatttctag

SEQ ID NO: 6020 - DNA, 26 bp, synthetic construct
  misc_feature 1..26: note = Description of Artificial Sequence: Synthetic Antisense oligonucleotide
  misc_feature 1..26: note = Original Sequence: caacaucaaggaagauggcauuucta
  modified_base 1: mod_base = OTHER; note = 5-methyl
  modified_base 4: mod_base = OTHER; note = 5-methyl
  modified_base 7: mod_base = OTHER; note = 5-methyl
  modified_base 19: mod_base = OTHER; note = 5-methyl
  modified_base 24: mod_base = OTHER; note = 5-methyl
  modified_base 1..2: mod_base = OTHER; note = bicyclic nucleic acid (BNA)
  modified_base 25..26: mod_base = OTHER; note = bicyclic nucleic acid (BNA)
  source 1..26: mol_type = other DNA
  modified_base 6: mod_base = OTHER; note = Uracil
  modified_base 16: mod_base = OTHER; note = Uracil
  modified_base 21: mod_base = OTHER; note = Uracil
  modified_base 22: mod_base = OTHER; note = Uracil
  modified_base 23: mod_base = OTHER; note = Uracil
caacatcaaggaagatggcatttcta

SEQ ID NO: 6021 - DNA, 25 bp, synthetic construct
  misc_feature 1..25: note = Description of Artificial Sequence: Synthetic Antisense oligonucleotide
  misc_feature 1..25: note = Original Sequence: caacaucaaggaagauggcauuuct
  modified_base 1: mod_base = OTHER; note = 5-methyl
  modified_base 4: mod_base = OTHER; note = 5-methyl
  modified_base 7: mod_base = OTHER; note = 5-methyl
  modified_base 19: mod_base = OTHER; note = 5-methyl
  modified_base 24: mod_base = OTHER; note = 5-methyl
  modified_base 1..2: mod_base = OTHER; note = bicyclic nucleic acid (BNA)
  modified_base 24..25: mod_base = OTHER; note = bicyclic nucleic acid (BNA)
  source 1..25: mol_type = other DNA
  modified_base 6: mod_base = OTHER; note = Uracil
  modified_base 16: mod_base = OTHER; note = Uracil
  modified_base 21: mod_base = OTHER; note = Uracil
  modified_base 22: mod_base = OTHER; note = Uracil
  modified_base 23: mod_base = OTHER; note = Uracil
caacatcaaggaagatggcatttct

SEQ ID NO: 6022 - DNA, 24 bp, synthetic construct
  misc_feature 1..24: note = Description of Artificial Sequence: Synthetic Antisense oligonucleotide
  misc_feature 1..24: note = Original Sequence: caacaucaaggaagauggcauutc
  modified_base 1: mod_base = OTHER; note = 5-methyl
  modified_base 4: mod_base = OTHER; note = 5-methyl
  modified_base 7: mod_base = OTHER; note = 5-methyl
  modified_base 19: mod_base = OTHER; note = 5-methyl
  modified_base 24: mod_base = OTHER; note = 5-methyl
  modified_base 1..2: mod_base = OTHER; note = bicyclic nucleic acid (BNA)
  modified_base 23..24: mod_base = OTHER; note = bicyclic nucleic acid (BNA)
  source 1..24: mol_type = other DNA
  modified_base 6: mod_base = OTHER; note = Uracil
  modified_base 16: mod_base = OTHER; note = Uracil
  modified_base 21: mod_base = OTHER; note = Uracil
  modified_base 22: mod_base = OTHER; note = Uracil
caacatcaaggaagatggcatttc

SEQ ID NO: 6023 - DNA, 23 bp, synthetic construct
  misc_feature 1..23: note = Description of Artificial Sequence: Synthetic Antisense oligonucleotide
  misc_feature 1..23: note = Original Sequence: caacaucaaggaagauggcautt
  modified_base 1: mod_base = OTHER; note = 5-methyl
  modified_base 4: mod_base = OTHER; note = 5-methyl
  modified_base 7: mod_base = OTHER; note = 5-methyl
  modified_base 19: mod_base = OTHER; note = 5-methyl
  modified_base 1..2: mod_base = OTHER; note = bicyclic nucleic acid (BNA)
  modified_base 22..23: mod_base = OTHER; note = bicyclic nucleic acid (BNA)
  source 1..23: mol_type = other DNA
  modified_base 6: mod_base = OTHER; note = Uracil
  modified_base 16: mod_base = OTHER; note = Uracil
  modified_base 21: mod_base = OTHER; note = Uracil
caacatcaaggaagatggcattt

SEQ ID NO: 6024 - DNA, 22 bp, synthetic construct
  misc_feature 1..22: note = Description of Artificial Sequence: Synthetic Antisense oligonucleotide
  misc_feature 1..22: note = Original Sequence: caacaucaaggaagauggcatt
  modified_base 1: mod_base = OTHER; note = 5-methyl
  modified_base 4: mod_base = OTHER; note = 5-methyl
  modified_base 7: mod_base = OTHER; note = 5-methyl
  modified_base 19: mod_base = OTHER; note = 5-methyl
  modified_base 1..2: mod_base = OTHER; note = bicyclic nucleic acid (BNA)
  modified_base 21..22: mod_base = OTHER; note = bicyclic nucleic acid (BNA)
  source 1..22: mol_type = other DNA
  modified_base 6: mod_base = OTHER; note = Uracil
  modified_base 16: mod_base = OTHER; note = Uracil
caacatcaaggaagatggcatt

SEQ ID NO: 6025 - DNA, 21 bp, synthetic construct
  misc_feature 1..21: note = Description of Artificial Sequence: Synthetic Antisense oligonucleotide
  misc_feature 1..21: note = Original Sequence: caacaucaaggaagauggcat
  modified_base 1: mod_base = OTHER; note = 5-methyl
  modified_base 4: mod_base = OTHER; note = 5-methyl
  modified_base 7: mod_base = OTHER; note = 5-methyl
  modified_base 19: mod_base = OTHER; note = 5-methyl
  modified_base 1..2: mod_base = OTHER; note = bicyclic nucleic acid (BNA)
  modified_base 20..21: mod_base = OTHER; note = bicyclic nucleic acid (BNA)
  source 1..21: mol_type = other DNA
  modified_base 6: mod_base = OTHER; note = Uracil
  modified_base 16: mod_base = OTHER; note = Uracil
caacatcaaggaagatggcat

SEQ ID NO: 6026 - RNA, 20 nt, synthetic construct
  misc_feature 1..20: note = Description of Artificial Sequence: Synthetic Antisense oligonucleotide
  modified_base 1: mod_base = OTHER; note = 5-methyl
  modified_base 4: mod_base = OTHER; note = 5-methyl
  modified_base 7: mod_base = OTHER; note = 5-methyl
  modified_base 19: mod_base = OTHER; note = 5-methyl
  modified_base 1..2: mod_base = OTHER; note = bicyclic nucleic acid (BNA)
  modified_base 19..20: mod_base = OTHER; note = bicyclic nucleic acid (BNA)
  source 1..20: mol_type = other RNA
caacatcaaggaagatggca

SEQ ID NO: 6027 - RNA, 19 nt, synthetic construct
  misc_feature 1..19: note = Description of Artificial Sequence: Synthetic Antisense oligonucleotide
  modified_base 1: mod_base = OTHER; note = 5-methyl
  modified_base 4: mod_base = OTHER; note = 5-methyl
  modified_base 7: mod_base = OTHER; note = 5-methyl
  modified_base 19: mod_base = OTHER; note = 5-methyl
  modified_base 1..2: mod_base = OTHER; note = bicyclic nucleic acid (BNA)
  modified_base 18..19: mod_base = OTHER; note = bicyclic nucleic acid (BNA)
  source 1..19: mol_type = other RNA
caacatcaaggaagatggc

SEQ ID NO: 6028 - RNA, 18 nt, synthetic construct
  misc_feature 1..18: note = Description of Artificial Sequence: Synthetic Antisense oligonucleotide
  modified_base 1: mod_base = OTHER; note = 5-methyl
  modified_base 4: mod_base = OTHER; note = 5-methyl
  modified_base 7: mod_base = OTHER; note = 5-methyl
  modified_base 1..2: mod_base = OTHER; note = bicyclic nucleic acid (BNA)
  modified_base 17..18: mod_base = OTHER; note = bicyclic nucleic acid (BNA)
  source 1..18: mol_type = other RNA
caacatcaaggaagatgg

SEQ ID NO: 6029 - DNA, 17 bp, synthetic construct
  misc_feature 1..17: note = Description of Artificial Sequence: Synthetic Antisense oligonucleotide
  misc_feature 1..17: note = Original Sequence: caacaucaaggaagatg
  modified_base 1: mod_base = OTHER; note = 5-methyl
  modified_base 4: mod_base = OTHER; note = 5-methyl
  modified_base 7: mod_base = OTHER; note = 5-methyl
  modified_base 1..2: mod_base = OTHER; note = bicyclic nucleic acid (BNA)
  modified_base 16..17: mod_base = OTHER; note = bicyclic nucleic acid (BNA)
  source 1..17: mol_type = other DNA
  modified_base 6: mod_base = OTHER; note = Uracil
caacatcaaggaagatg

SEQ ID NO: 6030 - DNA, 16 bp, synthetic construct
  misc_feature 1..16: note = Description of Artificial Sequence: Synthetic Antisense oligonucleotide
  misc_feature 1..16: note = Original Sequence: caacaucaaggaagat
  modified_base 1: mod_base = OTHER; note = 5-methyl
  modified_base 4: mod_base = OTHER; note = 5-methyl
  modified_base 7: mod_base = OTHER; note = 5-methyl
  modified_base 1..2: mod_base = OTHER; note = bicyclic nucleic acid (BNA)
  modified_base 15..16: mod_base = OTHER; note = bicyclic nucleic acid (BNA)
  source 1..16: mol_type = other DNA
  modified_base 6: mod_base = OTHER; note = Uracil
caacatcaaggaagat

SEQ ID NO: 6031 - RNA, 15 nt, synthetic construct
  misc_feature 1..15: note = Description of Artificial Sequence: Synthetic Antisense oligonucleotide
  modified_base 1: mod_base = OTHER; note = 5-methyl
  modified_base 4: mod_base = OTHER; note = 5-methyl
  modified_base 7: mod_base = OTHER; note = 5-methyl
  modified_base 1..2: mod_base = OTHER; note = bicyclic nucleic acid (BNA)
  modified_base 14..15: mod_base = OTHER; note = bicyclic nucleic acid (BNA)
  source 1..15: mol_type = other RNA
caacatcaaggaaga

SEQ ID NO: 6032 - RNA, 14 nt, synthetic construct
  misc_feature 1..14: note = Description of Artificial Sequence: Synthetic Antisense oligonucleotide
  modified_base 1: mod_base = OTHER; note = 5-methyl
  modified_base 4: mod_base = OTHER; note = 5-methyl
  modified_base 7: mod_base = OTHER; note = 5-methyl
  modified_base 1..2: mod_base = OTHER; note = bicyclic nucleic acid (BNA)
  modified_base 13..14: mod_base = OTHER; note = bicyclic nucleic acid (BNA)
  source 1..14: mol_type = other RNA
caacatcaaggaag

SEQ ID NO: 6033 - RNA, 26 nt, synthetic construct
  misc_feature 1..26: note = Description of Artificial Sequence: Synthetic Antisense oligonucleotide
  modified_base 1..2: mod_base = OTHER; note = bicyclic nucleic acid (BNA)
  modified_base 25..26: mod_base = OTHER; note = bicyclic nucleic acid (BNA)
  modified_base 3: mod_base = OTHER; note = 5-methyl
  modified_base 6: mod_base = OTHER; note = 5-methyl
  modified_base 18: mod_base = OTHER; note = 5-methyl
  modified_base 23: mod_base = OTHER; note = 5-methyl
  source 1..26: mol_type = other RNA
aacatcaaggaagatggcatttctag

SEQ ID NO: 6034 - DNA, 25 bp, synthetic construct
  misc_feature 1..25: note = Description of Artificial Sequence: Synthetic Antisense oligonucleotide
  misc_feature 1..25: note = Original Sequence: aacaucaaggaagauggcauuucta
  modified_base 1..2: mod_base = OTHER; note = bicyclic nucleic acid (BNA)
  modified_base 24..25: mod_base = OTHER; note = bicyclic nucleic acid (BNA)
  modified_base 3: mod_base = OTHER; note = 5-methyl
  modified_base 6: mod_base = OTHER; note = 5-methyl
  modified_base 18: mod_base = OTHER; note = 5-methyl
  modified_base 23: mod_base = OTHER; note = 5-methyl
  source 1..25: mol_type = other DNA
  modified_base 5: mod_base = OTHER; note = Uracil
  modified_base 15: mod_base = OTHER; note = Uracil
  modified_base 20: mod_base = OTHER; note = Uracil
  modified_base 21: mod_base = OTHER; note = Uracil
  modified_base 22: mod_base = OTHER; note = Uracil
aacatcaaggaagatggcatttcta

SEQ ID NO: 6035 - DNA, 24 bp, synthetic construct
  misc_feature 1..24: note = Description of Artificial Sequence: Synthetic Antisense oligonucleotide
  misc_feature 1..24: note = Original Sequence: aacaucaaggaagauggcauuuct
  modified_base 1..2: mod_base = OTHER; note = bicyclic nucleic acid (BNA)
  modified_base 23..24: mod_base = OTHER; note = bicyclic nucleic acid (BNA)
  modified_base 3: mod_base = OTHER; note = 5-methyl
  modified_base 6: mod_base = OTHER; note = 5-methyl
  modified_base 18: mod_base = OTHER; note = 5-methyl
  modified_base 23: mod_base = OTHER; note = 5-methyl
  source 1..24: mol_type = other DNA
  modified_base 5: mod_base = OTHER; note = Uracil
  modified_base 15: mod_base = OTHER; note = Uracil
  modified_base 20: mod_base = OTHER; note = Uracil
  modified_base 21: mod_base = OTHER; note = Uracil
  modified_base 22: mod_base = OTHER; note = Uracil
aacatcaaggaagatggcatttct

SEQ ID NO: 6036 - DNA, 23 bp, synthetic construct
  misc_feature 1..23: note = Description of Artificial Sequence: Synthetic Antisense oligonucleotide
  misc_feature 1..23: note = Original Sequence: aacaucaaggaagauggcauutc
  modified_base 1..2: mod_base = OTHER; note = bicyclic nucleic acid (BNA)
  modified_base 22..23: mod_base = OTHER; note = bicyclic nucleic acid (BNA)
  modified_base 3: mod_base = OTHER; note = 5-methyl
  modified_base 6: mod_base = OTHER; note = 5-methyl
  modified_base 18: mod_base = OTHER; note = 5-methyl
  modified_base 23: mod_base = OTHER; note = 5-methyl
  source 1..23: mol_type = other DNA
  modified_base 5: mod_base = OTHER; note = Uracil
  modified_base 15: mod_base = OTHER; note = Uracil
  modified_base 20: mod_base = OTHER; note = Uracil
  modified_base 21: mod_base = OTHER; note = Uracil
aacatcaaggaagatggcatttc

SEQ ID NO: 6037 - DNA, 22 bp, synthetic construct
  misc_feature 1..22: note = Description of Artificial Sequence: Synthetic Antisense oligonucleotide
  misc_feature 1..22: note = Original Sequence: aacaucaaggaagauggcautt
  modified_base 1..2: mod_base = OTHER; note = bicyclic nucleic acid (BNA)
  modified_base 21..22: mod_base = OTHER; note = bicyclic nucleic acid (BNA)
  modified_base 3: mod_base = OTHER; note = 5-methyl
  modified_base 6: mod_base = OTHER; note = 5-methyl
  modified_base 18: mod_base = OTHER; note = 5-methyl
  source 1..22: mol_type = other DNA
  modified_base 5: mod_base = OTHER; note = Uracil
  modified_base 15: mod_base = OTHER; note = Uracil
  modified_base 20: mod_base = OTHER; note = Uracil
aacatcaaggaagatggcattt

SEQ ID NO: 6038 - DNA, 21 bp, synthetic construct
  misc_feature 1..21: note = Description of Artificial Sequence: Synthetic Antisense oligonucleotide
  misc_feature 1..21: note = Original Sequence: aacaucaaggaagauggcatt
  modified_base 1..2: mod_base = OTHER; note = bicyclic nucleic acid (BNA)
  modified_base 20..21: mod_base = OTHER; note = bicyclic nucleic acid (BNA)
  modified_base 3: mod_base = OTHER; note = 5-methyl
  modified_base 6: mod_base = OTHER; note = 5-methyl
  modified_base 18: mod_base = OTHER; note = 5-methyl
  source 1..21: mol_type = other DNA
  modified_base 5: mod_base = OTHER; note = Uracil
  modified_base 15: mod_base = OTHER; note = Uracil
aacatcaaggaagatggcatt

SEQ ID NO: 6039 - DNA, 20 bp, synthetic construct
  misc_feature 1..20: note = Description of Artificial Sequence: Synthetic Antisense oligonucleotide
  misc_feature 1..20: note = Original Sequence: aacaucaaggaagauggcat
  modified_base 1..2: mod_base = OTHER; note = bicyclic nucleic acid (BNA)
  modified_base 19..20: mod_base = OTHER; note = bicyclic nucleic acid (BNA)
  modified_base 3: mod_base = OTHER; note = 5-methyl
  modified_base 6: mod_base = OTHER; note = 5-methyl
  modified_base 18: mod_base = OTHER; note = 5-methyl
  source 1..20: mol_type = other DNA
  modified_base 5: mod_base = OTHER; note = Uracil
  modified_base 15: mod_base = OTHER; note = Uracil
aacatcaaggaagatggcat

SEQ ID NO: 6040 - RNA, 19 nt, synthetic construct
  misc_feature 1..19: note = Description of Artificial Sequence: Synthetic Antisense oligonucleotide
  modified_base 1..2: mod_base = OTHER; note = bicyclic nucleic acid (BNA)
  modified_base 18..19: mod_base = OTHER; note = bicyclic nucleic acid (BNA)
  modified_base 3: mod_base = OTHER; note = 5-methyl
  modified_base 6: mod_base = OTHER; note = 5-methyl
  modified_base 18: mod_base = OTHER; note = 5-methyl
  source 1..19: mol_type = other RNA
aacatcaaggaagatggca

SEQ ID NO: 6041 - RNA, 18 nt, synthetic construct
  misc_feature 1..18: note = Description of Artificial Sequence: Synthetic Antisense oligonucleotide
  modified_base 1..2: mod_base = OTHER; note = bicyclic nucleic acid (BNA)
  modified_base 17..18: mod_base = OTHER; note = bicyclic nucleic acid (BNA)
  modified_base 3: mod_base = OTHER; note = 5-methyl
  modified_base 6: mod_base = OTHER; note = 5-methyl
  modified_base 18: mod_base = OTHER; note = 5-methyl
  source 1..18: mol_type = other RNA
aacatcaaggaagatggc

SEQ ID NO: 6042 - RNA, 17 nt, synthetic construct
  misc_feature 1..17: note = Description of Artificial Sequence: Synthetic Antisense oligonucleotide
  modified_base 1..2: mod_base = OTHER; note = bicyclic nucleic acid (BNA)
  modified_base 16..17: mod_base = OTHER; note = bicyclic nucleic acid (BNA)
  modified_base 3: mod_base = OTHER; note = 5-methyl
  modified_base 6: mod_base = OTHER; note = 5-methyl
  source 1..17: mol_type = other RNA
aacatcaaggaagatgg

SEQ ID NO: 6043 - DNA, 16 bp, synthetic construct
  misc_feature 1..16: note = Description of Artificial Sequence: Synthetic Antisense oligonucleotide
  misc_feature 1..16: note = Original Sequence: aacaucaaggaagatg
  modified_base 1..2: mod_base = OTHER; note = bicyclic nucleic acid (BNA)
  modified_base 15..16: mod_base = OTHER; note = bicyclic nucleic acid (BNA)
  modified_base 3: mod_base = OTHER; note = 5-methyl
  modified_base 6: mod_base = OTHER; note = 5-methyl
  source 1..16: mol_type = other DNA
  modified_base 5: mod_base = OTHER; note = Uracil
aacatcaaggaagatg

SEQ ID NO: 6044 - DNA, 15 bp, synthetic construct
  misc_feature 1..15: note = Description of Artificial Sequence: Synthetic Antisense oligonucleotide
  misc_feature 1..15: note = Original Sequence: aacaucaaggaagat
  modified_base 1..2: mod_base = OTHER; note = bicyclic nucleic acid (BNA)
  modified_base 14..15: mod_base = OTHER; note = bicyclic nucleic acid (BNA)
  modified_base 3: mod_base = OTHER; note = 5-methyl
  modified_base 6: mod_base = OTHER; note = 5-methyl
  source 1..15: mol_type = other DNA
  modified_base 5: mod_base = OTHER; note = Uracil
aacatcaaggaagat

SEQ ID NO: 6045 - RNA, 14 nt, synthetic construct
  misc_feature 1..14: note = Description of Artificial Sequence: Synthetic Antisense oligonucleotide
  modified_base 1..2: mod_base = OTHER; note = bicyclic nucleic acid (BNA)
  modified_base 13..14: mod_base = OTHER; note = bicyclic nucleic acid (BNA)
  modified_base 3: mod_base = OTHER; note = 5-methyl
  modified_base 6: mod_base = OTHER; note = 5-methyl
  source 1..14: mol_type = other RNA
aacatcaaggaaga

SEQ ID NO: 6046 - RNA, 13 nt, synthetic construct
  misc_feature 1..13: note = Description of Artificial Sequence: Synthetic Antisense oligonucleotide
  modified_base 1..2: mod_base = OTHER; note = bicyclic nucleic acid (BNA)
  modified_base 12..13: mod_base = OTHER; note = bicyclic nucleic acid (BNA)
  modified_base 3: mod_base = OTHER; note = 5-methyl
  modified_base 6: mod_base = OTHER; note = 5-methyl
  source 1..13: mol_type = other RNA
aacatcaaggaag

SEQ ID NO: 6047 - RNA, 25 nt, synthetic construct
  misc_feature 1..25: note = Description of Artificial Sequence: Synthetic Antisense oligonucleotide
  modified_base 1..2: mod_base = OTHER; note = bicyclic nucleic acid (BNA)
  modified_base 24..25: mod_base = OTHER; note = bicyclic nucleic acid (BNA)
  modified_base 2: mod_base = OTHER; note = 5-methyl
  modified_base 5: mod_base = OTHER; note = 5-methyl
  modified_base 17: mod_base = OTHER; note = 5-methyl
  modified_base 22: mod_base = OTHER; note = 5-methyl
  source 1..25: mol_type = other RNA
acatcaaggaagatggcatttctag

SEQ ID NO: 6048 - DNA, 24 bp, synthetic construct
  misc_feature 1..24: note = Description of Artificial Sequence: Synthetic Antisense oligonucleotide
  misc_feature 1..24: note = Original Sequence: acaucaaggaagauggcauuucta
  modified_base 1..2: mod_base = OTHER; note = bicyclic nucleic acid (BNA)
  modified_base 23..24: mod_base = OTHER; note = bicyclic nucleic acid (BNA)
  modified_base 2: mod_base = OTHER; note = 5-methyl
  modified_base 5: mod_base = OTHER; note = 5-methyl
  modified_base 17: mod_base = OTHER; note = 5-methyl
  modified_base 22: mod_base = OTHER; note = 5-methyl
  source 1..24: mol_type = other DNA
  modified_base 4: mod_base = OTHER; note = Uracil
  modified_base 14: mod_base = OTHER; note = Uracil
  modified_base 19: mod_base = OTHER; note = Uracil
  modified_base 20: mod_base = OTHER; note = Uracil
  modified_base 21: mod_base = OTHER; note = Uracil
acatcaaggaagatggcatttcta

SEQ ID NO: 6049 - DNA, 23 bp, synthetic construct
  misc_feature 1..23: note = Description of Artificial Sequence: Synthetic Antisense oligonucleotide
  misc_feature 1..23: note = Original Sequence: acaucaaggaagauggcauuuct
  modified_base 1..2: mod_base = OTHER; note = bicyclic nucleic acid (BNA)
  modified_base 22..23: mod_base = OTHER; note = bicyclic nucleic acid (BNA)
  modified_base 2: mod_base = OTHER; note = 5-methyl
  modified_base 5: mod_base = OTHER; note = 5-methyl
  modified_base 17: mod_base = OTHER; note = 5-methyl
  modified_base 22: mod_base = OTHER; note = 5-methyl
  source 1..23: mol_type = other DNA
  modified_base 4: mod_base = OTHER; note = Uracil
  modified_base 14: mod_base = OTHER; note = Uracil
  modified_base 19: mod_base = OTHER; note = Uracil
  modified_base 20: mod_base = OTHER; note = Uracil
  modified_base 21: mod_base = OTHER; note = Uracil
acatcaaggaagatggcatttct

SEQ ID NO: 6050 - DNA, 22 bp, synthetic construct
  misc_feature 1..22: note = Description of Artificial Sequence: Synthetic Antisense oligonucleotide
  misc_feature 1..22: note = Original Sequence: acaucaaggaagauggcauutc
  modified_base 1..2: mod_base = OTHER; note = bicyclic nucleic acid (BNA)
  modified_base 21..22: mod_base = OTHER; note = bicyclic nucleic acid (BNA)
  modified_base 2: mod_base = OTHER; note = 5-methyl
  modified_base 5: mod_base = OTHER; note = 5-methyl
  modified_base 17: mod_base = OTHER; note = 5-methyl
  modified_base 22: mod_base = OTHER; note = 5-methyl
  source 1..22: mol_type = other DNA
  modified_base 4: mod_base = OTHER; note = Uracil
  modified_base 14: mod_base = OTHER; note = Uracil
  modified_base 19: mod_base = OTHER; note = Uracil
  modified_base 20: mod_base = OTHER; note = Uracil
acatcaaggaagatggcatttc

SEQ ID NO: 6051 - DNA, 21 bp, synthetic construct
  misc_feature 1..21: note = Description of Artificial Sequence: Synthetic Antisense oligonucleotide
  misc_feature 1..21: note = Original Sequence: acaucaaggaagauggcautt
  modified_base 1..2: mod_base = OTHER; note = bicyclic nucleic acid (BNA)
  modified_base 20..21: mod_base = OTHER; note = bicyclic nucleic acid (BNA)
  modified_base 2: mod_base = OTHER; note = 5-methyl
  modified_base 5: mod_base = OTHER; note = 5-methyl
  modified_base 17: mod_base = OTHER; note = 5-methyl
  source 1..21: mol_type = other DNA
  modified_base 4: mod_base = OTHER; note = Uracil
  modified_base 14: mod_base = OTHER; note = Uracil
  modified_base 19: mod_base = OTHER; note = Uracil
acatcaaggaagatggcattt

SEQ ID NO: 6052 - DNA, 20 bp, synthetic construct
  misc_feature 1..20: note = Description of Artificial Sequence: Synthetic Antisense oligonucleotide
  misc_feature 1..20: note = Original Sequence: acaucaaggaagauggcatt
  modified_base 1..2: mod_base = OTHER; note = bicyclic nucleic acid (BNA)
  modified_base 19..20: mod_base = OTHER; note = bicyclic nucleic acid (BNA)
  modified_base 2: mod_base = OTHER; note = 5-methyl
  modified_base 5: mod_base = OTHER; note = 5-methyl
  modified_base 17: mod_base = OTHER; note = 5-methyl
  source 1..20: mol_type = other DNA
  modified_base 4: mod_base = OTHER; note = Uracil
  modified_base 14: mod_base = OTHER; note = Uracil
acatcaaggaagatggcatt

SEQ ID NO: 6053 - DNA, 19 bp, synthetic construct
  misc_feature 1..19: note = Description of Artificial Sequence: Synthetic Antisense oligonucleotide
  misc_feature 1..19: note = Original Sequence: acaucaaggaagauggcat
  modified_base 1..2: mod_base = OTHER; note = bicyclic nucleic acid (BNA)
  modified_base 18..19: mod_base = OTHER; note = bicyclic nucleic acid (BNA)
  modified_base 2: mod_base = OTHER; note = 5-methyl
  modified_base 5: mod_base = OTHER; note = 5-methyl
  modified_base 17: mod_base = OTHER; note = 5-methyl
  source 1..19: mol_type = other DNA
  modified_base 4: mod_base = OTHER; note = Uracil
  modified_base 14: mod_base = OTHER; note = Uracil
acatcaaggaagatggcat

SEQ ID NO: 6054 - RNA, 18 nt, synthetic construct
  misc_feature 1..18: note = Description of Artificial Sequence: Synthetic Antisense oligonucleotide
  modified_base 1..2: mod_base = OTHER; note = bicyclic nucleic acid (BNA)
  modified_base 17..18: mod_base = OTHER; note = bicyclic nucleic acid (BNA)
  modified_base 2: mod_base = OTHER; note = 5-methyl
  modified_base 5: mod_base = OTHER; note = 5-methyl
  modified_base 17: mod_base = OTHER; note = 5-methyl
  source 1..18: mol_type = other RNA
acatcaaggaagatggca

SEQ ID NO: 6055 - RNA, 17 nt, synthetic construct
  misc_feature 1..17: note = Description of Artificial Sequence: Synthetic Antisense oligonucleotide
  modified_base 1..2: mod_base = OTHER; note = bicyclic nucleic acid (BNA)
  modified_base 16..17: mod_base = OTHER; note = bicyclic nucleic acid (BNA)
  modified_base 2: mod_base = OTHER; note = 5-methyl
  modified_base 5: mod_base = OTHER; note = 5-methyl
  modified_base 17: mod_base = OTHER; note = 5-methyl
  source 1..17: mol_type = other RNA
acatcaaggaagatggc

SEQ ID NO: 6056 - RNA, 16 nt, synthetic construct
  misc_feature 1..16: note = Description of Artificial Sequence: Synthetic Antisense oligonucleotide
  modified_base 1..2: mod_base = OTHER; note = bicyclic nucleic acid (BNA)
  modified_base 15..16: mod_base = OTHER; note = bicyclic nucleic acid (BNA)
  modified_base 2: mod_base = OTHER; note = 5-methyl
  modified_base 5: mod_base = OTHER; note = 5-methyl
  source 1..16: mol_type = other RNA
acatcaaggaagatgg

SEQ ID NO: 6057 - DNA, 15 bp, synthetic construct
  misc_feature 1..15: note = Description of Artificial Sequence: Synthetic Antisense oligonucleotide
  misc_feature 1..15: note = Original Sequence: acaucaaggaagatg
  modified_base 1..2: mod_base = OTHER; note = bicyclic nucleic acid (BNA)
  modified_base 14..15: mod_base = OTHER; note = bicyclic nucleic acid (BNA)
  modified_base 2: mod_base = OTHER; note = 5-methyl
  modified_base 5: mod_base = OTHER; note = 5-methyl
  source 1..15: mol_type = other DNA
  modified_base 4: mod_base = OTHER; note = Uracil
acatcaaggaagatg

SEQ ID NO: 6058 - DNA, 14 bp, synthetic construct
  misc_feature 1..14: note = Description of Artificial Sequence: Synthetic Antisense oligonucleotide
  misc_feature 1..14: note = Original Sequence: acaucaaggaagat
  modified_base 1..2: mod_base = OTHER; note = bicyclic nucleic acid (BNA)
  modified_base 13..14: mod_base = OTHER; note = bicyclic nucleic acid (BNA)
  modified_base 2: mod_base = OTHER; note = 5-methyl
  modified_base 5: mod_base = OTHER; note = 5-methyl
  source 1..14: mol_type = other DNA
  modified_base 4: mod_base = OTHER; note = Uracil
acatcaaggaagat

SEQ ID NO: 6059 - RNA, 13 nt, synthetic construct
  misc_feature 1..13: note = Description of Artificial Sequence: Synthetic Antisense oligonucleotide
  modified_base 1..2: mod_base = OTHER; note = bicyclic nucleic acid (BNA)
  modified_base 12..13: mod_base = OTHER; note = bicyclic nucleic acid (BNA)
  modified_base 2: mod_base = OTHER; note = 5-methyl
  modified_base 5: mod_base = OTHER; note = 5-methyl
  source 1..13: mol_type = other RNA
acatcaaggaaga

SEQ ID NO: 6060 - RNA, 12 nt, synthetic construct
  misc_feature 1..12: note = Description of Artificial Sequence: Synthetic Antisense oligonucleotide
  modified_base 1..2: mod_base = OTHER; note = bicyclic nucleic acid (BNA)
  modified_base 11..12: mod_base = OTHER; note = bicyclic nucleic acid (BNA)
  modified_base 2: mod_base = OTHER; note = 5-methyl
  modified_base 5: mod_base = OTHER; note = 5-methyl
  source 1..12: mol_type = other RNA
acatcaaggaag

SEQ ID NO: 6061 - RNA, 24 nt, synthetic construct
  misc_feature 1..24: note = Description of Artificial Sequence: Synthetic Antisense oligonucleotide
  modified_base 1: mod_base = OTHER; note = 5-methyl
  modified_base 4: mod_base = OTHER; note = 5-methyl
  modified_base 16: mod_base = OTHER; note = 5-methyl
  modified_base 21: mod_base = OTHER; note = 5-methyl
  modified_base 1..2: mod_base = OTHER; note = bicyclic nucleic acid (BNA)
  modified_base 23..24: mod_base = OTHER; note = bicyclic nucleic acid (BNA)
  source 1..24: mol_type = other RNA
catcaaggaagatggcatttctag

SEQ ID NO: 6062 - DNA, 23 bp, synthetic construct
  misc_feature 1..23: note = Description of Artificial Sequence: Synthetic Antisense oligonucleotide
  misc_feature 1..23: note = Original Sequence: caucaaggaagauggcauuucta
  modified_base 1: mod_base = OTHER; note = 5-methyl
  modified_base 4: mod_base = OTHER; note = 5-methyl
  modified_base 16: mod_base = OTHER; note = 5-methyl
  modified_base 21: mod_base = OTHER; note = 5-methyl
  modified_base 1..2: mod_base = OTHER; note = bicyclic nucleic acid (BNA)
  modified_base 22..23: mod_base = OTHER; note = bicyclic nucleic acid (BNA)
  source 1..23: mol_type = other DNA
  modified_base 3: mod_base = OTHER; note = Uracil
  modified_base 13: mod_base = OTHER; note = Uracil
  modified_base 18: mod_base = OTHER; note = Uracil
  modified_base 19: mod_base = OTHER; note = Uracil
  modified_base 20: mod_base = OTHER; note = Uracil
catcaaggaagatggcatttcta

SEQ ID NO: 6063 - DNA, 22 bp, synthetic construct
  misc_feature 1..22: note = Description of Artificial Sequence: Synthetic Antisense oligonucleotide
  misc_feature 1..22: note = Original Sequence: caucaaggaagauggcauuuct
  modified_base 1: mod_base = OTHER; note = 5-methyl
  modified_base 4: mod_base = OTHER; note = 5-methyl
  modified_base 16: mod_base = OTHER; note = 5-methyl
  modified_base 21: mod_base = OTHER; note = 5-methyl
  modified_base 1..2: mod_base = OTHER; note = bicyclic nucleic acid (BNA)
  modified_base 21..22: mod_base = OTHER; note = bicyclic nucleic acid (BNA)
  source 1..22: mol_type = other DNA
  modified_base 3: mod_base = OTHER; note = Uracil
  modified_base 13: mod_base = OTHER; note = Uracil
  modified_base 18: mod_base = OTHER; note = Uracil
  modified_base 19: mod_base = OTHER; note = Uracil
  modified_base 20: mod_base = OTHER; note = Uracil
catcaaggaagatggcatttct

SEQ ID NO: 6064 - DNA, 21 bp, synthetic construct
  misc_feature 1..21: note = Description of Artificial Sequence: Synthetic Antisense oligonucleotide
  misc_feature 1..21: note = Original Sequence: caucaaggaagauggcauutc
  modified_base 1: mod_base = OTHER; note = 5-methyl
  modified_base 4: mod_base = OTHER; note = 5-methyl
  modified_base 16: mod_base = OTHER; note = 5-methyl
  modified_base 21: mod_base = OTHER; note = 5-methyl
  modified_base 1..2: mod_base = OTHER; note = bicyclic nucleic acid (BNA)
  modified_base 20..21: mod_base = OTHER; note = bicyclic nucleic acid (BNA)
  source 1..21: mol_type = other DNA
  modified_base 3: mod_base = OTHER; note = Uracil
  modified_base 13: mod_base = OTHER; note = Uracil
  modified_base 18: mod_base = OTHER; note = Uracil
  modified_base 19: mod_base = OTHER; note = Uracil
catcaaggaagatggcatttc

SEQ ID NO: 6065 - DNA, 20 bp, synthetic construct
  misc_feature 1..20: note = Description of Artificial Sequence: Synthetic Antisense oligonucleotide
  misc_feature 1..20: note = Original Sequence: caucaaggaagauggcautt
  modified_base 1: mod_base = OTHER; note = 5-methyl
  modified_base 4: mod_base = OTHER; note = 5-methyl
  modified_base 16: mod_base = OTHER; note = 5-methyl
  modified_base 1..2: mod_base = OTHER; note = bicyclic nucleic acid (BNA)
  modified_base 19..20: mod_base = OTHER; note = bicyclic nucleic acid (BNA)
  source 1..20: mol_type = other DNA
  modified_base 3: mod_base = OTHER; note = Uracil
  modified_base 13: mod_base = OTHER; note = Uracil
  modified_base 18: mod_base = OTHER; note = Uracil
catcaaggaagatggcattt

SEQ ID NO: 6066 - DNA, 19 bp, synthetic construct
  misc_feature 1..19: note = Description of Artificial Sequence: Synthetic Antisense oligonucleotide
  misc_feature 1..19: note = Original Sequence: caucaaggaagauggcatt
  modified_base 1: mod_base = OTHER; note = 5-methyl
  modified_base 4: mod_base = OTHER; note = 5-methyl
  modified_base 16: mod_base = OTHER; note = 5-methyl
  modified_base 1..2: mod_base = OTHER; note = bicyclic nucleic acid (BNA)
  modified_base 18..19: mod_base = OTHER; note = bicyclic nucleic acid (BNA)
  source 1..19: mol_type = other DNA
  modified_base 3: mod_base = OTHER; note = Uracil
  modified_base 13: mod_base = OTHER; note = Uracil
catcaaggaagatggcatt

SEQ ID NO: 6067 - DNA, 18 bp, synthetic construct
  misc_feature 1..18: note = Description of Artificial Sequence: Synthetic Antisense oligonucleotide
  misc_feature 1..18: note = Original Sequence: caucaaggaagauggcat
  modified_base 1: mod_base = OTHER; note = 5-methyl
  modified_base 4: mod_base = OTHER; note = 5-methyl
  modified_base 16: mod_base = OTHER; note = 5-methyl
  modified_base 1..2: mod_base = OTHER; note = bicyclic nucleic acid (BNA)
  modified_base 17..18: mod_base = OTHER; note = bicyclic nucleic acid (BNA)
  source 1..18: mol_type = other DNA
  modified_base 3: mod_base = OTHER; note = Uracil
  modified_base 13: mod_base = OTHER; note = Uracil
catcaaggaagatggcat

SEQ ID NO: 6068 - RNA, 17 nt, synthetic construct
  misc_feature 1..17: note = Description of Artificial Sequence: Synthetic Antisense oligonucleotide
  modified_base 1: mod_base = OTHER; note = 5-methyl
  modified_base 4: mod_base = OTHER; note = 5-methyl
  modified_base 16: mod_base = OTHER; note = 5-methyl
  modified_base 1..2: mod_base = OTHER; note = bicyclic nucleic acid (BNA)
  modified_base 16..17: mod_base = OTHER; note = bicyclic nucleic acid (BNA)
  source 1..17: mol_type = other RNA
catcaaggaagatggca

SEQ ID NO: 6069 - RNA, 16 nt, synthetic construct
  misc_feature 1..16: note = Description of Artificial Sequence: Synthetic Antisense oligonucleotide
  modified_base 1: mod_base = OTHER; note = 5-methyl
  modified_base 4: mod_base = OTHER; note = 5-methyl
  modified_base 16: mod_base = OTHER; note = 5-methyl
  modified_base 1..2: mod_base = OTHER; note = bicyclic nucleic acid (BNA)
  modified_base 15..16: mod_base = OTHER; note = bicyclic nucleic acid (BNA)
  source 1..16: mol_type = other RNA
catcaaggaagatggc

SEQ ID NO: 6070 - RNA, 15 nt, synthetic construct
  misc_feature 1..15: note = Description of Artificial Sequence: Synthetic Antisense oligonucleotide
  modified_base 1: mod_base = OTHER; note = 5-methyl
  modified_base 4: mod_base = OTHER; note = 5-methyl
  modified_base 1..2: mod_base = OTHER; note = bicyclic nucleic acid (BNA)
  modified_base 14..15: mod_base = OTHER; note = bicyclic nucleic acid (BNA)
  source 1..15: mol_type = other RNA
catcaaggaagatgg

SEQ ID NO: 6071 - DNA, 14 bp, synthetic construct
  misc_feature 1..14: note = Description of Artificial Sequence: Synthetic Antisense oligonucleotide
  misc_feature 1..14: note = Original Sequence: caucaaggaagatg
  modified_base 1: mod_base = OTHER; note = 5-methyl
  modified_base 4: mod_base = OTHER; note = 5-methyl
  modified_base 1..2: mod_base = OTHER; note = bicyclic nucleic acid (BNA)
  modified_base 13..14: mod_base = OTHER; note = bicyclic nucleic acid (BNA)
  source 1..14: mol_type = other DNA
  modified_base 3: mod_base = OTHER; note = Uracil
catcaaggaagatg

SEQ ID NO: 6072 - DNA, 13 bp, synthetic construct
  misc_feature 1..13: note = Description of Artificial Sequence: Synthetic Antisense oligonucleotide
  misc_feature 1..13: note = Original Sequence: caucaaggaagat
  modified_base 1: mod_base = OTHER; note = 5-methyl
  modified_base 4: mod_base = OTHER; note = 5-methyl
  modified_base 1..2: mod_base = OTHER; note = bicyclic nucleic acid (BNA)
  modified_base 12..13: mod_base = OTHER; note = bicyclic nucleic acid (BNA)
  source 1..13: mol_type = other DNA
  modified_base 3: mod_base = OTHER; note = Uracil
catcaaggaagat

SEQ ID NO: 6073 - RNA, 12 nt, synthetic construct
  misc_feature 1..12: note = Description of Artificial Sequence: Synthetic Antisense oligonucleotide
  modified_base 1: mod_base = OTHER; note = 5-methyl
  modified_base 4: mod_base = OTHER; note = 5-methyl
  modified_base 1..2: mod_base = OTHER; note = bicyclic nucleic acid (BNA)
  modified_base 11..12: mod_base = OTHER; note = bicyclic nucleic acid (BNA)
  source 1..12: mol_type = other RNA
catcaaggaaga

SEQ ID NO: 6074 - RNA, 11 nt, synthetic construct
  misc_feature 1..11: note = Description of Artificial Sequence: Synthetic Antisense oligonucleotide
  modified_base 1: mod_base = OTHER; note = 5-methyl
  modified_base 4: mod_base = OTHER; note = 5-methyl
  modified_base 1..2: mod_base = OTHER; note = bicyclic nucleic acid (BNA)
  modified_base 10..11: mod_base = OTHER; note = bicyclic nucleic acid (BNA)
  source 1..11: mol_type = other RNA
catcaaggaag

SEQ ID NO: 6075 - DNA, 23 bp, synthetic construct
  misc_feature 1..23: note = Description of Artificial Sequence: Synthetic Antisense oligonucleotide
  misc_feature 1..23: note = Original Sequence: atcaaggaagauggcauuucuag
  modified_base 1..2: mod_base = OTHER; note = bicyclic nucleic acid (BNA)
  modified_base 22..23: mod_base = OTHER; note = bicyclic nucleic acid (BNA)
  modified_base 3: mod_base = OTHER; note = 5-methyl
  modified_base 15: mod_base = OTHER; note = 5-methyl
  modified_base 20: mod_base = OTHER; note = 5-methyl
  source 1..23: mol_type = other DNA
  modified_base 12: mod_base = OTHER; note = Uracil
  modified_base 17: mod_base = OTHER; note = Uracil
  modified_base 18: mod_base = OTHER; note = Uracil
  modified_base 19: mod_base = OTHER; note = Uracil
  modified_base 21: mod_base = OTHER; note = Uracil
atcaaggaagatggcatttctag

SEQ ID NO: 6076 - DNA, 22 bp, synthetic construct
  misc_feature 1..22: note = Description of Artificial Sequence: Synthetic Antisense oligonucleotide
  misc_feature 1..22: note = Original Sequence: atcaaggaagauggcauuucta
  modified_base 1..2: mod_base = OTHER; note = bicyclic nucleic acid (BNA)
  modified_base 21..22: mod_base = OTHER; note = bicyclic nucleic acid (BNA)
  modified_base 3: mod_base = OTHER; note = 5-methyl
  modified_base 15: mod_base = OTHER; note = 5-methyl
  modified_base 20: mod_base = OTHER; note = 5-methyl
  source 1..22: mol_type = other DNA
  modified_base 12: mod_base = OTHER; note = Uracil
  modified_base 17: mod_base = OTHER; note = Uracil
  modified_base 18: mod_base = OTHER; note = Uracil
  modified_base 19: mod_base = OTHER; note = Uracil
atcaaggaagatggcatttcta

SEQ ID NO: 6077 - DNA, 21 bp, synthetic construct
  misc_feature 1..21: note = Description of Artificial Sequence: Synthetic Antisense oligonucleotide
  misc_feature 1..21: note = Original Sequence: atcaaggaagauggcauuuct
  modified_base 1..2: mod_base = OTHER; note = bicyclic nucleic acid (BNA)
  modified_base 20..21: mod_base = OTHER; note = bicyclic nucleic acid (BNA)
  modified_base 3: mod_base = OTHER; note = 5-methyl
  modified_base 15: mod_base = OTHER; note = 5-methyl
  modified_base 20: mod_base = OTHER; note = 5-methyl
  source 1..21: mol_type = other DNA
  modified_base 12: mod_base = OTHER; note = Uracil
  modified_base 17: mod_base = OTHER; note = Uracil
  modified_base 18: mod_base = OTHER; note = Uracil
  modified_base 19: mod_base = OTHER; note = Uracil
atcaaggaagatggcatttct

SEQ ID NO: 6078 - DNA, 20 bp, synthetic construct
  misc_feature 1..20: note = Description of Artificial Sequence: Synthetic Antisense oligonucleotide
  misc_feature 1..20: note = Original Sequence: atcaaggaagauggcauutc
  modified_base 1..2: mod_base = OTHER; note = bicyclic nucleic acid (BNA)
  modified_base 19..20: mod_base = OTHER; note = bicyclic nucleic acid (BNA)
  modified_base 3: mod_base = OTHER; note = 5-methyl
  modified_base 15: mod_base = OTHER; note = 5-methyl
  modified_base 20: mod_base = OTHER; note = 5-methyl
  source 1..20: mol_type = other DNA
  modified_base 12: mod_base = OTHER; note = Uracil
  modified_base 17: mod_base = OTHER; note = Uracil
  modified_base 18: mod_base = OTHER; note = Uracil
atcaaggaagatggcatttc

SEQ ID NO: 6079 - DNA, 19 bp, synthetic construct
  misc_feature 1..19: note = Description of Artificial Sequence: Synthetic Antisense oligonucleotide
  misc_feature 1..19: note = Original Sequence: atcaaggaagauggcautt
  modified_base 1..2: mod_base = OTHER; note = bicyclic nucleic acid (BNA)
  modified_base 18..19: mod_base = OTHER; note = bicyclic nucleic acid (BNA)
  modified_base 3: mod_base = OTHER; note = 5-methyl
  modified_base 15: mod_base = OTHER; note = 5-methyl
  source 1..19: mol_type = other DNA
  modified_base 12: mod_base = OTHER; note = Uracil
  modified_base 17: mod_base = OTHER; note = Uracil
atcaaggaagatggcattt

SEQ ID NO: 6080 - DNA, 18 bp, synthetic construct
  misc_feature 1..18: note = Description of Artificial Sequence: Synthetic Antisense oligonucleotide
  misc_feature 1..18: note = Original Sequence: atcaaggaagauggcatt
  modified_base 1..2: mod_base = OTHER; note = bicyclic nucleic acid (BNA)
  modified_base 17..18: mod_base = OTHER; note = bicyclic nucleic acid (BNA)
  modified_base 3: mod_base = OTHER; note = 5-methyl
  modified_base 15: mod_base = OTHER; note = 5-methyl
  source 1..18: mol_type = other DNA
  modified_base 12: mod_base = OTHER; note = Uracil
atcaaggaagatggcatt

SEQ ID NO: 6081 - DNA, 17 bp, synthetic construct
  misc_feature 1..17: note = Description of Artificial Sequence: Synthetic Antisense oligonucleotide
  misc_feature 1..17: note = Original Sequence: atcaaggaagauggcat
  modified_base 1..2: mod_base = OTHER; note = bicyclic nucleic acid (BNA)
  modified_base 16..17: mod_base = OTHER; note = bicyclic nucleic acid (BNA)
  modified_base 3: mod_base = OTHER; note = 5-methyl
  modified_base 15: mod_base = OTHER; note = 5-methyl
  source 1..17: mol_type = other DNA
  modified_base 12: mod_base = OTHER; note = Uracil
atcaaggaagatggcat

SEQ ID NO: 6082 - DNA, 16 bp, synthetic construct
  misc_feature 1..16: note = Description of Artificial Sequence: Synthetic Antisense oligonucleotide
  misc_feature 1..16: note = Original Sequence: atcaaggaagauggca
  modified_base 1..2: mod_base = OTHER; note = bicyclic nucleic acid (BNA)
  modified_base 15..16: mod_base = OTHER; note = bicyclic nucleic acid (BNA)
  modified_base 3: mod_base = OTHER; note = 5-methyl
  modified_base 15: mod_base = OTHER; note = 5-methyl
  source 1..16: mol_type = other DNA
  modified_base 12: mod_base = OTHER; note = Uracil
atcaaggaagatggca

SEQ ID NO: 6083 - DNA, 15 bp, synthetic construct
  misc_feature 1..15: note = Description of Artificial Sequence: Synthetic Antisense oligonucleotide
  misc_feature 1..15: note = Original Sequence: atcaaggaagauggc
  modified_base 1..2: mod_base = OTHER; note = bicyclic nucleic acid (BNA)
  modified_base 14..15: mod_base = OTHER; note = bicyclic nucleic acid (BNA)
  modified_base 3: mod_base = OTHER; note = 5-methyl
  modified_base 15: mod_base = OTHER; note = 5-methyl
  source 1..15: mol_type = other DNA
  modified_base 12: mod_base = OTHER; note = Uracil
atcaaggaagatggc

SEQ ID NO: 6084 - DNA, 14 bp, synthetic construct
  misc_feature 1..14: note = Description of Artificial Sequence: Synthetic Antisense oligonucleotide
  misc_feature 1..14: note = Original Sequence: atcaaggaagaugg
  modified_base 1..2: mod_base = OTHER; note = bicyclic nucleic acid (BNA)
  modified_base 13..14: mod_base = OTHER; note = bicyclic nucleic acid (BNA)
  modified_base 3: mod_base = OTHER; note = 5-methyl
  source 1..14: mol_type = other DNA
  modified_base 12: mod_base = OTHER; note = Uracil
atcaaggaagatgg

SEQ ID NO: 6085 - DNA, 13 bp, synthetic construct
  misc_feature 1..13: note = Description of Artificial Sequence: Synthetic Antisense oligonucleotide
  modified_base 1..2: mod_base = OTHER; note = bicyclic nucleic acid (BNA)
  modified_base 12..13: mod_base = OTHER; note = bicyclic nucleic acid (BNA)
  modified_base 3: mod_base = OTHER; note = 5-methyl
  source 1..13: mol_type = other DNA
atcaaggaagatg

SEQ ID NO: 6086 - DNA, 12 bp, synthetic construct
  misc_feature 1..12: note = Description of Artificial Sequence: Synthetic Antisense oligonucleotide
  modified_base 1..2: mod_base = OTHER; note = bicyclic nucleic acid (BNA)
  modified_base 11..12: mod_base = OTHER; note = bicyclic nucleic acid (BNA)
  modified_base 3: mod_base = OTHER; note = 5-methyl
  source 1..12: mol_type = other DNA
atcaaggaagat

SEQ ID NO: 6087 - DNA, 11 bp, synthetic construct
  misc_feature 1..11: note = Description of Artificial Sequence: Synthetic Antisense oligonucleotide
  modified_base 1..2: mod_base = OTHER; note = bicyclic nucleic acid (BNA)
  modified_base 10..11: mod_base = OTHER; note = bicyclic nucleic acid (BNA)
  modified_base 3: mod_base = OTHER; note = 5-methyl
  source 1..11: mol_type = other DNA
atcaaggaaga

SEQ ID NO: 6088 - DNA, 10 bp, synthetic construct
  misc_feature 1..10: note = Description of Artificial Sequence: Synthetic Antisense oligonucleotide
  modified_base 1..2: mod_base = OTHER; note = bicyclic nucleic acid (BNA)
  modified_base 9..10: mod_base = OTHER; note = bicyclic nucleic acid (BNA)
  modified_base 3: mod_base = OTHER; note = 5-methyl
  source 1..10: mol_type = other DNA
atcaaggaag

SEQ ID NO: 6089 - DNA, 18 bp, synthetic construct
  misc_feature 1..18: note = Description of Artificial Sequence: Synthetic Antisense oligonucleotide
  modified_base 1: mod_base = OTHER; note = bicyclic nucleic acid (BNA)
  source 1..18: mol_type = other DNA
ggtaagttctgtccaagc

SEQ ID NO: 6090 - DNA, 18 bp, synthetic construct
  misc_feature 1..18: note = Description of Artificial Sequence: Synthetic Antisense oligonucleotide
  modified_base 1: mod_base = OTHER; note = bicyclic nucleic acid (BNA)
  source 1..18: mol_type = other DNA
gtaagttctgtccaagcc

SEQ ID NO: 6091 - DNA, 18 bp, synthetic construct
  misc_feature 1..18: note = Description of Artificial Sequence: Synthetic Antisense oligonucleotide
  modified_base 1: mod_base = OTHER; note = bicyclic nucleic acid (BNA)
  source 1..18: mol_type = other DNA
agtcggtaagttctgtcc

SEQ ID NO: 6092 - DNA, 18 bp, synthetic construct
  misc_feature 1..18: note = Description of Artificial Sequence: Synthetic Antisense oligonucleotide
  modified_base 1: mod_base = OTHER; note = bicyclic nucleic acid (BNA)
  source 1..18: mol_type = other DNA
ctgtccaagcccggttga

SEQ ID NO: 6093 - DNA, 15 bp, synthetic construct
  misc_feature 1..15: note = Description of Artificial Sequence: Synthetic Antisense oligonucleotide
  modified_base 1: mod_base = OTHER; note = bicyclic nucleic acid (BNA)
  source 1..15: mol_type = other DNA
taagttctgtccaag

SEQ ID NO: 6094 - DNA, 20 bp, synthetic construct
  misc_feature 1..20: note = Description of Artificial Sequence: Synthetic Antisense oligonucleotide
  modified_base 1: mod_base = OTHER; note = bicyclic nucleic acid (BNA)
  source 1..20: mol_type = other DNA
ttctgtccaagcccggttga

SEQ ID NO: 6095 - DNA, 19 bp, synthetic construct
  misc_feature 1..19: note = Description of Artificial Sequence: Synthetic Antisense oligonucleotide
  modified_base 1: mod_base = OTHER; note = bicyclic nucleic acid (BNA)
  source 1..19: mol_type = other DNA
ttctgtccaagcccggttg

SEQ ID NO: 6096 - DNA, 18 bp, synthetic construct
  misc_feature 1..18: note = Description of Artificial Sequence: Synthetic Antisense oligonucleotide
  modified_base 1: mod_base = OTHER; note = bicyclic nucleic acid (BNA)
  source 1..18: mol_type = other DNA
ttctgtccaagcccggtt

SEQ ID NO: 6097 - DNA, 17 bp, synthetic construct
  misc_feature 1..17: note = Description of Artificial Sequence: Synthetic Antisense oligonucleotide
  modified_base 1: mod_base = OTHER; note = bicyclic nucleic acid (BNA)
  source 1..17: mol_type = other DNA
ttctgtccaagcccggt

SEQ ID NO: 6098 - DNA, 16 bp, synthetic construct
  misc_feature 1..16: note = Description of Artificial Sequence: Synthetic Antisense oligonucleotide
  modified_base 1: mod_base = OTHER; note = bicyclic nucleic acid (BNA)
  source 1..16: mol_type = other DNA
ttctgtccaagcccgg

SEQ ID NO: 6099 - DNA, 15 bp, synthetic construct
  misc_feature 1..15: note = Description of Artificial Sequence: Synthetic Antisense oligonucleotide
  modified_base 1: mod_base = OTHER; note = bicyclic nucleic acid (BNA)
  source 1..15: mol_type = other DNA
ttctgtccaagcccg

SEQ ID NO: 6100 - DNA, 14 bp, synthetic construct
  misc_feature 1..14: note = Description of Artificial Sequence: Synthetic Antisense oligonucleotide
  modified_base 1: mod_base = OTHER; note = bicyclic nucleic acid (BNA)
  source 1..14: mol_type = other DNA
ttctgtccaagccc

SEQ ID NO: 6101 - DNA, 13 bp, synthetic construct
  misc_feature 1..13: note = Description of Artificial Sequence: Synthetic Antisense oligonucleotide
  modified_base 1: mod_base = OTHER; note = bicyclic nucleic acid (BNA)
  source 1..13: mol_type = other DNA
ttctgtccaagcc

SEQ ID NO: 6102 - DNA, 12 bp, synthetic construct
  misc_feature 1..12: note = Description of Artificial Sequence: Synthetic Antisense oligonucleotide
  modified_base 1: mod_base = OTHER; note = bicyclic nucleic acid (BNA)
  source 1..12: mol_type = other DNA
ttctgtccaagc

SEQ ID NO: 6103 - DNA, 11 bp, synthetic construct
  misc_feature 1..11: note = Description of Artificial Sequence: Synthetic Antisense oligonucleotide
  modified_base 1: mod_base = OTHER; note = bicyclic nucleic acid (BNA)
  source 1..11: mol_type = other DNA
ttctgtccaag

SEQ ID NO: 6104 - DNA, 10 bp, synthetic construct
  misc_feature 1..10: note = Description of Artificial Sequence: Synthetic Antisense oligonucleotide
  modified_base 1: mod_base = OTHER; note = bicyclic nucleic acid (BNA)
  source 1..10: mol_type = other DNA
ttctgtccaa

SEQ ID NO: 6105-6106 - skipped (2 entries)

SEQ ID NO: 6107 - DNA, 19 bp, synthetic construct
  misc_feature 1..19: note = Description of Artificial Sequence: Synthetic Antisense oligonucleotide
  modified_base 1: mod_base = OTHER; note = bicyclic nucleic acid (BNA)
  source 1..19: mol_type = other DNA
tctgtccaagcccggttga

SEQ ID NO: 6108 - DNA, 18 bp, synthetic construct
  misc_feature 1..18: note = Description of Artificial Sequence: Synthetic Antisense oligonucleotide
  modified_base 1: mod_base = OTHER; note = bicyclic nucleic acid (BNA)
  source 1..18: mol_type = other DNA
tctgtccaagcccggttg

SEQ ID NO: 6109 - DNA, 17 bp, synthetic construct
  misc_feature 1..17: note = Description of Artificial Sequence: Synthetic Antisense oligonucleotide
  modified_base 1: mod_base = OTHER; note = bicyclic nucleic acid (BNA)
  source 1..17: mol_type = other DNA
tctgtccaagcccggtt

SEQ ID NO: 6110 - DNA, 16 bp, synthetic construct
  misc_feature 1..16: note = Description of Artificial Sequence: Synthetic Antisense oligonucleotide
  modified_base 1: mod_base = OTHER; note = bicyclic nucleic acid (BNA)
  source 1..16: mol_type = other DNA
tctgtccaagcccggt

SEQ ID NO: 6111 - DNA, 15 bp, synthetic construct
  misc_feature 1..15: note = Description of Artificial Sequence: Synthetic Antisense oligonucleotide
  modified_base 1: mod_base = OTHER; note = bicyclic nucleic acid (BNA)
  source 1..15: mol_type = other DNA
tctgtccaagcccgg

SEQ ID NO: 6112 - DNA, 14 bp, synthetic construct
  misc_feature 1..14: note = Description of Artificial Sequence: Synthetic Antisense oligonucleotide
  modified_base 1: mod_base = OTHER; note = bicyclic nucleic acid (BNA)
  source 1..14: mol_type = other DNA
tctgtccaagcccg

SEQ ID NO: 6113 - DNA, 13 bp, synthetic construct
  misc_feature 1..13: note = Description of Artificial Sequence: Synthetic Antisense oligonucleotide
  modified_base 1: mod_base = OTHER; note = bicyclic nucleic acid (BNA)
  source 1..13: mol_type = other DNA
tctgtccaagccc

SEQ ID NO: 6114 - DNA, 12 bp, synthetic construct
  misc_feature 1..12: note = Description of Artificial Sequence: Synthetic Antisense oligonucleotide
  modified_base 1: mod_base = OTHER; note = bicyclic nucleic acid (BNA)
  source 1..12: mol_type = other DNA
tctgtccaagcc

SEQ ID NO: 6115 - DNA, 11 bp, synthetic construct
  misc_feature 1..11: note = Description of Artificial Sequence: Synthetic Antisense oligonucleotide
  modified_base 1: mod_base = OTHER; note = bicyclic nucleic acid (BNA)
  source 1..11: mol_type = other DNA
tctgtccaagc

SEQ ID NO: 6116 - DNA, 10 bp, synthetic construct
  misc_feature 1..10: note = Description of Artificial Sequence: Synthetic Antisense oligonucleotide
  modified_base 1: mod_base = OTHER; note = bicyclic nucleic acid (BNA)
  source 1..10: mol_type = other DNA
tctgtccaag

SEQ ID NO: 6117-6118 - skipped (2 entries)

SEQ ID NO: 6119 - DNA, 17 bp, synthetic construct
  misc_feature 1..17: note = Description of Artificial Sequence: Synthetic Antisense oligonucleotide
  modified_base 1: mod_base = OTHER; note = bicyclic nucleic acid (BNA)
  source 1..17: mol_type = other DNA
ctgtccaagcccggttg

SEQ ID NO: 6120 - DNA, 16 bp, synthetic construct
  misc_feature 1..16: note = Description of Artificial Sequence: Synthetic Antisense oligonucleotide
  modified_base 1: mod_base = OTHER; note = bicyclic nucleic acid (BNA)
  source 1..16: mol_type = other DNA
ctgtccaagcccggtt

SEQ ID NO: 6121 - DNA, 15 bp, synthetic construct
  misc_feature 1..15: note = Description of Artificial Sequence: Synthetic Antisense oligonucleotide
  modified_base 1: mod_base = OTHER; note = bicyclic nucleic acid (BNA)
  source 1..15: mol_type = other DNA
ctgtccaagcccggt

SEQ ID NO: 6122 - DNA, 14 bp, synthetic construct
  misc_feature 1..14: note = Description of Artificial Sequence: Synthetic Antisense oligonucleotide
  modified_base 1: mod_base = OTHER; note = bicyclic nucleic acid (BNA)
  source 1..14: mol_type = other DNA
ctgtccaagcccgg

SEQ ID NO: 6123 - DNA, 13 bp, synthetic construct
  misc_feature 1..13: note = Description of Artificial Sequence: Synthetic Antisense oligonucleotide
  modified_base 1: mod_base = OTHER; note = bicyclic nucleic acid (BNA)
  source 1..13: mol_type = other DNA
ctgtccaagcccg

SEQ ID NO: 6124 - DNA, 12 bp, synthetic construct
  misc_feature 1..12: note = Description of Artificial Sequence: Synthetic Antisense oligonucleotide
  modified_base 1: mod_base = OTHER; note = bicyclic nucleic acid (BNA)
  source 1..12: mol_type = other DNA
ctgtccaagccc

SEQ ID NO: 6125 - DNA, 11 bp, synthetic construct
  misc_feature 1..11: note = Description of Artificial Sequence: Synthetic Antisense oligonucleotide
  modified_base 1: mod_base = OTHER; note = bicyclic nucleic acid (BNA)
  source 1..11: mol_type = other DNA
ctgtccaagcc

SEQ ID NO: 6126 - DNA, 10 bp, synthetic construct
  misc_feature 1..10: note = Description of Artificial Sequence: Synthetic Antisense oligonucleotide
  modified_base 1: mod_base = OTHER; note = bicyclic nucleic acid (BNA)
  source 1..10: mol_type = other DNA
ctgtccaagc

SEQ ID NO: 6127-6128 - skipped (2 entries)

SEQ ID NO: 6129 - DNA, 20 bp, synthetic construct
  misc_feature 1..20: note = Description of Artificial Sequence: Synthetic Antisense oligonucleotide
  modified_base 1: mod_base = OTHER; note = bicyclic nucleic acid (BNA)
  source 1..20: mol_type = other DNA
gttctgtccaagcccggttg

SEQ ID NO: 6130 - DNA, 19 bp, synthetic construct
  misc_feature 1..19: note = Description of Artificial Sequence: Synthetic Antisense oligonucleotide
  modified_base 1: mod_base = OTHER; note = bicyclic nucleic acid (BNA)
  source 1..19: mol_type = other DNA
gttctgtccaagcccggtt

SEQ ID NO: 6131 - DNA, 18 bp, synthetic construct
  misc_feature 1..18: note = Description of Artificial Sequence: Synthetic Antisense oligonucleotide
  modified_base 1: mod_base = OTHER; note = bicyclic nucleic acid (BNA)
  source 1..18: mol_type = other DNA
gttctgtccaagcccggt

SEQ ID NO: 6132 - DNA, 17 bp, synthetic construct
  misc_feature 1..17: note = Description of Artificial Sequence: Synthetic Antisense oligonucleotide
  modified_base 1: mod_base = OTHER; note = bicyclic nucleic acid (BNA)
  source 1..17: mol_type = other DNA
gttctgtccaagcccgg

SEQ ID NO: 6133 - DNA, 16 bp, synthetic construct
  misc_feature 1..16: note = Description of Artificial Sequence: Synthetic Antisense oligonucleotide
  modified_base 1: mod_base = OTHER; note = bicyclic nucleic acid (BNA)
  source 1..16: mol_type = other DNA
gttctgtccaagcccg

SEQ ID NO: 6134 - DNA, 15 bp, synthetic construct
  misc_feature 1..15: note = Description of Artificial Sequence: Synthetic Antisense oligonucleotide
  modified_base 1: mod_base = OTHER; note = bicyclic nucleic acid (BNA)
  source 1..15: mol_type = other DNA
gttctgtccaagccc

SEQ ID NO: 6135 - DNA, 14 bp, synthetic construct
  misc_feature 1..14: note = Description of Artificial Sequence: Synthetic Antisense oligonucleotide
  modified_base 1: mod_base = OTHER; note = bicyclic nucleic acid (BNA)
  source 1..14: mol_type = other DNA
gttctgtccaagcc

SEQ ID NO: 6136 - DNA, 13 bp, synthetic construct
  misc_feature 1..13: note = Description of Artificial Sequence: Synthetic Antisense oligonucleotide
  modified_base 1: mod_base = OTHER; note = bicyclic nucleic acid (BNA)
  source 1..13: mol_type = other DNA
gttctgtccaagc

SEQ ID NO: 6137 - DNA, 12 bp, synthetic construct
  misc_feature 1..12: note = Description of Artificial Sequence: Synthetic Antisense oligonucleotide
  modified_base 1: mod_base = OTHER; note = bicyclic nucleic acid (BNA)
  source 1..12: mol_type = other DNA
gttctgtccaag

SEQ ID NO: 6138 - DNA, 11 bp, synthetic construct
  misc_feature 1..11: note = Description of Artificial Sequence: Synthetic Antisense oligonucleotide
  modified_base 1: mod_base = OTHER; note = bicyclic nucleic acid (BNA)
  source 1..11: mol_type = other DNA
gttctgtccaa

SEQ ID NO: 6139 - DNA, 10 bp, synthetic construct
  misc_feature 1..10: note = Description of Artificial Sequence: Synthetic Antisense oligonucleotide
  modified_base 1: mod_base = OTHER; note = bicyclic nucleic acid (BNA)
  source 1..10: mol_type = other DNA
gttctgtcca

SEQ ID NO: 6140-6141 - skipped (2 entries)

SEQ ID NO: 6142 - DNA, 20 bp, synthetic construct
  misc_feature 1..20: note = Description of Artificial Sequence: Synthetic Antisense oligonucleotide
  modified_base 1: mod_base = OTHER; note = bicyclic nucleic acid (BNA)
  source 1..20: mol_type = other DNA
agttctgtccaagcccggtt

SEQ ID NO: 6143 - DNA, 19 bp, synthetic construct
  misc_feature 1..19: note = Description of Artificial Sequence: Synthetic Antisense oligonucleotide
  modified_base 1: mod_base = OTHER; note = bicyclic nucleic acid (BNA)
  source 1..19: mol_type = other DNA
agttctgtccaagcccggt

SEQ ID NO: 6144 - DNA, 18 bp, synthetic construct
  misc_feature 1..18: note = Description of Artificial Sequence: Synthetic Antisense oligonucleotide
  modified_base 1: mod_base = OTHER; note = bicyclic nucleic acid (BNA)
  source 1..18: mol_type = other DNA
agttctgtccaagcccgg

SEQ ID NO: 6145 - DNA, 17 bp, synthetic construct
  misc_feature 1..17: note = Description of Artificial Sequence: Synthetic Antisense oligonucleotide
  modified_base 1: mod_base = OTHER; note = bicyclic nucleic acid (BNA)
  source 1..17: mol_type = other DNA
agttctgtccaagcccg

SEQ ID NO: 6146 - DNA, 16 bp, synthetic construct
  misc_feature 1..16: note = Description of Artificial Sequence: Synthetic Antisense oligonucleotide
  modified_base 1: mod_base = OTHER; note = bicyclic nucleic acid (BNA)
  source 1..16: mol_type = other DNA
agttctgtccaagccc

SEQ ID NO: 6147 - DNA, 15 bp, synthetic construct
  misc_feature 1..15: note = Description of Artificial Sequence: Synthetic Antisense oligonucleotide
  modified_base 1: mod_base = OTHER; note = bicyclic nucleic acid (BNA)
  source 1..15: mol_type = other DNA
agttctgtccaagcc

SEQ ID NO: 6148 - DNA, 14 bp, synthetic construct
  misc_feature 1..14: note = Description of Artificial Sequence: Synthetic Antisense oligonucleotide
  modified_base 1: mod_base = OTHER; note = bicyclic nucleic acid (BNA)
  source 1..14: mol_type = other DNA
agttctgtccaagc

SEQ ID NO: 6149 - DNA, 13 bp, synthetic construct
  misc_feature 1..13: note = Description of Artificial Sequence: Synthetic Antisense oligonucleotide
  modified_base 1: mod_base = OTHER; note = bicyclic nucleic acid (BNA)
  source 1..13: mol_type = other DNA
agttctgtccaag

SEQ ID NO: 6150 - DNA, 12 bp, synthetic construct
  misc_feature 1..12: note = Description of Artificial Sequence: Synthetic Antisense oligonucleotide
  modified_base 1: mod_base = OTHER; note = bicyclic nucleic acid (BNA)
  source 1..12: mol_type = other DNA
agttctgtccaa

SEQ ID NO: 6151 - DNA, 11 bp, synthetic construct
  misc_feature 1..11: note = Description of Artificial Sequence: Synthetic Antisense oligonucleotide
  modified_base 1: mod_base = OTHER; note = bicyclic nucleic acid (BNA)
  source 1..11: mol_type = other DNA
agttctgtcca

SEQ ID NO: 6152 - DNA, 10 bp, synthetic construct
  misc_feature 1..10: note = Description of Artificial Sequence: Synthetic Antisense oligonucleotide
  modified_base 1: mod_base = OTHER; note = bicyclic nucleic acid (BNA)
  source 1..10: mol_type = other DNA
agttctgtcc

SEQ ID NO: 6153-6154 - skipped (2 entries)

SEQ ID NO: 6155 - DNA, 20 bp, synthetic construct
  misc_feature 1..20: note = Description of Artificial Sequence: Synthetic Antisense oligonucleotide
  modified_base 1: mod_base = OTHER; note = bicyclic nucleic acid (BNA)
  source 1..20: mol_type = other DNA
aagttctgtccaagcccggt

SEQ ID NO: 6156 - DNA, 19 bp, synthetic construct
  misc_feature 1..19: note = Description of Artificial Sequence: Synthetic Antisense oligonucleotide
  modified_base 1: mod_base = OTHER; note = bicyclic nucleic acid (BNA)
  source 1..19: mol_type = other DNA
aagttctgtccaagcccgg

SEQ ID NO: 6157 - DNA, 18 bp, synthetic construct
  misc_feature 1..18: note = Description of Artificial Sequence: Synthetic Antisense oligonucleotide
  modified_base 1: mod_base = OTHER; note = bicyclic nucleic acid (BNA)
  source 1..18: mol_type = other DNA
aagttctgtccaagcccg

SEQ ID NO: 6158 - DNA, 17 bp, synthetic construct
  misc_feature 1..17: note = Description of Artificial Sequence: Synthetic Antisense oligonucleotide
  modified_base 1: mod_base = OTHER; note = bicyclic nucleic acid (BNA)
  source 1..17: mol_type = other DNA
aagttctgtccaagccc

SEQ ID NO: 6159 - DNA, 16 bp, synthetic construct
  misc_feature 1..16: note = Description of Artificial Sequence: Synthetic Antisense oligonucleotide
  modified_base 1: mod_base = OTHER; note = bicyclic nucleic acid (BNA)
  source 1..16: mol_type = other DNA
aagttctgtccaagcc

SEQ ID NO: 6160 - DNA, 15 bp, synthetic construct
  misc_feature 1..15: note = Description of Artificial Sequence: Synthetic Antisense oligonucleotide
  modified_base 1: mod_base = OTHER; note = bicyclic nucleic acid (BNA)
  source 1..15: mol_type = other DNA
aagttctgtccaagc

SEQ ID NO: 6161 - DNA, 14 bp, synthetic construct
  misc_feature 1..14: note = Description of Artificial Sequence: Synthetic Antisense oligonucleotide
  modified_base 1: mod_base = OTHER; note = bicyclic nucleic acid (BNA)
  source 1..14: mol_type = other DNA
aagttctgtccaag

SEQ ID NO: 6162 - DNA, 13 bp, synthetic construct
  misc_feature 1..13: note = Description of Artificial Sequence: Synthetic Antisense oligonucleotide
  modified_base 1: mod_base = OTHER; note = bicyclic nucleic acid (BNA)
  source 1..13: mol_type = other DNA
aagttctgtccaa

SEQ ID NO: 6163 - DNA, 12 bp, synthetic construct
  misc_feature 1..12: note = Description of Artificial Sequence: Synthetic Antisense oligonucleotide
  modified_base 1: mod_base = OTHER; note = bicyclic nucleic acid (BNA)
  source 1..12: mol_type = other DNA
aagttctgtcca

SEQ ID NO: 6164 - DNA, 11 bp, synthetic construct
  misc_feature 1..11: note = Description of Artificial Sequence: Synthetic Antisense oligonucleotide
  modified_base 1: mod_base = OTHER; note = bicyclic nucleic acid (BNA)
  source 1..11: mol_type = other DNA
aagttctgtcc

SEQ ID NO: 6165 - DNA, 10 bp, synthetic construct
  misc_feature 1..10: note = Description of Artificial Sequence: Synthetic Antisense oligonucleotide
  modified_base 1: mod_base = OTHER; note = bicyclic nucleic acid (BNA)
  source 1..10: mol_type = other DNA
aagttctgtc

SEQ ID NO: 6166-6167 - skipped (2 entries)

SEQ ID NO: 6168 - DNA, 20 bp, synthetic construct
  misc_feature 1..20: note = Description of Artificial Sequence: Synthetic Antisense oligonucleotide
  modified_base 1: mod_base = OTHER; note = bicyclic nucleic acid (BNA)
  source 1..20: mol_type = other DNA
taagttctgtccaagcccgg

SEQ ID NO: 6169 - DNA, 19 bp, synthetic construct
  misc_feature 1..19: note = Description of Artificial Sequence: Synthetic Antisense oligonucleotide
  modified_base 1: mod_base = OTHER; note = bicyclic nucleic acid (BNA)
  source 1..19: mol_type = other DNA
taagttctgtccaagcccg

SEQ ID NO: 6170 - DNA, 18 bp, synthetic construct
  misc_feature 1..18: note = Description of Artificial Sequence: Synthetic Antisense oligonucleotide
  modified_base 1: mod_base = OTHER; note = bicyclic nucleic acid (BNA)
  source 1..18: mol_type = other DNA
taagttctgtccaagccc

SEQ ID NO: 6171 - DNA, 17 bp, synthetic construct
  misc_feature 1..17: note = Description of Artificial Sequence: Synthetic Antisense oligonucleotide
  modified_base 1: mod_base = OTHER; note = bicyclic nucleic acid (BNA)
  source 1..17: mol_type = other DNA
taagttctgtccaagcc

SEQ ID NO: 6172 - DNA, 16 bp, synthetic construct
  misc_feature 1..16: note = Description of Artificial Sequence: Synthetic Antisense oligonucleotide
  modified_base 1: mod_base = OTHER; note = bicyclic nucleic acid (BNA)
  source 1..16: mol_type = other DNA
taagttctgtccaagc

SEQ ID NO: 6173 - DNA, 14 bp, synthetic construct
  misc_feature 1..14: note = Description of Artificial Sequence: Synthetic Antisense oligonucleotide
  modified_base 1: mod_base = OTHER; note = bicyclic nucleic acid (BNA)
  source 1..14: mol_type = other DNA
taagttctgtccaa

SEQ ID NO: 6174 - DNA, 13 bp, synthetic construct
  misc_feature 1..13: note = Description of Artificial Sequence: Synthetic Antisense oligonucleotide
  modified_base 1: mod_base = OTHER; note = bicyclic nucleic acid (BNA)
  source 1..13: mol_type = other DNA
taagttctgtcca

SEQ ID NO: 6175 - DNA, 12 bp, synthetic construct
  misc_feature 1..12: note = Description of Artificial Sequence: Synthetic Antisense oligonucleotide
  modified_base 1: mod_base = OTHER; note = bicyclic nucleic acid (BNA)
  source 1..12: mol_type = other DNA
taagttctgtcc

SEQ ID NO: 6176 - DNA, 11 bp, synthetic construct
  misc_feature 1..11: note = Description of Artificial Sequence: Synthetic Antisense oligonucleotide
  modified_base 1: mod_base = OTHER; note = bicyclic nucleic acid (BNA)
  source 1..11: mol_type = other DNA
taagttctgtc

SEQ ID NO: 6177 - DNA, 10 bp, synthetic construct
  misc_feature 1..10: note = Description of Artificial Sequence: Synthetic Antisense oligonucleotide
  modified_base 1: mod_base = OTHER; note = bicyclic nucleic acid (BNA)
  source 1..10: mol_type = other DNA
taagttctgt

SEQ ID NO: 6178-6179 - skipped (2 entries)

SEQ ID NO: 6180 - DNA, 20 bp, synthetic construct
  misc_feature 1..20: note = Description of Artificial Sequence: Synthetic Antisense oligonucleotide
  modified_base 1: mod_base = OTHER; note = bicyclic nucleic acid (BNA)
  source 1..20: mol_type = other DNA
gtaagttctgtccaagcccg

SEQ ID NO: 6181 - DNA, 19 bp, synthetic construct
  misc_feature 1..19: note = Description of Artificial Sequence: Synthetic Antisense oligonucleotide
  modified_base 1: mod_base = OTHER; note = bicyclic nucleic acid (BNA)
  source 1..19: mol_type = other DNA
gtaagttctgtccaagccc

SEQ ID NO: 6182 - DNA, 17 bp, synthetic construct
  misc_feature 1..17: note = Description of Artificial Sequence: Synthetic Antisense oligonucleotide
  modified_base 1: mod_base = OTHER; note = bicyclic nucleic acid (BNA)
  source 1..17: mol_type = other DNA
gtaagttctgtccaagc

SEQ ID NO: 6183 - DNA, 16 bp, synthetic construct
  misc_feature 1..16: note = Description of Artificial Sequence: Synthetic Antisense oligonucleotide
  modified_base 1: mod_base = OTHER; note = bicyclic nucleic acid (BNA)
  source 1..16: mol_type = other DNA
gtaagttctgtccaag

SEQ ID NO: 6184 - DNA, 15 bp, synthetic construct
  misc_feature 1..15: note = Description of Artificial Sequence: Synthetic Antisense oligonucleotide
  modified_base 1: mod_base = OTHER; note = bicyclic nucleic acid (BNA)
  source 1..15: mol_type = other DNA
gtaagttctgtccaa

SEQ ID NO: 6185 - DNA, 14 bp, synthetic construct
  misc_feature 1..14: note = Description of Artificial Sequence: Synthetic Antisense oligonucleotide
  modified_base 1: mod_base = OTHER; note = bicyclic nucleic acid (BNA)
  source 1..14: mol_type = other DNA
gtaagttctgtcca

SEQ ID NO: 6186 - DNA, 13 bp, synthetic construct
  misc_feature 1..13: note = Description of Artificial Sequence: Synthetic Antisense oligonucleotide
  modified_base 1: mod_base = OTHER; note = bicyclic nucleic acid (BNA)
  source 1..13: mol_type = other DNA
gtaagttctgtcc

SEQ ID NO: 6187 - DNA, 12 bp, synthetic construct
  misc_feature 1..12: note = Description of Artificial Sequence: Synthetic Antisense oligonucleotide
  modified_base 1: mod_base = OTHER; note = bicyclic nucleic acid (BNA)
  source 1..12: mol_type = other DNA
gtaagttctgtc

SEQ ID NO: 6188 - DNA, 11 bp, synthetic construct
  misc_feature 1..11: note = Description of Artificial Sequence: Synthetic Antisense oligonucleotide
  modified_base 1: mod_base = OTHER; note = bicyclic nucleic acid (BNA)
  source 1..11: mol_type = other DNA
gtaagttctgt

SEQ ID NO: 6189 - DNA, 10 bp, synthetic construct
  misc_feature 1..10: note = Description of Artificial Sequence: Synthetic Antisense oligonucleotide
  modified_base 1: mod_base = OTHER; note = bicyclic nucleic acid (BNA)
  source 1..10: mol_type = other DNA
gtaagttctg

SEQ ID NO: 6190-6191 - skipped (2 entries)

SEQ ID NO: 6192 - DNA, 20 bp, synthetic construct
  misc_feature 1..20: note = Description of Artificial Sequence: Synthetic Antisense oligonucleotide
  modified_base 1: mod_base = OTHER; note = bicyclic nucleic acid (BNA)
  source 1..20: mol_type = other DNA
ggtaagttctgtccaagccc

SEQ ID NO: 6193 - DNA, 19 bp, synthetic construct
  misc_feature 1..19: note = Description of Artificial Sequence: Synthetic Antisense oligonucleotide
  modified_base 1: mod_base = OTHER; note = bicyclic nucleic acid (BNA)
  source 1..19: mol_type = other DNA
ggtaagttctgtccaagcc

SEQ ID NO: 6194 - DNA, 17 bp, synthetic construct
  misc_feature 1..17: note = Description of Artificial Sequence: Synthetic Antisense oligonucleotide
  modified_base 1: mod_base = OTHER; note = bicyclic nucleic acid (BNA)
  source 1..17: mol_type = other DNA
ggtaagttctgtccaag

SEQ ID NO: 6195 - DNA, 16 bp, synthetic construct
  misc_feature 1..16: note = Description of Artificial Sequence: Synthetic Antisense oligonucleotide
  modified_base 1: mod_base = OTHER; note = bicyclic nucleic acid (BNA)
  source 1..16: mol_type = other DNA
ggtaagttctgtccaa

SEQ ID NO: 6196 - DNA, 15 bp, synthetic construct
  misc_feature 1..15: note = Description of Artificial Sequence: Synthetic Antisense oligonucleotide
  modified_base 1: mod_base = OTHER; note = bicyclic nucleic acid (BNA)
  source 1..15: mol_type = other DNA
ggtaagttctgtcca

SEQ ID NO: 6197 - DNA, 14 bp, synthetic construct
  misc_feature 1..14: note = Description of Artificial Sequence: Synthetic Antisense oligonucleotide
  modified_base 1: mod_base = OTHER; note = bicyclic nucleic acid (BNA)
  source 1..14: mol_type = other DNA
ggtaagttctgtcc

SEQ ID NO: 6198 - DNA, 13 bp, synthetic construct
  misc_feature 1..13: note = Description of Artificial Sequence: Synthetic Antisense oligonucleotide
  modified_base 1: mod_base = OTHER; note = bicyclic nucleic acid (BNA)
  source 1..13: mol_type = other DNA
ggtaagttctgtc

SEQ ID NO: 6199 - DNA, 12 bp, synthetic construct
  misc_feature 1..12: note = Description of Artificial Sequence: Synthetic Antisense oligonucleotide
  modified_base 1: mod_base = OTHER; note = bicyclic nucleic acid (BNA)
  source 1..12: mol_type = other DNA
ggtaagttctgt

SEQ ID NO: 6200 - DNA, 11 bp, synthetic construct
  misc_feature 1..11: note = Description of Artificial Sequence: Synthetic Antisense oligonucleotide
  modified_base 1: mod_base = OTHER; note = bicyclic nucleic acid (BNA)
  source 1..11: mol_type = other DNA
ggtaagttctg

SEQ ID NO: 6201 - DNA, 10 bp, synthetic construct
  misc_feature 1..10: note = Description of Artificial Sequence: Synthetic Antisense oligonucleotide
  modified_base 1: mod_base = OTHER; note = bicyclic nucleic acid (BNA)
  source 1..10: mol_type = other DNA
ggtaagttct

SEQ ID NO: 6202-6203 - skipped (2 entries)

SEQ ID NO: 6204 - DNA, 20 bp, synthetic construct
  misc_feature 1..20: note = Description of Artificial Sequence: Synthetic Antisense oligonucleotide
  modified_base 1: mod_base = OTHER; note = bicyclic nucleic acid (BNA)
  source 1..20: mol_type = other DNA
cggtaagttctgtccaagcc

SEQ ID NO: 6205 - DNA, 19 bp, synthetic construct
  misc_feature 1..19: note = Description of Artificial Sequence: Synthetic Antisense oligonucleotide
  modified_base 1: mod_base = OTHER; note = bicyclic nucleic acid (BNA)
  source 1..19: mol_type = other DNA
cggtaagttctgtccaagc

SEQ ID NO: 6206 - DNA, 18 bp, synthetic construct
  misc_feature 1..18: note = Description of Artificial Sequence: Synthetic Antisense oligonucleotide
  modified_base 1: mod_base = OTHER; note = bicyclic nucleic acid (BNA)
  source 1..18: mol_type = other DNA
cggtaagttctgtccaag

SEQ ID NO: 6207 - DNA, 17 bp, synthetic construct
  misc_feature 1..17: note = Description of Artificial Sequence: Synthetic Antisense oligonucleotide
  modified_base 1: mod_base = OTHER; note = bicyclic nucleic acid (BNA)
  source 1..17: mol_type = other DNA
cggtaagttctgtccaa

SEQ ID NO: 6208 - DNA, 16 bp, synthetic construct
  misc_feature 1..16: note = Description of Artificial Sequence: Synthetic Antisense oligonucleotide
  modified_base 1: mod_base = OTHER; note = bicyclic nucleic acid (BNA)
  source 1..16: mol_type = other DNA
cggtaagttctgtcca

SEQ ID NO: 6209 - DNA, 15 bp, synthetic construct
  misc_feature 1..15: note = Description of Artificial Sequence: Synthetic Antisense oligonucleotide
  modified_base 1: mod_base = OTHER; note = bicyclic nucleic acid (BNA)
  source 1..15: mol_type = other DNA
cggtaagttctgtcc

SEQ ID NO: 6210 - DNA, 14 bp, synthetic construct
  misc_feature 1..14: note = Description of Artificial Sequence: Synthetic Antisense oligonucleotide
  modified_base 1: mod_base = OTHER; note = bicyclic nucleic acid (BNA)
  source 1..14: mol_type = other DNA
cggtaagttctgtc

SEQ ID NO: 6211 - DNA, 13 bp, synthetic construct
  misc_feature 1..13: note = Description of Artificial Sequence: Synthetic Antisense oligonucleotide
  modified_base 1: mod_base = OTHER; note = bicyclic nucleic acid (BNA)
  source 1..13: mol_type = other DNA
cggtaagttctgt

SEQ ID NO: 6212 - DNA, 12 bp, synthetic construct
  misc_feature 1..12: note = Description of Artificial Sequence: Synthetic Antisense oligonucleotide
  modified_base 1: mod_base = OTHER; note = bicyclic nucleic acid (BNA)
  source 1..12: mol_type = other DNA
cggtaagttctg

SEQ ID NO: 6213 - DNA, 11 bp, synthetic construct
  misc_feature 1..11: note = Description of Artificial Sequence: Synthetic Antisense oligonucleotide
  modified_base 1: mod_base = OTHER; note = bicyclic nucleic acid (BNA)
  source 1..11: mol_type = other DNA
cggtaagttct

SEQ ID NO: 6214 - DNA, 10 bp, synthetic construct
  misc_feature 1..10: note = Description of Artificial Sequence: Synthetic Antisense oligonucleotide
  modified_base 1: mod_base = OTHER; note = bicyclic nucleic acid (BNA)
  source 1..10: mol_type = other DNA
cggtaagttc

SEQ ID NO: 6215-6216 - skipped (2 entries)

SEQ ID NO: 6217 - DNA, 20 bp, synthetic construct
  misc_feature 1..20: note = Description of Artificial Sequence: Synthetic Antisense oligonucleotide
  modified_base 1: mod_base = OTHER; note = bicyclic nucleic acid (BNA)
  source 1..20: mol_type = other DNA
tcggtaagttctgtccaagc

SEQ ID NO: 6218 - DNA, 19 bp, synthetic construct
  misc_feature 1..19: note = Description of Artificial Sequence: Synthetic Antisense oligonucleotide
  modified_base 1: mod_base = OTHER; note = bicyclic nucleic acid (BNA)
  source 1..19: mol_type = other DNA
tcggtaagttctgtccaag

SEQ ID NO: 6219 - DNA, 18 bp, synthetic construct
  misc_feature 1..18: note = Description of Artificial Sequence: Synthetic Antisense oligonucleotide
  modified_base 1: mod_base = OTHER; note = bicyclic nucleic acid (BNA)
  source 1..18: mol_type = other DNA
tcggtaagttctgtccaa

SEQ ID NO: 6220 - DNA, 17 bp, synthetic construct
  misc_feature 1..17: note = Description of Artificial Sequence: Synthetic Antisense oligonucleotide
  modified_base 1: mod_base = OTHER; note = bicyclic nucleic acid (BNA)
  source 1..17: mol_type = other DNA
tcggtaagttctgtcca

SEQ ID NO: 6221 - DNA, 16 bp, synthetic construct
  misc_feature 1..16: note = Description of Artificial Sequence: Synthetic Antisense oligonucleotide
  modified_base 1: mod_base = OTHER; note = bicyclic nucleic acid (BNA)
  source 1..16: mol_type = other DNA
tcggtaagttctgtcc

SEQ ID NO: 6222 - DNA, 15 bp, synthetic construct
  misc_feature 1..15: note = Description of Artificial Sequence: Synthetic Antisense oligonucleotide
  modified_base 1: mod_base = OTHER; note = bicyclic nucleic acid (BNA)
  source 1..15: mol_type = other DNA
tcggtaagttctgtc

SEQ ID NO: 6223 - DNA, 14 bp, synthetic construct
  misc_feature 1..14: note = Description of Artificial Sequence: Synthetic Antisense oligonucleotide
  modified_base 1: mod_base = OTHER; note = bicyclic nucleic acid (BNA)
  source 1..14: mol_type = other DNA
tcggtaagttctgt

SEQ ID NO: 6224 - DNA, 13 bp, synthetic construct
  misc_feature 1..13: note = Description of Artificial Sequence: Synthetic Antisense oligonucleotide
  modified_base 1: mod_base = OTHER; note = bicyclic nucleic acid (BNA)
  source 1..13: mol_type = other DNA
tcggtaagttctg

SEQ ID NO: 6225 - DNA, 12 bp, synthetic construct
  misc_feature 1..12: note = Description of Artificial Sequence: Synthetic Antisense oligonucleotide
  modified_base 1: mod_base = OTHER; note = bicyclic nucleic acid (BNA)
  source 1..12: mol_type = other DNA
tcggtaagttct

SEQ ID NO: 6226 - DNA, 11 bp, synthetic construct
  misc_feature 1..11: note = Description of Artificial Sequence: Synthetic Antisense oligonucleotide
  modified_base 1: mod_base = OTHER; note = bicyclic nucleic acid (BNA)
  source 1..11: mol_type = other DNA
tcggtaagttc

SEQ ID NO: 6227 - DNA, 10 bp, synthetic construct
  misc_feature 1..10: note = Description of Artificial Sequence: Synthetic Antisense oligonucleotide
  modified_base 1: mod_base = OTHER; note = bicyclic nucleic acid (BNA)
  source 1..10: mol_type = other DNA
tcggtaagtt

SEQ ID NO: 6228 - skipped

SEQ ID NO: 6229 - DNA, 20 bp, synthetic construct
  misc_feature 1..20: note = Description of Artificial Sequence: Synthetic Antisense oligonucleotide
  modified_base 1: mod_base = OTHER; note = bicyclic nucleic acid (BNA)
  source 1..20: mol_type = other DNA
gtcggtaagttctgtccaag

SEQ ID NO: 6230 - DNA, 19 bp, synthetic construct
  misc_feature 1..19: note = Description of Artificial Sequence: Synthetic Antisense oligonucleotide
  modified_base 1: mod_base = OTHER; note = bicyclic nucleic acid (BNA)
  source 1..19: mol_type = other DNA
gtcggtaagttctgtccaa

SEQ ID NO: 6231 - DNA, 18 bp, synthetic construct
  misc_feature 1..18: note = Description of Artificial Sequence: Synthetic Antisense oligonucleotide
  modified_base 1: mod_base = OTHER; note = bicyclic nucleic acid (BNA)
  source 1..18: mol_type = other DNA
gtcggtaagttctgtcca

SEQ ID NO: 6232 - DNA, 17 bp, synthetic construct
  misc_feature 1..17: note = Description of Artificial Sequence: Synthetic Antisense oligonucleotide
  modified_base 1: mod_base = OTHER; note = bicyclic nucleic acid (BNA)
  source 1..17: mol_type = other DNA
gtcggtaagttctgtcc

SEQ ID NO: 6233 - DNA, 16 bp, synthetic construct
  misc_feature 1..16: note = Description of Artificial Sequence: Synthetic Antisense oligonucleotide
  modified_base 1: mod_base = OTHER; note = bicyclic nucleic acid (BNA)
  source 1..16: mol_type = other DNA
gtcggtaagttctgtc

SEQ ID NO: 6234 - DNA, 15 bp, synthetic construct
  misc_feature 1..15: note = Description of Artificial Sequence: Synthetic Antisense oligonucleotide
  modified_base 1: mod_base = OTHER; note = bicyclic nucleic acid (BNA)
  source 1..15: mol_type = other DNA
gtcggtaagttctgt

SEQ ID NO: 6235 - DNA, 14 bp, synthetic construct
  misc_feature 1..14: note = Description of Artificial Sequence: Synthetic Antisense oligonucleotide
  modified_base 1: mod_base = OTHER; note = bicyclic nucleic acid (BNA)
  source 1..14: mol_type = other DNA
gtcggtaagttctg

SEQ ID NO: 6236 - DNA, 13 bp, synthetic construct
  misc_feature 1..13: note = Description of Artificial Sequence: Synthetic Antisense oligonucleotide
  modified_base 1: mod_base = OTHER; note = bicyclic nucleic acid (BNA)
  source 1..13: mol_type = other DNA
gtcggtaagttct

SEQ ID NO: 6237 - DNA, 12 bp, synthetic construct
  misc_feature 1..12: note = Description of Artificial Sequence: Synthetic Antisense oligonucleotide
  modified_base 1: mod_base = OTHER; note = bicyclic nucleic acid (BNA)
  source 1..12: mol_type = other DNA
gtcggtaagttc

SEQ ID NO: 6238 - DNA, 11 bp, synthetic construct
  misc_feature 1..11: note = Description of Artificial Sequence: Synthetic Antisense oligonucleotide
  modified_base 1: mod_base = OTHER; note = bicyclic nucleic acid (BNA)
  source 1..11: mol_type = other DNA
gtcggtaagtt

SEQ ID NO: 6239 - DNA, 10 bp, synthetic construct
  misc_feature 1..10: note = Description of Artificial Sequence: Synthetic Antisense oligonucleotide
  modified_base 1: mod_base = OTHER; note = bicyclic nucleic acid (BNA)
  source 1..10: mol_type = other DNA
gtcggtaagt

SEQ ID NO: 6240 - DNA, 20 bp, synthetic construct
  misc_feature 1..20: note = Description of Artificial Sequence: Synthetic Antisense oligonucleotide
  modified_base 1: mod_base = OTHER; note = bicyclic nucleic acid (BNA)
  source 1..20: mol_type = other DNA
agtcggtaagttctgtccaa

SEQ ID NO: 6241 - DNA, 19 bp, synthetic construct
  misc_feature 1..19: note = Description of Artificial Sequence: Synthetic Antisense oligonucleotide
  modified_base 1: mod_base = OTHER; note = bicyclic nucleic acid (BNA)
  source 1..19: mol_type = other DNA
agtcggtaagttctgtcca

SEQ ID NO: 6242 - DNA, 17 bp, synthetic construct
  misc_feature 1..17: note = Description of Artificial Sequence: Synthetic Antisense oligonucleotide
  modified_base 1: mod_base = OTHER; note = bicyclic nucleic acid (BNA)
  source 1..17: mol_type = other DNA
agtcggtaagttctgtc

SEQ ID NO: 6243 - DNA, 16 bp, synthetic construct
  misc_feature 1..16: note = Description of Artificial Sequence: Synthetic Antisense oligonucleotide
  modified_base 1: mod_base = OTHER; note = bicyclic nucleic acid (BNA)
  source 1..16: mol_type = other DNA
agtcggtaagttctgt

SEQ ID NO: 6244 - DNA, 15 bp, synthetic construct
  misc_feature 1..15: note = Description of Artificial Sequence: Synthetic Antisense oligonucleotide
  modified_base 1: mod_base = OTHER; note = bicyclic nucleic acid (BNA)
  source 1..15: mol_type = other DNA
agtcggtaagttctg

SEQ ID NO: 6245 - DNA, 14 bp, synthetic construct
  misc_feature 1..14: note = Description of Artificial Sequence: Synthetic Antisense oligonucleotide
  modified_base 1: mod_base = OTHER; note = bicyclic nucleic acid (BNA)
  source 1..14: mol_type = other DNA
agtcggtaagttct

SEQ ID NO: 6246 - DNA, 13 bp, synthetic construct
  misc_feature 1..13: note = Description of Artificial Sequence: Synthetic Antisense oligonucleotide
  modified_base 1: mod_base = OTHER; note = bicyclic nucleic acid (BNA)
  source 1..13: mol_type = other DNA
agtcggtaagttc

SEQ ID NO: 6247 - DNA, 12 bp, synthetic construct
  misc_feature 1..12: note = Description of Artificial Sequence: Synthetic Antisense oligonucleotide
  modified_base 1: mod_base = OTHER; note = bicyclic nucleic acid (BNA)
  source 1..12: mol_type = other DNA
agtcggtaagtt

SEQ ID NO: 6248 - DNA, 11 bp, synthetic construct
  misc_feature 1..11: note = Description of Artificial Sequence: Synthetic Antisense oligonucleotide
  modified_base 1: mod_base = OTHER; note = bicyclic nucleic acid (BNA)
  source 1..11: mol_type = other DNA
agtcggtaagt

SEQ ID NO: 6249 - DNA, 20 bp, synthetic construct
  misc_feature 1..20: note = Description of Artificial Sequence: Synthetic Antisense oligonucleotide
  modified_base 1: mod_base = OTHER; note = bicyclic nucleic acid (BNA)
  source 1..20: mol_type = other DNA
cagtcggtaagttctgtcca

SEQ ID NO: 6250 - DNA, 19 bp, synthetic construct
  misc_feature 1..19: note = Description of Artificial Sequence: Synthetic Antisense oligonucleotide
  modified_base 1: mod_base = OTHER; note = bicyclic nucleic acid (BNA)
  source 1..19: mol_type = other DNA
cagtcggtaagttctgtcc

SEQ ID NO: 6251 - DNA, 18 bp, synthetic construct
  misc_feature 1..18: note = Description of Artificial Sequence: Synthetic Antisense oligonucleotide
  modified_base 1: mod_base = OTHER; note = bicyclic nucleic acid (BNA)
  source 1..18: mol_type = other DNA
cagtcggtaagttctgtc

SEQ ID NO: 6252 - DNA, 17 bp, synthetic construct
  misc_feature 1..17: note = Description of Artificial Sequence: Synthetic Antisense oligonucleotide
  modified_base 1: mod_base = OTHER; note = bicyclic nucleic acid (BNA)
  source 1..17: mol_type = other DNA
cagtcggtaagttctgt

SEQ ID NO: 6253 - DNA, 16 bp, synthetic construct
  misc_feature 1..16: note = Description of Artificial Sequence: Synthetic Antisense oligonucleotide
  modified_base 1: mod_base = OTHER; note = bicyclic nucleic acid (BNA)
  source 1..16: mol_type = other DNA
cagtcggtaagttctg

SEQ ID NO: 6254 - DNA, 15 bp, synthetic construct
  misc_feature 1..15: note = Description of Artificial Sequence: Synthetic Antisense oligonucleotide
  modified_base 1: mod_base = OTHER; note = bicyclic nucleic acid (BNA)
  source 1..15: mol_type = other DNA
cagtcggtaagttct

SEQ ID NO: 6255 - DNA, 14 bp, synthetic construct
  misc_feature 1..14: note = Description of Artificial Sequence: Synthetic Antisense oligonucleotide
  modified_base 1: mod_base = OTHER; note = bicyclic nucleic acid (BNA)
  source 1..14: mol_type = other DNA
cagtcggtaagttc

SEQ ID NO: 6256 - DNA, 13 bp, synthetic construct
  misc_feature 1..13: note = Description of Artificial Sequence: Synthetic Antisense oligonucleotide
  modified_base 1: mod_base = OTHER; note = bicyclic nucleic acid (BNA)
  source 1..13: mol_type = other DNA
cagtcggtaagtt

SEQ ID NO: 6257 - DNA, 12 bp, synthetic construct
  misc_feature 1..12: note = Description of Artificial Sequence: Synthetic Antisense oligonucleotide
  modified_base 1: mod_base = OTHER; note = bicyclic nucleic acid (BNA)
  source 1..12: mol_type = other DNA
cagtcggtaagt

SEQ ID NO: 6258 - DNA, 20 bp, synthetic construct
  misc_feature 1..20: note = Description of Artificial Sequence: Synthetic Antisense oligonucleotide
  modified_base 1: mod_base = OTHER; note = bicyclic nucleic acid (BNA)
  source 1..20: mol_type = other DNA
ccagtcggtaagttctgtcc

SEQ ID NO: 6259 - DNA, 19 bp, synthetic construct
  misc_feature 1..19: note = Description of Artificial Sequence: Synthetic Antisense oligonucleotide
  modified_base 1: mod_base = OTHER; note = bicyclic nucleic acid (BNA)
  source 1..19: mol_type = other DNA
ccagtcggtaagttctgtc

SEQ ID NO: 6260 - DNA, 18 bp, synthetic construct
  misc_feature 1..18: note = Description of Artificial Sequence: Synthetic Antisense oligonucleotide
  modified_base 1: mod_base = OTHER; note = bicyclic nucleic acid (BNA)
  source 1..18: mol_type = other DNA
ccagtcggtaagttctgt

SEQ ID NO: 6261 - DNA, 17 bp, synthetic construct
  misc_feature 1..17: note = Description of Artificial Sequence: Synthetic Antisense oligonucleotide
  modified_base 1: mod_base = OTHER; note = bicyclic nucleic acid (BNA)
  source 1..17: mol_type = other DNA
ccagtcggtaagttctg

SEQ ID NO: 6262 - DNA, 16 bp, synthetic construct
  misc_feature 1..16: note = Description of Artificial Sequence: Synthetic Antisense oligonucleotide
  modified_base 1: mod_base = OTHER; note = bicyclic nucleic acid (BNA)
  source 1..16: mol_type = other DNA
ccagtcggtaagttct

SEQ ID NO: 6263 - DNA, 15 bp, synthetic construct
  misc_feature 1..15: note = Description of Artificial Sequence: Synthetic Antisense oligonucleotide
  modified_base 1: mod_base = OTHER; note = bicyclic nucleic acid (BNA)
  source 1..15: mol_type = other DNA
ccagtcggtaagttc

SEQ ID NO: 6264 - DNA, 14 bp, synthetic construct
  misc_feature 1..14: note = Description of Artificial Sequence: Synthetic Antisense oligonucleotide
  modified_base 1: mod_base = OTHER; note = bicyclic nucleic acid (BNA)
  source 1..14: mol_type = other DNA
ccagtcggtaagtt

SEQ ID NO: 6265 - DNA, 13 bp, synthetic construct
  misc_feature 1..13: note = Description of Artificial Sequence: Synthetic Antisense oligonucleotide
  modified_base 1: mod_base = OTHER; note = bicyclic nucleic acid (BNA)
  source 1..13: mol_type = other DNA
ccagtcggtaagt

SEQ ID NO: 6266 - DNA, 20 bp, synthetic construct
  misc_feature 1..20: note = Description of Artificial Sequence: Synthetic Antisense oligonucleotide
  modified_base 1: mod_base = OTHER; note = bicyclic nucleic acid (BNA)
  source 1..20: mol_type = other DNA
gccagtcggtaagttctgtc

SEQ ID NO: 6267 - DNA, 19 bp, synthetic construct
  misc_feature 1..19: note = Description of Artificial Sequence: Synthetic Antisense oligonucleotide
  modified_base 1: mod_base = OTHER; note = bicyclic nucleic acid (BNA)
  source 1..19: mol_type = other DNA
gccagtcggtaagttctgt

SEQ ID NO: 6268 - DNA, 18 bp, synthetic construct
  misc_feature 1..18: note = Description of Artificial Sequence: Synthetic Antisense oligonucleotide
  modified_base 1: mod_base = OTHER; note = bicyclic nucleic acid (BNA)
  source 1..18: mol_type = other DNA
gccagtcggtaagttctg

SEQ ID NO: 6269 - DNA, 17 bp, synthetic construct
  misc_feature 1..17: note = Description of Artificial Sequence: Synthetic Antisense oligonucleotide
  modified_base 1: mod_base = OTHER; note = bicyclic nucleic acid (BNA)
  source 1..17: mol_type = other DNA
gccagtcggtaagttct

SEQ ID NO: 6270 - DNA, 16 bp, synthetic construct
  misc_feature 1..16: note = Description of Artificial Sequence: Synthetic Antisense oligonucleotide
  modified_base 1: mod_base = OTHER; note = bicyclic nucleic acid (BNA)
  source 1..16: mol_type = other DNA
gccagtcggtaagttc

SEQ ID NO: 6271 - DNA, 15 bp, synthetic construct
  misc_feature 1..15: note = Description of Artificial Sequence: Synthetic Antisense oligonucleotide
  modified_base 1: mod_base = OTHER; note = bicyclic nucleic acid (BNA)
  source 1..15: mol_type = other DNA
gccagtcggtaagtt

SEQ ID NO: 6272 - DNA, 14 bp, synthetic construct
  misc_feature 1..14: note = Description of Artificial Sequence: Synthetic Antisense oligonucleotide
  modified_base 1: mod_base = OTHER; note = bicyclic nucleic acid (BNA)
  source 1..14: mol_type = other DNA
gccagtcggtaagt

SEQ ID NO: 6273 - DNA, 20 bp, synthetic construct
  misc_feature 1..20: note = Description of Artificial Sequence: Synthetic Antisense oligonucleotide
  modified_base 1: mod_base = OTHER; note = bicyclic nucleic acid (BNA)
  source 1..20: mol_type = other DNA
tcaaggaagatggcatttct

SEQ ID NO: 6274 - DNA, 22 bp, synthetic construct
  misc_feature 1..22: note = Description of Artificial Sequence: Synthetic Antisense oligonucleotide
  modified_base 1: mod_base = OTHER; note = bicyclic nucleic acid (BNA)
  source 1..22: mol_type = other DNA
tcaaggaagatggcatttctag

SEQ ID NO: 6275 - DNA, 16 bp, synthetic construct
  misc_feature 1..16: note = Description of Artificial Sequence: Synthetic Antisense oligonucleotide
  modified_base 1: mod_base = OTHER; note = bicyclic nucleic acid (BNA)
  source 1..16: mol_type = other DNA
tcaaggaagatggcat

SEQ ID NO: 6276 - DNA, 15 bp, synthetic construct
  misc_feature 1..15: note = Description of Artificial Sequence: Synthetic Antisense oligonucleotide
  modified_base 1: mod_base = OTHER; note = bicyclic nucleic acid (BNA)
  source 1..15: mol_type = other DNA
gaagatggcatttct

SEQ ID NO: 6277 - DNA, 21 bp, synthetic construct
  misc_feature 1..21: note = Description of Artificial Sequence: Synthetic Antisense oligonucleotide
  modified_base 1: mod_base = OTHER; note = bicyclic nucleic acid (BNA)
  source 1..21: mol_type = other DNA
tcaaggaagatggcatttcta

SEQ ID NO: 6278 - DNA, 19 bp, synthetic construct
  misc_feature 1..19: note = Description of Artificial Sequence: Synthetic Antisense oligonucleotide
  modified_base 1: mod_base = OTHER; note = bicyclic nucleic acid (BNA)
  source 1..19: mol_type = other DNA
tcaaggaagatggcatttc

SEQ ID NO: 6279 - DNA, 18 bp, synthetic construct
  misc_feature 1..18: note = Description of Artificial Sequence: Synthetic Antisense oligonucleotide
  modified_base 1: mod_base = OTHER; note = bicyclic nucleic acid (BNA)
  source 1..18: mol_type = other DNA
tcaaggaagatggcattt

SEQ ID NO: 6280 - DNA, 17 bp, synthetic construct
  misc_feature 1..17: note = Description of Artificial Sequence: Synthetic Antisense oligonucleotide
  modified_base 1: mod_base = OTHER; note = bicyclic nucleic acid (BNA)
  source 1..17: mol_type = other DNA
tcaaggaagatggcatt

SEQ ID NO: 6281 - DNA, 15 bp, synthetic construct
  misc_feature 1..15: note = Description of Artificial Sequence: Synthetic Antisense oligonucleotide
  modified_base 1: mod_base = OTHER; note = bicyclic nucleic acid (BNA)
  source 1..15: mol_type = other DNA
tcaaggaagatggca

SEQ ID NO: 6282 - DNA, 14 bp, synthetic construct
  misc_feature 1..14: note = Description of Artificial Sequence: Synthetic Antisense oligonucleotide
  modified_base 1: mod_base = OTHER; note = bicyclic nucleic acid (BNA)
  source 1..14: mol_type = other DNA
tcaaggaagatggc

SEQ ID NO: 6283 - DNA, 13 bp, synthetic construct
  misc_feature 1..13: note = Description of Artificial Sequence: Synthetic Antisense oligonucleotide
  modified_base 1: mod_base = OTHER; note = bicyclic nucleic acid (BNA)
  source 1..13: mol_type = other DNA
tcaaggaagatgg

SEQ ID NO: 6284 - DNA, 12 bp, synthetic construct
  misc_feature 1..12: note = Description of Artificial Sequence: Synthetic Antisense oligonucleotide
  modified_base 1: mod_base = OTHER; note = bicyclic nucleic acid (BNA)
  source 1..12: mol_type = other DNA
tcaaggaagatg

SEQ ID NO: 6285 - DNA, 11 bp, synthetic construct
  misc_feature 1..11: note = Description of Artificial Sequence: Synthetic Antisense oligonucleotide
  modified_base 1: mod_base = OTHER; note = bicyclic nucleic acid (BNA)
  source 1..11: mol_type = other DNA
tcaaggaagat

SEQ ID NO: 6286 - DNA, 10 bp, synthetic construct
  misc_feature 1..10: note = Description of Artificial Sequence: Synthetic Antisense oligonucleotide
  modified_base 1: mod_base = OTHER; note = bicyclic nucleic acid (BNA)
  source 1..10: mol_type = other DNA
tcaaggaaga

SEQ ID NO: 6287 - skipped

SEQ ID NO: 6288 - DNA, 21 bp, synthetic construct
  misc_feature 1..21: note = Description of Artificial Sequence: Synthetic Antisense oligonucleotide
  modified_base 1: mod_base = OTHER; note = bicyclic nucleic acid (BNA)
  source 1..21: mol_type = other DNA
caaggaagatggcatttctag

SEQ ID NO: 6289 - DNA, 20 bp, synthetic construct
  misc_feature 1..20: note = Description of Artificial Sequence: Synthetic Antisense oligonucleotide
  modified_base 1: mod_base = OTHER; note = bicyclic nucleic acid (BNA)
  source 1..20: mol_type = other DNA
caaggaagatggcatttcta

SEQ ID NO: 6290 - DNA, 19 bp, synthetic construct
  misc_feature 1..19: note = Description of Artificial Sequence: Synthetic Antisense oligonucleotide
  modified_base 1: mod_base = OTHER; note = bicyclic nucleic acid (BNA)
  source 1..19: mol_type = other DNA
caaggaagatggcatttct

SEQ ID NO: 6291 - DNA, 18 bp, synthetic construct
  misc_feature 1..18: note = Description of Artificial Sequence: Synthetic Antisense oligonucleotide
  modified_base 1: mod_base = OTHER; note = bicyclic nucleic acid (BNA)
  source 1..18: mol_type = other DNA
caaggaagatggcatttc

SEQ ID NO: 6292 - DNA, 17 bp, synthetic construct
  misc_feature 1..17: note = Description of Artificial Sequence: Synthetic Antisense oligonucleotide
  modified_base 1: mod_base = OTHER; note = bicyclic nucleic acid (BNA)
  source 1..17: mol_type = other DNA
caaggaagatggcattt

SEQ ID NO: 6293 - DNA, 16 bp, synthetic construct
  misc_feature 1..16: note = Description of Artificial Sequence: Synthetic Antisense oligonucleotide
  modified_base 1: mod_base = OTHER; note = bicyclic nucleic acid (BNA)
  source 1..16: mol_type = other DNA
caaggaagatggcatt

SEQ ID NO: 6294 - DNA, 15 bp, synthetic construct
  misc_feature 1..15: note = Description of Artificial Sequence: Synthetic Antisense oligonucleotide
  modified_base 1: mod_base = OTHER; note = bicyclic nucleic acid (BNA)
  source 1..15: mol_type = other DNA
caaggaagatggcat

SEQ ID NO: 6295 - DNA, 14 bp, synthetic construct
  misc_feature 1..14: note = Description of Artificial Sequence: Synthetic Antisense oligonucleotide
  modified_base 1: mod_base = OTHER; note = bicyclic nucleic acid (BNA)
  source 1..14: mol_type = other DNA
caaggaagatggca

SEQ ID NO: 6296 - DNA, 13 bp, synthetic construct
  misc_feature 1..13: note = Description of Artificial Sequence: Synthetic Antisense oligonucleotide
  modified_base 1: mod_base = OTHER; note = bicyclic nucleic acid (BNA)
  source 1..13: mol_type = other DNA
caaggaagatggc

SEQ ID NO: 6297 - DNA, 12 bp, synthetic construct
  misc_feature 1..12: note = Description of Artificial Sequence: Synthetic Antisense oligonucleotide
  modified_base 1: mod_base = OTHER; note = bicyclic nucleic acid (BNA)
  source 1..12: mol_type = other DNA
caaggaagatgg

SEQ ID NO: 6298 - DNA, 11 bp, synthetic construct
  misc_feature 1..11: note = Description of Artificial Sequence: Synthetic Antisense oligonucleotide
  modified_base 1: mod_base = OTHER; note = bicyclic nucleic acid (BNA)
  source 1..11: mol_type = other DNA
caaggaagatg

SEQ ID NO: 6299 - DNA, 10 bp, synthetic construct
  misc_feature 1..10: note = Description of Artificial Sequence: Synthetic Antisense oligonucleotide
  modified_base 1: mod_base = OTHER; note = bicyclic nucleic acid (BNA)
  source 1..10: mol_type = other DNA
caaggaagat

SEQ ID NO: 6300 - DNA, 20 bp, synthetic construct
  misc_feature 1..20: note = Description of Artificial Sequence: Synthetic Antisense oligonucleotide
  modified_base 1: mod_base = OTHER; note = bicyclic nucleic acid (BNA)
  source 1..20: mol_type = other DNA
aaggaagatggcatttctag

SEQ ID NO: 6301 - DNA, 19 bp, synthetic construct
  misc_feature 1..19: note = Description of Artificial Sequence: Synthetic Antisense oligonucleotide
  modified_base 1: mod_base = OTHER; note = bicyclic nucleic acid (BNA)
  source 1..19: mol_type = other DNA
aaggaagatggcatttcta

SEQ ID NO: 6302 - DNA, 18 bp, synthetic construct
  misc_feature 1..18: note = Description of Artificial Sequence: Synthetic Antisense oligonucleotide
  modified_base 1: mod_base = OTHER; note = bicyclic nucleic acid (BNA)
  source 1..18: mol_type = other DNA
aaggaagatggcatttct

SEQ ID NO: 6303 - DNA, 17 bp, synthetic construct
  misc_feature 1..17: note = Description of Artificial Sequence: Synthetic Antisense oligonucleotide
  modified_base 1: mod_base = OTHER; note = bicyclic nucleic acid (BNA)
  source 1..17: mol_type = other DNA
aaggaagatggcatttc

SEQ ID NO: 6304 - DNA, 16 bp, synthetic construct
  misc_feature 1..16: note = Description of Artificial Sequence: Synthetic Antisense oligonucleotide
  modified_base 1: mod_base = OTHER; note = bicyclic nucleic acid (BNA)
  source 1..16: mol_type = other DNA
aaggaagatggcattt

SEQ ID NO: 6305 - DNA, 15 bp, synthetic construct
  misc_feature 1..15: note = Description of Artificial Sequence: Synthetic Antisense oligonucleotide
  modified_base 1: mod_base = OTHER; note = bicyclic nucleic acid (BNA)
  source 1..15: mol_type = other DNA
aaggaagatggcatt

SEQ ID NO: 6306 - DNA, 14 bp, synthetic construct
  misc_feature 1..14: note = Description of Artificial Sequence: Synthetic Antisense oligonucleotide
  modified_base 1: mod_base = OTHER; note = bicyclic nucleic acid (BNA)
  source 1..14: mol_type = other DNA
aaggaagatggcat

SEQ ID NO: 6307 - DNA, 13 bp, synthetic construct
  misc_feature 1..13: note = Description of Artificial Sequence: Synthetic Antisense oligonucleotide
  modified_base 1: mod_base = OTHER; note = bicyclic nucleic acid (BNA)
  source 1..13: mol_type = other DNA
aaggaagatggca

SEQ ID NO: 6308 - DNA, 12 bp, synthetic construct
  misc_feature 1..12: note = Description of Artificial Sequence: Synthetic Antisense oligonucleotide
  modified_base 1: mod_base = OTHER; note = bicyclic nucleic acid (BNA)
  source 1..12: mol_type = other DNA
aaggaagatggc

SEQ ID NO: 6309 - DNA, 11 bp, synthetic construct
  misc_feature 1..11: note = Description of Artificial Sequence: Synthetic Antisense oligonucleotide
  modified_base 1: mod_base = OTHER; note = bicyclic nucleic acid (BNA)
  source 1..11: mol_type = other DNA
aaggaagatgg

SEQ ID NO: 6310 - DNA, 10 bp, synthetic construct
  misc_feature 1..10: note = Description of Artificial Sequence: Synthetic Antisense oligonucleotide
  modified_base 1: mod_base = OTHER; note = bicyclic nucleic acid (BNA)
  source 1..10: mol_type = other DNA
aaggaagatg

SEQ ID NO: 6311 - skipped

SEQ ID NO: 6312 - DNA, 19 bp, synthetic construct
  misc_feature 1..19: note = Description of Artificial Sequence: Synthetic Antisense oligonucleotide
  modified_base 1: mod_base = OTHER; note = bicyclic nucleic acid (BNA)
  source 1..19: mol_type = other DNA
aggaagatggcatttctag

SEQ ID NO: 6313 - DNA, 18 bp, synthetic construct
  misc_feature 1..18: note = Description of Artificial Sequence: Synthetic Antisense oligonucleotide
  modified_base 1: mod_base = OTHER; note = bicyclic nucleic acid (BNA)
  source 1..18: mol_type = other DNA
aggaagatggcatttcta

SEQ ID NO: 6314 - DNA, 17 bp, synthetic construct
  misc_feature 1..17: note = Description of Artificial Sequence: Synthetic Antisense oligonucleotide
  modified_base 1: mod_base = OTHER; note = bicyclic nucleic acid (BNA)
  source 1..17: mol_type = other DNA
aggaagatggcatttct

SEQ ID NO: 6315 - DNA, 16 bp, synthetic construct
  misc_feature 1..16: note = Description of Artificial Sequence: Synthetic Antisense oligonucleotide
  modified_base 1: mod_base = OTHER; note = bicyclic nucleic acid (BNA)
  source 1..16: mol_type = other DNA
aggaagatggcatttc

SEQ ID NO: 6316 - DNA, 15 bp, synthetic construct
  misc_feature 1..15: note = Description of Artificial Sequence: Synthetic Antisense oligonucleotide
  modified_base 1: mod_base = OTHER; note = bicyclic nucleic acid (BNA)
  source 1..15: mol_type = other DNA
aggaagatggcattt

SEQ ID NO: 6317 - DNA, 14 bp, synthetic construct
  misc_feature 1..14: note = Description of Artificial Sequence: Synthetic Antisense oligonucleotide
  modified_base 1: mod_base = OTHER; note = bicyclic nucleic acid (BNA)
  source 1..14: mol_type = other DNA
aggaagatggcatt

SEQ ID NO: 6318 - DNA, 13 bp, synthetic construct
  misc_feature 1..13: note = Description of Artificial Sequence: Synthetic Antisense oligonucleotide
  modified_base 1: mod_base = OTHER; note = bicyclic nucleic acid (BNA)
  source 1..13: mol_type = other DNA
aggaagatggcat

SEQ ID NO: 6319 - DNA, 12 bp, synthetic construct
  misc_feature 1..12: note = Description of Artificial Sequence: Synthetic Antisense oligonucleotide
  modified_base 1: mod_base = OTHER; note = bicyclic nucleic acid (BNA)
  source 1..12: mol_type = other DNA
aggaagatggca

SEQ ID NO: 6320 - DNA, 10 bp, synthetic construct
  misc_feature 1..10: note = Description of Artificial Sequence: Synthetic Antisense oligonucleotide
  modified_base 1: mod_base = OTHER; note = bicyclic nucleic acid (BNA)
  source 1..10: mol_type = other DNA
aggaagatgg

SEQ ID NO: 6321-6322 - skipped (2 entries)

SEQ ID NO: 6323 - DNA, 18 bp, synthetic construct
  misc_feature 1..18: note = Description of Artificial Sequence: Synthetic Antisense oligonucleotide
  modified_base 1: mod_base = OTHER; note = bicyclic nucleic acid (BNA)
  source 1..18: mol_type = other DNA
ggaagatggcatttctag

SEQ ID NO: 6324 - DNA, 17 bp, synthetic construct
  misc_feature 1..17: note = Description of Artificial Sequence: Synthetic Antisense oligonucleotide
  modified_base 1: mod_base = OTHER; note = bicyclic nucleic acid (BNA)
  source 1..17: mol_type = other DNA
ggaagatggcatttcta

SEQ ID NO: 6325 - DNA, 16 bp, synthetic construct
  misc_feature 1..16: note = Description of Artificial Sequence: Synthetic Antisense oligonucleotide
  modified_base 1: mod_base = OTHER; note = bicyclic nucleic acid (BNA)
  source 1..16: mol_type = other DNA
ggaagatggcatttct

SEQ ID NO: 6326 - DNA, 15 bp, synthetic construct
  misc_feature 1..15: note = Description of Artificial Sequence: Synthetic Antisense oligonucleotide
  modified_base 1: mod_base = OTHER; note = bicyclic nucleic acid (BNA)
  source 1..15: mol_type = other DNA
ggaagatggcatttc

SEQ ID NO: 6327 - DNA, 14 bp, synthetic construct
  misc_feature 1..14: note = Description of Artificial Sequence: Synthetic Antisense oligonucleotide
  modified_base 1: mod_base = OTHER; note = bicyclic nucleic acid (BNA)
  source 1..14: mol_type = other DNA
ggaagatggcattt

SEQ ID NO: 6328 - DNA, 13 bp, synthetic construct
  misc_feature 1..13: note = Description of Artificial Sequence: Synthetic Antisense oligonucleotide
  modified_base 1: mod_base = OTHER; note = bicyclic nucleic acid (BNA)
  source 1..13: mol_type = other DNA
ggaagatggcatt

SEQ ID NO: 6329 - DNA, 12 bp, synthetic construct
  misc_feature 1..12: note = Description of Artificial Sequence: Synthetic Antisense oligonucleotide
  modified_base 1: mod_base = OTHER; note = bicyclic nucleic acid (BNA)
  source 1..12: mol_type = other DNA
ggaagatggcat

SEQ ID NO: 6330 - DNA, 11 bp, synthetic construct
  misc_feature 1..11: note = Description of Artificial Sequence: Synthetic Antisense oligonucleotide
  modified_base 1: mod_base = OTHER; note = bicyclic nucleic acid (BNA)
  source 1..11: mol_type = other DNA
ggaagatggca

SEQ ID NO: 6331 - DNA, 10 bp, synthetic construct
  misc_feature 1..10: note = Description of Artificial Sequence: Synthetic Antisense oligonucleotide
  modified_base 1: mod_base = OTHER; note = bicyclic nucleic acid (BNA)
  source 1..10: mol_type = other DNA
ggaagatggc

SEQ ID NO: 6332 - skipped

SEQ ID NO: 6333 - DNA, 17 bp, synthetic construct
  misc_feature 1..17: note = Description of Artificial Sequence: Synthetic Antisense oligonucleotide
  modified_base 1: mod_base = OTHER; note = bicyclic nucleic acid (BNA)
  source 1..17: mol_type = other DNA
gaagatggcatttctag

SEQ ID NO: 6334 - DNA, 16 bp, synthetic construct
  misc_feature 1..16: note = Description of Artificial Sequence: Synthetic Antisense oligonucleotide
  modified_base 1: mod_base = OTHER; note = bicyclic nucleic acid (BNA)
  source 1..16: mol_type = other DNA
gaagatggcatttcta

SEQ ID NO: 6335 - DNA, 14 bp, synthetic construct
  misc_feature 1..14: note = Description of Artificial Sequence: Synthetic Antisense oligonucleotide
  modified_base 1: mod_base = OTHER; note = bicyclic nucleic acid (BNA)
  source 1..14: mol_type = other DNA
gaagatggcatttc

SEQ ID NO: 6336 - DNA, 13 bp, synthetic construct
  misc_feature 1..13: note = Description of Artificial Sequence: Synthetic Antisense oligonucleotide
  modified_base 1: mod_base = OTHER; note = bicyclic nucleic acid (BNA)
  source 1..13: mol_type = other DNA
gaagatggcattt

SEQ ID NO: 6337 - DNA, 12 bp, synthetic construct
  misc_feature 1..12: note = Description of Artificial Sequence: Synthetic Antisense oligonucleotide
  modified_base 1: mod_base = OTHER; note = bicyclic nucleic acid (BNA)
  source 1..12: mol_type = other DNA
gaagatggcatt

SEQ ID NO: 6338 - DNA, 11 bp, synthetic construct
  misc_feature 1..11: note = Description of Artificial Sequence: Synthetic Antisense oligonucleotide
  modified_base 1: mod_base = OTHER; note = bicyclic nucleic acid (BNA)
  source 1..11: mol_type = other DNA
gaagatggcat

SEQ ID NO: 6339 - DNA, 10 bp, synthetic construct
  misc_feature 1..10: note = Description of Artificial Sequence: Synthetic Antisense oligonucleotide
  modified_base 1: mod_base = OTHER; note = bicyclic nucleic acid (BNA)
  source 1..10: mol_type = other DNA
gaagatggca

SEQ ID NO: 6340-6341 - skipped (2 entries)

SEQ ID NO: 6342 - DNA, 16 bp, synthetic construct
  misc_feature 1..16: note = Description of Artificial Sequence: Synthetic Antisense oligonucleotide
  modified_base 1: mod_base = OTHER; note = bicyclic nucleic acid (BNA)
  source 1..16: mol_type = other DNA
aagatggcatttctag

SEQ ID NO: 6343 - DNA, 15 bp, synthetic construct
  misc_feature 1..15: note = Description of Artificial Sequence: Synthetic Antisense oligonucleotide
  modified_base 1: mod_base = OTHER; note = bicyclic nucleic acid (BNA)
  source 1..15: mol_type = other DNA
aagatggcatttcta

SEQ ID NO: 6344 - DNA, 14 bp, synthetic construct
  misc_feature 1..14: note = Description of Artificial Sequence: Synthetic Antisense oligonucleotide
  modified_base 1: mod_base = OTHER; note = bicyclic nucleic acid (BNA)
  source 1..14: mol_type = other DNA
aagatggcatttct

SEQ ID NO: 6345 - DNA, 13 bp, synthetic construct
  misc_feature 1..13: note = Description of Artificial Sequence: Synthetic Antisense oligonucleotide
  modified_base 1: mod_base = OTHER; note = bicyclic nucleic acid (BNA)
  source 1..13: mol_type = other DNA
aagatggcatttc

SEQ ID NO: 6346 - DNA, 12 bp, synthetic construct
  misc_feature 1..12: note = Description of Artificial Sequence: Synthetic Antisense oligonucleotide
  modified_base 1: mod_base = OTHER; note = bicyclic nucleic acid (BNA)
  source 1..12: mol_type = other DNA
aagatggcattt

SEQ ID NO: 6347 - DNA, 11 bp, synthetic construct
  misc_feature 1..11: note = Description of Artificial Sequence: Synthetic Antisense oligonucleotide
  modified_base 1: mod_base = OTHER; note = bicyclic nucleic acid (BNA)
  source 1..11: mol_type = other DNA
aagatggcatt

SEQ ID NO: 6348 - DNA, 10 bp, synthetic construct
  misc_feature 1..10: note = Description of Artificial Sequence: Synthetic Antisense oligonucleotide
  modified_base 1: mod_base = OTHER; note = bicyclic nucleic acid (BNA)
  source 1..10: mol_type = other DNA
aagatggcat

SEQ ID NO: 6349-6350 - skipped (2 entries)

SEQ ID NO: 6351 - DNA, 15 bp, synthetic construct
  misc_feature 1..15: note = Description of Artificial Sequence: Synthetic Antisense oligonucleotide
  modified_base 1: mod_base = OTHER; note = bicyclic nucleic acid (BNA)
  source 1..15: mol_type = other DNA
agatggcatttctag

SEQ ID NO: 6352 - DNA, 14 bp, synthetic construct
  misc_feature 1..14: note = Description of Artificial Sequence: Synthetic Antisense oligonucleotide
  modified_base 1: mod_base = OTHER; note = bicyclic nucleic acid (BNA)
  source 1..14: mol_type = other DNA
agatggcatttcta

SEQ ID NO: 6353 - DNA, 13 bp, synthetic construct
  misc_feature 1..13: note = Description of Artificial Sequence: Synthetic Antisense oligonucleotide
  modified_base 1: mod_base = OTHER; note = bicyclic nucleic acid (BNA)
  source 1..13: mol_type = other DNA
agatggcatttct

SEQ ID NO: 6354 - DNA, 12 bp, synthetic construct
  misc_feature 1..12: note = Description of Artificial Sequence: Synthetic Antisense oligonucleotide
  modified_base 1: mod_base = OTHER; note = bicyclic nucleic acid (BNA)
  source 1..12: mol_type = other DNA
agatggcatttc

SEQ ID NO: 6355 - DNA, 11 bp, synthetic construct
  misc_feature 1..11: note = Description of Artificial Sequence: Synthetic Antisense oligonucleotide
  modified_base 1: mod_base = OTHER; note = bicyclic nucleic acid (BNA)
  source 1..11: mol_type = other DNA
agatggcattt

SEQ ID NO: 6356 - DNA, 10 bp, synthetic construct
  misc_feature 1..10: note = Description of Artificial Sequence: Synthetic Antisense oligonucleotide
  modified_base 1: mod_base = OTHER; note = bicyclic nucleic acid (BNA)
  source 1..10: mol_type = other DNA
agatggcatt

SEQ ID NO: 6357-6358 - skipped (2 entries)

SEQ ID NO: 6359 - DNA, 30 bp, synthetic construct; identical to SEQ ID NO: 8
  misc_feature 1..30: note = Description of Artificial Sequence: Synthetic Antisense oligonucleotide
  modified_base 1: mod_base = OTHER; note = bicyclic nucleic acid (BNA)
  source 1..30: mol_type = other DNA

SEQ ID NO: 6360 - DNA, 29 bp, synthetic construct
  misc_feature 1..29: note = Description of Artificial Sequence: Synthetic Antisense oligonucleotide
  modified_base 1: mod_base = OTHER; note = bicyclic nucleic acid (BNA)
  source 1..29: mol_type = other DNA
ctccaacatcaaggaagatggcatttcta

SEQ ID NO: 6361 - DNA, 28 bp, synthetic construct
  misc_feature 1..28: note = Description of Artificial Sequence: Synthetic Antisense oligonucleotide
  modified_base 1: mod_base = OTHER; note = bicyclic nucleic acid (BNA)
  source 1..28: mol_type = other DNA
ctccaacatcaaggaagatggcatttct

SEQ ID NO: 6362 - DNA, 27 bp, synthetic construct
  misc_feature 1..27: note = Description of Artificial Sequence: Synthetic Antisense oligonucleotide
  modified_base 1: mod_base = OTHER; note = bicyclic nucleic acid (BNA)
  source 1..27: mol_type = other DNA
ctccaacatcaaggaagatggcatttc

SEQ ID NO: 6363 - DNA, 26 bp, synthetic construct
  misc_feature 1..26: note = Description of Artificial Sequence: Synthetic Antisense oligonucleotide
  modified_base 1: mod_base = OTHER; note = bicyclic nucleic acid (BNA)
  source 1..26: mol_type = other DNA
ctccaacatcaaggaagatggcattt

SEQ ID NO: 6364 - DNA, 25 bp, synthetic construct
  misc_feature 1..25: note = Description of Artificial Sequence: Synthetic Antisense oligonucleotide
  modified_base 1: mod_base = OTHER; note = bicyclic nucleic acid (BNA)
  source 1..25: mol_type = other DNA
ctccaacatcaaggaagatggcatt

SEQ ID NO: 6365 - DNA, 24 bp, synthetic construct
  misc_feature 1..24: note = Description of Artificial Sequence: Synthetic Antisense oligonucleotide
  modified_base 1: mod_base = OTHER; note = bicyclic nucleic acid (BNA)
  source 1..24: mol_type = other DNA
ctccaacatcaaggaagatggcat

SEQ ID NO: 6366 - DNA, 23 bp, synthetic construct
  misc_feature 1..23: note = Description of Artificial Sequence: Synthetic Antisense oligonucleotide
  modified_base 1: mod_base = OTHER; note = bicyclic nucleic acid (BNA)
  source 1..23: mol_type = other DNA
ctccaacatcaaggaagatggca

SEQ ID NO: 6367 - DNA, 22 bp, synthetic construct
  misc_feature 1..22: note = Description of Artificial Sequence: Synthetic Antisense oligonucleotide
  modified_base 1: mod_base = OTHER; note = bicyclic nucleic acid (BNA)
  source 1..22: mol_type = other DNA
ctccaacatcaaggaagatggc

SEQ ID NO: 6368 - DNA, 21 bp, synthetic construct
  misc_feature 1..21: note = Description of Artificial Sequence: Synthetic Antisense oligonucleotide
  modified_base 1: mod_base = OTHER; note = bicyclic nucleic acid (BNA)
  source 1..21: mol_type = other DNA
ctccaacatcaaggaagatgg

SEQ ID NO: 6369 - DNA, 20 bp, synthetic construct
  misc_feature 1..20: note = Description of Artificial Sequence: Synthetic Antisense oligonucleotide
  modified_base 1: mod_base = OTHER; note = bicyclic nucleic acid (BNA)
  source 1..20: mol_type = other DNA
ctccaacatcaaggaagatg

SEQ ID NO: 6370 - DNA, 19 bp, synthetic construct
  misc_feature 1..19: note = Description of Artificial Sequence: Synthetic Antisense oligonucleotide
  modified_base 1: mod_base = OTHER; note = bicyclic nucleic acid (BNA)
  source 1..19: mol_type = other DNA
ctccaacatcaaggaagat

SEQ ID NO: 6371 - DNA, 18 bp, synthetic construct
  misc_feature 1..18: note = Description of Artificial Sequence: Synthetic Antisense oligonucleotide
  modified_base 1: mod_base = OTHER; note = bicyclic nucleic acid (BNA)
  source 1..18: mol_type = other DNA
ctccaacatcaaggaaga

SEQ ID NO: 6372 - DNA, 17 bp, synthetic construct
  misc_feature 1..17: note = Description of Artificial Sequence: Synthetic Antisense oligonucleotide
  modified_base 1: mod_base = OTHER; note = bicyclic nucleic acid (BNA)
  source 1..17: mol_type = other DNA
ctccaacatcaaggaag

SEQ ID NO: 6373 - DNA, 29 bp, synthetic construct
  misc_feature 1..29: note = Description of Artificial Sequence: Synthetic Antisense oligonucleotide
  modified_base 1: mod_base = OTHER; note = bicyclic nucleic acid (BNA)
  source 1..29: mol_type = other DNA
tccaacatcaaggaagatggcatttctag

SEQ ID NO: 6374 - DNA, 28 bp, synthetic construct
  misc_feature 1..28: note = Description of Artificial Sequence: Synthetic Antisense oligonucleotide
  modified_base 1: mod_base = OTHER; note = bicyclic nucleic acid (BNA)
  source 1..28: mol_type = other DNA
tccaacatcaaggaagatggcatttcta

SEQ ID NO: 6375 - DNA, 27 bp, synthetic construct
  misc_feature 1..27: note = Description of Artificial Sequence: Synthetic Antisense oligonucleotide
  modified_base 1: mod_base = OTHER; note = bicyclic nucleic acid (BNA)
  source 1..27: mol_type = other DNA
tccaacatcaaggaagatggcatttct

SEQ ID NO: 6376 - DNA, 26 bp, synthetic construct
  misc_feature 1..26: note = Description of Artificial Sequence: Synthetic Antisense oligonucleotide
  modified_base 1: mod_base = OTHER; note = bicyclic nucleic acid (BNA)
  source 1..26: mol_type = other DNA
tccaacatcaaggaagatggcatttc

SEQ ID NO: 6377 - DNA, 25 bp, synthetic construct
  misc_feature 1..25: note = Description of Artificial Sequence: Synthetic Antisense oligonucleotide
  modified_base 1: mod_base = OTHER; note = bicyclic nucleic acid (BNA)
  source 1..25: mol_type = other DNA
tccaacatcaaggaagatggcattt

SEQ ID NO: 6378 - DNA, 24 bp, synthetic construct
  misc_feature 1..24: note = Description of Artificial Sequence: Synthetic Antisense oligonucleotide
  modified_base 1: mod_base = OTHER; note = bicyclic nucleic acid (BNA)
  source 1..24: mol_type = other DNA
tccaacatcaaggaagatggcatt

SEQ ID NO: 6379 - DNA, 23 bp, synthetic construct
  misc_feature 1..23: note = Description of Artificial Sequence: Synthetic Antisense oligonucleotide
  modified_base 1: mod_base = OTHER; note = bicyclic nucleic acid (BNA)
  source 1..23: mol_type = other DNA
tccaacatcaaggaagatggcat

SEQ ID NO: 6380 - DNA, 22 bp, synthetic construct
  misc_feature 1..22: note = Description of Artificial Sequence: Synthetic Antisense oligonucleotide
  modified_base 1: mod_base = OTHER; note = bicyclic nucleic acid (BNA)
  source 1..22: mol_type = other DNA
tccaacatcaaggaagatggca

SEQ ID NO: 6381 - DNA, 21 bp, synthetic construct
  misc_feature 1..21: note = Description of Artificial Sequence: Synthetic Antisense oligonucleotide
  modified_base 1: mod_base = OTHER; note = bicyclic nucleic acid (BNA)
  source 1..21: mol_type = other DNA
tccaacatcaaggaagatggc

SEQ ID NO: 6382 - DNA, 20 bp, synthetic construct
  misc_feature 1..20: note = Description of Artificial Sequence: Synthetic Antisense oligonucleotide
  modified_base 1: mod_base = OTHER; note = bicyclic nucleic acid (BNA)
  source 1..20: mol_type = other DNA
tccaacatcaaggaagatgg

SEQ ID NO: 6383 - DNA, 19 bp, synthetic construct
  misc_feature 1..19: note = Description of Artificial Sequence: Synthetic Antisense oligonucleotide
  modified_base 1: mod_base = OTHER; note = bicyclic nucleic acid (BNA)
  source 1..19: mol_type = other DNA
tccaacatcaaggaagatg

SEQ ID NO: 6384 - DNA, 18 bp, synthetic construct
  misc_feature 1..18: note = Description of Artificial Sequence: Synthetic Antisense oligonucleotide
  modified_base 1: mod_base = OTHER; note = bicyclic nucleic acid (BNA)
  source 1..18: mol_type = other DNA
tccaacatcaaggaagat

SEQ ID NO: 6385 - DNA, 17 bp, synthetic construct
  misc_feature 1..17: note = Description of Artificial Sequence: Synthetic Antisense oligonucleotide
  modified_base 1: mod_base = OTHER; note = bicyclic nucleic acid (BNA)
  source 1..17: mol_type = other DNA
tccaacatcaaggaaga

SEQ ID NO: 6386 - DNA, 16 bp, synthetic construct
  misc_feature 1..16: note = Description of Artificial Sequence: Synthetic Antisense oligonucleotide
  modified_base 1: mod_base = OTHER; note = bicyclic nucleic acid (BNA)
  source 1..16: mol_type = other DNA
tccaacatcaaggaag

SEQ ID NO: 6387 - DNA, 28 bp, synthetic construct
  misc_feature 1..28: note = Description of Artificial Sequence: Synthetic Antisense oligonucleotide
  modified_base 1: mod_base = OTHER; note = bicyclic nucleic acid (BNA)
  source 1..28: mol_type = other DNA
ccaacatcaaggaagatggcatttctag

SEQ ID NO: 6388 - DNA, 27 bp, synthetic construct
  misc_feature 1..27: note = Description of Artificial Sequence: Synthetic Antisense oligonucleotide
  modified_base 1: mod_base = OTHER; note = bicyclic nucleic acid (BNA)
  source 1..27: mol_type = other DNA
ccaacatcaaggaagatggcatttcta

SEQ ID NO: 6389 - DNA, 26 bp, synthetic construct
  misc_feature 1..26: note = Description of Artificial Sequence: Synthetic Antisense oligonucleotide
  modified_base 1: mod_base = OTHER; note = bicyclic nucleic acid (BNA)
  source 1..26: mol_type = other DNA
ccaacatcaaggaagatggcatttct

SEQ ID NO: 6390 - DNA, 25 bp, synthetic construct
  misc_feature 1..25: note = Description of Artificial Sequence: Synthetic Antisense oligonucleotide
  modified_base 1: mod_base = OTHER; note = bicyclic nucleic acid (BNA)
  source 1..25: mol_type = other DNA
ccaacatcaaggaagatggcatttc

SEQ ID NO: 6391 - DNA, 24 bp, synthetic construct
  misc_feature 1..24: note = Description of Artificial Sequence: Synthetic Antisense oligonucleotide
  modified_base 1: mod_base = OTHER; note = bicyclic nucleic acid (BNA)
  source 1..24: mol_type = other DNA
ccaacatcaaggaagatggcattt

SEQ ID NO: 6392 - DNA, 23 bp, synthetic construct
  misc_feature 1..23: note = Description of Artificial Sequence: Synthetic Antisense oligonucleotide
  modified_base 1: mod_base = OTHER; note = bicyclic nucleic acid (BNA)
  source 1..23: mol_type = other DNA
ccaacatcaaggaagatggcatt

SEQ ID NO: 6393 - DNA, 22 bp, synthetic construct
  misc_feature 1..22: note = Description of Artificial Sequence: Synthetic Antisense oligonucleotide
  modified_base 1: mod_base = OTHER; note = bicyclic nucleic acid (BNA)
  source 1..22: mol_type = other DNA
ccaacatcaaggaagatggcat

SEQ ID NO: 6394 - DNA, 21 bp, synthetic construct
  misc_feature 1..21: note = Description of Artificial Sequence: Synthetic Antisense oligonucleotide
  modified_base 1: mod_base = OTHER; note = bicyclic nucleic acid (BNA)
  source 1..21: mol_type = other DNA
ccaacatcaaggaagatggca

SEQ ID NO: 6395 - DNA, 20 bp, synthetic construct
  misc_feature 1..20: note = Description of Artificial Sequence: Synthetic Antisense oligonucleotide
  modified_base 1: mod_base = OTHER; note = bicyclic nucleic acid (BNA)
  source 1..20: mol_type = other DNA
ccaacatcaaggaagatggc

SEQ ID NO: 6396 - DNA, 19 bp, synthetic construct
  misc_feature 1..19: note = Description of Artificial Sequence: Synthetic Antisense oligonucleotide
  modified_base 1: mod_base = OTHER; note = bicyclic nucleic acid (BNA)
  source 1..19: mol_type = other DNA
ccaacatcaaggaagatgg

SEQ ID NO: 6397 - DNA, 18 bp, synthetic construct
  misc_feature 1..18: note = Description of Artificial Sequence: Synthetic Antisense oligonucleotide
  modified_base 1: mod_base = OTHER; note = bicyclic nucleic acid (BNA)
  source 1..18: mol_type = other DNA
ccaacatcaaggaagatg

SEQ ID NO: 6398 - DNA, 17 bp, synthetic construct
  misc_feature 1..17: note = Description of Artificial Sequence: Synthetic Antisense oligonucleotide
  modified_base 1: mod_base = OTHER; note = bicyclic nucleic acid (BNA)
  source 1..17: mol_type = other DNA
ccaacatcaaggaagat

SEQ ID NO: 6399 - DNA, 16 bp, synthetic construct
  misc_feature 1..16: note = Description of Artificial Sequence: Synthetic Antisense oligonucleotide
  modified_base 1: mod_base = OTHER; note = bicyclic nucleic acid (BNA)
  source 1..16: mol_type = other DNA
ccaacatcaaggaaga

SEQ ID NO: 6400 - DNA, 15 bp, synthetic construct
  misc_feature 1..15: note = Description of Artificial Sequence: Synthetic Antisense oligonucleotide
  modified_base 1: mod_base = OTHER; note = bicyclic nucleic acid (BNA)
  source 1..15: mol_type = other DNA
ccaacatcaaggaag

SEQ ID NO: 6401 - DNA, 27 bp, synthetic construct
  misc_feature 1..27: note = Description of Artificial Sequence: Synthetic Antisense oligonucleotide
  modified_base 1: mod_base = OTHER; note = bicyclic nucleic acid (BNA)
  source 1..27: mol_type = other DNA
caacatcaaggaagatggcatttctag

SEQ ID NO: 6402 - DNA, 26 bp, synthetic construct
  misc_feature 1..26: note = Description of Artificial Sequence: Synthetic Antisense oligonucleotide
  modified_base 1: mod_base = OTHER; note = bicyclic nucleic acid (BNA)
  source 1..26: mol_type = other DNA
caacatcaaggaagatggcatttcta

SEQ ID NO: 6403 - DNA, 25 bp, synthetic construct
  misc_feature 1..25: note = Description of Artificial Sequence: Synthetic Antisense oligonucleotide
  modified_base 1: mod_base = OTHER; note = bicyclic nucleic acid (BNA)
  source 1..25: mol_type = other DNA
caacatcaaggaagatggcatttct

SEQ ID NO: 6404 - DNA, 24 bp, synthetic construct
  misc_feature 1..24: note = Description of Artificial Sequence: Synthetic Antisense oligonucleotide
  modified_base 1: mod_base = OTHER; note = bicyclic nucleic acid (BNA)
  source 1..24: mol_type = other DNA
caacatcaaggaagatggcatttc

SEQ ID NO: 6405 - DNA, 23 bp, synthetic construct
  misc_feature 1..23: note = Description of Artificial Sequence: Synthetic Antisense oligonucleotide
  modified_base 1: mod_base = OTHER; note = bicyclic nucleic acid (BNA)
  source 1..23: mol_type = other DNA
caacatcaaggaagatggcattt

SEQ ID NO: 6406 - DNA, 22 bp, synthetic construct
  misc_feature 1..22: note = Description of Artificial Sequence: Synthetic Antisense oligonucleotide
  modified_base 1: mod_base = OTHER; note = bicyclic nucleic acid (BNA)
  source 1..22: mol_type = other DNA
caacatcaaggaagatggcatt

SEQ ID NO: 6407 - DNA, 21 bp, synthetic construct
  misc_feature 1..21: note = Description of Artificial Sequence: Synthetic Antisense oligonucleotide
  modified_base 1: mod_base = OTHER; note = bicyclic nucleic acid (BNA)
  source 1..21: mol_type = other DNA
caacatcaaggaagatggcat

SEQ ID NO: 6408 - DNA, 20 bp, synthetic construct
  misc_feature 1..20: note = Description of Artificial Sequence: Synthetic Antisense oligonucleotide
  modified_base 1: mod_base = OTHER; note = bicyclic nucleic acid (BNA)
  source 1..20: mol_type = other DNA
caacatcaaggaagatggca

SEQ ID NO: 6409 - DNA, 19 bp, synthetic construct
  misc_feature 1..19: note = Description of Artificial Sequence: Synthetic Antisense oligonucleotide
  modified_base 1: mod_base = OTHER; note = bicyclic nucleic acid (BNA)
  source 1..19: mol_type = other DNA
caacatcaaggaagatggc

SEQ ID NO: 6410 - DNA, 18 bp, synthetic construct
  misc_feature 1..18: note = Description of Artificial Sequence: Synthetic Antisense oligonucleotide
  modified_base 1: mod_base = OTHER; note = bicyclic nucleic acid (BNA)
  source 1..18: mol_type = other DNA
caacatcaaggaagatgg

SEQ ID NO: 6411 - DNA, 17 bp, synthetic construct
  misc_feature 1..17: note = Description of Artificial Sequence: Synthetic Antisense oligonucleotide
  modified_base 1: mod_base = OTHER; note = bicyclic nucleic acid (BNA)
  source 1..17: mol_type = other DNA
caacatcaaggaagatg

SEQ ID NO: 6412 - DNA, 16 bp, synthetic construct
  misc_feature 1..16: note = Description of Artificial Sequence: Synthetic Antisense oligonucleotide
  modified_base 1: mod_base = OTHER; note = bicyclic nucleic acid (BNA)
  source 1..16: mol_type = other DNA
caacatcaaggaagat

SEQ ID NO: 6413 - DNA, 15 bp, synthetic construct
  misc_feature 1..15: note = Description of Artificial Sequence: Synthetic Antisense oligonucleotide
  modified_base 1: mod_base = OTHER; note = bicyclic nucleic acid (BNA)
  source 1..15: mol_type = other DNA
caacatcaaggaaga

SEQ ID NO: 6414 - DNA, 14 bp, synthetic construct
  misc_feature 1..14: note = Description of Artificial Sequence: Synthetic Antisense oligonucleotide
  modified_base 1: mod_base = OTHER; note = bicyclic nucleic acid (BNA)
  source 1..14: mol_type = other DNA
caacatcaaggaag

SEQ ID NO: 6415 - DNA, 26 bp, synthetic construct
  misc_feature 1..26: note = Description of Artificial Sequence: Synthetic Antisense oligonucleotide
  modified_base 1: mod_base = OTHER; note = bicyclic nucleic acid (BNA)
  source 1..26: mol_type = other DNA
aacatcaaggaagatggcatttctag

SEQ ID NO: 6416 - DNA, 25 bp, synthetic construct
  misc_feature 1..25: note = Description of Artificial Sequence: Synthetic Antisense oligonucleotide
  modified_base 1: mod_base = OTHER; note = bicyclic nucleic acid (BNA)
  source 1..25: mol_type = other DNA
aacatcaaggaagatggcatttcta

SEQ ID NO: 6417 - DNA, 24 bp, synthetic construct
  misc_feature 1..24: note = Description of Artificial Sequence: Synthetic Antisense oligonucleotide
  modified_base 1: mod_base = OTHER; note = bicyclic nucleic acid (BNA)
  source 1..24: mol_type = other DNA
aacatcaaggaagatggcatttct

SEQ ID NO: 6418 - DNA, 23 bp, synthetic construct
  misc_feature 1..23: note = Description of Artificial Sequence: Synthetic Antisense oligonucleotide
  modified_base 1: mod_base = OTHER; note = bicyclic nucleic acid (BNA)
  source 1..23: mol_type = other DNA
aacatcaaggaagatggcatttc

SEQ ID NO: 6419 - DNA, 22 bp, synthetic construct
  misc_feature 1..22: note = Description of Artificial Sequence: Synthetic Antisense oligonucleotide
  modified_base 1: mod_base = OTHER; note = bicyclic nucleic acid (BNA)
  source 1..22: mol_type = other DNA
aacatcaaggaagatggcattt

SEQ ID NO: 6420 - DNA, 21 bp, synthetic construct
  misc_feature 1..21: note = Description of Artificial Sequence: Synthetic Antisense oligonucleotide
  modified_base 1: mod_base = OTHER; note = bicyclic nucleic acid (BNA)
  source 1..21: mol_type = other DNA
aacatcaaggaagatggcatt

SEQ ID NO: 6421 - DNA, 20 bp, synthetic construct
  misc_feature 1..20: note = Description of Artificial Sequence: Synthetic Antisense oligonucleotide
  modified_base 1: mod_base = OTHER; note = bicyclic nucleic acid (BNA)
  source 1..20: mol_type = other DNA
aacatcaaggaagatggcat

SEQ ID NO: 6422 - DNA, 19 bp, synthetic construct
  misc_feature 1..19: note = Description of Artificial Sequence: Synthetic Antisense oligonucleotide
  modified_base 1: mod_base = OTHER; note = bicyclic nucleic acid (BNA)
  source 1..19: mol_type = other DNA
aacatcaaggaagatggca

SEQ ID NO: 6423 - DNA, 18 bp, synthetic construct
  misc_feature 1..18: note = Description of Artificial Sequence: Synthetic Antisense oligonucleotide
  modified_base 1: mod_base = OTHER; note = bicyclic nucleic acid (BNA)
  source 1..18: mol_type = other DNA
aacatcaaggaagatggc

SEQ ID NO: 6424 - DNA, 17 bp, synthetic construct
  misc_feature 1..17: note = Description of Artificial Sequence: Synthetic Antisense oligonucleotide
  modified_base 1: mod_base = OTHER; note = bicyclic nucleic acid (BNA)
  source 1..17: mol_type = other DNA
aacatcaaggaagatgg

SEQ ID NO: 6425 - DNA, 16 bp, synthetic construct
  misc_feature 1..16: note = Description of Artificial Sequence: Synthetic Antisense oligonucleotide
  modified_base 1: mod_base = OTHER; note = bicyclic nucleic acid (BNA)
  source 1..16: mol_type = other DNA
aacatcaaggaagatg

SEQ ID NO: 6426 - DNA, 15 bp, synthetic construct
  misc_feature 1..15: note = Description of Artificial Sequence: Synthetic Antisense oligonucleotide
  modified_base 1: mod_base = OTHER; note = bicyclic nucleic acid (BNA)
  source 1..15: mol_type = other DNA
aacatcaaggaagat

SEQ ID NO: 6427 - DNA, 14 bp, synthetic construct
  misc_feature 1..14: note = Description of Artificial Sequence: Synthetic Antisense oligonucleotide
  modified_base 1: mod_base = OTHER; note = bicyclic nucleic acid (BNA)
  source 1..14: mol_type = other DNA
aacatcaaggaaga

SEQ ID NO: 6428 - DNA, 13 bp, synthetic construct
  misc_feature 1..13: note = Description of Artificial Sequence: Synthetic Antisense oligonucleotide
  modified_base 1: mod_base = OTHER; note = bicyclic nucleic acid (BNA)
  source 1..13: mol_type = other DNA
aacatcaaggaag

SEQ ID NO: 6429 - DNA, 25 bp, synthetic construct
  misc_feature 1..25: note = Description of Artificial Sequence: Synthetic Antisense oligonucleotide
  modified_base 1: mod_base = OTHER; note = bicyclic nucleic acid (BNA)
  source 1..25: mol_type = other DNA
acatcaaggaagatggcatttctag

SEQ ID NO: 6430 - DNA, 24 bp, synthetic construct
  misc_feature 1..24: note = Description of Artificial Sequence: Synthetic Antisense oligonucleotide
  modified_base 1: mod_base = OTHER; note = bicyclic nucleic acid (BNA)
  source 1..24: mol_type = other DNA
acatcaaggaagatggcatttcta

SEQ ID NO: 6431 - DNA, 23 bp, synthetic construct
  misc_feature 1..23: note = Description of Artificial Sequence: Synthetic Antisense oligonucleotide
  modified_base 1: mod_base = OTHER; note = bicyclic nucleic acid (BNA)
  source 1..23: mol_type = other DNA
acatcaaggaagatggcatttct

SEQ ID NO: 6432 - DNA, 22 bp, synthetic construct
  misc_feature 1..22: note = Description of Artificial Sequence: Synthetic Antisense oligonucleotide
  modified_base 1: mod_base = OTHER; note = bicyclic nucleic acid (BNA)
  source 1..22: mol_type = other DNA
acatcaaggaagatggcatttc

SEQ ID NO: 6433 - DNA, 21 bp, synthetic construct
  misc_feature 1..21: note = Description of Artificial Sequence: Synthetic Antisense oligonucleotide
  modified_base 1: mod_base = OTHER; note = bicyclic nucleic acid (BNA)
  source 1..21: mol_type = other DNA
acatcaaggaagatggcattt

SEQ ID NO: 6434 - DNA, 20 bp, synthetic construct
  misc_feature 1..20: note = Description of Artificial Sequence: Synthetic Antisense oligonucleotide
  modified_base 1: mod_base = OTHER; note = bicyclic nucleic acid (BNA)
  source 1..20: mol_type = other DNA
acatcaaggaagatggcatt

SEQ ID NO: 6435 - DNA, 19 bp, synthetic construct
  misc_feature 1..19: note = Description of Artificial Sequence: Synthetic Antisense oligonucleotide
  modified_base 1: mod_base = OTHER; note = bicyclic nucleic acid (BNA)
  source 1..19: mol_type = other DNA
acatcaaggaagatggcat

SEQ ID NO: 6436 - DNA, 18 bp, synthetic construct
  misc_feature 1..18: note = Description of Artificial Sequence: Synthetic Antisense oligonucleotide
  modified_base 1: mod_base = OTHER; note = bicyclic nucleic acid (BNA)
  source 1..18: mol_type = other DNA
acatcaaggaagatggca

SEQ ID NO: 6437 - DNA, 17 bp, synthetic construct
  misc_feature 1..17: note = Description of Artificial Sequence: Synthetic Antisense oligonucleotide
  modified_base 1: mod_base = OTHER; note = bicyclic nucleic acid (BNA)
  source 1..17: mol_type = other DNA
acatcaaggaagatggc

SEQ ID NO: 6438 - DNA, 16 bp, synthetic construct
  misc_feature 1..16: note = Description of Artificial Sequence: Synthetic Antisense oligonucleotide
  modified_base 1: mod_base = OTHER; note = bicyclic nucleic acid (BNA)
  source 1..16: mol_type = other DNA
acatcaaggaagatgg

SEQ ID NO: 6439 - DNA, 15 bp, synthetic construct
  misc_feature 1..15: note = Description of Artificial Sequence: Synthetic Antisense oligonucleotide
  modified_base 1: mod_base = OTHER; note = bicyclic nucleic acid (BNA)
  source 1..15: mol_type = other DNA
acatcaaggaagatg

SEQ ID NO: 6440 - DNA, 14 bp, synthetic construct
  misc_feature 1..14: note = Description of Artificial Sequence: Synthetic Antisense oligonucleotide
  modified_base 1: mod_base = OTHER; note = bicyclic nucleic acid (BNA)
  source 1..14: mol_type = other DNA
acatcaaggaagat

SEQ ID NO: 6441 - DNA, 13 bp, synthetic construct
  misc_feature 1..13: note = Description of Artificial Sequence: Synthetic Antisense oligonucleotide
  modified_base 1: mod_base = OTHER; note = bicyclic nucleic acid (BNA)
  source 1..13: mol_type = other DNA
acatcaaggaaga

SEQ ID NO: 6442 - DNA, 12 bp, synthetic construct
  misc_feature 1..12: note = Description of Artificial Sequence: Synthetic Antisense oligonucleotide
  modified_base 1: mod_base = OTHER; note = bicyclic nucleic acid (BNA)
  source 1..12: mol_type = other DNA
acatcaaggaag

SEQ ID NO: 6443 - DNA, 24 bp, synthetic construct
  misc_feature 1..24: note = Description of Artificial Sequence: Synthetic Antisense oligonucleotide
  modified_base 1: mod_base = OTHER; note = bicyclic nucleic acid (BNA)
  source 1..24: mol_type = other DNA
catcaaggaagatggcatttctag

SEQ ID NO: 6444 - DNA, 23 bp, synthetic construct
  misc_feature 1..23: note = Description of Artificial Sequence: Synthetic Antisense oligonucleotide
  modified_base 1: mod_base = OTHER; note = bicyclic nucleic acid (BNA)
  source 1..23: mol_type = other DNA
catcaaggaagatggcatttcta

SEQ ID NO: 6445 - DNA, 22 bp, synthetic construct
  misc_feature 1..22: note = Description of Artificial Sequence: Synthetic Antisense oligonucleotide
  modified_base 1: mod_base = OTHER; note = bicyclic nucleic acid (BNA)
  source 1..22: mol_type = other DNA
catcaaggaagatggcatttct

SEQ ID NO: 6446 - DNA, 21 bp, synthetic construct
  misc_feature 1..21: note = Description of Artificial Sequence: Synthetic Antisense oligonucleotide
  modified_base 1: mod_base = OTHER; note = bicyclic nucleic acid (BNA)
  source 1..21: mol_type = other DNA
catcaaggaagatggcatttc

SEQ ID NO: 6447 - DNA, 20 bp, synthetic construct
  misc_feature 1..20: note = Description of Artificial Sequence: Synthetic Antisense oligonucleotide
  modified_base 1: mod_base = OTHER; note = bicyclic nucleic acid (BNA)
  source 1..20: mol_type = other DNA
catcaaggaagatggcattt

SEQ ID NO: 6448 - DNA, 19 bp, synthetic construct
  misc_feature 1..19: note = Description of Artificial Sequence: Synthetic Antisense oligonucleotide
  modified_base 1: mod_base = OTHER; note = bicyclic nucleic acid (BNA)
  source 1..19: mol_type = other DNA
catcaaggaagatggcatt

SEQ ID NO: 6449 - DNA, 18 bp, synthetic construct
  misc_feature 1..18: note = Description of Artificial Sequence: Synthetic Antisense oligonucleotide
  modified_base 1: mod_base = OTHER; note = bicyclic nucleic acid (BNA)
  source 1..18: mol_type = other DNA
catcaaggaagatggcat

SEQ ID NO: 6450 - DNA, 17 bp, synthetic construct
  misc_feature 1..17: note = Description of Artificial Sequence: Synthetic Antisense oligonucleotide
  modified_base 1: mod_base = OTHER; note = bicyclic nucleic acid (BNA)
  source 1..17: mol_type = other DNA
catcaaggaagatggca

SEQ ID NO: 6451 - DNA, 16 bp, synthetic construct
  misc_feature 1..16: note = Description of Artificial Sequence: Synthetic Antisense oligonucleotide
  modified_base 1: mod_base = OTHER; note = bicyclic nucleic acid (BNA)
  source 1..16: mol_type = other DNA
catcaaggaagatggc

SEQ ID NO: 6452 - DNA, 15 bp, synthetic construct
  misc_feature 1..15: note = Description of Artificial Sequence: Synthetic Antisense oligonucleotide
  modified_base 1: mod_base = OTHER; note = bicyclic nucleic acid (BNA)
  source 1..15: mol_type = other DNA
catcaaggaagatgg

SEQ ID NO: 6453 - DNA, 14 bp, synthetic construct
  misc_feature 1..14: note = Description of Artificial Sequence: Synthetic Antisense oligonucleotide
  modified_base 1: mod_base = OTHER; note = bicyclic nucleic acid (BNA)
  source 1..14: mol_type = other DNA
catcaaggaagatg

SEQ ID NO: 6454 - DNA, 13 bp, synthetic construct
  misc_feature 1..13: note = Description of Artificial Sequence: Synthetic Antisense oligonucleotide
  modified_base 1: mod_base = OTHER; note = bicyclic nucleic acid (BNA)
  source 1..13: mol_type = other DNA
catcaaggaagat

SEQ ID NO: 6455 - DNA, 12 bp, synthetic construct
  misc_feature 1..12: note = Description of Artificial Sequence: Synthetic Antisense oligonucleotide
  modified_base 1: mod_base = OTHER; note = bicyclic nucleic acid (BNA)
  source 1..12: mol_type = other DNA
catcaaggaaga

SEQ ID NO: 6456 - DNA, 11 bp, synthetic construct
  misc_feature 1..11: note = Description of Artificial Sequence: Synthetic Antisense oligonucleotide
  modified_base 1: mod_base = OTHER; note = bicyclic nucleic acid (BNA)
  source 1..11: mol_type = other DNA
catcaaggaag

SEQ ID NO: 6457 - DNA, 23 bp, synthetic construct
  misc_feature 1..23: note = Description of Artificial Sequence: Synthetic Antisense oligonucleotide
  modified_base 1: mod_base = OTHER; note = bicyclic nucleic acid (BNA)
  source 1..23: mol_type = other DNA
atcaaggaagatggcatttctag

SEQ ID NO: 6458 - DNA, 22 bp, synthetic construct
  misc_feature 1..22: note = Description of Artificial Sequence: Synthetic Antisense oligonucleotide
  modified_base 1: mod_base = OTHER; note = bicyclic nucleic acid (BNA)
  source 1..22: mol_type = other DNA
atcaaggaagatggcatttcta

SEQ ID NO: 6459 - DNA, 21 bp, synthetic construct
  misc_feature 1..21: note = Description of Artificial Sequence: Synthetic Antisense oligonucleotide
  modified_base 1: mod_base = OTHER; note = bicyclic nucleic acid (BNA)
  source 1..21: mol_type = other DNA
atcaaggaagatggcatttct

SEQ ID NO: 6460 - DNA, 20 bp, synthetic construct
  misc_feature 1..20: note = Description of Artificial Sequence: Synthetic Antisense oligonucleotide
  modified_base 1: mod_base = OTHER; note = bicyclic nucleic acid (BNA)
  source 1..20: mol_type = other DNA
atcaaggaagatggcatttc

SEQ ID NO: 6461 - DNA, 19 bp, synthetic construct
  misc_feature 1..19: note = Description of Artificial Sequence: Synthetic Antisense oligonucleotide
  modified_base 1: mod_base = OTHER; note = bicyclic nucleic acid (BNA)
  source 1..19: mol_type = other DNA
atcaaggaagatggcattt

SEQ ID NO: 6462 - DNA, 18 bp, synthetic construct
  misc_feature 1..18: note = Description of Artificial Sequence: Synthetic Antisense oligonucleotide
  modified_base 1: mod_base = OTHER; note = bicyclic nucleic acid (BNA)
  source 1..18: mol_type = other DNA
atcaaggaagatggcatt

SEQ ID NO: 6463 - DNA, 17 bp, synthetic construct
  misc_feature 1..17: note = Description of Artificial Sequence: Synthetic Antisense oligonucleotide
  modified_base 1: mod_base = OTHER; note = bicyclic nucleic acid (BNA)
  source 1..17: mol_type = other DNA
atcaaggaagatggcat

SEQ ID NO: 6464 - DNA, 16 bp, synthetic construct
  misc_feature 1..16: note = Description of Artificial Sequence: Synthetic Antisense oligonucleotide
  modified_base 1: mod_base = OTHER; note = bicyclic nucleic acid (BNA)
  source 1..16: mol_type = other DNA
atcaaggaagatggca

SEQ ID NO: 6465 - DNA, 15 bp, synthetic construct
  misc_feature 1..15: note = Description of Artificial Sequence: Synthetic Antisense oligonucleotide
  modified_base 1: mod_base = OTHER; note = bicyclic nucleic acid (BNA)
  source 1..15: mol_type = other DNA
atcaaggaagatggc

SEQ ID NO: 6466 - DNA, 14 bp, synthetic construct
  misc_feature 1..14: note = Description of Artificial Sequence: Synthetic Antisense oligonucleotide
  modified_base 1: mod_base = OTHER; note = bicyclic nucleic acid (BNA)
  source 1..14: mol_type = other DNA
atcaaggaagatgg

SEQ ID NO: 6467 - DNA, 13 bp, synthetic construct
  misc_feature 1..13: note = Description of Artificial Sequence: Synthetic Antisense oligonucleotide
  modified_base 1: mod_base = OTHER; note = bicyclic nucleic acid (BNA)
  source 1..13: mol_type = other DNA
atcaaggaagatg

SEQ ID NO: 6468 - DNA, 12 bp, synthetic construct
  misc_feature 1..12: note = Description of Artificial Sequence: Synthetic Antisense oligonucleotide
  modified_base 1: mod_base = OTHER; note = bicyclic nucleic acid (BNA)
  source 1..12: mol_type = other DNA
atcaaggaagat

SEQ ID NO: 6469 - DNA, 11 bp, synthetic construct
  misc_feature 1..11: note = Description of Artificial Sequence: Synthetic Antisense oligonucleotide
  modified_base 1: mod_base = OTHER; note = bicyclic nucleic acid (BNA)
  source 1..11: mol_type = other DNA
atcaaggaaga

SEQ ID NO: 6470 - DNA, 10 bp, synthetic construct
  misc_feature 1..10: note = Description of Artificial Sequence: Synthetic Antisense oligonucleotide
  modified_base 1: mod_base = OTHER; note = bicyclic nucleic acid (BNA)
  source 1..10: mol_type = other DNA
atcaaggaag

SEQ ID NO: 6471 - DNA, 18 bp, synthetic construct
  misc_feature 1..18: note = Description of Artificial Sequence: Synthetic Antisense oligonucleotide
  modified_base 18: mod_base = OTHER; note = bicyclic nucleic acid (BNA)
  source 1..18: mol_type = other DNA
ggtaagttctgtccaagc

SEQ ID NO: 6472 - DNA, 18 bp, synthetic construct
  misc_feature 1..18: note = Description of Artificial Sequence: Synthetic Antisense oligonucleotide
  modified_base 18: mod_base = OTHER; note = bicyclic nucleic acid (BNA)
  source 1..18: mol_type = other DNA
gtaagttctgtccaagcc

SEQ ID NO: 6473 - DNA, 18 bp, synthetic construct
  misc_feature 1..18: note = Description of Artificial Sequence: Synthetic Antisense oligonucleotide
  modified_base 18: mod_base = OTHER; note = bicyclic nucleic acid (BNA)
  source 1..18: mol_type = other DNA
agtcggtaagttctgtcc

SEQ ID NO: 6474 - DNA, 18 bp, synthetic construct
  misc_feature 1..18: note = Description of Artificial Sequence: Synthetic Antisense oligonucleotide
  modified_base 18: mod_base = OTHER; note = bicyclic nucleic acid (BNA)
  source 1..18: mol_type = other DNA
ctgtccaagcccggttga

SEQ ID NO: 6475 - DNA, 15 bp, synthetic construct
  misc_feature 1..15: note = Description of Artificial Sequence: Synthetic Antisense oligonucleotide
  modified_base 15: mod_base = OTHER; note = bicyclic nucleic acid (BNA)
  source 1..15: mol_type = other DNA
taagttctgtccaag

SEQ ID NO: 6476 - DNA, 20 bp, synthetic construct
  misc_feature 1..20: note = Description of Artificial Sequence: Synthetic Antisense oligonucleotide
  modified_base 20: mod_base = OTHER; note = bicyclic nucleic acid (BNA)
  source 1..20: mol_type = other DNA
ttctgtccaagcccggttga

SEQ ID NO: 6477 - DNA, 19 bp, synthetic construct
  misc_feature 1..19: note = Description of Artificial Sequence: Synthetic Antisense oligonucleotide
  modified_base 19: mod_base = OTHER; note = bicyclic nucleic acid (BNA)
  source 1..19: mol_type = other DNA
ttctgtccaagcccggttg

SEQ ID NO: 6478 - DNA, 18 bp, synthetic construct
  misc_feature 1..18: note = Description of Artificial Sequence: Synthetic Antisense oligonucleotide
  modified_base 18: mod_base = OTHER; note = bicyclic nucleic acid (BNA)
  source 1..18: mol_type = other DNA
ttctgtccaagcccggtt

SEQ ID NO: 6479 - DNA, 17 bp, synthetic construct
  misc_feature 1..17: note = Description of Artificial Sequence: Synthetic Antisense oligonucleotide
  modified_base 17: mod_base = OTHER; note = bicyclic nucleic acid (BNA)
  source 1..17: mol_type = other DNA
ttctgtccaagcccggt

SEQ ID NO: 6480 - DNA, 16 bp, synthetic construct
  misc_feature 1..16: note = Description of Artificial Sequence: Synthetic Antisense oligonucleotide
  modified_base 16: mod_base = OTHER; note = bicyclic nucleic acid (BNA)
  source 1..16: mol_type = other DNA
ttctgtccaagcccgg

SEQ ID NO: 6481 - DNA, 15 bp, synthetic construct
  misc_feature 1..15: note = Description of Artificial Sequence: Synthetic Antisense oligonucleotide
  modified_base 15: mod_base = OTHER; note = bicyclic nucleic acid (BNA)
  source 1..15: mol_type = other DNA
ttctgtccaagcccg

SEQ ID NO: 6482 - DNA, 14 bp, synthetic construct
  misc_feature 1..14: note = Description of Artificial Sequence: Synthetic Antisense oligonucleotide
  modified_base 14: mod_base = OTHER; note = bicyclic nucleic acid (BNA)
  source 1..14: mol_type = other DNA
ttctgtccaagccc

SEQ ID NO: 6483 - DNA, 13 bp, synthetic construct
  misc_feature 1..13: note = Description of Artificial Sequence: Synthetic Antisense oligonucleotide
  modified_base 13: mod_base = OTHER; note = bicyclic nucleic acid (BNA)
  source 1..13: mol_type = other DNA
ttctgtccaagcc

SEQ ID NO: 6484 - DNA, 12 bp, synthetic construct
  misc_feature 1..12: note = Description of Artificial Sequence: Synthetic Antisense oligonucleotide
  modified_base 12: mod_base = OTHER; note = bicyclic nucleic acid (BNA)
  source 1..12: mol_type = other DNA
ttctgtccaagc

SEQ ID NO: 6485 - DNA, 11 bp, synthetic construct
  misc_feature 1..11: note = Description of Artificial Sequence: Synthetic Antisense oligonucleotide
  modified_base 11: mod_base = OTHER; note = bicyclic nucleic acid (BNA)
  source 1..11: mol_type = other DNA
ttctgtccaag

SEQ ID NO: 6486 - DNA, 10 bp, synthetic construct
  misc_feature 1..10: note = Description of Artificial Sequence: Synthetic Antisense oligonucleotide
  modified_base 10: mod_base = OTHER; note = bicyclic nucleic acid (BNA)
  source 1..10: mol_type = other DNA
ttctgtccaa

SEQ ID NO: 6487-6488 - skipped (2 entries)

SEQ ID NO: 6489 - DNA, 19 bp, synthetic construct
  misc_feature 1..19: note = Description of Artificial Sequence: Synthetic Antisense oligonucleotide
  modified_base 19: mod_base = OTHER; note = bicyclic nucleic acid (BNA)
  source 1..19: mol_type = other DNA
tctgtccaagcccggttga

SEQ ID NO: 6490 - DNA, 18 bp, synthetic construct
  misc_feature 1..18: note = Description of Artificial Sequence: Synthetic Antisense oligonucleotide
  modified_base 18: mod_base = OTHER; note = bicyclic nucleic acid (BNA)
  source 1..18: mol_type = other DNA
tctgtccaagcccggttg

SEQ ID NO: 6491 - DNA, 17 bp, synthetic construct
  misc_feature 1..17: note = Description of Artificial Sequence: Synthetic Antisense oligonucleotide
  modified_base 17: mod_base = OTHER; note = bicyclic nucleic acid (BNA)
  source 1..17: mol_type = other DNA
tctgtccaagcccggtt

SEQ ID NO: 6492 - DNA, 16 bp, synthetic construct
  misc_feature 1..16: note = Description of Artificial Sequence: Synthetic Antisense oligonucleotide
  modified_base 16: mod_base = OTHER; note = bicyclic nucleic acid (BNA)
  source 1..16: mol_type = other DNA
tctgtccaagcccggt

SEQ ID NO: 6493 - DNA, 15 bp, synthetic construct
  misc_feature 1..15: note = Description of Artificial Sequence: Synthetic Antisense oligonucleotide
  modified_base 15: mod_base = OTHER; note = bicyclic nucleic acid (BNA)
  source 1..15: mol_type = other DNA
tctgtccaagcccgg

SEQ ID NO: 6494 - DNA, 14 bp, synthetic construct
  misc_feature 1..14: note = Description of Artificial Sequence: Synthetic Antisense oligonucleotide
  modified_base 14: mod_base = OTHER; note = bicyclic nucleic acid (BNA)
  source 1..14: mol_type = other DNA
tctgtccaagcccg

SEQ ID NO: 6495 - DNA, 13 bp, synthetic construct
  misc_feature 1..13: note = Description of Artificial Sequence: Synthetic Antisense oligonucleotide
  modified_base 13: mod_base = OTHER; note = bicyclic nucleic acid (BNA)
  source 1..13: mol_type = other DNA
tctgtccaagccc

SEQ ID NO: 6496 - DNA, 12 bp, synthetic construct
  misc_feature 1..12: note = Description of Artificial Sequence: Synthetic Antisense oligonucleotide
  modified_base 12: mod_base = OTHER; note = bicyclic nucleic acid (BNA)
  source 1..12: mol_type = other DNA
tctgtccaagcc

SEQ ID NO: 6497 - DNA, 11 bp, synthetic construct
  misc_feature 1..11: note = Description of Artificial Sequence: Synthetic Antisense oligonucleotide
  modified_base 11: mod_base = OTHER; note = bicyclic nucleic acid (BNA)
  source 1..11: mol_type = other DNA
tctgtccaagc

SEQ ID NO: 6498 - DNA, 10 bp, synthetic construct
  misc_feature 1..10: note = Description of Artificial Sequence: Synthetic Antisense oligonucleotide
  modified_base 10: mod_base = OTHER; note = bicyclic nucleic acid (BNA)
  source 1..10: mol_type = other DNA
tctgtccaag

SEQ ID NO: 6499-6500 - skipped (2 entries)

SEQ ID NO: 6501 - DNA, 17 bp, synthetic construct
  misc_feature 1..17: note = Description of Artificial Sequence: Synthetic Antisense oligonucleotide
  modified_base 17: mod_base = OTHER; note = bicyclic nucleic acid (BNA)
  source 1..17: mol_type = other DNA
ctgtccaagcccggttg

SEQ ID NO: 6502 - DNA, 16 bp, synthetic construct
  misc_feature 1..16: note = Description of Artificial Sequence: Synthetic Antisense oligonucleotide
  modified_base 16: mod_base = OTHER; note = bicyclic nucleic acid (BNA)
  source 1..16: mol_type = other DNA
ctgtccaagcccggtt

SEQ ID NO: 6503 - DNA, 15 bp, synthetic construct
  misc_feature 1..15: note = Description of Artificial Sequence: Synthetic Antisense oligonucleotide
  modified_base 15: mod_base = OTHER; note = bicyclic nucleic acid (BNA)
  source 1..15: mol_type = other DNA
ctgtccaagcccggt

SEQ ID NO: 6504 - DNA, 14 bp, synthetic construct
  misc_feature 1..14: note = Description of Artificial Sequence: Synthetic Antisense oligonucleotide
  modified_base 14: mod_base = OTHER; note = bicyclic nucleic acid (BNA)
  source 1..14: mol_type = other DNA
ctgtccaagcccgg

SEQ ID NO: 6505 - DNA, 13 bp, synthetic construct
  misc_feature 1..13: note = Description of Artificial Sequence: Synthetic Antisense oligonucleotide
  modified_base 13: mod_base = OTHER; note = bicyclic nucleic acid (BNA)
  source 1..13: mol_type = other DNA
ctgtccaagcccg

SEQ ID NO: 6506 - DNA, 12 bp, synthetic construct
  misc_feature 1..12: note = Description of Artificial Sequence: Synthetic Antisense oligonucleotide
  modified_base 12: mod_base = OTHER; note = bicyclic nucleic acid (BNA)
  source 1..12: mol_type = other DNA
ctgtccaagccc

SEQ ID NO: 6507 - DNA, 11 bp, synthetic construct
  misc_feature 1..11: note = Description of Artificial Sequence: Synthetic Antisense oligonucleotide
  modified_base 11: mod_base = OTHER; note = bicyclic nucleic acid (BNA)
  source 1..11: mol_type = other DNA
ctgtccaagcc

SEQ ID NO: 6508 - DNA, 10 bp, synthetic construct
  misc_feature 1..10: note = Description of Artificial Sequence: Synthetic Antisense oligonucleotide
  modified_base 10: mod_base = OTHER; note = bicyclic nucleic acid (BNA)
  source 1..10: mol_type = other DNA
ctgtccaagc

SEQ ID NO: 6509-6510 - skipped (2 entries)

SEQ ID NO: 6511 - DNA, 20 bp, synthetic construct
  misc_feature 1..20: note = Description of Artificial Sequence: Synthetic Antisense oligonucleotide
  modified_base 20: mod_base = OTHER; note = bicyclic nucleic acid (BNA)
  source 1..20: mol_type = other DNA
gttctgtccaagcccggttg

SEQ ID NO: 6512 - DNA, 19 bp, synthetic construct
  misc_feature 1..19: note = Description of Artificial Sequence: Synthetic Antisense oligonucleotide
  modified_base 19: mod_base = OTHER; note = bicyclic nucleic acid (BNA)
  source 1..19: mol_type = other DNA
gttctgtccaagcccggtt

SEQ ID NO: 6513 - DNA, 18 bp, synthetic construct
  misc_feature 1..18: note = Description of Artificial Sequence: Synthetic Antisense oligonucleotide
  modified_base 18: mod_base = OTHER; note = bicyclic nucleic acid (BNA)
  source 1..18: mol_type = other DNA
gttctgtccaagcccggt

SEQ ID NO: 6514 - DNA, 17 bp, synthetic construct
  misc_feature 1..17: note = Description of Artificial Sequence: Synthetic Antisense oligonucleotide
  modified_base 17: mod_base = OTHER; note = bicyclic nucleic acid (BNA)
  source 1..17: mol_type = other DNA
gttctgtccaagcccgg

SEQ ID NO: 6515 - DNA, 16 bp, synthetic construct
  misc_feature 1..16: note = Description of Artificial Sequence: Synthetic Antisense oligonucleotide
  modified_base 16: mod_base = OTHER; note = bicyclic nucleic acid (BNA)
  source 1..16: mol_type = other DNA
gttctgtccaagcccg

SEQ ID NO: 6516 - DNA, 15 bp, synthetic construct
  misc_feature 1..15: note = Description of Artificial Sequence: Synthetic Antisense oligonucleotide
  modified_base 15: mod_base = OTHER; note = bicyclic nucleic acid (BNA)
  source 1..15: mol_type = other DNA
gttctgtccaagccc

SEQ ID NO: 6517 - DNA, 14 bp, synthetic construct
  misc_feature 1..14: note = Description of Artificial Sequence: Synthetic Antisense oligonucleotide
  modified_base 14: mod_base = OTHER; note = bicyclic nucleic acid (BNA)
  source 1..14: mol_type = other DNA
gttctgtccaagcc

SEQ ID NO: 6518 - DNA, 13 bp, synthetic construct
  misc_feature 1..13: note = Description of Artificial Sequence: Synthetic Antisense oligonucleotide
  modified_base 13: mod_base = OTHER; note = bicyclic nucleic acid (BNA)
  source 1..13: mol_type = other DNA
gttctgtccaagc

SEQ ID NO: 6519 - DNA, 12 bp, synthetic construct
  misc_feature 1..12: note = Description of Artificial Sequence: Synthetic Antisense oligonucleotide
  modified_base 12: mod_base = OTHER; note = bicyclic nucleic acid (BNA)
  source 1..12: mol_type = other DNA
gttctgtccaag

SEQ ID NO: 6520 - DNA, 11 bp, synthetic construct
  misc_feature 1..11: note = Description of Artificial Sequence: Synthetic Antisense oligonucleotide
  modified_base 11: mod_base = OTHER; note = bicyclic nucleic acid (BNA)
  source 1..11: mol_type = other DNA
gttctgtccaa

SEQ ID NO: 6521 - DNA, 10 bp, synthetic construct
  misc_feature 1..10: note = Description of Artificial Sequence: Synthetic Antisense oligonucleotide
  modified_base 10: mod_base = OTHER; note = bicyclic nucleic acid (BNA)
  source 1..10: mol_type = other DNA
gttctgtcca

SEQ ID NO: 6522-6523 - skipped (2 entries)

SEQ ID NO: 6524 - DNA, 20 bp, synthetic construct
  misc_feature 1..20: note = Description of Artificial Sequence: Synthetic Antisense oligonucleotide
  modified_base 20: mod_base = OTHER; note = bicyclic nucleic acid (BNA)
  source 1..20: mol_type = other DNA
agttctgtccaagcccggtt

SEQ ID NO: 6525 - DNA, 19 bp, synthetic construct
  misc_feature 1..19: note = Description of Artificial Sequence: Synthetic Antisense oligonucleotide
  modified_base 19: mod_base = OTHER; note = bicyclic nucleic acid (BNA)
  source 1..19: mol_type = other DNA
agttctgtccaagcccggt

SEQ ID NO: 6526 - DNA, 18 bp, synthetic construct
  misc_feature 1..18: note = Description of Artificial Sequence: Synthetic Antisense oligonucleotide
  modified_base 18: mod_base = OTHER; note = bicyclic nucleic acid (BNA)
  source 1..18: mol_type = other DNA
agttctgtccaagcccgg

SEQ ID NO: 6527 - DNA, 17 bp, synthetic construct
  misc_feature 1..17: note = Description of Artificial Sequence: Synthetic Antisense oligonucleotide
  modified_base 17: mod_base = OTHER; note = bicyclic nucleic acid (BNA)
  source 1..17: mol_type = other DNA
agttctgtccaagcccg

SEQ ID NO: 6528 - DNA, 16 bp, synthetic construct
  misc_feature 1..16: note = Description of Artificial Sequence: Synthetic Antisense oligonucleotide
  modified_base 16: mod_base = OTHER; note = bicyclic nucleic acid (BNA)
  source 1..16: mol_type = other DNA
agttctgtccaagccc

SEQ ID NO: 6529 - DNA, 15 bp, synthetic construct
  misc_feature 1..15: note = Description of Artificial Sequence: Synthetic Antisense oligonucleotide
  modified_base 15: mod_base = OTHER; note = bicyclic nucleic acid (BNA)
  source 1..15: mol_type = other DNA
agttctgtccaagcc

SEQ ID NO: 6530 - DNA, 14 bp, synthetic construct
  misc_feature 1..14: note = Description of Artificial Sequence: Synthetic Antisense oligonucleotide
  modified_base 14: mod_base = OTHER; note = bicyclic nucleic acid (BNA)
  source 1..14: mol_type = other DNA
agttctgtccaagc

SEQ ID NO: 6531 - DNA, 13 bp, synthetic construct
  misc_feature 1..13: note = Description of Artificial Sequence: Synthetic Antisense oligonucleotide
  modified_base 13: mod_base = OTHER; note = bicyclic nucleic acid (BNA)
  source 1..13: mol_type = other DNA
agttctgtccaag

SEQ ID NO: 6532 - DNA, 12 bp, synthetic construct
  misc_feature 1..12: note = Description of Artificial Sequence: Synthetic Antisense oligonucleotide
  modified_base 12: mod_base = OTHER; note = bicyclic nucleic acid (BNA)
  source 1..12: mol_type = other DNA
agttctgtccaa

SEQ ID NO: 6533 - DNA, 11 bp, synthetic construct
  misc_feature 1..11: note = Description of Artificial Sequence: Synthetic Antisense oligonucleotide
  modified_base 11: mod_base = OTHER; note = bicyclic nucleic acid (BNA)
  source 1..11: mol_type = other DNA
agttctgtcca

SEQ ID NO: 6534 - DNA, 10 bp, synthetic construct
  misc_feature 1..10: note = Description of Artificial Sequence: Synthetic Antisense oligonucleotide
  modified_base 10: mod_base = OTHER; note = bicyclic nucleic acid (BNA)
  source 1..10: mol_type = other DNA
agttctgtcc

SEQ ID NO: 6535-6536 - skipped (2 entries)

SEQ ID NO: 6537 - DNA, 20 bp, synthetic construct
  misc_feature 1..20: note = Description of Artificial Sequence: Synthetic Antisense oligonucleotide
  modified_base 20: mod_base = OTHER; note = bicyclic nucleic acid (BNA)
  source 1..20: mol_type = other DNA
aagttctgtccaagcccggt

SEQ ID NO: 6538 - DNA, 19 bp, synthetic construct
  misc_feature 1..19: note = Description of Artificial Sequence: Synthetic Antisense oligonucleotide
  modified_base 19: mod_base = OTHER; note = bicyclic nucleic acid (BNA)
  source 1..19: mol_type = other DNA
aagttctgtccaagcccgg

SEQ ID NO: 6539 - DNA, 18 bp, synthetic construct
  misc_feature 1..18: note = Description of Artificial Sequence: Synthetic Antisense oligonucleotide
  modified_base 18: mod_base = OTHER; note = bicyclic nucleic acid (BNA)
  source 1..18: mol_type = other DNA
aagttctgtccaagcccg

SEQ ID NO: 6540 - DNA, 17 bp, synthetic construct
  misc_feature 1..17: note = Description of Artificial Sequence: Synthetic Antisense oligonucleotide
  modified_base 17: mod_base = OTHER; note = bicyclic nucleic acid (BNA)
  source 1..17: mol_type = other DNA
aagttctgtccaagccc

SEQ ID NO: 6541 - DNA, 16 bp, synthetic construct
  misc_feature 1..16: note = Description of Artificial Sequence: Synthetic Antisense oligonucleotide
  modified_base 16: mod_base = OTHER; note = bicyclic nucleic acid (BNA)
  source 1..16: mol_type = other DNA
aagttctgtccaagcc

SEQ ID NO: 6542 - DNA, 15 bp, synthetic construct
  misc_feature 1..15: note = Description of Artificial Sequence: Synthetic Antisense oligonucleotide
  modified_base 15: mod_base = OTHER; note = bicyclic nucleic acid (BNA)
  source 1..15: mol_type = other DNA
aagttctgtccaagc

SEQ ID NO: 6543 - DNA, 14 bp, synthetic construct
  misc_feature 1..14: note = Description of Artificial Sequence: Synthetic Antisense oligonucleotide
  modified_base 14: mod_base = OTHER; note = bicyclic nucleic acid (BNA)
  source 1..14: mol_type = other DNA
aagttctgtccaag

SEQ ID NO: 6544 - DNA, 13 bp, synthetic construct
  misc_feature 1..13: note = Description of Artificial Sequence: Synthetic Antisense oligonucleotide
  modified_base 13: mod_base = OTHER; note = bicyclic nucleic acid (BNA)
  source 1..13: mol_type = other DNA
aagttctgtccaa

SEQ ID NO: 6545 - DNA, 12 bp, synthetic construct
  misc_feature 1..12: note = Description of Artificial Sequence: Synthetic Antisense oligonucleotide
  modified_base 12: mod_base = OTHER; note = bicyclic nucleic acid (BNA)
  source 1..12: mol_type = other DNA
aagttctgtcca

SEQ ID NO: 6546 - DNA, 11 bp, synthetic construct
  misc_feature 1..11: note = Description of Artificial Sequence: Synthetic Antisense oligonucleotide
  modified_base 11: mod_base = OTHER; note = bicyclic nucleic acid (BNA)
  source 1..11: mol_type = other DNA
aagttctgtcc

SEQ ID NO: 6547 - DNA, 10 bp, synthetic construct
  misc_feature 1..10: note = Description of Artificial Sequence: Synthetic Antisense oligonucleotide
  modified_base 10: mod_base = OTHER; note = bicyclic nucleic acid (BNA)
  source 1..10: mol_type = other DNA
aagttctgtc

SEQ ID NO: 6548-6549 - skipped (2 entries)

SEQ ID NO: 6550 - DNA, 20 bp, synthetic construct
  misc_feature 1..20: note = Description of Artificial Sequence: Synthetic Antisense oligonucleotide
  modified_base 20: mod_base = OTHER; note = bicyclic nucleic acid (BNA)
  source 1..20: mol_type = other DNA
taagttctgtccaagcccgg

SEQ ID NO: 6551 - DNA, 19 bp, synthetic construct
  misc_feature 1..19: note = Description of Artificial Sequence: Synthetic Antisense oligonucleotide
  modified_base 19: mod_base = OTHER; note = bicyclic nucleic acid (BNA)
  source 1..19: mol_type = other DNA
taagttctgtccaagcccg

SEQ ID NO: 6552 - DNA, 18 bp, synthetic construct
  misc_feature 1..18: note = Description of Artificial Sequence: Synthetic Antisense oligonucleotide
  modified_base 18: mod_base = OTHER; note = bicyclic nucleic acid (BNA)
  source 1..18: mol_type = other DNA
taagttctgtccaagccc

SEQ ID NO: 6553 - DNA, 17 bp, synthetic construct
  misc_feature 1..17: note = Description of Artificial Sequence: Synthetic Antisense oligonucleotide
  modified_base 17: mod_base = OTHER; note = bicyclic nucleic acid (BNA)
  source 1..17: mol_type = other DNA
taagttctgtccaagcc

SEQ ID NO: 6554 - DNA, 16 bp, synthetic construct
  misc_feature 1..16: note = Description of Artificial Sequence: Synthetic Antisense oligonucleotide
  modified_base 16: mod_base = OTHER; note = bicyclic nucleic acid (BNA)
  source 1..16: mol_type = other DNA
taagttctgtccaagc

SEQ ID NO: 6555 - DNA, 14 bp, synthetic construct
  misc_feature 1..14: note = Description of Artificial Sequence: Synthetic Antisense oligonucleotide
  modified_base 14: mod_base = OTHER; note = bicyclic nucleic acid (BNA)
  source 1..14: mol_type = other DNA
taagttctgtccaa

SEQ ID NO: 6556 - DNA, 13 bp, synthetic construct
  misc_feature 1..13: note = Description of Artificial Sequence: Synthetic Antisense oligonucleotide
  modified_base 13: mod_base = OTHER; note = bicyclic nucleic acid (BNA)
  source 1..13: mol_type = other DNA
taagttctgtcca

SEQ ID NO: 6557 - DNA, 12 bp, synthetic construct
  misc_feature 1..12: note = Description of Artificial Sequence: Synthetic Antisense oligonucleotide
  modified_base 12: mod_base = OTHER; note = bicyclic nucleic acid (BNA)
  source 1..12: mol_type = other DNA
taagttctgtcc

SEQ ID NO: 6558 - DNA, 11 bp, synthetic construct
  misc_feature 1..11: note = Description of Artificial Sequence: Synthetic Antisense oligonucleotide
  modified_base 11: mod_base = OTHER; note = bicyclic nucleic acid (BNA)
  source 1..11: mol_type = other DNA
taagttctgtc

SEQ ID NO: 6559 - DNA, 10 bp, synthetic construct
  misc_feature 1..10: note = Description of Artificial Sequence: Synthetic Antisense oligonucleotide
  modified_base 10: mod_base = OTHER; note = bicyclic nucleic acid (BNA)
  source 1..10: mol_type = other DNA
taagttctgt

SEQ ID NO: 6560-6561 - skipped (2 entries)

SEQ ID NO: 6562 - DNA, 20 bp, synthetic construct
  misc_feature 1..20: note = Description of Artificial Sequence: Synthetic Antisense oligonucleotide
  modified_base 20: mod_base = OTHER; note = bicyclic nucleic acid (BNA)
  source 1..20: mol_type = other DNA
gtaagttctgtccaagcccg

SEQ ID NO: 6563 - DNA, 19 bp, synthetic construct
  misc_feature 1..19: note = Description of Artificial Sequence: Synthetic Antisense oligonucleotide
  modified_base 19: mod_base = OTHER; note = bicyclic nucleic acid (BNA)
  source 1..19: mol_type = other DNA
gtaagttctgtccaagccc

SEQ ID NO: 6564 - DNA, 17 bp, synthetic construct
  misc_feature 1..17: note = Description of Artificial Sequence: Synthetic Antisense oligonucleotide
  modified_base 17: mod_base = OTHER; note = bicyclic nucleic acid (BNA)
  source 1..17: mol_type = other DNA
gtaagttctgtccaagc

SEQ ID NO: 6565 - DNA, 16 bp, synthetic construct
  misc_feature 1..16: note = Description of Artificial Sequence: Synthetic Antisense oligonucleotide
  modified_base 16: mod_base = OTHER; note = bicyclic nucleic acid (BNA)
  source 1..16: mol_type = other DNA
gtaagttctgtccaag

SEQ ID NO: 6566 - DNA, 15 bp, synthetic construct
  misc_feature 1..15: note = Description of Artificial Sequence: Synthetic Antisense oligonucleotide
  modified_base 15: mod_base = OTHER; note = bicyclic nucleic acid (BNA)
  source 1..15: mol_type = other DNA
gtaagttctgtccaa

SEQ ID NO: 6567 - DNA, 14 bp, synthetic construct
  misc_feature 1..14: note = Description of Artificial Sequence: Synthetic Antisense oligonucleotide
  modified_base 14: mod_base = OTHER; note = bicyclic nucleic acid (BNA)
  source 1..14: mol_type = other DNA
gtaagttctgtcca

SEQ ID NO: 6568 - DNA, 13 bp, synthetic construct
  misc_feature 1..13: note = Description of Artificial Sequence: Synthetic Antisense oligonucleotide
  modified_base 13: mod_base = OTHER; note = bicyclic nucleic acid (BNA)
  source 1..13: mol_type = other DNA
gtaagttctgtcc

SEQ ID NO: 6569 - DNA, 12 bp, synthetic construct
  misc_feature 1..12: note = Description of Artificial Sequence: Synthetic Antisense oligonucleotide
  modified_base 12: mod_base = OTHER; note = bicyclic nucleic acid (BNA)
  source 1..12: mol_type = other DNA
gtaagttctgtc

SEQ ID NO: 6570 - DNA, 11 bp, synthetic construct
  misc_feature 1..11: note = Description of Artificial Sequence: Synthetic Antisense oligonucleotide
  modified_base 11: mod_base = OTHER; note = bicyclic nucleic acid (BNA)
  source 1..11: mol_type = other DNA
gtaagttctgt

SEQ ID NO: 6571 - DNA, 10 bp, synthetic construct
  misc_feature 1..10: note = Description of Artificial Sequence: Synthetic Antisense oligonucleotide
  modified_base 10: mod_base = OTHER; note = bicyclic nucleic acid (BNA)
  source 1..10: mol_type = other DNA
gtaagttctg

SEQ ID NO: 6572-6573 - skipped (2 entries)

SEQ ID NO: 6574 - DNA, 20 bp, synthetic construct
  misc_feature 1..20: note = Description of Artificial Sequence: Synthetic Antisense oligonucleotide
  modified_base 20: mod_base = OTHER; note = bicyclic nucleic acid (BNA)
  source 1..20: mol_type = other DNA
ggtaagttctgtccaagccc

SEQ ID NO: 6575 - DNA, 19 bp, synthetic construct
  misc_feature 1..19: note = Description of Artificial Sequence: Synthetic Antisense oligonucleotide
  modified_base 19: mod_base = OTHER; note = bicyclic nucleic acid (BNA)
  source 1..19: mol_type = other DNA
ggtaagttctgtccaagcc

SEQ ID NO: 6576 - DNA, 17 bp, synthetic construct
  misc_feature 1..17: note = Description of Artificial Sequence: Synthetic Antisense oligonucleotide
  modified_base 17: mod_base = OTHER; note = bicyclic nucleic acid (BNA)
  source 1..17: mol_type = other DNA
ggtaagttctgtccaag

SEQ ID NO: 6577 - DNA, 16 bp, synthetic construct
  misc_feature 1..16: note = Description of Artificial Sequence: Synthetic Antisense oligonucleotide
  modified_base 16: mod_base = OTHER; note = bicyclic nucleic acid (BNA)
  source 1..16: mol_type = other DNA
ggtaagttctgtccaa

SEQ ID NO: 6578 - DNA, 15 bp, synthetic construct
  misc_feature 1..15: note = Description of Artificial Sequence: Synthetic Antisense oligonucleotide
  modified_base 15: mod_base = OTHER; note = bicyclic nucleic acid (BNA)
  source 1..15: mol_type = other DNA
ggtaagttctgtcca

SEQ ID NO: 6579 - DNA, 14 bp, synthetic construct
  misc_feature 1..14: note = Description of Artificial Sequence: Synthetic Antisense oligonucleotide
  modified_base 14: mod_base = OTHER; note = bicyclic nucleic acid (BNA)
  source 1..14: mol_type = other DNA
ggtaagttctgtcc

SEQ ID NO: 6580 - DNA, 13 bp, synthetic construct
  misc_feature 1..13: note = Description of Artificial Sequence: Synthetic Antisense oligonucleotide
  modified_base 13: mod_base = OTHER; note = bicyclic nucleic acid (BNA)
  source 1..13: mol_type = other DNA
ggtaagttctgtc

SEQ ID NO: 6581 - DNA, 12 bp, synthetic construct
  misc_feature 1..12: note = Description of Artificial Sequence: Synthetic Antisense oligonucleotide
  modified_base 12: mod_base = OTHER; note = bicyclic nucleic acid (BNA)
  source 1..12: mol_type = other DNA
ggtaagttctgt

SEQ ID NO: 6582 - DNA, 11 bp, synthetic construct
  misc_feature 1..11: note = Description of Artificial Sequence: Synthetic Antisense oligonucleotide
  modified_base 11: mod_base = OTHER; note = bicyclic nucleic acid (BNA)
  source 1..11: mol_type = other DNA
ggtaagttctg

SEQ ID NO: 6583 - DNA, 10 bp, synthetic construct
  misc_feature 1..10: note = Description of Artificial Sequence: Synthetic Antisense oligonucleotide
  modified_base 10: mod_base = OTHER; note = bicyclic nucleic acid (BNA)
  source 1..10: mol_type = other DNA
ggtaagttct

SEQ ID NO: 6584-6585 - skipped (2 entries)

SEQ ID NO: 6586 - DNA, 20 bp, synthetic construct
  misc_feature 1..20: note = Description of Artificial Sequence: Synthetic Antisense oligonucleotide
  modified_base 20: mod_base = OTHER; note = bicyclic nucleic acid (BNA)
  source 1..20: mol_type = other DNA
cggtaagttctgtccaagcc

SEQ ID NO: 6587 - DNA, 19 bp, synthetic construct
  misc_feature 1..19: note = Description of Artificial Sequence: Synthetic Antisense oligonucleotide
  modified_base 19: mod_base = OTHER; note = bicyclic nucleic acid (BNA)
  source 1..19: mol_type = other DNA
cggtaagttctgtccaagc

SEQ ID NO: 6588 - DNA, 18 bp, synthetic construct
  misc_feature 1..18: note = Description of Artificial Sequence: Synthetic Antisense oligonucleotide
  modified_base 18: mod_base = OTHER; note = bicyclic nucleic acid (BNA)
  source 1..18: mol_type = other DNA
cggtaagttctgtccaag

SEQ ID NO: 6589 - DNA, 17 bp, synthetic construct
  misc_feature 1..17: note = Description of Artificial Sequence: Synthetic Antisense oligonucleotide
  modified_base 17: mod_base = OTHER; note = bicyclic nucleic acid (BNA)
  source 1..17: mol_type = other DNA
cggtaagttctgtccaa

SEQ ID NO: 6590 - DNA, 16 bp, synthetic construct
  misc_feature 1..16: note = Description of Artificial Sequence: Synthetic Antisense oligonucleotide
  modified_base 16: mod_base = OTHER; note = bicyclic nucleic acid (BNA)
  source 1..16: mol_type = other DNA
cggtaagttctgtcca

SEQ ID NO: 6591 - DNA, 15 bp, synthetic construct
  misc_feature 1..15: note = Description of Artificial Sequence: Synthetic Antisense oligonucleotide
  modified_base 15: mod_base = OTHER; note = bicyclic nucleic acid (BNA)
  source 1..15: mol_type = other DNA
cggtaagttctgtcc

SEQ ID NO: 6592 - DNA, 14 bp, synthetic construct
  misc_feature 1..14: note = Description of Artificial Sequence: Synthetic Antisense oligonucleotide
  modified_base 14: mod_base = OTHER; note = bicyclic nucleic acid (BNA)
  source 1..14: mol_type = other DNA
cggtaagttctgtc

SEQ ID NO: 6593 - DNA, 13 bp, synthetic construct
  misc_feature 1..13: note = Description of Artificial Sequence: Synthetic Antisense oligonucleotide
  modified_base 13: mod_base = OTHER; note = bicyclic nucleic acid (BNA)
  source 1..13: mol_type = other DNA
cggtaagttctgt

SEQ ID NO: 6594 - DNA, 12 bp, synthetic construct
  misc_feature 1..12: note = Description of Artificial Sequence: Synthetic Antisense oligonucleotide
  modified_base 12: mod_base = OTHER; note = bicyclic nucleic acid (BNA)
  source 1..12: mol_type = other DNA
cggtaagttctg

SEQ ID NO: 6595 - DNA, 11 bp, synthetic construct
  misc_feature 1..11: note = Description of Artificial Sequence: Synthetic Antisense oligonucleotide
  modified_base 11: mod_base = OTHER; note = bicyclic nucleic acid (BNA)
  source 1..11: mol_type = other DNA
cggtaagttct

SEQ ID NO: 6596 - DNA, 10 bp, synthetic construct
  misc_feature 1..10: note = Description of Artificial Sequence: Synthetic Antisense oligonucleotide
  modified_base 10: mod_base = OTHER; note = bicyclic nucleic acid (BNA)
  source 1..10: mol_type = other DNA
cggtaagttc

SEQ ID NO: 6597-6598 - skipped (2 entries)

SEQ ID NO: 6599 - DNA, 20 bp, synthetic construct
  misc_feature 1..20: note = Description of Artificial Sequence: Synthetic Antisense oligonucleotide
  modified_base 20: mod_base = OTHER; note = bicyclic nucleic acid (BNA)
  source 1..20: mol_type = other DNA
tcggtaagttctgtccaagc

SEQ ID NO: 6600 - DNA, 19 bp, synthetic construct
  misc_feature 1..19: note = Description of Artificial Sequence: Synthetic Antisense oligonucleotide
  modified_base 19: mod_base = OTHER; note = bicyclic nucleic acid (BNA)
  source 1..19: mol_type = other DNA
tcggtaagttctgtccaag

SEQ ID NO: 6601 - DNA, 18 bp, synthetic construct
  misc_feature 1..18: note = Description of Artificial Sequence: Synthetic Antisense oligonucleotide
  modified_base 18: mod_base = OTHER; note = bicyclic nucleic acid (BNA)
  source 1..18: mol_type = other DNA
tcggtaagttctgtccaa

SEQ ID NO: 6602 - DNA, 17 bp, synthetic construct
  misc_feature 1..17: note = Description of Artificial Sequence: Synthetic Antisense oligonucleotide
  modified_base 17: mod_base = OTHER; note = bicyclic nucleic acid (BNA)
  source 1..17: mol_type = other DNA
tcggtaagttctgtcca

SEQ ID NO: 6603 - DNA, 16 bp, synthetic construct
  misc_feature 1..16: note = Description of Artificial Sequence: Synthetic Antisense oligonucleotide
  modified_base 16: mod_base = OTHER; note = bicyclic nucleic acid (BNA)
  source 1..16: mol_type = other DNA
tcggtaagttctgtcc

SEQ ID NO: 6604 - DNA, 15 bp, synthetic construct
  misc_feature 1..15: note = Description of Artificial Sequence: Synthetic Antisense oligonucleotide
  modified_base 15: mod_base = OTHER; note = bicyclic nucleic acid (BNA)
  source 1..15: mol_type = other DNA
tcggtaagttctgtc

SEQ ID NO: 6605 - DNA, 14 bp, synthetic construct
  misc_feature 1..14: note = Description of Artificial Sequence: Synthetic Antisense oligonucleotide
  modified_base 14: mod_base = OTHER; note = bicyclic nucleic acid (BNA)
  source 1..14: mol_type = other DNA
tcggtaagttctgt

SEQ ID NO: 6606 - DNA, 13 bp, synthetic construct
  misc_feature 1..13: note = Description of Artificial Sequence: Synthetic Antisense oligonucleotide
  modified_base 13: mod_base = OTHER; note = bicyclic nucleic acid (BNA)
  source 1..13: mol_type = other DNA
tcggtaagttctg

SEQ ID NO: 6607 - DNA, 12 bp, synthetic construct
  misc_feature 1..12: note = Description of Artificial Sequence: Synthetic Antisense oligonucleotide
  modified_base 12: mod_base = OTHER; note = bicyclic nucleic acid (BNA)
  source 1..12: mol_type = other DNA
tcggtaagttct

SEQ ID NO: 6608 - DNA, 11 bp, synthetic construct
  misc_feature 1..11: note = Description of Artificial Sequence: Synthetic Antisense oligonucleotide
  modified_base 11: mod_base = OTHER; note = bicyclic nucleic acid (BNA)
  source 1..11: mol_type = other DNA
tcggtaagttc

SEQ ID NO: 6609 - DNA, 10 bp, synthetic construct
  misc_feature 1..10: note = Description of Artificial Sequence: Synthetic Antisense oligonucleotide
  modified_base 10: mod_base = OTHER; note = bicyclic nucleic acid (BNA)
  source 1..10: mol_type = other DNA
tcggtaagtt

SEQ ID NO: 6610 - skipped

SEQ ID NO: 6611 - DNA, 20 bp, synthetic construct
  misc_feature 1..20: note = Description of Artificial Sequence: Synthetic Antisense oligonucleotide
  modified_base 20: mod_base = OTHER; note = bicyclic nucleic acid (BNA)
  source 1..20: mol_type = other DNA
gtcggtaagttctgtccaag

SEQ ID NO: 6612 - DNA, 19 bp, synthetic construct
  misc_feature 1..19: note = Description of Artificial Sequence: Synthetic Antisense oligonucleotide
  modified_base 19: mod_base = OTHER; note = bicyclic nucleic acid (BNA)
  source 1..19: mol_type = other DNA
gtcggtaagttctgtccaa

SEQ ID NO: 6613 - DNA, 18 bp, synthetic construct
  misc_feature 1..18: note = Description of Artificial Sequence: Synthetic Antisense oligonucleotide
  modified_base 18: mod_base = OTHER; note = bicyclic nucleic acid (BNA)
  source 1..18: mol_type = other DNA
gtcggtaagttctgtcca

SEQ ID NO: 6614 - DNA, 17 bp, synthetic construct
  misc_feature 1..17: note = Description of Artificial Sequence: Synthetic Antisense oligonucleotide
  modified_base 17: mod_base = OTHER; note = bicyclic nucleic acid (BNA)
  source 1..17: mol_type = other DNA
gtcggtaagttctgtcc

SEQ ID NO: 6615 - DNA, 16 bp, synthetic construct
  misc_feature 1..16: note = Description of Artificial Sequence: Synthetic Antisense oligonucleotide
  modified_base 16: mod_base = OTHER; note = bicyclic nucleic acid (BNA)
  source 1..16: mol_type = other DNA
gtcggtaagttctgtc

SEQ ID NO: 6616 - DNA, 15 bp, synthetic construct
  misc_feature 1..15: note = Description of Artificial Sequence: Synthetic Antisense oligonucleotide
  modified_base 15: mod_base = OTHER; note = bicyclic nucleic acid (BNA)
  source 1..15: mol_type = other DNA
gtcggtaagttctgt

SEQ ID NO: 6617 - DNA, 14 bp, synthetic construct
  misc_feature 1..14: note = Description of Artificial Sequence: Synthetic Antisense oligonucleotide
  modified_base 14: mod_base = OTHER; note = bicyclic nucleic acid (BNA)
  source 1..14: mol_type = other DNA
gtcggtaagttctg

SEQ ID NO: 6618 - DNA, 13 bp, synthetic construct
  misc_feature 1..13: note = Description of Artificial Sequence: Synthetic Antisense oligonucleotide
  modified_base 13: mod_base = OTHER; note = bicyclic nucleic acid (BNA)
  source 1..13: mol_type = other DNA
gtcggtaagttct

SEQ ID NO: 6619 - DNA, 12 bp, synthetic construct
  misc_feature 1..12: note = Description of Artificial Sequence: Synthetic Antisense oligonucleotide
  modified_base 12: mod_base = OTHER; note = bicyclic nucleic acid (BNA)
  source 1..12: mol_type = other DNA
gtcggtaagttc

SEQ ID NO: 6620 - DNA, 11 bp, synthetic construct
  misc_feature 1..11: note = Description of Artificial Sequence: Synthetic Antisense oligonucleotide
  modified_base 11: mod_base = OTHER; note = bicyclic nucleic acid (BNA)
  source 1..11: mol_type = other DNA
gtcggtaagtt

SEQ ID NO: 6621 - DNA, 10 bp, synthetic construct
  misc_feature 1..10: note = Description of Artificial Sequence: Synthetic Antisense oligonucleotide
  modified_base 10: mod_base = OTHER; note = bicyclic nucleic acid (BNA)
  source 1..10: mol_type = other DNA
gtcggtaagt

SEQ ID NO: 6622 - DNA, 20 bp, synthetic construct
  misc_feature 1..20: note = Description of Artificial Sequence: Synthetic Antisense oligonucleotide
  modified_base 20: mod_base = OTHER; note = bicyclic nucleic acid (BNA)
  source 1..20: mol_type = other DNA
agtcggtaagttctgtccaa

SEQ ID NO: 6623 - DNA, 19 bp, synthetic construct
  misc_feature 1..19: note = Description of Artificial Sequence: Synthetic Antisense oligonucleotide
  modified_base 19: mod_base = OTHER; note = bicyclic nucleic acid (BNA)
  source 1..19: mol_type = other DNA
agtcggtaagttctgtcca

SEQ ID NO: 6624 - DNA, 17 bp, synthetic construct
  misc_feature 1..17: note = Description of Artificial Sequence: Synthetic Antisense oligonucleotide
  modified_base 17: mod_base = OTHER; note = bicyclic nucleic acid (BNA)
  source 1..17: mol_type = other DNA
agtcggtaagttctgtc

SEQ ID NO: 6625 - DNA, 16 bp, synthetic construct
  misc_feature 1..16: note = Description of Artificial Sequence: Synthetic Antisense oligonucleotide
  modified_base 16: mod_base = OTHER; note = bicyclic nucleic acid (BNA)
  source 1..16: mol_type = other DNA
agtcggtaagttctgt

SEQ ID NO: 6626 - DNA, 15 bp, synthetic construct
  misc_feature 1..15: note = Description of Artificial Sequence: Synthetic Antisense oligonucleotide
  modified_base 15: mod_base = OTHER; note = bicyclic nucleic acid (BNA)
  source 1..15: mol_type = other DNA
agtcggtaagttctg

SEQ ID NO: 6627 - DNA, 14 bp, synthetic construct
  misc_feature 1..14: note = Description of Artificial Sequence: Synthetic Antisense oligonucleotide
  modified_base 14: mod_base = OTHER; note = bicyclic nucleic acid (BNA)
  source 1..14: mol_type = other DNA
agtcggtaagttct

SEQ ID NO: 6628 - DNA, 13 bp, synthetic construct
  misc_feature 1..13: note = Description of Artificial Sequence: Synthetic Antisense oligonucleotide
  modified_base 13: mod_base = OTHER; note = bicyclic nucleic acid (BNA)
  source 1..13: mol_type = other DNA
agtcggtaagttc

SEQ ID NO: 6629 - DNA, 12 bp, synthetic construct
  misc_feature 1..12: note = Description of Artificial Sequence: Synthetic Antisense oligonucleotide
  modified_base 12: mod_base = OTHER; note = bicyclic nucleic acid (BNA)
  source 1..12: mol_type = other DNA
agtcggtaagtt

SEQ ID NO: 6630 - DNA, 11 bp, synthetic construct
  misc_feature 1..11: note = Description of Artificial Sequence: Synthetic Antisense oligonucleotide
  modified_base 11: mod_base = OTHER; note = bicyclic nucleic acid (BNA)
  source 1..11: mol_type = other DNA
agtcggtaagt

SEQ ID NO: 6631 - DNA, 20 bp, synthetic construct
  misc_feature 1..20: note = Description of Artificial Sequence: Synthetic Antisense oligonucleotide
  modified_base 20: mod_base = OTHER; note = bicyclic nucleic acid (BNA)
  source 1..20: mol_type = other DNA
cagtcggtaagttctgtcca

SEQ ID NO: 6632 - DNA, 19 bp, synthetic construct
  misc_feature 1..19: note = Description of Artificial Sequence: Synthetic Antisense oligonucleotide
  modified_base 19: mod_base = OTHER; note = bicyclic nucleic acid (BNA)
  source 1..19: mol_type = other DNA
cagtcggtaagttctgtcc

SEQ ID NO: 6633 - DNA, 18 bp, synthetic construct
  misc_feature 1..18: note = Description of Artificial Sequence: Synthetic Antisense oligonucleotide
  modified_base 18: mod_base = OTHER; note = bicyclic nucleic acid (BNA)
  source 1..18: mol_type = other DNA
cagtcggtaagttctgtc

SEQ ID NO: 6634 - DNA, 17 bp, synthetic construct
  misc_feature 1..17: note = Description of Artificial Sequence: Synthetic Antisense oligonucleotide
  modified_base 17: mod_base = OTHER; note = bicyclic nucleic acid (BNA)
  source 1..17: mol_type = other DNA
cagtcggtaagttctgt

SEQ ID NO: 6635 - DNA, 16 bp, synthetic construct
  misc_feature 1..16: note = Description of Artificial Sequence: Synthetic Antisense oligonucleotide
  modified_base 16: mod_base = OTHER; note = bicyclic nucleic acid (BNA)
  source 1..16: mol_type = other DNA
cagtcggtaagttctg

SEQ ID NO: 6636 - DNA, 15 bp, synthetic construct
  misc_feature 1..15: note = Description of Artificial Sequence: Synthetic Antisense oligonucleotide
  modified_base 15: mod_base = OTHER; note = bicyclic nucleic acid (BNA)
  source 1..15: mol_type = other DNA
cagtcggtaagttct

SEQ ID NO: 6637 - DNA, 14 bp, synthetic construct
  misc_feature 1..14: note = Description of Artificial Sequence: Synthetic Antisense oligonucleotide
  modified_base 14: mod_base = OTHER; note = bicyclic nucleic acid (BNA)
  source 1..14: mol_type = other DNA
cagtcggtaagttc

SEQ ID NO: 6638 - DNA, 13 bp, synthetic construct
  misc_feature 1..13: note = Description of Artificial Sequence: Synthetic Antisense oligonucleotide
  modified_base 13: mod_base = OTHER; note = bicyclic nucleic acid (BNA)
  source 1..13: mol_type = other DNA
cagtcggtaagtt

SEQ ID NO: 6639 - DNA, 12 bp, synthetic construct
  misc_feature 1..12: note = Description of Artificial Sequence: Synthetic Antisense oligonucleotide
  modified_base 12: mod_base = OTHER; note = bicyclic nucleic acid (BNA)
  source 1..12: mol_type = other DNA
cagtcggtaagt

SEQ ID NO: 6640 - DNA, 20 bp, synthetic construct
  misc_feature 1..20: note = Description of Artificial Sequence: Synthetic Antisense oligonucleotide
  modified_base 20: mod_base = OTHER; note = bicyclic nucleic acid (BNA)
  source 1..20: mol_type = other DNA
ccagtcggtaagttctgtcc

SEQ ID NO: 6641 - DNA, 19 bp, synthetic construct
  misc_feature 1..19: note = Description of Artificial Sequence: Synthetic Antisense oligonucleotide
  modified_base 19: mod_base = OTHER; note = bicyclic nucleic acid (BNA)
  source 1..19: mol_type = other DNA
ccagtcggtaagttctgtc

SEQ ID NO: 6642 - DNA, 18 bp, synthetic construct
  misc_feature 1..18: note = Description of Artificial Sequence: Synthetic Antisense oligonucleotide
  modified_base 18: mod_base = OTHER; note = bicyclic nucleic acid (BNA)
  source 1..18: mol_type = other DNA
ccagtcggtaagttctgt

SEQ ID NO: 6643 - DNA, 17 bp, synthetic construct
  misc_feature 1..17: note = Description of Artificial Sequence: Synthetic Antisense oligonucleotide
  modified_base 17: mod_base = OTHER; note = bicyclic nucleic acid (BNA)
  source 1..17: mol_type = other DNA
ccagtcggtaagttctg

SEQ ID NO: 6644 - DNA, 16 bp, synthetic construct
  misc_feature 1..16: note = Description of Artificial Sequence: Synthetic Antisense oligonucleotide
  modified_base 16: mod_base = OTHER; note = bicyclic nucleic acid (BNA)
  source 1..16: mol_type = other DNA
ccagtcggtaagttct

SEQ ID NO: 6645 - DNA, 15 bp, synthetic construct
  misc_feature 1..15: note = Description of Artificial Sequence: Synthetic Antisense oligonucleotide
  modified_base 15: mod_base = OTHER; note = bicyclic nucleic acid (BNA)
  source 1..15: mol_type = other DNA
ccagtcggtaagttc

SEQ ID NO: 6646 - DNA, 14 bp, synthetic construct
  misc_feature 1..14: note = Description of Artificial Sequence: Synthetic Antisense oligonucleotide
  modified_base 14: mod_base = OTHER; note = bicyclic nucleic acid (BNA)
  source 1..14: mol_type = other DNA
ccagtcggtaagtt

SEQ ID NO: 6647 - DNA, 13 bp, synthetic construct
  misc_feature 1..13: note = Description of Artificial Sequence: Synthetic Antisense oligonucleotide
  modified_base 13: mod_base = OTHER; note = bicyclic nucleic acid (BNA)
  source 1..13: mol_type = other DNA
ccagtcggtaagt

SEQ ID NO: 6648 - DNA, 20 bp, synthetic construct
  misc_feature 1..20: note = Description of Artificial Sequence: Synthetic Antisense oligonucleotide
  modified_base 20: mod_base = OTHER; note = bicyclic nucleic acid (BNA)
  source 1..20: mol_type = other DNA
gccagtcggtaagttctgtc

SEQ ID NO: 6649 - DNA, 19 bp, synthetic construct
  misc_feature 1..19: note = Description of Artificial Sequence: Synthetic Antisense oligonucleotide
  modified_base 19: mod_base = OTHER; note = bicyclic nucleic acid (BNA)
  source 1..19: mol_type = other DNA
gccagtcggtaagttctgt

SEQ ID NO: 6650 - DNA, 18 bp, synthetic construct
  misc_feature 1..18: note = Description of Artificial Sequence: Synthetic Antisense oligonucleotide
  modified_base 18: mod_base = OTHER; note = bicyclic nucleic acid (BNA)
  source 1..18: mol_type = other DNA
gccagtcggtaagttctg

SEQ ID NO: 6651 - DNA, 17 bp, synthetic construct
  misc_feature 1..17: note = Description of Artificial Sequence: Synthetic Antisense oligonucleotide
  modified_base 17: mod_base = OTHER; note = bicyclic nucleic acid (BNA)
  source 1..17: mol_type = other DNA
gccagtcggtaagttct

SEQ ID NO: 6652 - DNA, 16 bp, synthetic construct
  misc_feature 1..16: note = Description of Artificial Sequence: Synthetic Antisense oligonucleotide
  modified_base 16: mod_base = OTHER; note = bicyclic nucleic acid (BNA)
  source 1..16: mol_type = other DNA
gccagtcggtaagttc

SEQ ID NO: 6653 - DNA, 15 bp, synthetic construct
  misc_feature 1..15: note = Description of Artificial Sequence: Synthetic Antisense oligonucleotide
  modified_base 15: mod_base = OTHER; note = bicyclic nucleic acid (BNA)
  source 1..15: mol_type = other DNA
gccagtcggtaagtt

SEQ ID NO: 6654 - DNA, 14 bp, synthetic construct
  misc_feature 1..14: note = Description of Artificial Sequence: Synthetic Antisense oligonucleotide
  modified_base 14: mod_base = OTHER; note = bicyclic nucleic acid (BNA)
  source 1..14: mol_type = other DNA
gccagtcggtaagt

SEQ ID NO: 6655 - DNA, 20 bp, synthetic construct
  misc_feature 1..20: note = Description of Artificial Sequence: Synthetic Antisense oligonucleotide
  modified_base 20: mod_base = OTHER; note = bicyclic nucleic acid (BNA)
  source 1..20: mol_type = other DNA
tcaaggaagatggcatttct

SEQ ID NO: 6656 - DNA, 22 bp, synthetic construct
  misc_feature 1..22: note = Description of Artificial Sequence: Synthetic Antisense oligonucleotide
  modified_base 22: mod_base = OTHER; note = bicyclic nucleic acid (BNA)
  source 1..22: mol_type = other DNA
tcaaggaagatggcatttctag

SEQ ID NO: 6657 - DNA, 16 bp, synthetic construct
  misc_feature 1..16: note = Description of Artificial Sequence: Synthetic Antisense oligonucleotide
  modified_base 16: mod_base = OTHER; note = bicyclic nucleic acid (BNA)
  source 1..16: mol_type = other DNA
tcaaggaagatggcat

SEQ ID NO: 6658 - DNA, 15 bp, synthetic construct
  misc_feature 1..15: note = Description of Artificial Sequence: Synthetic Antisense oligonucleotide
  modified_base 15: mod_base = OTHER; note = bicyclic nucleic acid (BNA)
  source 1..15: mol_type = other DNA
gaagatggcatttct

SEQ ID NO: 6659 - DNA, 21 bp, synthetic construct
  misc_feature 1..21: note = Description of Artificial Sequence: Synthetic Antisense oligonucleotide
  modified_base 21: mod_base = OTHER; note = bicyclic nucleic acid (BNA)
  source 1..21: mol_type = other DNA
tcaaggaagatggcatttcta

SEQ ID NO: 6660 - DNA, 19 bp, synthetic construct
  misc_feature 1..19: note = Description of Artificial Sequence: Synthetic Antisense oligonucleotide
  modified_base 19: mod_base = OTHER; note = bicyclic nucleic acid (BNA)
  source 1..19: mol_type = other DNA
tcaaggaagatggcatttc

SEQ ID NO: 6661 - DNA, 18 bp, synthetic construct
  misc_feature 1..18: note = Description of Artificial Sequence: Synthetic Antisense oligonucleotide
  modified_base 18: mod_base = OTHER; note = bicyclic nucleic acid (BNA)
  source 1..18: mol_type = other DNA
tcaaggaagatggcattt

SEQ ID NO: 6662 - DNA, 17 bp, synthetic construct
  misc_feature 1..17: note = Description of Artificial Sequence: Synthetic Antisense oligonucleotide
  modified_base 17: mod_base = OTHER; note = bicyclic nucleic acid (BNA)
  source 1..17: mol_type = other DNA
tcaaggaagatggcatt

SEQ ID NO: 6663 - DNA, 15 bp, synthetic construct
  misc_feature 1..15: note = Description of Artificial Sequence: Synthetic Antisense oligonucleotide
  modified_base 15: mod_base = OTHER; note = bicyclic nucleic acid (BNA)
  source 1..15: mol_type = other DNA
tcaaggaagatggca

SEQ ID NO: 6664 - DNA, 14 bp, synthetic construct
  misc_feature 1..14: note = Description of Artificial Sequence: Synthetic Antisense oligonucleotide
  modified_base 14: mod_base = OTHER; note = bicyclic nucleic acid (BNA)
  source 1..14: mol_type = other DNA
tcaaggaagatggc

SEQ ID NO: 6665 - DNA, 13 bp, synthetic construct
  misc_feature 1..13: note = Description of Artificial Sequence: Synthetic Antisense oligonucleotide
  modified_base 13: mod_base = OTHER; note = bicyclic nucleic acid (BNA)
  source 1..13: mol_type = other DNA
tcaaggaagatgg

SEQ ID NO: 6666 - DNA, 12 bp, synthetic construct
  misc_feature 1..12: note = Description of Artificial Sequence: Synthetic Antisense oligonucleotide
  modified_base 12: mod_base = OTHER; note = bicyclic nucleic acid (BNA)
  source 1..12: mol_type = other DNA
tcaaggaagatg

SEQ ID NO: 6667 - DNA, 11 bp, synthetic construct
  misc_feature 1..11: note = Description of Artificial Sequence: Synthetic Antisense oligonucleotide
  modified_base 11: mod_base = OTHER; note = bicyclic nucleic acid (BNA)
  source 1..11: mol_type = other DNA
tcaaggaagat

SEQ ID NO: 6668 - DNA, 10 bp, synthetic construct
  misc_feature 1..10: note = Description of Artificial Sequence: Synthetic Antisense oligonucleotide
  modified_base 10: mod_base = OTHER; note = bicyclic nucleic acid (BNA)
  source 1..10: mol_type = other DNA
tcaaggaaga

SEQ ID NO: 6669 - skipped

SEQ ID NO: 6670 - DNA, 21 bp, synthetic construct
  misc_feature 1..21: note = Description of Artificial Sequence: Synthetic Antisense oligonucleotide
  modified_base 21: mod_base = OTHER; note = bicyclic nucleic acid (BNA)
  source 1..21: mol_type = other DNA
caaggaagatggcatttctag

SEQ ID NO: 6671 - DNA, 20 bp, synthetic construct
  misc_feature 1..20: note = Description of Artificial Sequence: Synthetic Antisense oligonucleotide
  modified_base 20: mod_base = OTHER; note = bicyclic nucleic acid (BNA)
  source 1..20: mol_type = other DNA
caaggaagatggcatttcta

SEQ ID NO: 6672 - DNA, 19 bp, synthetic construct
  misc_feature 1..19: note = Description of Artificial Sequence: Synthetic Antisense oligonucleotide
  modified_base 19: mod_base = OTHER; note = bicyclic nucleic acid (BNA)
  source 1..19: mol_type = other DNA
caaggaagatggcatttct

SEQ ID NO: 6673 - DNA, 18 bp, synthetic construct
  misc_feature 1..18: note = Description of Artificial Sequence: Synthetic Antisense oligonucleotide
  modified_base 18: mod_base = OTHER; note = bicyclic nucleic acid (BNA)
  source 1..18: mol_type = other DNA
caaggaagatggcatttc

SEQ ID NO: 6674 - DNA, 17 bp, synthetic construct
  misc_feature 1..17: note = Description of Artificial Sequence: Synthetic Antisense oligonucleotide
  modified_base 17: mod_base = OTHER; note = bicyclic nucleic acid (BNA)
  source 1..17: mol_type = other DNA
caaggaagatggcattt

SEQ ID NO: 6675 - DNA, 16 bp, synthetic construct
  misc_feature 1..16: note = Description of Artificial Sequence: Synthetic Antisense oligonucleotide
  modified_base 16: mod_base = OTHER; note = bicyclic nucleic acid (BNA)
  source 1..16: mol_type = other DNA
caaggaagatggcatt

SEQ ID NO: 6676 - DNA, 15 bp, synthetic construct
  misc_feature 1..15: note = Description of Artificial Sequence: Synthetic Antisense oligonucleotide
  modified_base 15: mod_base = OTHER; note = bicyclic nucleic acid (BNA)
  source 1..15: mol_type = other DNA
caaggaagatggcat

SEQ ID NO: 6677 - DNA, 14 bp, synthetic construct
  misc_feature 1..14: note = Description of Artificial Sequence: Synthetic Antisense oligonucleotide
  modified_base 14: mod_base = OTHER; note = bicyclic nucleic acid (BNA)
  source 1..14: mol_type = other DNA
caaggaagatggca

SEQ ID NO: 6678 - DNA, 13 bp, synthetic construct
  misc_feature 1..13: note = Description of Artificial Sequence: Synthetic Antisense oligonucleotide
  modified_base 13: mod_base = OTHER; note = bicyclic nucleic acid (BNA)
  source 1..13: mol_type = other DNA
caaggaagatggc

SEQ ID NO: 6679 - DNA, 12 bp, synthetic construct
  misc_feature 1..12: note = Description of Artificial Sequence: Synthetic Antisense oligonucleotide
  modified_base 12: mod_base = OTHER; note = bicyclic nucleic acid (BNA)
  source 1..12: mol_type = other DNA
caaggaagatgg

SEQ ID NO: 6680 - DNA, 11 bp, synthetic construct
  misc_feature 1..11: note = Description of Artificial Sequence: Synthetic Antisense oligonucleotide
  modified_base 11: mod_base = OTHER; note = bicyclic nucleic acid (BNA)
  source 1..11: mol_type = other DNA
caaggaagatg

SEQ ID NO: 6681 - DNA, 10 bp, synthetic construct
  misc_feature 1..10: note = Description of Artificial Sequence: Synthetic Antisense oligonucleotide
  modified_base 10: mod_base = OTHER; note = bicyclic nucleic acid (BNA)
  source 1..10: mol_type = other DNA
caaggaagat

SEQ ID NO: 6682 - DNA, 20 bp, synthetic construct
  misc_feature 1..20: note = Description of Artificial Sequence: Synthetic Antisense oligonucleotide
  modified_base 20: mod_base = OTHER; note = bicyclic nucleic acid (BNA)
  source 1..20: mol_type = other DNA
aaggaagatggcatttctag

SEQ ID NO: 6683 - DNA, 19 bp, synthetic construct
  misc_feature 1..19: note = Description of Artificial Sequence: Synthetic Antisense oligonucleotide
  modified_base 19: mod_base = OTHER; note = bicyclic nucleic acid (BNA)
  source 1..19: mol_type = other DNA
aaggaagatggcatttcta

SEQ ID NO: 6684 - DNA, 18 bp, synthetic construct
  misc_feature 1..18: note = Description of Artificial Sequence: Synthetic Antisense oligonucleotide
  modified_base 18: mod_base = OTHER; note = bicyclic nucleic acid (BNA)
  source 1..18: mol_type = other DNA
aaggaagatggcatttct

SEQ ID NO: 6685 - DNA, 17 bp, synthetic construct
  misc_feature 1..17: note = Description of Artificial Sequence: Synthetic Antisense oligonucleotide
  modified_base 17: mod_base = OTHER; note = bicyclic nucleic acid (BNA)
  source 1..17: mol_type = other DNA
aaggaagatggcatttc

SEQ ID NO: 6686 - DNA, 16 bp, synthetic construct
  misc_feature 1..16: note = Description of Artificial Sequence: Synthetic Antisense oligonucleotide
  modified_base 16: mod_base = OTHER; note = bicyclic nucleic acid (BNA)
  source 1..16: mol_type = other DNA
aaggaagatggcattt

SEQ ID NO: 6687 - DNA, 15 bp, synthetic construct
  misc_feature 1..15: note = Description of Artificial Sequence: Synthetic Antisense oligonucleotide
  modified_base 15: mod_base = OTHER; note = bicyclic nucleic acid (BNA)
  source 1..15: mol_type = other DNA
aaggaagatggcatt

SEQ ID NO: 6688 - DNA, 14 bp, synthetic construct
  misc_feature 1..14: note = Description of Artificial Sequence: Synthetic Antisense oligonucleotide
  modified_base 14: mod_base = OTHER; note = bicyclic nucleic acid (BNA)
  source 1..14: mol_type = other DNA
aaggaagatggcat

SEQ ID NO: 6689 - DNA, 13 bp, synthetic construct
  misc_feature 1..13: note = Description of Artificial Sequence: Synthetic Antisense oligonucleotide
  modified_base 13: mod_base = OTHER; note = bicyclic nucleic acid (BNA)
  source 1..13: mol_type = other DNA
aaggaagatggca

SEQ ID NO: 6690 - DNA, 12 bp, synthetic construct
  misc_feature 1..12: note = Description of Artificial Sequence: Synthetic Antisense oligonucleotide
  modified_base 12: mod_base = OTHER; note = bicyclic nucleic acid (BNA)
  source 1..12: mol_type = other DNA
aaggaagatggc

SEQ ID NO: 6691 - DNA, 11 bp, synthetic construct
  misc_feature 1..11: note = Description of Artificial Sequence: Synthetic Antisense oligonucleotide
  modified_base 11: mod_base = OTHER; note = bicyclic nucleic acid (BNA)
  source 1..11: mol_type = other DNA
aaggaagatgg

SEQ ID NO: 6692 - DNA, 10 bp, synthetic construct
  misc_feature 1..10: note = Description of Artificial Sequence: Synthetic Antisense oligonucleotide
  modified_base 10: mod_base = OTHER; note = bicyclic nucleic acid (BNA)
  source 1..10: mol_type = other DNA
aaggaagatg

SEQ ID NO: 6693 - skipped

SEQ ID NO: 6694 - DNA, 19 bp, synthetic construct
  misc_feature 1..19: note = Description of Artificial Sequence: Synthetic Antisense oligonucleotide
  modified_base 19: mod_base = OTHER; note = bicyclic nucleic acid (BNA)
  source 1..19: mol_type = other DNA
aggaagatggcatttctag

SEQ ID NO: 6695 - DNA, 18 bp, synthetic construct
  misc_feature 1..18: note = Description of Artificial Sequence: Synthetic Antisense oligonucleotide
  modified_base 18: mod_base = OTHER; note = bicyclic nucleic acid (BNA)
  source 1..18: mol_type = other DNA
aggaagatggcatttcta

SEQ ID NO: 6696 - DNA, 17 bp, synthetic construct
  misc_feature 1..17: note = Description of Artificial Sequence: Synthetic Antisense oligonucleotide
  modified_base 17: mod_base = OTHER; note = bicyclic nucleic acid (BNA)
  source 1..17: mol_type = other DNA
aggaagatggcatttct

SEQ ID NO: 6697 - DNA, 16 bp, synthetic construct
  misc_feature 1..16: note = Description of Artificial Sequence: Synthetic Antisense oligonucleotide
  modified_base 16: mod_base = OTHER; note = bicyclic nucleic acid (BNA)
  source 1..16: mol_type = other DNA
aggaagatggcatttc

SEQ ID NO: 6698 - DNA, 15 bp, synthetic construct
  misc_feature 1..15: note = Description of Artificial Sequence: Synthetic Antisense oligonucleotide
  modified_base 15: mod_base = OTHER; note = bicyclic nucleic acid (BNA)
  source 1..15: mol_type = other DNA
aggaagatggcattt

SEQ ID NO: 6699 - DNA, 14 bp, synthetic construct
  misc_feature 1..14: note = Description of Artificial Sequence: Synthetic Antisense oligonucleotide
  modified_base 14: mod_base = OTHER; note = bicyclic nucleic acid (BNA)
  source 1..14: mol_type = other DNA
aggaagatggcatt

SEQ ID NO: 6700 - DNA, 13 bp, synthetic construct
  misc_feature 1..13: note = Description of Artificial Sequence: Synthetic Antisense oligonucleotide
  modified_base 13: mod_base = OTHER; note = bicyclic nucleic acid (BNA)
  source 1..13: mol_type = other DNA
aggaagatggcat

SEQ ID NO: 6701 - DNA, 12 bp, synthetic construct
  misc_feature 1..12: note = Description of Artificial Sequence: Synthetic Antisense oligonucleotide
  modified_base 12: mod_base = OTHER; note = bicyclic nucleic acid (BNA)
  source 1..12: mol_type = other DNA
aggaagatggca

SEQ ID NO: 6702 - DNA, 10 bp, synthetic construct
  misc_feature 1..10: note = Description of Artificial Sequence: Synthetic Antisense oligonucleotide
  modified_base 10: mod_base = OTHER; note = bicyclic nucleic acid (BNA)
  source 1..10: mol_type = other DNA
aggaagatgg

SEQ ID NO: 6703-6704 - skipped (2 entries)

SEQ ID NO: 6705 - DNA, 18 bp, synthetic construct
  misc_feature 1..18: note = Description of Artificial Sequence: Synthetic Antisense oligonucleotide
  modified_base 18: mod_base = OTHER; note = bicyclic nucleic acid (BNA)
  source 1..18: mol_type = other DNA
ggaagatggcatttctag

SEQ ID NO: 6706 - DNA, 17 bp, synthetic construct
  misc_feature 1..17: note = Description of Artificial Sequence: Synthetic Antisense oligonucleotide
  modified_base 17: mod_base = OTHER; note = bicyclic nucleic acid (BNA)
  source 1..17: mol_type = other DNA
ggaagatggcatttcta

SEQ ID NO: 6707 - DNA, 16 bp, synthetic construct
  misc_feature 1..16: note = Description of Artificial Sequence: Synthetic Antisense oligonucleotide
  modified_base 16: mod_base = OTHER; note = bicyclic nucleic acid (BNA)
  source 1..16: mol_type = other DNA
ggaagatggcatttct

SEQ ID NO: 6708 - DNA, 15 bp, synthetic construct
  misc_feature 1..15: note = Description of Artificial Sequence: Synthetic Antisense oligonucleotide
  modified_base 15: mod_base = OTHER; note = bicyclic nucleic acid (BNA)
  source 1..15: mol_type = other DNA
ggaagatggcatttc

SEQ ID NO: 6709 - DNA, 14 bp, synthetic construct
  misc_feature 1..14: note = Description of Artificial Sequence: Synthetic Antisense oligonucleotide
  modified_base 14: mod_base = OTHER; note = bicyclic nucleic acid (BNA)
  source 1..14: mol_type = other DNA
ggaagatggcattt

SEQ ID NO: 6710 - DNA, 13 bp, synthetic construct
  misc_feature 1..13: note = Description of Artificial Sequence: Synthetic Antisense oligonucleotide
  modified_base 13: mod_base = OTHER; note = bicyclic nucleic acid (BNA)
  source 1..13: mol_type = other DNA
ggaagatggcatt

SEQ ID NO: 6711 - DNA, 12 bp, synthetic construct
  misc_feature 1..12: note = Description of Artificial Sequence: Synthetic Antisense oligonucleotide
  modified_base 12: mod_base = OTHER; note = bicyclic nucleic acid (BNA)
  source 1..12: mol_type = other DNA
ggaagatggcat

SEQ ID NO: 6712 - DNA, 11 bp, synthetic construct
  misc_feature 1..11: note = Description of Artificial Sequence: Synthetic Antisense oligonucleotide
  modified_base 11: mod_base = OTHER; note = bicyclic nucleic acid (BNA)
  source 1..11: mol_type = other DNA
ggaagatggca

SEQ ID NO: 6713 - DNA, 10 bp, synthetic construct
  misc_feature 1..10: note = Description of Artificial Sequence: Synthetic Antisense oligonucleotide
  modified_base 10: mod_base = OTHER; note = bicyclic nucleic acid (BNA)
  source 1..10: mol_type = other DNA
ggaagatggc

SEQ ID NO: 6714 - skipped

SEQ ID NO: 6715 - DNA, 17 bp, synthetic construct
  misc_feature 1..17: note = Description of Artificial Sequence: Synthetic Antisense oligonucleotide
  modified_base 17: mod_base = OTHER; note = bicyclic nucleic acid (BNA)
  source 1..17: mol_type = other DNA
gaagatggcatttctag

SEQ ID NO: 6716 - DNA, 16 bp, synthetic construct
  misc_feature 1..16: note = Description of Artificial Sequence: Synthetic Antisense oligonucleotide
  modified_base 16: mod_base = OTHER; note = bicyclic nucleic acid (BNA)
  source 1..16: mol_type = other DNA
gaagatggcatttcta

SEQ ID NO: 6717 - DNA, 14 bp, synthetic construct
  misc_feature 1..14: note = Description of Artificial Sequence: Synthetic Antisense oligonucleotide
  modified_base 14: mod_base = OTHER; note = bicyclic nucleic acid (BNA)
  source 1..14: mol_type = other DNA
gaagatggcatttc

SEQ ID NO: 6718 - DNA, 13 bp, synthetic construct
  misc_feature 1..13: note = Description of Artificial Sequence: Synthetic Antisense oligonucleotide
  modified_base 13: mod_base = OTHER; note = bicyclic nucleic acid (BNA)
  source 1..13: mol_type = other DNA
gaagatggcattt

SEQ ID NO: 6719 - DNA, 12 bp, synthetic construct
  misc_feature 1..12: note = Description of Artificial Sequence: Synthetic Antisense oligonucleotide
  modified_base 12: mod_base = OTHER; note = bicyclic nucleic acid (BNA)
  source 1..12: mol_type = other DNA
gaagatggcatt

SEQ ID NO: 6720 - DNA, 11 bp, synthetic construct
  misc_feature 1..11: note = Description of Artificial Sequence: Synthetic Antisense oligonucleotide
  modified_base 11: mod_base = OTHER; note = bicyclic nucleic acid (BNA)
  source 1..11: mol_type = other DNA
gaagatggcat

SEQ ID NO: 6721 - DNA, 10 bp, synthetic construct
  misc_feature 1..10: note = Description of Artificial Sequence: Synthetic Antisense oligonucleotide
  modified_base 10: mod_base = OTHER; note = bicyclic nucleic acid (BNA)
  source 1..10: mol_type = other DNA
gaagatggca

SEQ ID NO: 6722-6723 - skipped (2 entries)

SEQ ID NO: 6724 - DNA, 16 bp, synthetic construct
  misc_feature 1..16: note = Description of Artificial Sequence: Synthetic Antisense oligonucleotide
  modified_base 16: mod_base = OTHER; note = bicyclic nucleic acid (BNA)
  source 1..16: mol_type = other DNA
aagatggcatttctag

SEQ ID NO: 6725 - DNA, 15 bp, synthetic construct
  misc_feature 1..15: note = Description of Artificial Sequence: Synthetic Antisense oligonucleotide
  modified_base 15: mod_base = OTHER; note = bicyclic nucleic acid (BNA)
  source 1..15: mol_type = other DNA
aagatggcatttcta

SEQ ID NO: 6726 - DNA, 14 bp, synthetic construct
  misc_feature 1..14: note = Description of Artificial Sequence: Synthetic Antisense oligonucleotide
  modified_base 14: mod_base = OTHER; note = bicyclic nucleic acid (BNA)
  source 1..14: mol_type = other DNA
aagatggcatttct

SEQ ID NO: 6727 - DNA, 13 bp, synthetic construct
  misc_feature 1..13: note = Description of Artificial Sequence: Synthetic Antisense oligonucleotide
  modified_base 13: mod_base = OTHER; note = bicyclic nucleic acid (BNA)
  source 1..13: mol_type = other DNA
aagatggcatttc

SEQ ID NO: 6728 - DNA, 12 bp, synthetic construct
  misc_feature 1..12: note = Description of Artificial Sequence: Synthetic Antisense oligonucleotide
  modified_base 12: mod_base = OTHER; note = bicyclic nucleic acid (BNA)
  source 1..12: mol_type = other DNA
aagatggcattt

SEQ ID NO: 6729 - DNA, 11 bp, synthetic construct
  misc_feature 1..11: note = Description of Artificial Sequence: Synthetic Antisense oligonucleotide
  modified_base 11: mod_base = OTHER; note = bicyclic nucleic acid (BNA)
  source 1..11: mol_type = other DNA
aagatggcatt

SEQ ID NO: 6730 - DNA, 10 bp, synthetic construct
  misc_feature 1..10: note = Description of Artificial Sequence: Synthetic Antisense oligonucleotide
  modified_base 10: mod_base = OTHER; note = bicyclic nucleic acid (BNA)
  source 1..10: mol_type = other DNA
aagatggcat

SEQ ID NO: 6731-6732 - skipped (2 entries)

SEQ ID NO: 6733 - DNA, 15 bp, synthetic construct
  misc_feature 1..15: note = Description of Artificial Sequence: Synthetic Antisense oligonucleotide
  modified_base 15: mod_base = OTHER; note = bicyclic nucleic acid (BNA)
  source 1..15: mol_type = other DNA
agatggcatttctag

SEQ ID NO: 6734 - DNA, 14 bp, synthetic construct
  misc_feature 1..14: note = Description of Artificial Sequence: Synthetic Antisense oligonucleotide
  modified_base 14: mod_base = OTHER; note = bicyclic nucleic acid (BNA)
  source 1..14: mol_type = other DNA
agatggcatttcta

SEQ ID NO: 6735 - DNA, 13 bp, synthetic construct
  misc_feature 1..13: note = Description of Artificial Sequence: Synthetic Antisense oligonucleotide
  modified_base 13: mod_base = OTHER; note = bicyclic nucleic acid (BNA)
  source 1..13: mol_type = other DNA
agatggcatttct

SEQ ID NO: 6736 - DNA, 12 bp, synthetic construct
  misc_feature 1..12: note = Description of Artificial Sequence: Synthetic Antisense oligonucleotide
  modified_base 12: mod_base = OTHER; note = bicyclic nucleic acid (BNA)
  source 1..12: mol_type = other DNA
agatggcatttc

SEQ ID NO: 6737 - DNA, 11 bp, synthetic construct
  misc_feature 1..11: note = Description of Artificial Sequence: Synthetic Antisense oligonucleotide
  modified_base 11: mod_base = OTHER; note = bicyclic nucleic acid (BNA)
  source 1..11: mol_type = other DNA
agatggcattt

SEQ ID NO: 6738 - DNA, 10 bp, synthetic construct
  misc_feature 1..10: note = Description of Artificial Sequence: Synthetic Antisense oligonucleotide
  modified_base 10: mod_base = OTHER; note = bicyclic nucleic acid (BNA)
  source 1..10: mol_type = other DNA
agatggcatt

SEQ ID NO: 6739-6740 - skipped (2 entries)

SEQ ID NO: 6741 - DNA, 30 bp, synthetic construct; identical to SEQ ID NO: 8
  misc_feature 1..30: note = Description of Artificial Sequence: Synthetic Antisense oligonucleotide
  modified_base 30: mod_base = OTHER; note = bicyclic nucleic acid (BNA)
  source 1..30: mol_type = other DNA

SEQ ID NO: 6742 - DNA, 29 bp, synthetic construct
  misc_feature 1..29: note = Description of Artificial Sequence: Synthetic Antisense oligonucleotide
  modified_base 29: mod_base = OTHER; note = bicyclic nucleic acid (BNA)
  source 1..29: mol_type = other DNA
ctccaacatcaaggaagatggcatttcta

SEQ ID NO: 6743 - DNA, 28 bp, synthetic construct
  misc_feature 1..28: note = Description of Artificial Sequence: Synthetic Antisense oligonucleotide
  modified_base 28: mod_base = OTHER; note = bicyclic nucleic acid (BNA)
  source 1..28: mol_type = other DNA
ctccaacatcaaggaagatggcatttct

SEQ ID NO: 6744 - DNA, 27 bp, synthetic construct
  misc_feature 1..27: note = Description of Artificial Sequence: Synthetic Antisense oligonucleotide
  modified_base 27: mod_base = OTHER; note = bicyclic nucleic acid (BNA)
  source 1..27: mol_type = other DNA
ctccaacatcaaggaagatggcatttc

SEQ ID NO: 6745 - DNA, 26 bp, synthetic construct
  misc_feature 1..26: note = Description of Artificial Sequence: Synthetic Antisense oligonucleotide
  modified_base 26: mod_base = OTHER; note = bicyclic nucleic acid (BNA)
  source 1..26: mol_type = other DNA
ctccaacatcaaggaagatggcattt

SEQ ID NO: 6746 - DNA, 25 bp, synthetic construct
  misc_feature 1..25: note = Description of Artificial Sequence: Synthetic Antisense oligonucleotide
  modified_base 25: mod_base = OTHER; note = bicyclic nucleic acid (BNA)
  source 1..25: mol_type = other DNA
ctccaacatcaaggaagatggcatt

SEQ ID NO: 6747 - DNA, 24 bp, synthetic construct
  misc_feature 1..24: note = Description of Artificial Sequence: Synthetic Antisense oligonucleotide
  modified_base 24: mod_base = OTHER; note = bicyclic nucleic acid (BNA)
  source 1..24: mol_type = other DNA
ctccaacatcaaggaagatggcat

SEQ ID NO: 6748 - DNA, 23 bp, synthetic construct
  misc_feature 1..23: note = Description of Artificial Sequence: Synthetic Antisense oligonucleotide
  modified_base 23: mod_base = OTHER; note = bicyclic nucleic acid (BNA)
  source 1..23: mol_type = other DNA
ctccaacatcaaggaagatggca

SEQ ID NO: 6749 - DNA, 22 bp, synthetic construct
  misc_feature 1..22: note = Description of Artificial Sequence: Synthetic Antisense oligonucleotide
  modified_base 22: mod_base = OTHER; note = bicyclic nucleic acid (BNA)
  source 1..22: mol_type = other DNA
ctccaacatcaaggaagatggc

SEQ ID NO: 6750 - DNA, 21 bp, synthetic construct
  misc_feature 1..21: note = Description of Artificial Sequence: Synthetic Antisense oligonucleotide
  modified_base 21: mod_base = OTHER; note = bicyclic nucleic acid (BNA)
  source 1..21: mol_type = other DNA
ctccaacatcaaggaagatgg

SEQ ID NO: 6751 - DNA, 20 bp, synthetic construct
  misc_feature 1..20: note = Description of Artificial Sequence: Synthetic Antisense oligonucleotide
  modified_base 20: mod_base = OTHER; note = bicyclic nucleic acid (BNA)
  source 1..20: mol_type = other DNA
ctccaacatcaaggaagatg

SEQ ID NO: 6752 - DNA, 19 bp, synthetic construct
  misc_feature 1..19: note = Description of Artificial Sequence: Synthetic Antisense oligonucleotide
  modified_base 19: mod_base = OTHER; note = bicyclic nucleic acid (BNA)
  source 1..19: mol_type = other DNA
ctccaacatcaaggaagat

SEQ ID NO: 6753 - DNA, 18 bp, synthetic construct
  misc_feature 1..18: note = Description of Artificial Sequence: Synthetic Antisense oligonucleotide
  modified_base 18: mod_base = OTHER; note = bicyclic nucleic acid (BNA)
  source 1..18: mol_type = other DNA
ctccaacatcaaggaaga

SEQ ID NO: 6754 - DNA, 17 bp, synthetic construct
  misc_feature 1..17: note = Description of Artificial Sequence: Synthetic Antisense oligonucleotide
  modified_base 17: mod_base = OTHER; note = bicyclic nucleic acid (BNA)
  source 1..17: mol_type = other DNA
ctccaacatcaaggaag

SEQ ID NO: 6755 - DNA, 29 bp, synthetic construct
  misc_feature 1..29: note = Description of Artificial Sequence: Synthetic Antisense oligonucleotide
  modified_base 29: mod_base = OTHER; note = bicyclic nucleic acid (BNA)
  source 1..29: mol_type = other DNA
tccaacatcaaggaagatggcatttctag

SEQ ID NO: 6756 - DNA, 28 bp, synthetic construct
  misc_feature 1..28: note = Description of Artificial Sequence: Synthetic Antisense oligonucleotide
  modified_base 28: mod_base = OTHER; note = bicyclic nucleic acid (BNA)
  source 1..28: mol_type = other DNA
tccaacatcaaggaagatggcatttcta

SEQ ID NO: 6757 - DNA, 27 bp, synthetic construct
  misc_feature 1..27: note = Description of Artificial Sequence: Synthetic Antisense oligonucleotide
  modified_base 27: mod_base = OTHER; note = bicyclic nucleic acid (BNA)
  source 1..27: mol_type = other DNA
tccaacatcaaggaagatggcatttct

SEQ ID NO: 6758 - DNA, 26 bp, synthetic construct
  misc_feature 1..26: note = Description of Artificial Sequence: Synthetic Antisense oligonucleotide
  modified_base 26: mod_base = OTHER; note = bicyclic nucleic acid (BNA)
  source 1..26: mol_type = other DNA
tccaacatcaaggaagatggcatttc

SEQ ID NO: 6759 - DNA, 25 bp, synthetic construct
  misc_feature 1..25: note = Description of Artificial Sequence: Synthetic Antisense oligonucleotide
  modified_base 25: mod_base = OTHER; note = bicyclic nucleic acid (BNA)
  source 1..25: mol_type = other DNA
tccaacatcaaggaagatggcattt

SEQ ID NO: 6760 - DNA, 24 bp, synthetic construct
  misc_feature 1..24: note = Description of Artificial Sequence: Synthetic Antisense oligonucleotide
  modified_base 24: mod_base = OTHER; note = bicyclic nucleic acid (BNA)
  source 1..24: mol_type = other DNA
tccaacatcaaggaagatggcatt

SEQ ID NO: 6761 - DNA, 23 bp, synthetic construct
  misc_feature 1..23: note = Description of Artificial Sequence: Synthetic Antisense oligonucleotide
  modified_base 23: mod_base = OTHER; note = bicyclic nucleic acid (BNA)
  source 1..23: mol_type = other DNA
tccaacatcaaggaagatggcat

SEQ ID NO: 6762 - DNA, 22 bp, synthetic construct
  misc_feature 1..22: note = Description of Artificial Sequence: Synthetic Antisense oligonucleotide
  modified_base 22: mod_base = OTHER; note = bicyclic nucleic acid (BNA)
  source 1..22: mol_type = other DNA
tccaacatcaaggaagatggca

SEQ ID NO: 6763 - DNA, 21 bp, synthetic construct
  misc_feature 1..21: note = Description of Artificial Sequence: Synthetic Antisense oligonucleotide
  modified_base 21: mod_base = OTHER; note = bicyclic nucleic acid (BNA)
  source 1..21: mol_type = other DNA
tccaacatcaaggaagatggc

SEQ ID NO: 6764 - DNA, 20 bp, synthetic construct
  misc_feature 1..20: note = Description of Artificial Sequence: Synthetic Antisense oligonucleotide
  modified_base 20: mod_base = OTHER; note = bicyclic nucleic acid (BNA)
  source 1..20: mol_type = other DNA
tccaacatcaaggaagatgg

SEQ ID NO: 6765 - DNA, 19 bp, synthetic construct
  misc_feature 1..19: note = Description of Artificial Sequence: Synthetic Antisense oligonucleotide
  modified_base 19: mod_base = OTHER; note = bicyclic nucleic acid (BNA)
  source 1..19: mol_type = other DNA
tccaacatcaaggaagatg

SEQ ID NO: 6766 - DNA, 18 bp, synthetic construct
  misc_feature 1..18: note = Description of Artificial Sequence: Synthetic Antisense oligonucleotide
  modified_base 18: mod_base = OTHER; note = bicyclic nucleic acid (BNA)
  source 1..18: mol_type = other DNA
tccaacatcaaggaagat

SEQ ID NO: 6767 - DNA, 17 bp, synthetic construct
  misc_feature 1..17: note = Description of Artificial Sequence: Synthetic Antisense oligonucleotide
  modified_base 17: mod_base = OTHER; note = bicyclic nucleic acid (BNA)
  source 1..17: mol_type = other DNA
tccaacatcaaggaaga

SEQ ID NO: 6768 - DNA, 16 bp, synthetic construct
  misc_feature 1..16: note = Description of Artificial Sequence: Synthetic Antisense oligonucleotide
  modified_base 16: mod_base = OTHER; note = bicyclic nucleic acid (BNA)
  source 1..16: mol_type = other DNA
tccaacatcaaggaag

SEQ ID NO: 6769 - DNA, 28 bp, synthetic construct
  misc_feature 1..28: note = Description of Artificial Sequence: Synthetic Antisense oligonucleotide
  modified_base 28: mod_base = OTHER; note = bicyclic nucleic acid (BNA)
  source 1..28: mol_type = other DNA
ccaacatcaaggaagatggcatttctag

SEQ ID NO: 6770 - DNA, 27 bp, synthetic construct
  misc_feature 1..27: note = Description of Artificial Sequence: Synthetic Antisense oligonucleotide
  modified_base 27: mod_base = OTHER; note = bicyclic nucleic acid (BNA)
  source 1..27: mol_type = other DNA
ccaacatcaaggaagatggcatttcta

SEQ ID NO: 6771 - DNA, 26 bp, synthetic construct
  misc_feature 1..26: note = Description of Artificial Sequence: Synthetic Antisense oligonucleotide
  modified_base 26: mod_base = OTHER; note = bicyclic nucleic acid (BNA)
  source 1..26: mol_type = other DNA
ccaacatcaaggaagatggcatttct

SEQ ID NO: 6772 - DNA, 25 bp, synthetic construct
  misc_feature 1..25: note = Description of Artificial Sequence: Synthetic Antisense oligonucleotide
  modified_base 25: mod_base = OTHER; note = bicyclic nucleic acid (BNA)
  source 1..25: mol_type = other DNA
ccaacatcaaggaagatggcatttc

SEQ ID NO: 6773 - DNA, 24 bp, synthetic construct
  misc_feature 1..24: note = Description of Artificial Sequence: Synthetic Antisense oligonucleotide
  modified_base 24: mod_base = OTHER; note = bicyclic nucleic acid (BNA)
  source 1..24: mol_type = other DNA
ccaacatcaaggaagatggcattt

SEQ ID NO: 6774 - DNA, 23 bp, synthetic construct
  misc_feature 1..23: note = Description of Artificial Sequence: Synthetic Antisense oligonucleotide
  modified_base 23: mod_base = OTHER; note = bicyclic nucleic acid (BNA)
  source 1..23: mol_type = other DNA
ccaacatcaaggaagatggcatt

SEQ ID NO: 6775 - DNA, 22 bp, synthetic construct
  misc_feature 1..22: note = Description of Artificial Sequence: Synthetic Antisense oligonucleotide
  modified_base 22: mod_base = OTHER; note = bicyclic nucleic acid (BNA)
  source 1..22: mol_type = other DNA
ccaacatcaaggaagatggcat

SEQ ID NO: 6776 - DNA, 21 bp, synthetic construct
  misc_feature 1..21: note = Description of Artificial Sequence: Synthetic Antisense oligonucleotide
  modified_base 21: mod_base = OTHER; note = bicyclic nucleic acid (BNA)
  source 1..21: mol_type = other DNA
ccaacatcaaggaagatggca

SEQ ID NO: 6777 - DNA, 20 bp, synthetic construct
  misc_feature 1..20: note = Description of Artificial Sequence: Synthetic Antisense oligonucleotide
  modified_base 20: mod_base = OTHER; note = bicyclic nucleic acid (BNA)
  source 1..20: mol_type = other DNA
ccaacatcaaggaagatggc

SEQ ID NO: 6778 - DNA, 19 bp, synthetic construct
  misc_feature 1..19: note = Description of Artificial Sequence: Synthetic Antisense oligonucleotide
  modified_base 19: mod_base = OTHER; note = bicyclic nucleic acid (BNA)
  source 1..19: mol_type = other DNA
ccaacatcaaggaagatgg

SEQ ID NO: 6779 - DNA, 18 bp, synthetic construct
  misc_feature 1..18: note = Description of Artificial Sequence: Synthetic Antisense oligonucleotide
  modified_base 18: mod_base = OTHER; note = bicyclic nucleic acid (BNA)
  source 1..18: mol_type = other DNA
ccaacatcaaggaagatg

SEQ ID NO: 6780 - DNA, 17 bp, synthetic construct
  misc_feature 1..17: note = Description of Artificial Sequence: Synthetic Antisense oligonucleotide
  modified_base 17: mod_base = OTHER; note = bicyclic nucleic acid (BNA)
  source 1..17: mol_type = other DNA
ccaacatcaaggaagat

SEQ ID NO: 6781 - DNA, 16 bp, synthetic construct
  misc_feature 1..16: note = Description of Artificial Sequence: Synthetic Antisense oligonucleotide
  modified_base 16: mod_base = OTHER; note = bicyclic nucleic acid (BNA)
  source 1..16: mol_type = other DNA
ccaacatcaaggaaga

SEQ ID NO: 6782 - DNA, 15 bp, synthetic construct
  misc_feature 1..15: note = Description of Artificial Sequence: Synthetic Antisense oligonucleotide
  modified_base 15: mod_base = OTHER; note = bicyclic nucleic acid (BNA)
  source 1..15: mol_type = other DNA
ccaacatcaaggaag

SEQ ID NO: 6783 - DNA, 27 bp, synthetic construct
  misc_feature 1..27: note = Description of Artificial Sequence: Synthetic Antisense oligonucleotide
  modified_base 27: mod_base = OTHER; note = bicyclic nucleic acid (BNA)
  source 1..27: mol_type = other DNA
caacatcaaggaagatggcatttctag

SEQ ID NO: 6784 - DNA, 26 bp, synthetic construct
  misc_feature 1..26: note = Description of Artificial Sequence: Synthetic Antisense oligonucleotide
  modified_base 26: mod_base = OTHER; note = bicyclic nucleic acid (BNA)
  source 1..26: mol_type = other DNA
caacatcaaggaagatggcatttcta

SEQ ID NO: 6785 - DNA, 25 bp, synthetic construct
  misc_feature 1..25: note = Description of Artificial Sequence: Synthetic Antisense oligonucleotide
  modified_base 25: mod_base = OTHER; note = bicyclic nucleic acid (BNA)
  source 1..25: mol_type = other DNA
caacatcaaggaagatggcatttct

SEQ ID NO: 6786 - DNA, 24 bp, synthetic construct
  misc_feature 1..24: note = Description of Artificial Sequence: Synthetic Antisense oligonucleotide
  modified_base 24: mod_base = OTHER; note = bicyclic nucleic acid (BNA)
  source 1..24: mol_type = other DNA
caacatcaaggaagatggcatttc

SEQ ID NO: 6787 - DNA, 23 bp, synthetic construct
  misc_feature 1..23: note = Description of Artificial Sequence: Synthetic Antisense oligonucleotide
  modified_base 23: mod_base = OTHER; note = bicyclic nucleic acid (BNA)
  source 1..23: mol_type = other DNA
caacatcaaggaagatggcattt

SEQ ID NO: 6788 - DNA, 22 bp, synthetic construct
  misc_feature 1..22: note = Description of Artificial Sequence: Synthetic Antisense oligonucleotide
  modified_base 22: mod_base = OTHER; note = bicyclic nucleic acid (BNA)
  source 1..22: mol_type = other DNA
caacatcaaggaagatggcatt

SEQ ID NO: 6789 - DNA, 21 bp, synthetic construct
  misc_feature 1..21: note = Description of Artificial Sequence: Synthetic Antisense oligonucleotide
  modified_base 21: mod_base = OTHER; note = bicyclic nucleic acid (BNA)
  source 1..21: mol_type = other DNA
caacatcaaggaagatggcat

SEQ ID NO: 6790 - DNA, 20 bp, synthetic construct
  misc_feature 1..20: note = Description of Artificial Sequence: Synthetic Antisense oligonucleotide
  modified_base 20: mod_base = OTHER; note = bicyclic nucleic acid (BNA)
  source 1..20: mol_type = other DNA
caacatcaaggaagatggca

SEQ ID NO: 6791 - DNA, 19 bp, synthetic construct
  misc_feature 1..19: note = Description of Artificial Sequence: Synthetic Antisense oligonucleotide
  modified_base 19: mod_base = OTHER; note = bicyclic nucleic acid (BNA)
  source 1..19: mol_type = other DNA
caacatcaaggaagatggc

SEQ ID NO: 6792 - DNA, 18 bp, synthetic construct
  misc_feature 1..18: note = Description of Artificial Sequence: Synthetic Antisense oligonucleotide
  modified_base 18: mod_base = OTHER; note = bicyclic nucleic acid (BNA)
  source 1..18: mol_type = other DNA
caacatcaaggaagatgg

SEQ ID NO: 6793 - DNA, 17 bp, synthetic construct
  misc_feature 1..17: note = Description of Artificial Sequence: Synthetic Antisense oligonucleotide
  modified_base 17: mod_base = OTHER; note = bicyclic nucleic acid (BNA)
  source 1..17: mol_type = other DNA
caacatcaaggaagatg

SEQ ID NO: 6794 - DNA, 16 bp, synthetic construct
  misc_feature 1..16: note = Description of Artificial Sequence: Synthetic Antisense oligonucleotide
  modified_base 16: mod_base = OTHER; note = bicyclic nucleic acid (BNA)
  source 1..16: mol_type = other DNA
caacatcaaggaagat

SEQ ID NO: 6795 - DNA, 15 bp, synthetic construct
  misc_feature 1..15: note = Description of Artificial Sequence: Synthetic Antisense oligonucleotide
  modified_base 15: mod_base = OTHER; note = bicyclic nucleic acid (BNA)
  source 1..15: mol_type = other DNA
caacatcaaggaaga

SEQ ID NO: 6796 - DNA, 14 bp, synthetic construct
  misc_feature 1..14: note = Description of Artificial Sequence: Synthetic Antisense oligonucleotide
  modified_base 14: mod_base = OTHER; note = bicyclic nucleic acid (BNA)
  source 1..14: mol_type = other DNA
caacatcaaggaag

SEQ ID NO: 6797 - DNA, 26 bp, synthetic construct
  misc_feature 1..26: note = Description of Artificial Sequence: Synthetic Antisense oligonucleotide
  modified_base 26: mod_base = OTHER; note = bicyclic nucleic acid (BNA)
  source 1..26: mol_type = other DNA
aacatcaaggaagatggcatttctag

SEQ ID NO: 6798 - DNA, 25 bp, synthetic construct
  misc_feature 1..25: note = Description of Artificial Sequence: Synthetic Antisense oligonucleotide
  modified_base 25: mod_base = OTHER; note = bicyclic nucleic acid (BNA)
  source 1..25: mol_type = other DNA
aacatcaaggaagatggcatttcta

SEQ ID NO: 6799 - DNA, 24 bp, synthetic construct
  misc_feature 1..24: note = Description of Artificial Sequence: Synthetic Antisense oligonucleotide
  modified_base 24: mod_base = OTHER; note = bicyclic nucleic acid (BNA)
  source 1..24: mol_type = other DNA
aacatcaaggaagatggcatttct

SEQ ID NO: 6800 - DNA, 23 bp, synthetic construct
  misc_feature 1..23: note = Description of Artificial Sequence: Synthetic Antisense oligonucleotide
  modified_base 23: mod_base = OTHER; note = bicyclic nucleic acid (BNA)
  source 1..23: mol_type = other DNA
aacatcaaggaagatggcatttc

SEQ ID NO: 6801 - DNA, 22 bp, synthetic construct
  misc_feature 1..22: note = Description of Artificial Sequence: Synthetic Antisense oligonucleotide
  modified_base 22: mod_base = OTHER; note = bicyclic nucleic acid (BNA)
  source 1..22: mol_type = other DNA
aacatcaaggaagatggcattt

SEQ ID NO: 6802 - DNA, 21 bp, synthetic construct
  misc_feature 1..21: note = Description of Artificial Sequence: Synthetic Antisense oligonucleotide
  modified_base 21: mod_base = OTHER; note = bicyclic nucleic acid (BNA)
  source 1..21: mol_type = other DNA
aacatcaaggaagatggcatt

SEQ ID NO: 6803 - DNA, 20 bp, synthetic construct
  misc_feature 1..20: note = Description of Artificial Sequence: Synthetic Antisense oligonucleotide
  modified_base 20: mod_base = OTHER; note = bicyclic nucleic acid (BNA)
  source 1..20: mol_type = other DNA
aacatcaaggaagatggcat

SEQ ID NO: 6804 - DNA, 19 bp, synthetic construct
  misc_feature 1..19: note = Description of Artificial Sequence: Synthetic Antisense oligonucleotide
  modified_base 19: mod_base = OTHER; note = bicyclic nucleic acid (BNA)
  source 1..19: mol_type = other DNA
aacatcaaggaagatggca

SEQ ID NO: 6805 - DNA, 18 bp, synthetic construct
  misc_feature 1..18: note = Description of Artificial Sequence: Synthetic Antisense oligonucleotide
  modified_base 18: mod_base = OTHER; note = bicyclic nucleic acid (BNA)
  source 1..18: mol_type = other DNA
aacatcaaggaagatggc

SEQ ID NO: 6806 - DNA, 17 bp, synthetic construct
  misc_feature 1..17: note = Description of Artificial Sequence: Synthetic Antisense oligonucleotide
  modified_base 17: mod_base = OTHER; note = bicyclic nucleic acid (BNA)
  source 1..17: mol_type = other DNA
aacatcaaggaagatgg

SEQ ID NO: 6807 - DNA, 16 bp, synthetic construct
  misc_feature 1..16: note = Description of Artificial Sequence: Synthetic Antisense oligonucleotide
  modified_base 16: mod_base = OTHER; note = bicyclic nucleic acid (BNA)
  source 1..16: mol_type = other DNA
aacatcaaggaagatg

SEQ ID NO: 6808 - DNA, 15 bp, synthetic construct
  misc_feature 1..15: note = Description of Artificial Sequence: Synthetic Antisense oligonucleotide
  modified_base 15: mod_base = OTHER; note = bicyclic nucleic acid (BNA)
  source 1..15: mol_type = other DNA
aacatcaaggaagat

SEQ ID NO: 6809 - DNA, 14 bp, synthetic construct
  misc_feature 1..14: note = Description of Artificial Sequence: Synthetic Antisense oligonucleotide
  modified_base 14: mod_base = OTHER; note = bicyclic nucleic acid (BNA)
  source 1..14: mol_type = other DNA
aacatcaaggaaga

SEQ ID NO: 6810 - DNA, 13 bp, synthetic construct
  misc_feature 1..13: note = Description of Artificial Sequence: Synthetic Antisense oligonucleotide
  modified_base 13: mod_base = OTHER; note = bicyclic nucleic acid (BNA)
  source 1..13: mol_type = other DNA
aacatcaaggaag

SEQ ID NO: 6811 - DNA, 25 bp, synthetic construct
  misc_feature 1..25: note = Description of Artificial Sequence: Synthetic Antisense oligonucleotide
  modified_base 25: mod_base = OTHER; note = bicyclic nucleic acid (BNA)
  source 1..25: mol_type = other DNA
acatcaaggaagatggcatttctag

SEQ ID NO: 6812 - DNA, 24 bp, synthetic construct
  misc_feature 1..24: note = Description of Artificial Sequence: Synthetic Antisense oligonucleotide
  modified_base 24: mod_base = OTHER; note = bicyclic nucleic acid (BNA)
  source 1..24: mol_type = other DNA
acatcaaggaagatggcatttcta

SEQ ID NO: 6813 - DNA, 23 bp, synthetic construct
  misc_feature 1..23: note = Description of Artificial Sequence: Synthetic Antisense oligonucleotide
  modified_base 23: mod_base = OTHER; note = bicyclic nucleic acid (BNA)
  source 1..23: mol_type = other DNA
acatcaaggaagatggcatttct

SEQ ID NO: 6814 - DNA, 22 bp, synthetic construct
  misc_feature 1..22: note = Description of Artificial Sequence: Synthetic Antisense oligonucleotide
  modified_base 22: mod_base = OTHER; note = bicyclic nucleic acid (BNA)
  source 1..22: mol_type = other DNA
acatcaaggaagatggcatttc

SEQ ID NO: 6815 - DNA, 21 bp, synthetic construct
  misc_feature 1..21: note = Description of Artificial Sequence: Synthetic Antisense oligonucleotide
  modified_base 21: mod_base = OTHER; note = bicyclic nucleic acid (BNA)
  source 1..21: mol_type = other DNA
acatcaaggaagatggcattt

SEQ ID NO: 6816 - DNA, 20 bp, synthetic construct
  misc_feature 1..20: note = Description of Artificial Sequence: Synthetic Antisense oligonucleotide
  modified_base 20: mod_base = OTHER; note = bicyclic nucleic acid (BNA)
  source 1..20: mol_type = other DNA
acatcaaggaagatggcatt

SEQ ID NO: 6817 - DNA, 19 bp, synthetic construct
  misc_feature 1..19: note = Description of Artificial Sequence: Synthetic Antisense oligonucleotide
  modified_base 19: mod_base = OTHER; note = bicyclic nucleic acid (BNA)
  source 1..19: mol_type = other DNA
acatcaaggaagatggcat

SEQ ID NO: 6818 - DNA, 18 bp, synthetic construct
  misc_feature 1..18: note = Description of Artificial Sequence: Synthetic Antisense oligonucleotide
  modified_base 18: mod_base = OTHER; note = bicyclic nucleic acid (BNA)
  source 1..18: mol_type = other DNA
acatcaaggaagatggca

SEQ ID NO: 6819 - DNA, 17 bp, synthetic construct
  misc_feature 1..17: note = Description of Artificial Sequence: Synthetic Antisense oligonucleotide
  modified_base 17: mod_base = OTHER; note = bicyclic nucleic acid (BNA)
  source 1..17: mol_type = other DNA
acatcaaggaagatggc

SEQ ID NO: 6820 - DNA, 16 bp, synthetic construct
  misc_feature 1..16: note = Description of Artificial Sequence: Synthetic Antisense oligonucleotide
  modified_base 16: mod_base = OTHER; note = bicyclic nucleic acid (BNA)
  source 1..16: mol_type = other DNA
acatcaaggaagatgg

SEQ ID NO: 6821 - DNA, 15 bp, synthetic construct
  misc_feature 1..15: note = Description of Artificial Sequence: Synthetic Antisense oligonucleotide
  modified_base 15: mod_base = OTHER; note = bicyclic nucleic acid (BNA)
  source 1..15: mol_type = other DNA
acatcaaggaagatg

SEQ ID NO: 6822 - DNA, 14 bp, synthetic construct
  misc_feature 1..14: note = Description of Artificial Sequence: Synthetic Antisense oligonucleotide
  modified_base 14: mod_base = OTHER; note = bicyclic nucleic acid (BNA)
  source 1..14: mol_type = other DNA
acatcaaggaagat

SEQ ID NO: 6823 - DNA, 13 bp, synthetic construct
  misc_feature 1..13: note = Description of Artificial Sequence: Synthetic Antisense oligonucleotide
  modified_base 13: mod_base = OTHER; note = bicyclic nucleic acid (BNA)
  source 1..13: mol_type = other DNA
acatcaaggaaga

SEQ ID NO: 6824 - DNA, 12 bp, synthetic construct
  misc_feature 1..12: note = Description of Artificial Sequence: Synthetic Antisense oligonucleotide
  modified_base 12: mod_base = OTHER; note = bicyclic nucleic acid (BNA)
  source 1..12: mol_type = other DNA
acatcaaggaag

SEQ ID NO: 6825 - DNA, 24 bp, synthetic construct
  misc_feature 1..24: note = Description of Artificial Sequence: Synthetic Antisense oligonucleotide
  modified_base 24: mod_base = OTHER; note = bicyclic nucleic acid (BNA)
  source 1..24: mol_type = other DNA
catcaaggaagatggcatttctag

SEQ ID NO: 6826 - DNA, 23 bp, synthetic construct
  misc_feature 1..23: note = Description of Artificial Sequence: Synthetic Antisense oligonucleotide
  modified_base 23: mod_base = OTHER; note = bicyclic nucleic acid (BNA)
  source 1..23: mol_type = other DNA
catcaaggaagatggcatttcta

SEQ ID NO: 6827 - DNA, 22 bp, synthetic construct
  misc_feature 1..22: note = Description of Artificial Sequence: Synthetic Antisense oligonucleotide
  modified_base 22: mod_base = OTHER; note = bicyclic nucleic acid (BNA)
  source 1..22: mol_type = other DNA
catcaaggaagatggcatttct

SEQ ID NO: 6828 - DNA, 21 bp, synthetic construct
  misc_feature 1..21: note = Description of Artificial Sequence: Synthetic Antisense oligonucleotide
  modified_base 21: mod_base = OTHER; note = bicyclic nucleic acid (BNA)
  source 1..21: mol_type = other DNA
catcaaggaagatggcatttc

SEQ ID NO: 6829 - DNA, 20 bp, synthetic construct
  misc_feature 1..20: note = Description of Artificial Sequence: Synthetic Antisense oligonucleotide
  modified_base 20: mod_base = OTHER; note = bicyclic nucleic acid (BNA)
  source 1..20: mol_type = other DNA
catcaaggaagatggcattt

SEQ ID NO: 6830 - DNA, 19 bp, synthetic construct
  misc_feature 1..19: note = Description of Artificial Sequence: Synthetic Antisense oligonucleotide
  modified_base 19: mod_base = OTHER; note = bicyclic nucleic acid (BNA)
  source 1..19: mol_type = other DNA
catcaaggaagatggcatt

SEQ ID NO: 6831 - DNA, 18 bp, synthetic construct
  misc_feature 1..18: note = Description of Artificial Sequence: Synthetic Antisense oligonucleotide
  modified_base 18: mod_base = OTHER; note = bicyclic nucleic acid (BNA)
  source 1..18: mol_type = other DNA
catcaaggaagatggcat

SEQ ID NO: 6832 - DNA, 17 bp, synthetic construct
  misc_feature 1..17: note = Description of Artificial Sequence: Synthetic Antisense oligonucleotide
  modified_base 17: mod_base = OTHER; note = bicyclic nucleic acid (BNA)
  source 1..17: mol_type = other DNA
catcaaggaagatggca

SEQ ID NO: 6833 - DNA, 16 bp, synthetic construct
  misc_feature 1..16: note = Description of Artificial Sequence: Synthetic Antisense oligonucleotide
  modified_base 16: mod_base = OTHER; note = bicyclic nucleic acid (BNA)
  source 1..16: mol_type = other DNA
catcaaggaagatggc

SEQ ID NO: 6834 - DNA, 15 bp, synthetic construct
  misc_feature 1..15: note = Description of Artificial Sequence: Synthetic Antisense oligonucleotide
  modified_base 15: mod_base = OTHER; note = bicyclic nucleic acid (BNA)
  source 1..15: mol_type = other DNA
catcaaggaagatgg

SEQ ID NO: 6835 - DNA, 14 bp, synthetic construct
  misc_feature 1..14: note = Description of Artificial Sequence: Synthetic Antisense oligonucleotide
  modified_base 14: mod_base = OTHER; note = bicyclic nucleic acid (BNA)
  source 1..14: mol_type = other DNA
catcaaggaagatg

SEQ ID NO: 6836 - DNA, 13 bp, synthetic construct
  misc_feature 1..13: note = Description of Artificial Sequence: Synthetic Antisense oligonucleotide
  modified_base 13: mod_base = OTHER; note = bicyclic nucleic acid (BNA)
  source 1..13: mol_type = other DNA
catcaaggaagat

SEQ ID NO: 6837 - DNA, 12 bp, synthetic construct
  misc_feature 1..12: note = Description of Artificial Sequence: Synthetic Antisense oligonucleotide
  modified_base 12: mod_base = OTHER; note = bicyclic nucleic acid (BNA)
  source 1..12: mol_type = other DNA
catcaaggaaga

SEQ ID NO: 6838 - DNA, 11 bp, synthetic construct
  misc_feature 1..11: note = Description of Artificial Sequence: Synthetic Antisense oligonucleotide
  modified_base 11: mod_base = OTHER; note = bicyclic nucleic acid (BNA)
  source 1..11: mol_type = other DNA
catcaaggaag

SEQ ID NO: 6839 - DNA, 23 bp, synthetic construct
  misc_feature 1..23: note = Description of Artificial Sequence: Synthetic Antisense oligonucleotide
  modified_base 23: mod_base = OTHER; note = bicyclic nucleic acid (BNA)
  source 1..23: mol_type = other DNA
atcaaggaagatggcatttctag

SEQ ID NO: 6840 - DNA, 22 bp, synthetic construct
  misc_feature 1..22: note = Description of Artificial Sequence: Synthetic Antisense oligonucleotide
  modified_base 22: mod_base = OTHER; note = bicyclic nucleic acid (BNA)
  source 1..22: mol_type = other DNA
atcaaggaagatggcatttcta

SEQ ID NO: 6841 - DNA, 21 bp, synthetic construct
  misc_feature 1..21: note = Description of Artificial Sequence: Synthetic Antisense oligonucleotide
  modified_base 21: mod_base = OTHER; note = bicyclic nucleic acid (BNA)
  source 1..21: mol_type = other DNA
atcaaggaagatggcatttct

SEQ ID NO: 6842 - DNA, 20 bp, synthetic construct
  misc_feature 1..20: note = Description of Artificial Sequence: Synthetic Antisense oligonucleotide
  modified_base 20: mod_base = OTHER; note = bicyclic nucleic acid (BNA)
  source 1..20: mol_type = other DNA
atcaaggaagatggcatttc

SEQ ID NO: 6843 - DNA, 19 bp, synthetic construct
  misc_feature 1..19: note = Description of Artificial Sequence: Synthetic Antisense oligonucleotide
  modified_base 19: mod_base = OTHER; note = bicyclic nucleic acid (BNA)
  source 1..19: mol_type = other DNA
atcaaggaagatggcattt

SEQ ID NO: 6844 - DNA, 18 bp, synthetic construct
  misc_feature 1..18: note = Description of Artificial Sequence: Synthetic Antisense oligonucleotide
  modified_base 18: mod_base = OTHER; note = bicyclic nucleic acid (BNA)
  source 1..18: mol_type = other DNA
atcaaggaagatggcatt

SEQ ID NO: 6845 - DNA, 17 bp, synthetic construct
  misc_feature 1..17: note = Description of Artificial Sequence: Synthetic Antisense oligonucleotide
  modified_base 17: mod_base = OTHER; note = bicyclic nucleic acid (BNA)
  source 1..17: mol_type = other DNA
atcaaggaagatggcat

SEQ ID NO: 6846 - DNA, 16 bp, synthetic construct
  misc_feature 1..16: note = Description of Artificial Sequence: Synthetic Antisense oligonucleotide
  modified_base 16: mod_base = OTHER; note = bicyclic nucleic acid (BNA)
  source 1..16: mol_type = other DNA
atcaaggaagatggca

SEQ ID NO: 6847 - DNA, 15 bp, synthetic construct
  misc_feature 1..15: note = Description of Artificial Sequence: Synthetic Antisense oligonucleotide
  modified_base 15: mod_base = OTHER; note = bicyclic nucleic acid (BNA)
  source 1..15: mol_type = other DNA
atcaaggaagatggc

SEQ ID NO: 6848 - DNA, 14 bp, synthetic construct
  misc_feature 1..14: note = Description of Artificial Sequence: Synthetic Antisense oligonucleotide
  modified_base 14: mod_base = OTHER; note = bicyclic nucleic acid (BNA)
  source 1..14: mol_type = other DNA
atcaaggaagatgg

SEQ ID NO: 6849 - DNA, 13 bp, synthetic construct
  misc_feature 1..13: note = Description of Artificial Sequence: Synthetic Antisense oligonucleotide
  modified_base 13: mod_base = OTHER; note = bicyclic nucleic acid (BNA)
  source 1..13: mol_type = other DNA
atcaaggaagatg

SEQ ID NO: 6850 - DNA, 12 bp, synthetic construct
  misc_feature 1..12: note = Description of Artificial Sequence: Synthetic Antisense oligonucleotide
  modified_base 12: mod_base = OTHER; note = bicyclic nucleic acid (BNA)
  source 1..12: mol_type = other DNA
atcaaggaagat

SEQ ID NO: 6851 - DNA, 11 bp, synthetic construct
  misc_feature 1..11: note = Description of Artificial Sequence: Synthetic Antisense oligonucleotide
  modified_base 11: mod_base = OTHER; note = bicyclic nucleic acid (BNA)
  source 1..11: mol_type = other DNA
atcaaggaaga

SEQ ID NO: 6852 - DNA, 10 bp, synthetic construct
  misc_feature 1..10: note = Description of Artificial Sequence: Synthetic Antisense oligonucleotide
  modified_base 10: mod_base = OTHER; note = bicyclic nucleic acid (BNA)
  source 1..10: mol_type = other DNA
atcaaggaag

SEQ ID NO: 6853 - DNA, 18 bp, synthetic construct
  misc_feature 1..18: note = Description of Artificial Sequence: Synthetic Antisense oligonucleotide
  modified_base 1: mod_base = OTHER; note = bicyclic nucleic acid (BNA)
  modified_base 18: mod_base = OTHER; note = bicyclic nucleic acid (BNA)
  source 1..18: mol_type = other DNA
ggtaagttctgtccaagc

SEQ ID NO: 6854 - DNA, 18 bp, synthetic construct
  misc_feature 1..18: note = Description of Artificial Sequence: Synthetic Antisense oligonucleotide
  modified_base 1: mod_base = OTHER; note = bicyclic nucleic acid (BNA)
  modified_base 18: mod_base = OTHER; note = bicyclic nucleic acid (BNA)
  source 1..18: mol_type = other DNA
gtaagttctgtccaagcc

SEQ ID NO: 6855 - DNA, 18 bp, synthetic construct
  misc_feature 1..18: note = Description of Artificial Sequence: Synthetic Antisense oligonucleotide
  modified_base 1: mod_base = OTHER; note = bicyclic nucleic acid (BNA)
  modified_base 18: mod_base = OTHER; note = bicyclic nucleic acid (BNA)
  source 1..18: mol_type = other DNA
agtcggtaagttctgtcc

SEQ ID NO: 6856 - DNA, 18 bp, synthetic construct
  misc_feature 1..18: note = Description of Artificial Sequence: Synthetic Antisense oligonucleotide
  modified_base 1: mod_base = OTHER; note = bicyclic nucleic acid (BNA)
  modified_base 18: mod_base = OTHER; note = bicyclic nucleic acid (BNA)
  source 1..18: mol_type = other DNA
ctgtccaagcccggttga

SEQ ID NO: 6857 - DNA, 15 bp, synthetic construct
  misc_feature 1..15: note = Description of Artificial Sequence: Synthetic Antisense oligonucleotide
  modified_base 1: mod_base = OTHER; note = bicyclic nucleic acid (BNA)
  modified_base 15: mod_base = OTHER; note = bicyclic nucleic acid (BNA)
  source 1..15: mol_type = other DNA
taagttctgtccaag

SEQ ID NO: 6858 - DNA, 20 bp, synthetic construct
  misc_feature 1..20: note = Description of Artificial Sequence: Synthetic Antisense oligonucleotide
  modified_base 1: mod_base = OTHER; note = bicyclic nucleic acid (BNA)
  modified_base 20: mod_base = OTHER; note = bicyclic nucleic acid (BNA)
  source 1..20: mol_type = other DNA
ttctgtccaagcccggttga

SEQ ID NO: 6859 - DNA, 19 bp, synthetic construct
  misc_feature 1..19: note = Description of Artificial Sequence: Synthetic Antisense oligonucleotide
  modified_base 1: mod_base = OTHER; note = bicyclic nucleic acid (BNA)
  modified_base 19: mod_base = OTHER; note = bicyclic nucleic acid (BNA)
  source 1..19: mol_type = other DNA
ttctgtccaagcccggttg

SEQ ID NO: 6860 - DNA, 18 bp, synthetic construct
  misc_feature 1..18: note = Description of Artificial Sequence: Synthetic Antisense oligonucleotide
  modified_base 1: mod_base = OTHER; note = bicyclic nucleic acid (BNA)
  modified_base 18: mod_base = OTHER; note = bicyclic nucleic acid (BNA)
  source 1..18: mol_type = other DNA
ttctgtccaagcccggtt

SEQ ID NO: 6861 - DNA, 17 bp, synthetic construct
  misc_feature 1..17: note = Description of Artificial Sequence: Synthetic Antisense oligonucleotide
  modified_base 1: mod_base = OTHER; note = bicyclic nucleic acid (BNA)
  modified_base 17: mod_base = OTHER; note = bicyclic nucleic acid (BNA)
  source 1..17: mol_type = other DNA
ttctgtccaagcccggt

SEQ ID NO: 6862 - DNA, 16 bp, synthetic construct
  misc_feature 1..16: note = Description of Artificial Sequence: Synthetic Antisense oligonucleotide
  modified_base 1: mod_base = OTHER; note = bicyclic nucleic acid (BNA)
  modified_base 16: mod_base = OTHER; note = bicyclic nucleic acid (BNA)
  source 1..16: mol_type = other DNA
ttctgtccaagcccgg

SEQ ID NO: 6863 - DNA, 15 bp, synthetic construct
  misc_feature 1..15: note = Description of Artificial Sequence: Synthetic Antisense oligonucleotide
  modified_base 1: mod_base = OTHER; note = bicyclic nucleic acid (BNA)
  modified_base 15: mod_base = OTHER; note = bicyclic nucleic acid (BNA)
  source 1..15: mol_type = other DNA
ttctgtccaagcccg

SEQ ID NO: 6864 - DNA, 14 bp, synthetic construct
  misc_feature 1..14: note = Description of Artificial Sequence: Synthetic Antisense oligonucleotide
  modified_base 1: mod_base = OTHER; note = bicyclic nucleic acid (BNA)
  modified_base 14: mod_base = OTHER; note = bicyclic nucleic acid (BNA)
  source 1..14: mol_type = other DNA
ttctgtccaagccc

SEQ ID NO: 6865 - DNA, 13 bp, synthetic construct
  misc_feature 1..13: note = Description of Artificial Sequence: Synthetic Antisense oligonucleotide
  modified_base 1: mod_base = OTHER; note = bicyclic nucleic acid (BNA)
  modified_base 13: mod_base = OTHER; note = bicyclic nucleic acid (BNA)
  source 1..13: mol_type = other DNA
ttctgtccaagcc

SEQ ID NO: 6866 - DNA, 12 bp, synthetic construct
  misc_feature 1..12: note = Description of Artificial Sequence: Synthetic Antisense oligonucleotide
  modified_base 1: mod_base = OTHER; note = bicyclic nucleic acid (BNA)
  modified_base 12: mod_base = OTHER; note = bicyclic nucleic acid (BNA)
  source 1..12: mol_type = other DNA
ttctgtccaagc

SEQ ID NO: 6867 - DNA, 11 bp, synthetic construct
  misc_feature 1..11: note = Description of Artificial Sequence: Synthetic Antisense oligonucleotide
  modified_base 1: mod_base = OTHER; note = bicyclic nucleic acid (BNA)
  modified_base 11: mod_base = OTHER; note = bicyclic nucleic acid (BNA)
  source 1..11: mol_type = other DNA
ttctgtccaag

SEQ ID NO: 6868 - DNA, 10 bp, synthetic construct
  misc_feature 1..10: note = Description of Artificial Sequence: Synthetic Antisense oligonucleotide
  modified_base 1: mod_base = OTHER; note = bicyclic nucleic acid (BNA)
  modified_base 10: mod_base = OTHER; note = bicyclic nucleic acid (BNA)
  source 1..10: mol_type = other DNA
ttctgtccaa

SEQ ID NO: 6869-6870 - skipped (2 entries)

SEQ ID NO: 6871 - DNA, 19 bp, synthetic construct
  misc_feature 1..19: note = Description of Artificial Sequence: Synthetic Antisense oligonucleotide
  modified_base 1: mod_base = OTHER; note = bicyclic nucleic acid (BNA)
  modified_base 19: mod_base = OTHER; note = bicyclic nucleic acid (BNA)
  source 1..19: mol_type = other DNA
tctgtccaagcccggttga

SEQ ID NO: 6872 - DNA, 18 bp, synthetic construct
  misc_feature 1..18: note = Description of Artificial Sequence: Synthetic Antisense oligonucleotide
  modified_base 1: mod_base = OTHER; note = bicyclic nucleic acid (BNA)
  modified_base 18: mod_base = OTHER; note = bicyclic nucleic acid (BNA)
  source 1..18: mol_type = other DNA
tctgtccaagcccggttg

SEQ ID NO: 6873 - DNA, 17 bp, synthetic construct
  misc_feature 1..17: note = Description of Artificial Sequence: Synthetic Antisense oligonucleotide
  modified_base 1: mod_base = OTHER; note = bicyclic nucleic acid (BNA)
  modified_base 17: mod_base = OTHER; note = bicyclic nucleic acid (BNA)
  source 1..17: mol_type = other DNA
tctgtccaagcccggtt

SEQ ID NO: 6874 - DNA, 16 bp, synthetic construct
  misc_feature 1..16: note = Description of Artificial Sequence: Synthetic Antisense oligonucleotide
  modified_base 1: mod_base = OTHER; note = bicyclic nucleic acid (BNA)
  modified_base 16: mod_base = OTHER; note = bicyclic nucleic acid (BNA)
  source 1..16: mol_type = other DNA
tctgtccaagcccggt

SEQ ID NO: 6875 - DNA, 15 bp, synthetic construct
  misc_feature 1..15: note = Description of Artificial Sequence: Synthetic Antisense oligonucleotide
  modified_base 1: mod_base = OTHER; note = bicyclic nucleic acid (BNA)
  modified_base 15: mod_base = OTHER; note = bicyclic nucleic acid (BNA)
  source 1..15: mol_type = other DNA
tctgtccaagcccgg

SEQ ID NO: 6876 - DNA, 14 bp, synthetic construct
  misc_feature 1..14: note = Description of Artificial Sequence: Synthetic Antisense oligonucleotide
  modified_base 1: mod_base = OTHER; note = bicyclic nucleic acid (BNA)
  modified_base 14: mod_base = OTHER; note = bicyclic nucleic acid (BNA)
  source 1..14: mol_type = other DNA
tctgtccaagcccg

SEQ ID NO: 6877 - DNA, 13 bp, synthetic construct
  misc_feature 1..13: note = Description of Artificial Sequence: Synthetic Antisense oligonucleotide
  modified_base 1: mod_base = OTHER; note = bicyclic nucleic acid (BNA)
  modified_base 13: mod_base = OTHER; note = bicyclic nucleic acid (BNA)
  source 1..13: mol_type = other DNA
tctgtccaagccc

SEQ ID NO: 6878 - DNA, 12 bp, synthetic construct
  misc_feature 1..12: note = Description of Artificial Sequence: Synthetic Antisense oligonucleotide
  modified_base 1: mod_base = OTHER; note = bicyclic nucleic acid (BNA)
  modified_base 12: mod_base = OTHER; note = bicyclic nucleic acid (BNA)
  source 1..12: mol_type = other DNA
tctgtccaagcc

SEQ ID NO: 6879 - DNA, 11 bp, synthetic construct
  misc_feature 1..11: note = Description of Artificial Sequence: Synthetic Antisense oligonucleotide
  modified_base 1: mod_base = OTHER; note = bicyclic nucleic acid (BNA)
  modified_base 11: mod_base = OTHER; note = bicyclic nucleic acid (BNA)
  source 1..11: mol_type = other DNA
tctgtccaagc

SEQ ID NO: 6880 - DNA, 10 bp, synthetic construct
  misc_feature 1..10: note = Description of Artificial Sequence: Synthetic Antisense oligonucleotide
  modified_base 1: mod_base = OTHER; note = bicyclic nucleic acid (BNA)
  modified_base 10: mod_base = OTHER; note = bicyclic nucleic acid (BNA)
  source 1..10: mol_type = other DNA
tctgtccaag

SEQ ID NO: 6881-6882 - skipped (2 entries)

SEQ ID NO: 6883 - DNA, 17 bp, synthetic construct
  misc_feature 1..17: note = Description of Artificial Sequence: Synthetic Antisense oligonucleotide
  modified_base 1: mod_base = OTHER; note = bicyclic nucleic acid (BNA)
  modified_base 17: mod_base = OTHER; note = bicyclic nucleic acid (BNA)
  source 1..17: mol_type = other DNA
ctgtccaagcccggttg

SEQ ID NO: 6884 - DNA, 16 bp, synthetic construct
  misc_feature 1..16: note = Description of Artificial Sequence: Synthetic Antisense oligonucleotide
  modified_base 1: mod_base = OTHER; note = bicyclic nucleic acid (BNA)
  modified_base 16: mod_base = OTHER; note = bicyclic nucleic acid (BNA)
  source 1..16: mol_type = other DNA
ctgtccaagcccggtt

SEQ ID NO: 6885 - DNA, 15 bp, synthetic construct
  misc_feature 1..15: note = Description of Artificial Sequence: Synthetic Antisense oligonucleotide
  modified_base 1: mod_base = OTHER; note = bicyclic nucleic acid (BNA)
  modified_base 15: mod_base = OTHER; note = bicyclic nucleic acid (BNA)
  source 1..15: mol_type = other DNA
ctgtccaagcccggt

SEQ ID NO: 6886 - DNA, 14 bp, synthetic construct
  misc_feature 1..14: note = Description of Artificial Sequence: Synthetic Antisense oligonucleotide
  modified_base 1: mod_base = OTHER; note = bicyclic nucleic acid (BNA)
  modified_base 14: mod_base = OTHER; note = bicyclic nucleic acid (BNA)
  source 1..14: mol_type = other DNA
ctgtccaagcccgg

SEQ ID NO: 6887 - DNA, 13 bp, synthetic construct
  misc_feature 1..13: note = Description of Artificial Sequence: Synthetic Antisense oligonucleotide
  modified_base 1: mod_base = OTHER; note = bicyclic nucleic acid (BNA)
  modified_base 13: mod_base = OTHER; note = bicyclic nucleic acid (BNA)
  source 1..13: mol_type = other DNA
ctgtccaagcccg

SEQ ID NO: 6888 - DNA, 12 bp, synthetic construct
  misc_feature 1..12: note = Description of Artificial Sequence: Synthetic Antisense oligonucleotide
  modified_base 1: mod_base = OTHER; note = bicyclic nucleic acid (BNA)
  modified_base 12: mod_base = OTHER; note = bicyclic nucleic acid (BNA)
  source 1..12: mol_type = other DNA
ctgtccaagccc

SEQ ID NO: 6889 - DNA, 11 bp, synthetic construct
  misc_feature 1..11: note = Description of Artificial Sequence: Synthetic Antisense oligonucleotide
  modified_base 1: mod_base = OTHER; note = bicyclic nucleic acid (BNA)
  modified_base 11: mod_base = OTHER; note = bicyclic nucleic acid (BNA)
  source 1..11: mol_type = other DNA
ctgtccaagcc

SEQ ID NO: 6890 - DNA, 10 bp, synthetic construct
  misc_feature 1..10: note = Description of Artificial Sequence: Synthetic Antisense oligonucleotide
  modified_base 1: mod_base = OTHER; note = bicyclic nucleic acid (BNA)
  modified_base 10: mod_base = OTHER; note = bicyclic nucleic acid (BNA)
  source 1..10: mol_type = other DNA
ctgtccaagc

SEQ ID NO: 6891-6892 - skipped (2 entries)

SEQ ID NO: 6893 - DNA, 20 bp, synthetic construct
  misc_feature 1..20: note = Description of Artificial Sequence: Synthetic Antisense oligonucleotide
  modified_base 1: mod_base = OTHER; note = bicyclic nucleic acid (BNA)
  modified_base 20: mod_base = OTHER; note = bicyclic nucleic acid (BNA)
  source 1..20: mol_type = other DNA
gttctgtccaagcccggttg

SEQ ID NO: 6894 - DNA, 19 bp, synthetic construct
  misc_feature 1..19: note = Description of Artificial Sequence: Synthetic Antisense oligonucleotide
  modified_base 1: mod_base = OTHER; note = bicyclic nucleic acid (BNA)
  modified_base 19: mod_base = OTHER; note = bicyclic nucleic acid (BNA)
  source 1..19: mol_type = other DNA
gttctgtccaagcccggtt

SEQ ID NO: 6895 - DNA, 18 bp, synthetic construct
  misc_feature 1..18: note = Description of Artificial Sequence: Synthetic Antisense oligonucleotide
  modified_base 1: mod_base = OTHER; note = bicyclic nucleic acid (BNA)
  modified_base 18: mod_base = OTHER; note = bicyclic nucleic acid (BNA)
  source 1..18: mol_type = other DNA
gttctgtccaagcccggt

SEQ ID NO: 6896 - DNA, 17 bp, synthetic construct
  misc_feature 1..17: note = Description of Artificial Sequence: Synthetic Antisense oligonucleotide
  modified_base 1: mod_base = OTHER; note = bicyclic nucleic acid (BNA)
  modified_base 17: mod_base = OTHER; note = bicyclic nucleic acid (BNA)
  source 1..17: mol_type = other DNA
gttctgtccaagcccgg

SEQ ID NO: 6897 - DNA, 16 bp, synthetic construct
  misc_feature 1..16: note = Description of Artificial Sequence: Synthetic Antisense oligonucleotide
  modified_base 1: mod_base = OTHER; note = bicyclic nucleic acid (BNA)
  modified_base 16: mod_base = OTHER; note = bicyclic nucleic acid (BNA)
  source 1..16: mol_type = other DNA
gttctgtccaagcccg

SEQ ID NO: 6898 - DNA, 15 bp, synthetic construct
  misc_feature 1..15: note = Description of Artificial Sequence: Synthetic Antisense oligonucleotide
  modified_base 1: mod_base = OTHER; note = bicyclic nucleic acid (BNA)
  modified_base 15: mod_base = OTHER; note = bicyclic nucleic acid (BNA)
  source 1..15: mol_type = other DNA
gttctgtccaagccc

SEQ ID NO: 6899 - DNA, 14 bp, synthetic construct
  misc_feature 1..14: note = Description of Artificial Sequence: Synthetic Antisense oligonucleotide
  modified_base 1: mod_base = OTHER; note = bicyclic nucleic acid (BNA)
  modified_base 14: mod_base = OTHER; note = bicyclic nucleic acid (BNA)
  source 1..14: mol_type = other DNA
gttctgtccaagcc

SEQ ID NO: 6900 - DNA, 13 bp, synthetic construct
  misc_feature 1..13: note = Description of Artificial Sequence: Synthetic Antisense oligonucleotide
  modified_base 1: mod_base = OTHER; note = bicyclic nucleic acid (BNA)
  modified_base 13: mod_base = OTHER; note = bicyclic nucleic acid (BNA)
  source 1..13: mol_type = other DNA
gttctgtccaagc

SEQ ID NO: 6901 - DNA, 12 bp, synthetic construct
  misc_feature 1..12: note = Description of Artificial Sequence: Synthetic Antisense oligonucleotide
  modified_base 1: mod_base = OTHER; note = bicyclic nucleic acid (BNA)
  modified_base 12: mod_base = OTHER; note = bicyclic nucleic acid (BNA)
  source 1..12: mol_type = other DNA
gttctgtccaag

SEQ ID NO: 6902 - DNA, 11 bp, synthetic construct
  misc_feature 1..11: note = Description of Artificial Sequence: Synthetic Antisense oligonucleotide
  modified_base 1: mod_base = OTHER; note = bicyclic nucleic acid (BNA)
  modified_base 11: mod_base = OTHER; note = bicyclic nucleic acid (BNA)
  source 1..11: mol_type = other DNA
gttctgtccaa

SEQ ID NO: 6903 - DNA, 10 bp, synthetic construct
  misc_feature 1..10: note = Description of Artificial Sequence: Synthetic Antisense oligonucleotide
  modified_base 1: mod_base = OTHER; note = bicyclic nucleic acid (BNA)
  modified_base 10: mod_base = OTHER; note = bicyclic nucleic acid (BNA)
  source 1..10: mol_type = other DNA
gttctgtcca

SEQ ID NO: 6904-6905 - skipped (2 entries)

SEQ ID NO: 6906 - DNA, 20 bp, synthetic construct
  misc_feature 1..20: note = Description of Artificial Sequence: Synthetic Antisense oligonucleotide
  modified_base 1: mod_base = OTHER; note = bicyclic nucleic acid (BNA)
  modified_base 20: mod_base = OTHER; note = bicyclic nucleic acid (BNA)
  source 1..20: mol_type = other DNA
agttctgtccaagcccggtt

SEQ ID NO: 6907 - DNA, 19 bp, synthetic construct
  misc_feature 1..19: note = Description of Artificial Sequence: Synthetic Antisense oligonucleotide
  modified_base 1: mod_base = OTHER; note = bicyclic nucleic acid (BNA)
  modified_base 19: mod_base = OTHER; note = bicyclic nucleic acid (BNA)
  source 1..19: mol_type = other DNA
agttctgtccaagcccggt

SEQ ID NO: 6908 - DNA, 18 bp, synthetic construct
  misc_feature 1..18: note = Description of Artificial Sequence: Synthetic Antisense oligonucleotide
  modified_base 1: mod_base = OTHER; note = bicyclic nucleic acid (BNA)
  modified_base 18: mod_base = OTHER; note = bicyclic nucleic acid (BNA)
  source 1..18: mol_type = other DNA
agttctgtccaagcccgg

SEQ ID NO: 6909 - DNA, 17 bp, synthetic construct
  misc_feature 1..17: note = Description of Artificial Sequence: Synthetic Antisense oligonucleotide
  modified_base 1: mod_base = OTHER; note = bicyclic nucleic acid (BNA)
  modified_base 17: mod_base = OTHER; note = bicyclic nucleic acid (BNA)
  source 1..17: mol_type = other DNA
agttctgtccaagcccg

SEQ ID NO: 6910 - DNA, 16 bp, synthetic construct
  misc_feature 1..16: note = Description of Artificial Sequence: Synthetic Antisense oligonucleotide
  modified_base 1: mod_base = OTHER; note = bicyclic nucleic acid (BNA)
  modified_base 16: mod_base = OTHER; note = bicyclic nucleic acid (BNA)
  source 1..16: mol_type = other DNA
agttctgtccaagccc

SEQ ID NO: 6911 - DNA, 15 bp, synthetic construct
  misc_feature 1..15: note = Description of Artificial Sequence: Synthetic Antisense oligonucleotide
  modified_base 1: mod_base = OTHER; note = bicyclic nucleic acid (BNA)
  modified_base 15: mod_base = OTHER; note = bicyclic nucleic acid (BNA)
  source 1..15: mol_type = other DNA
agttctgtccaagcc

SEQ ID NO: 6912 - DNA, 14 bp, synthetic construct
  misc_feature 1..14: note = Description of Artificial Sequence: Synthetic Antisense oligonucleotide
  modified_base 1: mod_base = OTHER; note = bicyclic nucleic acid (BNA)
  modified_base 14: mod_base = OTHER; note = bicyclic nucleic acid (BNA)
  source 1..14: mol_type = other DNA
agttctgtccaagc

SEQ ID NO: 6913 - DNA, 13 bp, synthetic construct
  misc_feature 1..13: note = Description of Artificial Sequence: Synthetic Antisense oligonucleotide
  modified_base 1: mod_base = OTHER; note = bicyclic nucleic acid (BNA)
  modified_base 13: mod_base = OTHER; note = bicyclic nucleic acid (BNA)
  source 1..13: mol_type = other DNA
agttctgtccaag

SEQ ID NO: 6914 - DNA, 12 bp, synthetic construct
  misc_feature 1..12: note = Description of Artificial Sequence: Synthetic Antisense oligonucleotide
  modified_base 1: mod_base = OTHER; note = bicyclic nucleic acid (BNA)
  modified_base 12: mod_base = OTHER; note = bicyclic nucleic acid (BNA)
  source 1..12: mol_type = other DNA
agttctgtccaa

SEQ ID NO: 6915 - DNA, 11 bp, synthetic construct
  misc_feature 1..11: note = Description of Artificial Sequence: Synthetic Antisense oligonucleotide
  modified_base 1: mod_base = OTHER; note = bicyclic nucleic acid (BNA)
  modified_base 11: mod_base = OTHER; note = bicyclic nucleic acid (BNA)
  source 1..11: mol_type = other DNA
agttctgtcca

SEQ ID NO: 6916 - DNA, 10 bp, synthetic construct
  misc_feature 1..10: note = Description of Artificial Sequence: Synthetic Antisense oligonucleotide
  modified_base 1: mod_base = OTHER; note = bicyclic nucleic acid (BNA)
  modified_base 10: mod_base = OTHER; note = bicyclic nucleic acid (BNA)
  source 1..10: mol_type = other DNA
agttctgtcc

SEQ ID NO: 6917-6918 - skipped (2 entries)

SEQ ID NO: 6919 - DNA, 20 bp, synthetic construct
  misc_feature 1..20: note = Description of Artificial Sequence: Synthetic Antisense oligonucleotide
  modified_base 1: mod_base = OTHER; note = bicyclic nucleic acid (BNA)
  modified_base 20: mod_base = OTHER; note = bicyclic nucleic acid (BNA)
  source 1..20: mol_type = other DNA
aagttctgtccaagcccggt

SEQ ID NO: 6920 - DNA, 19 bp, synthetic construct
  misc_feature 1..19: note = Description of Artificial Sequence: Synthetic Antisense oligonucleotide
  modified_base 1: mod_base = OTHER; note = bicyclic nucleic acid (BNA)
  modified_base 19: mod_base = OTHER; note = bicyclic nucleic acid (BNA)
  source 1..19: mol_type = other DNA
aagttctgtccaagcccgg

SEQ ID NO: 6921 - DNA, 18 bp, synthetic construct
  misc_feature 1..18: note = Description of Artificial Sequence: Synthetic Antisense oligonucleotide
  modified_base 1: mod_base = OTHER; note = bicyclic nucleic acid (BNA)
  modified_base 18: mod_base = OTHER; note = bicyclic nucleic acid (BNA)
  source 1..18: mol_type = other DNA
aagttctgtccaagcccg

SEQ ID NO: 6922 - DNA, 17 bp, synthetic construct
  misc_feature 1..17: note = Description of Artificial Sequence: Synthetic Antisense oligonucleotide
  modified_base 1: mod_base = OTHER; note = bicyclic nucleic acid (BNA)
  modified_base 17: mod_base = OTHER; note = bicyclic nucleic acid (BNA)
  source 1..17: mol_type = other DNA
aagttctgtccaagccc

SEQ ID NO: 6923 - DNA, 16 bp, synthetic construct
  misc_feature 1..16: note = Description of Artificial Sequence: Synthetic Antisense oligonucleotide
  modified_base 1: mod_base = OTHER; note = bicyclic nucleic acid (BNA)
  modified_base 16: mod_base = OTHER; note = bicyclic nucleic acid (BNA)
  source 1..16: mol_type = other DNA
aagttctgtccaagcc

SEQ ID NO: 6924 - DNA, 15 bp, synthetic construct
  misc_feature 1..15: note = Description of Artificial Sequence: Synthetic Antisense oligonucleotide
  modified_base 1: mod_base = OTHER; note = bicyclic nucleic acid (BNA)
  modified_base 15: mod_base = OTHER; note = bicyclic nucleic acid (BNA)
  source 1..15: mol_type = other DNA
aagttctgtccaagc

SEQ ID NO: 6925 - DNA, 14 bp, synthetic construct
  misc_feature 1..14: note = Description of Artificial Sequence: Synthetic Antisense oligonucleotide
  modified_base 1: mod_base = OTHER; note = bicyclic nucleic acid (BNA)
  modified_base 14: mod_base = OTHER; note = bicyclic nucleic acid (BNA)
  source 1..14: mol_type = other DNA
aagttctgtccaag

SEQ ID NO: 6926 - DNA, 13 bp, synthetic construct
  misc_feature 1..13: note = Description of Artificial Sequence: Synthetic Antisense oligonucleotide
  modified_base 1: mod_base = OTHER; note = bicyclic nucleic acid (BNA)
  modified_base 13: mod_base = OTHER; note = bicyclic nucleic acid (BNA)
  source 1..13: mol_type = other DNA
aagttctgtccaa

SEQ ID NO: 6927 - DNA, 12 bp, synthetic construct
  misc_feature 1..12: note = Description of Artificial Sequence: Synthetic Antisense oligonucleotide
  modified_base 1: mod_base = OTHER; note = bicyclic nucleic acid (BNA)
  modified_base 12: mod_base = OTHER; note = bicyclic nucleic acid (BNA)
  source 1..12: mol_type = other DNA
aagttctgtcca

SEQ ID NO: 6928 - DNA, 11 bp, synthetic construct
  misc_feature 1..11: note = Description of Artificial Sequence: Synthetic Antisense oligonucleotide
  modified_base 1: mod_base = OTHER; note = bicyclic nucleic acid (BNA)
  modified_base 11: mod_base = OTHER; note = bicyclic nucleic acid (BNA)
  source 1..11: mol_type = other DNA
aagttctgtcc

SEQ ID NO: 6929 - DNA, 10 bp, synthetic construct
  misc_feature 1..10: note = Description of Artificial Sequence: Synthetic Antisense oligonucleotide
  modified_base 1: mod_base = OTHER; note = bicyclic nucleic acid (BNA)
  modified_base 10: mod_base = OTHER; note = bicyclic nucleic acid (BNA)
  source 1..10: mol_type = other DNA
aagttctgtc

SEQ ID NO: 6930-6931 - skipped (2 entries)

SEQ ID NO: 6932 - DNA, 20 bp, synthetic construct
  misc_feature 1..20: note = Description of Artificial Sequence: Synthetic Antisense oligonucleotide
  modified_base 1: mod_base = OTHER; note = bicyclic nucleic acid (BNA)
  modified_base 20: mod_base = OTHER; note = bicyclic nucleic acid (BNA)
  source 1..20: mol_type = other DNA
taagttctgtccaagcccgg

SEQ ID NO: 6933 - DNA, 19 bp, synthetic construct
  misc_feature 1..19: note = Description of Artificial Sequence: Synthetic Antisense oligonucleotide
  modified_base 1: mod_base = OTHER; note = bicyclic nucleic acid (BNA)
  modified_base 19: mod_base = OTHER; note = bicyclic nucleic acid (BNA)
  source 1..19: mol_type = other DNA
taagttctgtccaagcccg

SEQ ID NO: 6934 - DNA, 18 bp, synthetic construct
  misc_feature 1..18: note = Description of Artificial Sequence: Synthetic Antisense oligonucleotide
  modified_base 1: mod_base = OTHER; note = bicyclic nucleic acid (BNA)
  modified_base 18: mod_base = OTHER; note = bicyclic nucleic acid (BNA)
  source 1..18: mol_type = other DNA
taagttctgtccaagccc

SEQ ID NO: 6935 - DNA, 17 bp, synthetic construct
  misc_feature 1..17: note = Description of Artificial Sequence: Synthetic Antisense oligonucleotide
  modified_base 1: mod_base = OTHER; note = bicyclic nucleic acid (BNA)
  modified_base 17: mod_base = OTHER; note = bicyclic nucleic acid (BNA)
  source 1..17: mol_type = other DNA
taagttctgtccaagcc

SEQ ID NO: 6936 - DNA, 16 bp, synthetic construct
  misc_feature 1..16: note = Description of Artificial Sequence: Synthetic Antisense oligonucleotide
  modified_base 1: mod_base = OTHER; note = bicyclic nucleic acid (BNA)
  modified_base 16: mod_base = OTHER; note = bicyclic nucleic acid (BNA)
  source 1..16: mol_type = other DNA
taagttctgtccaagc

SEQ ID NO: 6937 - DNA, 14 bp, synthetic construct
  misc_feature 1..14: note = Description of Artificial Sequence: Synthetic Antisense oligonucleotide
  modified_base 1: mod_base = OTHER; note = bicyclic nucleic acid (BNA)
  modified_base 14: mod_base = OTHER; note = bicyclic nucleic acid (BNA)
  source 1..14: mol_type = other DNA
taagttctgtccaa

SEQ ID NO: 6938 - DNA, 13 bp, synthetic construct
  misc_feature 1..13: note = Description of Artificial Sequence: Synthetic Antisense oligonucleotide
  modified_base 1: mod_base = OTHER; note = bicyclic nucleic acid (BNA)
  modified_base 13: mod_base = OTHER; note = bicyclic nucleic acid (BNA)
  source 1..13: mol_type = other DNA
taagttctgtcca

SEQ ID NO: 6939 - DNA, 12 bp, synthetic construct
  misc_feature 1..12: note = Description of Artificial Sequence: Synthetic Antisense oligonucleotide
  modified_base 1: mod_base = OTHER; note = bicyclic nucleic acid (BNA)
  modified_base 12: mod_base = OTHER; note = bicyclic nucleic acid (BNA)
  source 1..12: mol_type = other DNA
taagttctgtcc

SEQ ID NO: 6940 - DNA, 11 bp, synthetic construct
  misc_feature 1..11: note = Description of Artificial Sequence: Synthetic Antisense oligonucleotide
  modified_base 1: mod_base = OTHER; note = bicyclic nucleic acid (BNA)
  modified_base 11: mod_base = OTHER; note = bicyclic nucleic acid (BNA)
  source 1..11: mol_type = other DNA
taagttctgtc

SEQ ID NO: 6941 - DNA, 10 bp, synthetic construct
  misc_feature 1..10: note = Description of Artificial Sequence: Synthetic Antisense oligonucleotide
  modified_base 1: mod_base = OTHER; note = bicyclic nucleic acid (BNA)
  modified_base 10: mod_base = OTHER; note = bicyclic nucleic acid (BNA)
  source 1..10: mol_type = other DNA
taagttctgt

SEQ ID NO: 6942-6943 - skipped (2 entries)

SEQ ID NO: 6944 - DNA, 20 bp, synthetic construct
  misc_feature 1..20: note = Description of Artificial Sequence: Synthetic Antisense oligonucleotide
  modified_base 1: mod_base = OTHER; note = bicyclic nucleic acid (BNA)
  modified_base 20: mod_base = OTHER; note = bicyclic nucleic acid (BNA)
  source 1..20: mol_type = other DNA
gtaagttctgtccaagcccg

SEQ ID NO: 6945 - DNA, 19 bp, synthetic construct
  misc_feature 1..19: note = Description of Artificial Sequence: Synthetic Antisense oligonucleotide
  modified_base 1: mod_base = OTHER; note = bicyclic nucleic acid (BNA)
  modified_base 19: mod_base = OTHER; note = bicyclic nucleic acid (BNA)
  source 1..19: mol_type = other DNA
gtaagttctgtccaagccc

SEQ ID NO: 6946 - DNA, 17 bp, synthetic construct
  misc_feature 1..17: note = Description of Artificial Sequence: Synthetic Antisense oligonucleotide
  modified_base 1: mod_base = OTHER; note = bicyclic nucleic acid (BNA)
  modified_base 17: mod_base = OTHER; note = bicyclic nucleic acid (BNA)
  source 1..17: mol_type = other DNA
gtaagttctgtccaagc

SEQ ID NO: 6947 - DNA, 16 bp, synthetic construct
  misc_feature 1..16: note = Description of Artificial Sequence: Synthetic Antisense oligonucleotide
  modified_base 1: mod_base = OTHER; note = bicyclic nucleic acid (BNA)
  modified_base 16: mod_base = OTHER; note = bicyclic nucleic acid (BNA)
  source 1..16: mol_type = other DNA
gtaagttctgtccaag

SEQ ID NO: 6948 - DNA, 15 bp, synthetic construct
  misc_feature 1..15: note = Description of Artificial Sequence: Synthetic Antisense oligonucleotide
  modified_base 1: mod_base = OTHER; note = bicyclic nucleic acid (BNA)
  modified_base 15: mod_base = OTHER; note = bicyclic nucleic acid (BNA)
  source 1..15: mol_type = other DNA
gtaagttctgtccaa

SEQ ID NO: 6949 - DNA, 14 bp, synthetic construct
  misc_feature 1..14: note = Description of Artificial Sequence: Synthetic Antisense oligonucleotide
  modified_base 1: mod_base = OTHER; note = bicyclic nucleic acid (BNA)
  modified_base 14: mod_base = OTHER; note = bicyclic nucleic acid (BNA)
  source 1..14: mol_type = other DNA
gtaagttctgtcca

SEQ ID NO: 6950 - DNA, 13 bp, synthetic construct
  misc_feature 1..13: note = Description of Artificial Sequence: Synthetic Antisense oligonucleotide
  modified_base 1: mod_base = OTHER; note = bicyclic nucleic acid (BNA)
  modified_base 13: mod_base = OTHER; note = bicyclic nucleic acid (BNA)
  source 1..13: mol_type = other DNA
gtaagttctgtcc

SEQ ID NO: 6951 - DNA, 12 bp, synthetic construct
  misc_feature 1..12: note = Description of Artificial Sequence: Synthetic Antisense oligonucleotide
  modified_base 1: mod_base = OTHER; note = bicyclic nucleic acid (BNA)
  modified_base 12: mod_base = OTHER; note = bicyclic nucleic acid (BNA)
  source 1..12: mol_type = other DNA
gtaagttctgtc

SEQ ID NO: 6952 - DNA, 11 bp, synthetic construct
  misc_feature 1..11: note = Description of Artificial Sequence: Synthetic Antisense oligonucleotide
  modified_base 1: mod_base = OTHER; note = bicyclic nucleic acid (BNA)
  modified_base 11: mod_base = OTHER; note = bicyclic nucleic acid (BNA)
  source 1..11: mol_type = other DNA
gtaagttctgt

SEQ ID NO: 6953 - DNA, 10 bp, synthetic construct
  misc_feature 1..10: note = Description of Artificial Sequence: Synthetic Antisense oligonucleotide
  modified_base 1: mod_base = OTHER; note = bicyclic nucleic acid (BNA)
  modified_base 10: mod_base = OTHER; note = bicyclic nucleic acid (BNA)
  source 1..10: mol_type = other DNA
gtaagttctg

SEQ ID NO: 6954-6955 - skipped (2 entries)

SEQ ID NO: 6956 - DNA, 20 bp, synthetic construct
  misc_feature 1..20: note = Description of Artificial Sequence: Synthetic Antisense oligonucleotide
  modified_base 1: mod_base = OTHER; note = bicyclic nucleic acid (BNA)
  modified_base 20: mod_base = OTHER; note = bicyclic nucleic acid (BNA)
  source 1..20: mol_type = other DNA
ggtaagttctgtccaagccc

SEQ ID NO: 6957 - DNA, 19 bp, synthetic construct
  misc_feature 1..19: note = Description of Artificial Sequence: Synthetic Antisense oligonucleotide
  modified_base 1: mod_base = OTHER; note = bicyclic nucleic acid (BNA)
  modified_base 19: mod_base = OTHER; note = bicyclic nucleic acid (BNA)
  source 1..19: mol_type = other DNA
ggtaagttctgtccaagcc

SEQ ID NO: 6958 - DNA, 17 bp, synthetic construct
  misc_feature 1..17: note = Description of Artificial Sequence: Synthetic Antisense oligonucleotide
  modified_base 1: mod_base = OTHER; note = bicyclic nucleic acid (BNA)
  modified_base 17: mod_base = OTHER; note = bicyclic nucleic acid (BNA)
  source 1..17: mol_type = other DNA
ggtaagttctgtccaag

SEQ ID NO: 6959 - DNA, 16 bp, synthetic construct
  misc_feature 1..16: note = Description of Artificial Sequence: Synthetic Antisense oligonucleotide
  modified_base 1: mod_base = OTHER; note = bicyclic nucleic acid (BNA)
  modified_base 16: mod_base = OTHER; note = bicyclic nucleic acid (BNA)
  source 1..16: mol_type = other DNA
ggtaagttctgtccaa

SEQ ID NO: 6960 - DNA, 15 bp, synthetic construct
  misc_feature 1..15: note = Description of Artificial Sequence: Synthetic Antisense oligonucleotide
  modified_base 1: mod_base = OTHER; note = bicyclic nucleic acid (BNA)
  modified_base 15: mod_base = OTHER; note = bicyclic nucleic acid (BNA)
  source 1..15: mol_type = other DNA
ggtaagttctgtcca

SEQ ID NO: 6961 - DNA, 14 bp, synthetic construct
  misc_feature 1..14: note = Description of Artificial Sequence: Synthetic Antisense oligonucleotide
  modified_base 1: mod_base = OTHER; note = bicyclic nucleic acid (BNA)
  modified_base 14: mod_base = OTHER; note = bicyclic nucleic acid (BNA)
  source 1..14: mol_type = other DNA
ggtaagttctgtcc

SEQ ID NO: 6962 - DNA, 13 bp, synthetic construct
  misc_feature 1..13: note = Description of Artificial Sequence: Synthetic Antisense oligonucleotide
  modified_base 1: mod_base = OTHER; note = bicyclic nucleic acid (BNA)
  modified_base 13: mod_base = OTHER; note = bicyclic nucleic acid (BNA)
  source 1..13: mol_type = other DNA
ggtaagttctgtc

SEQ ID NO: 6963 - DNA, 12 bp, synthetic construct
  misc_feature 1..12: note = Description of Artificial Sequence: Synthetic Antisense oligonucleotide
  modified_base 1: mod_base = OTHER; note = bicyclic nucleic acid (BNA)
  modified_base 12: mod_base = OTHER; note = bicyclic nucleic acid (BNA)
  source 1..12: mol_type = other DNA
ggtaagttctgt

SEQ ID NO: 6964 - DNA, 11 bp, synthetic construct
  misc_feature 1..11: note = Description of Artificial Sequence: Synthetic Antisense oligonucleotide
  modified_base 1: mod_base = OTHER; note = bicyclic nucleic acid (BNA)
  modified_base 11: mod_base = OTHER; note = bicyclic nucleic acid (BNA)
  source 1..11: mol_type = other DNA
ggtaagttctg

SEQ ID NO: 6965 - DNA, 10 bp, synthetic construct
  misc_feature 1..10: note = Description of Artificial Sequence: Synthetic Antisense oligonucleotide
  modified_base 1: mod_base = OTHER; note = bicyclic nucleic acid (BNA)
  modified_base 10: mod_base = OTHER; note = bicyclic nucleic acid (BNA)
  source 1..10: mol_type = other DNA
ggtaagttct

SEQ ID NO: 6966-6967 - skipped (2 entries)

SEQ ID NO: 6968 - DNA, 20 bp, synthetic construct
  misc_feature 1..20: note = Description of Artificial Sequence: Synthetic Antisense oligonucleotide
  modified_base 1: mod_base = OTHER; note = bicyclic nucleic acid (BNA)
  modified_base 20: mod_base = OTHER; note = bicyclic nucleic acid (BNA)
  source 1..20: mol_type = other DNA
cggtaagttctgtccaagcc

SEQ ID NO: 6969 - DNA, 19 bp, synthetic construct
  misc_feature 1..19: note = Description of Artificial Sequence: Synthetic Antisense oligonucleotide
  modified_base 1: mod_base = OTHER; note = bicyclic nucleic acid (BNA)
  modified_base 19: mod_base = OTHER; note = bicyclic nucleic acid (BNA)
  source 1..19: mol_type = other DNA
cggtaagttctgtccaagc

SEQ ID NO: 6970 - DNA, 18 bp, synthetic construct
  misc_feature 1..18: note = Description of Artificial Sequence: Synthetic Antisense oligonucleotide
  modified_base 1: mod_base = OTHER; note = bicyclic nucleic acid (BNA)
  modified_base 18: mod_base = OTHER; note = bicyclic nucleic acid (BNA)
  source 1..18: mol_type = other DNA
cggtaagttctgtccaag

SEQ ID NO: 6971 - DNA, 17 bp, synthetic construct
  misc_feature 1..17: note = Description of Artificial Sequence: Synthetic Antisense oligonucleotide
  modified_base 1: mod_base = OTHER; note = bicyclic nucleic acid (BNA)
  modified_base 17: mod_base = OTHER; note = bicyclic nucleic acid (BNA)
  source 1..17: mol_type = other DNA
cggtaagttctgtccaa

SEQ ID NO: 6972 - DNA, 16 bp, synthetic construct
  misc_feature 1..16: note = Description of Artificial Sequence: Synthetic Antisense oligonucleotide
  modified_base 1: mod_base = OTHER; note = bicyclic nucleic acid (BNA)
  modified_base 16: mod_base = OTHER; note = bicyclic nucleic acid (BNA)
  source 1..16: mol_type = other DNA
cggtaagttctgtcca

SEQ ID NO: 6973 - DNA, 15 bp, synthetic construct
  misc_feature 1..15: note = Description of Artificial Sequence: Synthetic Antisense oligonucleotide
  modified_base 1: mod_base = OTHER; note = bicyclic nucleic acid (BNA)
  modified_base 15: mod_base = OTHER; note = bicyclic nucleic acid (BNA)
  source 1..15: mol_type = other DNA
cggtaagttctgtcc

SEQ ID NO: 6974 - DNA, 14 bp, synthetic construct
  misc_feature 1..14: note = Description of Artificial Sequence: Synthetic Antisense oligonucleotide
  modified_base 1: mod_base = OTHER; note = bicyclic nucleic acid (BNA)
  modified_base 14: mod_base = OTHER; note = bicyclic nucleic acid (BNA)
  source 1..14: mol_type = other DNA
cggtaagttctgtc

SEQ ID NO: 6975 - DNA, 13 bp, synthetic construct
  misc_feature 1..13: note = Description of Artificial Sequence: Synthetic Antisense oligonucleotide
  modified_base 1: mod_base = OTHER; note = bicyclic nucleic acid (BNA)
  modified_base 13: mod_base = OTHER; note = bicyclic nucleic acid (BNA)
  source 1..13: mol_type = other DNA
cggtaagttctgt

SEQ ID NO: 6976 - DNA, 12 bp, synthetic construct
  misc_feature 1..12: note = Description of Artificial Sequence: Synthetic Antisense oligonucleotide
  modified_base 1: mod_base = OTHER; note = bicyclic nucleic acid (BNA)
  modified_base 12: mod_base = OTHER; note = bicyclic nucleic acid (BNA)
  source 1..12: mol_type = other DNA
cggtaagttctg

SEQ ID NO: 6977 - DNA, 11 bp, synthetic construct
  misc_feature 1..11: note = Description of Artificial Sequence: Synthetic Antisense oligonucleotide
  modified_base 1: mod_base = OTHER; note = bicyclic nucleic acid (BNA)
  modified_base 11: mod_base = OTHER; note = bicyclic nucleic acid (BNA)
  source 1..11: mol_type = other DNA
cggtaagttct

SEQ ID NO: 6978 - DNA, 10 bp, synthetic construct
  misc_feature 1..10: note = Description of Artificial Sequence: Synthetic Antisense oligonucleotide
  modified_base 1: mod_base = OTHER; note = bicyclic nucleic acid (BNA)
  modified_base 10: mod_base = OTHER; note = bicyclic nucleic acid (BNA)
  source 1..10: mol_type = other DNA
cggtaagttc

SEQ ID NO: 6979-6980 - skipped (2 entries)

SEQ ID NO: 6981 - DNA, 20 bp, synthetic construct
  misc_feature 1..20: note = Description of Artificial Sequence: Synthetic Antisense oligonucleotide
  modified_base 1: mod_base = OTHER; note = bicyclic nucleic acid (BNA)
  modified_base 20: mod_base = OTHER; note = bicyclic nucleic acid (BNA)
  source 1..20: mol_type = other DNA
tcggtaagttctgtccaagc

SEQ ID NO: 6982 - DNA, 19 bp, synthetic construct
  misc_feature 1..19: note = Description of Artificial Sequence: Synthetic Antisense oligonucleotide
  modified_base 1: mod_base = OTHER; note = bicyclic nucleic acid (BNA)
  modified_base 19: mod_base = OTHER; note = bicyclic nucleic acid (BNA)
  source 1..19: mol_type = other DNA
tcggtaagttctgtccaag

SEQ ID NO: 6983 - DNA, 18 bp, synthetic construct
  misc_feature 1..18: note = Description of Artificial Sequence: Synthetic Antisense oligonucleotide
  modified_base 1: mod_base = OTHER; note = bicyclic nucleic acid (BNA)
  modified_base 18: mod_base = OTHER; note = bicyclic nucleic acid (BNA)
  source 1..18: mol_type = other DNA
tcggtaagttctgtccaa

SEQ ID NO: 6984 - DNA, 17 bp, synthetic construct
  misc_feature 1..17: note = Description of Artificial Sequence: Synthetic Antisense oligonucleotide
  modified_base 1: mod_base = OTHER; note = bicyclic nucleic acid (BNA)
  modified_base 17: mod_base = OTHER; note = bicyclic nucleic acid (BNA)
  source 1..17: mol_type = other DNA
tcggtaagttctgtcca

SEQ ID NO: 6985 - DNA, 16 bp, synthetic construct
  misc_feature 1..16: note = Description of Artificial Sequence: Synthetic Antisense oligonucleotide
  modified_base 1: mod_base = OTHER; note = bicyclic nucleic acid (BNA)
  modified_base 16: mod_base = OTHER; note = bicyclic nucleic acid (BNA)
  source 1..16: mol_type = other DNA
tcggtaagttctgtcc

SEQ ID NO: 6986 - DNA, 15 bp, synthetic construct
  misc_feature 1..15: note = Description of Artificial Sequence: Synthetic Antisense oligonucleotide
  modified_base 1: mod_base = OTHER; note = bicyclic nucleic acid (BNA)
  modified_base 15: mod_base = OTHER; note = bicyclic nucleic acid (BNA)
  source 1..15: mol_type = other DNA
tcggtaagttctgtc

SEQ ID NO: 6987 - DNA, 14 bp, synthetic construct
  misc_feature 1..14: note = Description of Artificial Sequence: Synthetic Antisense oligonucleotide
  modified_base 1: mod_base = OTHER; note = bicyclic nucleic acid (BNA)
  modified_base 14: mod_base = OTHER; note = bicyclic nucleic acid (BNA)
  source 1..14: mol_type = other DNA
tcggtaagttctgt

SEQ ID NO: 6988 - DNA, 13 bp, synthetic construct
  misc_feature 1..13: note = Description of Artificial Sequence: Synthetic Antisense oligonucleotide
  modified_base 1: mod_base = OTHER; note = bicyclic nucleic acid (BNA)
  modified_base 13: mod_base = OTHER; note = bicyclic nucleic acid (BNA)
  source 1..13: mol_type = other DNA
tcggtaagttctg

SEQ ID NO: 6989 - DNA, 12 bp, synthetic construct
  misc_feature 1..12: note = Description of Artificial Sequence: Synthetic Antisense oligonucleotide
  modified_base 1: mod_base = OTHER; note = bicyclic nucleic acid (BNA)
  modified_base 12: mod_base = OTHER; note = bicyclic nucleic acid (BNA)
  source 1..12: mol_type = other DNA
tcggtaagttct

SEQ ID NO: 6990 - DNA, 11 bp, synthetic construct
  misc_feature 1..11: note = Description of Artificial Sequence: Synthetic Antisense oligonucleotide
  modified_base 1: mod_base = OTHER; note = bicyclic nucleic acid (BNA)
  modified_base 11: mod_base = OTHER; note = bicyclic nucleic acid (BNA)
  source 1..11: mol_type = other DNA
tcggtaagttc

SEQ ID NO: 6991 - DNA, 10 bp, synthetic construct
  misc_feature 1..10: note = Description of Artificial Sequence: Synthetic Antisense oligonucleotide
  modified_base 1: mod_base = OTHER; note = bicyclic nucleic acid (BNA)
  modified_base 10: mod_base = OTHER; note = bicyclic nucleic acid (BNA)
  source 1..10: mol_type = other DNA
tcggtaagtt

SEQ ID NO: 6992 - skipped

SEQ ID NO: 6993 - DNA, 20 bp, synthetic construct
  misc_feature 1..20: note = Description of Artificial Sequence: Synthetic Antisense oligonucleotide
  modified_base 1: mod_base = OTHER; note = bicyclic nucleic acid (BNA)
  modified_base 20: mod_base = OTHER; note = bicyclic nucleic acid (BNA)
  source 1..20: mol_type = other DNA
gtcggtaagttctgtccaag

SEQ ID NO: 6994 - DNA, 19 bp, synthetic construct
  misc_feature 1..19: note = Description of Artificial Sequence: Synthetic Antisense oligonucleotide
  modified_base 1: mod_base = OTHER; note = bicyclic nucleic acid (BNA)
  modified_base 19: mod_base = OTHER; note = bicyclic nucleic acid (BNA)
  source 1..19: mol_type = other DNA
gtcggtaagttctgtccaa

SEQ ID NO: 6995 - DNA, 18 bp, synthetic construct
  misc_feature 1..18: note = Description of Artificial Sequence: Synthetic Antisense oligonucleotide
  modified_base 1: mod_base = OTHER; note = bicyclic nucleic acid (BNA)
  modified_base 18: mod_base = OTHER; note = bicyclic nucleic acid (BNA)
  source 1..18: mol_type = other DNA
gtcggtaagttctgtcca

SEQ ID NO: 6996 - DNA, 17 bp, synthetic construct
  misc_feature 1..17: note = Description of Artificial Sequence: Synthetic Antisense oligonucleotide
  modified_base 1: mod_base = OTHER; note = bicyclic nucleic acid (BNA)
  modified_base 17: mod_base = OTHER; note = bicyclic nucleic acid (BNA)
  source 1..17: mol_type = other DNA
gtcggtaagttctgtcc

SEQ ID NO: 6997 - DNA, 16 bp, synthetic construct
  misc_feature 1..16: note = Description of Artificial Sequence: Synthetic Antisense oligonucleotide
  modified_base 1: mod_base = OTHER; note = bicyclic nucleic acid (BNA)
  modified_base 16: mod_base = OTHER; note = bicyclic nucleic acid (BNA)
  source 1..16: mol_type = other DNA
gtcggtaagttctgtc

SEQ ID NO: 6998 - DNA, 15 bp, synthetic construct
  misc_feature 1..15: note = Description of Artificial Sequence: Synthetic Antisense oligonucleotide
  modified_base 1: mod_base = OTHER; note = bicyclic nucleic acid (BNA)
  modified_base 15: mod_base = OTHER; note = bicyclic nucleic acid (BNA)
  source 1..15: mol_type = other DNA
gtcggtaagttctgt

SEQ ID NO: 6999 - DNA, 14 bp, synthetic construct
  misc_feature 1..14: note = Description of Artificial Sequence: Synthetic Antisense oligonucleotide
  modified_base 1: mod_base = OTHER; note = bicyclic nucleic acid (BNA)
  modified_base 14: mod_base = OTHER; note = bicyclic nucleic acid (BNA)
  source 1..14: mol_type = other DNA
gtcggtaagttctg

SEQ ID NO: 7000 - DNA, 13 bp, synthetic construct
  misc_feature 1..13: note = Description of Artificial Sequence: Synthetic Antisense oligonucleotide
  modified_base 1: mod_base = OTHER; note = bicyclic nucleic acid (BNA)
  modified_base 13: mod_base = OTHER; note = bicyclic nucleic acid (BNA)
  source 1..13: mol_type = other DNA
gtcggtaagttct

SEQ ID NO: 7001 - DNA, 12 bp, synthetic construct
  misc_feature 1..12: note = Description of Artificial Sequence: Synthetic Antisense oligonucleotide
  modified_base 1: mod_base = OTHER; note = bicyclic nucleic acid (BNA)
  modified_base 12: mod_base = OTHER; note = bicyclic nucleic acid (BNA)
  source 1..12: mol_type = other DNA
gtcggtaagttc

SEQ ID NO: 7002 - DNA, 11 bp, synthetic construct
  misc_feature 1..11: note = Description of Artificial Sequence: Synthetic Antisense oligonucleotide
  modified_base 1: mod_base = OTHER; note = bicyclic nucleic acid (BNA)
  modified_base 11: mod_base = OTHER; note = bicyclic nucleic acid (BNA)
  source 1..11: mol_type = other DNA
gtcggtaagtt

SEQ ID NO: 7003 - DNA, 10 bp, synthetic construct
  misc_feature 1..10: note = Description of Artificial Sequence: Synthetic Antisense oligonucleotide
  modified_base 1: mod_base = OTHER; note = bicyclic nucleic acid (BNA)
  modified_base 10: mod_base = OTHER; note = bicyclic nucleic acid (BNA)
  source 1..10: mol_type = other DNA
gtcggtaagt

SEQ ID NO: 7004 - DNA, 20 bp, synthetic construct
  misc_feature 1..20: note = Description of Artificial Sequence: Synthetic Antisense oligonucleotide
  modified_base 1: mod_base = OTHER; note = bicyclic nucleic acid (BNA)
  modified_base 20: mod_base = OTHER; note = bicyclic nucleic acid (BNA)
  source 1..20: mol_type = other DNA
agtcggtaagttctgtccaa

SEQ ID NO: 7005 - DNA, 19 bp, synthetic construct
  misc_feature 1..19: note = Description of Artificial Sequence: Synthetic Antisense oligonucleotide
  modified_base 1: mod_base = OTHER; note = bicyclic nucleic acid (BNA)
  modified_base 19: mod_base = OTHER; note = bicyclic nucleic acid (BNA)
  source 1..19: mol_type = other DNA
agtcggtaagttctgtcca

SEQ ID NO: 7006 - DNA, 17 bp, synthetic construct
  misc_feature 1..17: note = Description of Artificial Sequence: Synthetic Antisense oligonucleotide
  modified_base 1: mod_base = OTHER; note = bicyclic nucleic acid (BNA)
  modified_base 17: mod_base = OTHER; note = bicyclic nucleic acid (BNA)
  source 1..17: mol_type = other DNA
agtcggtaagttctgtc

SEQ ID NO: 7007 - DNA, 16 bp, synthetic construct
  misc_feature 1..16: note = Description of Artificial Sequence: Synthetic Antisense oligonucleotide
  modified_base 1: mod_base = OTHER; note = bicyclic nucleic acid (BNA)
  modified_base 16: mod_base = OTHER; note = bicyclic nucleic acid (BNA)
  source 1..16: mol_type = other DNA
agtcggtaagttctgt

SEQ ID NO: 7008 - DNA, 15 bp, synthetic construct
  misc_feature 1..15: note = Description of Artificial Sequence: Synthetic Antisense oligonucleotide
  modified_base 1: mod_base = OTHER; note = bicyclic nucleic acid (BNA)
  modified_base 15: mod_base = OTHER; note = bicyclic nucleic acid (BNA)
  source 1..15: mol_type = other DNA
agtcggtaagttctg

SEQ ID NO: 7009 - DNA, 14 bp, synthetic construct
  misc_feature 1..14: note = Description of Artificial Sequence: Synthetic Antisense oligonucleotide
  modified_base 1: mod_base = OTHER; note = bicyclic nucleic acid (BNA)
  modified_base 14: mod_base = OTHER; note = bicyclic nucleic acid (BNA)
  source 1..14: mol_type = other DNA
agtcggtaagttct

SEQ ID NO: 7010 - DNA, 13 bp, synthetic construct
  misc_feature 1..13: note = Description of Artificial Sequence: Synthetic Antisense oligonucleotide
  modified_base 1: mod_base = OTHER; note = bicyclic nucleic acid (BNA)
  modified_base 13: mod_base = OTHER; note = bicyclic nucleic acid (BNA)
  source 1..13: mol_type = other DNA
agtcggtaagttc

SEQ ID NO: 7011 - DNA, 12 bp, synthetic construct
  misc_feature 1..12: note = Description of Artificial Sequence: Synthetic Antisense oligonucleotide
  modified_base 1: mod_base = OTHER; note = bicyclic nucleic acid (BNA)
  modified_base 12: mod_base = OTHER; note = bicyclic nucleic acid (BNA)
  source 1..12: mol_type = other DNA
agtcggtaagtt

SEQ ID NO: 7012 - DNA, 11 bp, synthetic construct
  misc_feature 1..11: note = Description of Artificial Sequence: Synthetic Antisense oligonucleotide
  modified_base 1: mod_base = OTHER; note = bicyclic nucleic acid (BNA)
  modified_base 11: mod_base = OTHER; note = bicyclic nucleic acid (BNA)
  source 1..11: mol_type = other DNA
agtcggtaagt

SEQ ID NO: 7013 - DNA, 20 bp, synthetic construct
  misc_feature 1..20: note = Description of Artificial Sequence: Synthetic Antisense oligonucleotide
  modified_base 1: mod_base = OTHER; note = bicyclic nucleic acid (BNA)
  modified_base 20: mod_base = OTHER; note = bicyclic nucleic acid (BNA)
  source 1..20: mol_type = other DNA
cagtcggtaagttctgtcca

SEQ ID NO: 7014 - DNA, 19 bp, synthetic construct
  misc_feature 1..19: note = Description of Artificial Sequence: Synthetic Antisense oligonucleotide
  modified_base 1: mod_base = OTHER; note = bicyclic nucleic acid (BNA)
  modified_base 19: mod_base = OTHER; note = bicyclic nucleic acid (BNA)
  source 1..19: mol_type = other DNA
cagtcggtaagttctgtcc

SEQ ID NO: 7015 - DNA, 18 bp, synthetic construct
  misc_feature 1..18: note = Description of Artificial Sequence: Synthetic Antisense oligonucleotide
  modified_base 1: mod_base = OTHER; note = bicyclic nucleic acid (BNA)
  modified_base 18: mod_base = OTHER; note = bicyclic nucleic acid (BNA)
  source 1..18: mol_type = other DNA
cagtcggtaagttctgtc

SEQ ID NO: 7016 - DNA, 17 bp, synthetic construct
  misc_feature 1..17: note = Description of Artificial Sequence: Synthetic Antisense oligonucleotide
  modified_base 1: mod_base = OTHER; note = bicyclic nucleic acid (BNA)
  modified_base 17: mod_base = OTHER; note = bicyclic nucleic acid (BNA)
  source 1..17: mol_type = other DNA
cagtcggtaagttctgt

SEQ ID NO: 7017 - DNA, 16 bp, synthetic construct
  misc_feature 1..16: note = Description of Artificial Sequence: Synthetic Antisense oligonucleotide
  modified_base 1: mod_base = OTHER; note = bicyclic nucleic acid (BNA)
  modified_base 16: mod_base = OTHER; note = bicyclic nucleic acid (BNA)
  source 1..16: mol_type = other DNA
cagtcggtaagttctg

SEQ ID NO: 7018 - DNA, 15 bp, synthetic construct
  misc_feature 1..15: note = Description of Artificial Sequence: Synthetic Antisense oligonucleotide
  modified_base 1: mod_base = OTHER; note = bicyclic nucleic acid (BNA)
  modified_base 15: mod_base = OTHER; note = bicyclic nucleic acid (BNA)
  source 1..15: mol_type = other DNA
cagtcggtaagttct

SEQ ID NO: 7019 - DNA, 14 bp, synthetic construct
  misc_feature 1..14: note = Description of Artificial Sequence: Synthetic Antisense oligonucleotide
  modified_base 1: mod_base = OTHER; note = bicyclic nucleic acid (BNA)
  modified_base 14: mod_base = OTHER; note = bicyclic nucleic acid (BNA)
  source 1..14: mol_type = other DNA
cagtcggtaagttc

SEQ ID NO: 7020 - DNA, 13 bp, synthetic construct
  misc_feature 1..13: note = Description of Artificial Sequence: Synthetic Antisense oligonucleotide
  modified_base 1: mod_base = OTHER; note = bicyclic nucleic acid (BNA)
  modified_base 13: mod_base = OTHER; note = bicyclic nucleic acid (BNA)
  source 1..13: mol_type = other DNA
cagtcggtaagtt

SEQ ID NO: 7021 - DNA, 12 bp, synthetic construct
  misc_feature 1..12: note = Description of Artificial Sequence: Synthetic Antisense oligonucleotide
  modified_base 1: mod_base = OTHER; note = bicyclic nucleic acid (BNA)
  modified_base 12: mod_base = OTHER; note = bicyclic nucleic acid (BNA)
  source 1..12: mol_type = other DNA
cagtcggtaagt

SEQ ID NO: 7022 - DNA, 20 bp, synthetic construct
  misc_feature 1..20: note = Description of Artificial Sequence: Synthetic Antisense oligonucleotide
  modified_base 1: mod_base = OTHER; note = bicyclic nucleic acid (BNA)
  modified_base 20: mod_base = OTHER; note = bicyclic nucleic acid (BNA)
  source 1..20: mol_type = other DNA
ccagtcggtaagttctgtcc

SEQ ID NO: 7023 - DNA, 19 bp, synthetic construct
  misc_feature 1..19: note = Description of Artificial Sequence: Synthetic Antisense oligonucleotide
  modified_base 1: mod_base = OTHER; note = bicyclic nucleic acid (BNA)
  modified_base 19: mod_base = OTHER; note = bicyclic nucleic acid (BNA)
  source 1..19: mol_type = other DNA
ccagtcggtaagttctgtc

SEQ ID NO: 7024 - DNA, 18 bp, synthetic construct
  misc_feature 1..18: note = Description of Artificial Sequence: Synthetic Antisense oligonucleotide
  modified_base 1: mod_base = OTHER; note = bicyclic nucleic acid (BNA)
  modified_base 18: mod_base = OTHER; note = bicyclic nucleic acid (BNA)
  source 1..18: mol_type = other DNA
ccagtcggtaagttctgt

SEQ ID NO: 7025 - DNA, 17 bp, synthetic construct
  misc_feature 1..17: note = Description of Artificial Sequence: Synthetic Antisense oligonucleotide
  modified_base 1: mod_base = OTHER; note = bicyclic nucleic acid (BNA)
  modified_base 17: mod_base = OTHER; note = bicyclic nucleic acid (BNA)
  source 1..17: mol_type = other DNA
ccagtcggtaagttctg

SEQ ID NO: 7026 - DNA, 16 bp, synthetic construct
  misc_feature 1..16: note = Description of Artificial Sequence: Synthetic Antisense oligonucleotide
  modified_base 1: mod_base = OTHER; note = bicyclic nucleic acid (BNA)
  modified_base 16: mod_base = OTHER; note = bicyclic nucleic acid (BNA)
  source 1..16: mol_type = other DNA
ccagtcggtaagttct

SEQ ID NO: 7027 - DNA, 15 bp, synthetic construct
  misc_feature 1..15: note = Description of Artificial Sequence: Synthetic Antisense oligonucleotide
  modified_base 1: mod_base = OTHER; note = bicyclic nucleic acid (BNA)
  modified_base 15: mod_base = OTHER; note = bicyclic nucleic acid (BNA)
  source 1..15: mol_type = other DNA
ccagtcggtaagttc

SEQ ID NO: 7028 - DNA, 14 bp, synthetic construct
  misc_feature 1..14: note = Description of Artificial Sequence: Synthetic Antisense oligonucleotide
  modified_base 1: mod_base = OTHER; note = bicyclic nucleic acid (BNA)
  modified_base 14: mod_base = OTHER; note = bicyclic nucleic acid (BNA)
  source 1..14: mol_type = other DNA
ccagtcggtaagtt

SEQ ID NO: 7029 - DNA, 13 bp, synthetic construct
  misc_feature 1..13: note = Description of Artificial Sequence: Synthetic Antisense oligonucleotide
  modified_base 1: mod_base = OTHER; note = bicyclic nucleic acid (BNA)
  modified_base 13: mod_base = OTHER; note = bicyclic nucleic acid (BNA)
  source 1..13: mol_type = other DNA
ccagtcggtaagt

SEQ ID NO: 7030 - DNA, 20 bp, synthetic construct
  misc_feature 1..20: note = Description of Artificial Sequence: Synthetic Antisense oligonucleotide
  modified_base 1: mod_base = OTHER; note = bicyclic nucleic acid (BNA)
  modified_base 20: mod_base = OTHER; note = bicyclic nucleic acid (BNA)
  source 1..20: mol_type = other DNA
gccagtcggtaagttctgtc

SEQ ID NO: 7031 - DNA, 19 bp, synthetic construct
  misc_feature 1..19: note = Description of Artificial Sequence: Synthetic Antisense oligonucleotide
  modified_base 1: mod_base = OTHER; note = bicyclic nucleic acid (BNA)
  modified_base 19: mod_base = OTHER; note = bicyclic nucleic acid (BNA)
  source 1..19: mol_type = other DNA
gccagtcggtaagttctgt

SEQ ID NO: 7032 - DNA, 18 bp, synthetic construct
  misc_feature 1..18: note = Description of Artificial Sequence: Synthetic Antisense oligonucleotide
  modified_base 1: mod_base = OTHER; note = bicyclic nucleic acid (BNA)
  modified_base 18: mod_base = OTHER; note = bicyclic nucleic acid (BNA)
  source 1..18: mol_type = other DNA
gccagtcggtaagttctg

SEQ ID NO: 7033 - DNA, 17 bp, synthetic construct
  misc_feature 1..17: note = Description of Artificial Sequence: Synthetic Antisense oligonucleotide
  modified_base 1: mod_base = OTHER; note = bicyclic nucleic acid (BNA)
  modified_base 17: mod_base = OTHER; note = bicyclic nucleic acid (BNA)
  source 1..17: mol_type = other DNA
gccagtcggtaagttct

SEQ ID NO: 7034 - DNA, 16 bp, synthetic construct
  misc_feature 1..16: note = Description of Artificial Sequence: Synthetic Antisense oligonucleotide
  modified_base 1: mod_base = OTHER; note = bicyclic nucleic acid (BNA)
  modified_base 16: mod_base = OTHER; note = bicyclic nucleic acid (BNA)
  source 1..16: mol_type = other DNA
gccagtcggtaagttc

SEQ ID NO: 7035 - DNA, 15 bp, synthetic construct
  misc_feature 1..15: note = Description of Artificial Sequence: Synthetic Antisense oligonucleotide
  modified_base 1: mod_base = OTHER; note = bicyclic nucleic acid (BNA)
  modified_base 15: mod_base = OTHER; note = bicyclic nucleic acid (BNA)
  source 1..15: mol_type = other DNA
gccagtcggtaagtt

SEQ ID NO: 7036 - DNA, 14 bp, synthetic construct
  misc_feature 1..14: note = Description of Artificial Sequence: Synthetic Antisense oligonucleotide
  modified_base 1: mod_base = OTHER; note = bicyclic nucleic acid (BNA)
  modified_base 14: mod_base = OTHER; note = bicyclic nucleic acid (BNA)
  source 1..14: mol_type = other DNA
gccagtcggtaagt

SEQ ID NO: 7037 - DNA, 20 bp, synthetic construct
  misc_feature 1..20: note = Description of Artificial Sequence: Synthetic Antisense oligonucleotide
  modified_base 1: mod_base = OTHER; note = bicyclic nucleic acid (BNA)
  modified_base 20: mod_base = OTHER; note = bicyclic nucleic acid (BNA)
  source 1..20: mol_type = other DNA
tcaaggaagatggcatttct

SEQ ID NO: 7038 - DNA, 22 bp, synthetic construct
  misc_feature 1..22: note = Description of Artificial Sequence: Synthetic Antisense oligonucleotide
  modified_base 1: mod_base = OTHER; note = bicyclic nucleic acid (BNA)
  modified_base 22: mod_base = OTHER; note = bicyclic nucleic acid (BNA)
  source 1..22: mol_type = other DNA
tcaaggaagatggcatttctag

SEQ ID NO: 7039 - DNA, 16 bp, synthetic construct
  misc_feature 1..16: note = Description of Artificial Sequence: Synthetic Antisense oligonucleotide
  modified_base 1: mod_base = OTHER; note = bicyclic nucleic acid (BNA)
  modified_base 16: mod_base = OTHER; note = bicyclic nucleic acid (BNA)
  source 1..16: mol_type = other DNA
tcaaggaagatggcat

SEQ ID NO: 7040 - DNA, 15 bp, synthetic construct
  misc_feature 1..15: note = Description of Artificial Sequence: Synthetic Antisense oligonucleotide
  modified_base 1: mod_base = OTHER; note = bicyclic nucleic acid (BNA)
  modified_base 15: mod_base = OTHER; note = bicyclic nucleic acid (BNA)
  source 1..15: mol_type = other DNA
gaagatggcatttct

SEQ ID NO: 7041 - DNA, 21 bp, synthetic construct
  misc_feature 1..21: note = Description of Artificial Sequence: Synthetic Antisense oligonucleotide
  modified_base 1: mod_base = OTHER; note = bicyclic nucleic acid (BNA)
  modified_base 21: mod_base = OTHER; note = bicyclic nucleic acid (BNA)
  source 1..21: mol_type = other DNA
tcaaggaagatggcatttcta

SEQ ID NO: 7042 - DNA, 19 bp, synthetic construct
  misc_feature 1..19: note = Description of Artificial Sequence: Synthetic Antisense oligonucleotide
  modified_base 1: mod_base = OTHER; note = bicyclic nucleic acid (BNA)
  modified_base 19: mod_base = OTHER; note = bicyclic nucleic acid (BNA)
  source 1..19: mol_type = other DNA
tcaaggaagatggcatttc

SEQ ID NO: 7043 - DNA, 18 bp, synthetic construct
  misc_feature 1..18: note = Description of Artificial Sequence: Synthetic Antisense oligonucleotide
  modified_base 1: mod_base = OTHER; note = bicyclic nucleic acid (BNA)
  modified_base 18: mod_base = OTHER; note = bicyclic nucleic acid (BNA)
  source 1..18: mol_type = other DNA
tcaaggaagatggcattt

SEQ ID NO: 7044 - DNA, 17 bp, synthetic construct
  misc_feature 1..17: note = Description of Artificial Sequence: Synthetic Antisense oligonucleotide
  modified_base 1: mod_base = OTHER; note = bicyclic nucleic acid (BNA)
  modified_base 17: mod_base = OTHER; note = bicyclic nucleic acid (BNA)
  source 1..17: mol_type = other DNA
tcaaggaagatggcatt

SEQ ID NO: 7045 - DNA, 15 bp, synthetic construct
  misc_feature 1..15: note = Description of Artificial Sequence: Synthetic Antisense oligonucleotide
  modified_base 1: mod_base = OTHER; note = bicyclic nucleic acid (BNA)
  modified_base 15: mod_base = OTHER; note = bicyclic nucleic acid (BNA)
  source 1..15: mol_type = other DNA
tcaaggaagatggca

SEQ ID NO: 7046 - DNA, 14 bp, synthetic construct
  misc_feature 1..14: note = Description of Artificial Sequence: Synthetic Antisense oligonucleotide
  modified_base 1: mod_base = OTHER; note = bicyclic nucleic acid (BNA)
  modified_base 14: mod_base = OTHER; note = bicyclic nucleic acid (BNA)
  source 1..14: mol_type = other DNA
tcaaggaagatggc

SEQ ID NO: 7047 - DNA, 13 bp, synthetic construct
  misc_feature 1..13: note = Description of Artificial Sequence: Synthetic Antisense oligonucleotide
  modified_base 1: mod_base = OTHER; note = bicyclic nucleic acid (BNA)
  modified_base 13: mod_base = OTHER; note = bicyclic nucleic acid (BNA)
  source 1..13: mol_type = other DNA
tcaaggaagatgg

SEQ ID NO: 7048 - DNA, 12 bp, synthetic construct
  misc_feature 1..12: note = Description of Artificial Sequence: Synthetic Antisense oligonucleotide
  modified_base 1: mod_base = OTHER; note = bicyclic nucleic acid (BNA)
  modified_base 12: mod_base = OTHER; note = bicyclic nucleic acid (BNA)
  source 1..12: mol_type = other DNA
tcaaggaagatg

SEQ ID NO: 7049 - DNA, 11 bp, synthetic construct
  misc_feature 1..11: note = Description of Artificial Sequence: Synthetic Antisense oligonucleotide
  modified_base 1: mod_base = OTHER; note = bicyclic nucleic acid (BNA)
  modified_base 11: mod_base = OTHER; note = bicyclic nucleic acid (BNA)
  source 1..11: mol_type = other DNA
tcaaggaagat

SEQ ID NO: 7050 - DNA, 10 bp, synthetic construct
  misc_feature 1..10: note = Description of Artificial Sequence: Synthetic Antisense oligonucleotide
  modified_base 1: mod_base = OTHER; note = bicyclic nucleic acid (BNA)
  modified_base 10: mod_base = OTHER; note = bicyclic nucleic acid (BNA)
  source 1..10: mol_type = other DNA
tcaaggaaga

SEQ ID NO: 7051 - skipped

SEQ ID NO: 7052 - DNA, 21 bp, synthetic construct
  misc_feature 1..21: note = Description of Artificial Sequence: Synthetic Antisense oligonucleotide
  modified_base 1: mod_base = OTHER; note = bicyclic nucleic acid (BNA)
  modified_base 21: mod_base = OTHER; note = bicyclic nucleic acid (BNA)
  source 1..21: mol_type = other DNA
caaggaagatggcatttctag

SEQ ID NO: 7053 - DNA, 20 bp, synthetic construct
  misc_feature 1..20: note = Description of Artificial Sequence: Synthetic Antisense oligonucleotide
  modified_base 1: mod_base = OTHER; note = bicyclic nucleic acid (BNA)
  modified_base 20: mod_base = OTHER; note = bicyclic nucleic acid (BNA)
  source 1..20: mol_type = other DNA
caaggaagatggcatttcta

SEQ ID NO: 7054 - DNA, 19 bp, synthetic construct
  misc_feature 1..19: note = Description of Artificial Sequence: Synthetic Antisense oligonucleotide
  modified_base 1: mod_base = OTHER; note = bicyclic nucleic acid (BNA)
  modified_base 19: mod_base = OTHER; note = bicyclic nucleic acid (BNA)
  source 1..19: mol_type = other DNA
caaggaagatggcatttct

SEQ ID NO: 7055 - DNA, 18 bp, synthetic construct
  misc_feature 1..18: note = Description of Artificial Sequence: Synthetic Antisense oligonucleotide
  modified_base 1: mod_base = OTHER; note = bicyclic nucleic acid (BNA)
  modified_base 18: mod_base = OTHER; note = bicyclic nucleic acid (BNA)
  source 1..18: mol_type = other DNA
caaggaagatggcatttc

SEQ ID NO: 7056 - DNA, 17 bp, synthetic construct
  misc_feature 1..17: note = Description of Artificial Sequence: Synthetic Antisense oligonucleotide
  modified_base 1: mod_base = OTHER; note = bicyclic nucleic acid (BNA)
  modified_base 17: mod_base = OTHER; note = bicyclic nucleic acid (BNA)
  source 1..17: mol_type = other DNA
caaggaagatggcattt

SEQ ID NO: 7057 - DNA, 16 bp, synthetic construct
  misc_feature 1..16: note = Description of Artificial Sequence: Synthetic Antisense oligonucleotide
  modified_base 1: mod_base = OTHER; note = bicyclic nucleic acid (BNA)
  modified_base 16: mod_base = OTHER; note = bicyclic nucleic acid (BNA)
  source 1..16: mol_type = other DNA
caaggaagatggcatt

SEQ ID NO: 7058 - DNA, 15 bp, synthetic construct
  misc_feature 1..15: note = Description of Artificial Sequence: Synthetic Antisense oligonucleotide
  modified_base 1: mod_base = OTHER; note = bicyclic nucleic acid (BNA)
  modified_base 15: mod_base = OTHER; note = bicyclic nucleic acid (BNA)
  source 1..15: mol_type = other DNA
caaggaagatggcat

SEQ ID NO: 7059 - DNA, 14 bp, synthetic construct
  misc_feature 1..14: note = Description of Artificial Sequence: Synthetic Antisense oligonucleotide
  modified_base 1: mod_base = OTHER; note = bicyclic nucleic acid (BNA)
  modified_base 14: mod_base = OTHER; note = bicyclic nucleic acid (BNA)
  source 1..14: mol_type = other DNA
caaggaagatggca

SEQ ID NO: 7060 - DNA, 13 bp, synthetic construct
  misc_feature 1..13: note = Description of Artificial Sequence: Synthetic Antisense oligonucleotide
  modified_base 1: mod_base = OTHER; note = bicyclic nucleic acid (BNA)
  modified_base 13: mod_base = OTHER; note = bicyclic nucleic acid (BNA)
  source 1..13: mol_type = other DNA
caaggaagatggc

SEQ ID NO: 7061 - DNA, 12 bp, synthetic construct
  misc_feature 1..12: note = Description of Artificial Sequence: Synthetic Antisense oligonucleotide
  modified_base 1: mod_base = OTHER; note = bicyclic nucleic acid (BNA)
  modified_base 12: mod_base = OTHER; note = bicyclic nucleic acid (BNA)
  source 1..12: mol_type = other DNA
caaggaagatgg

SEQ ID NO: 7062 - DNA, 11 bp, synthetic construct
  misc_feature 1..11: note = Description of Artificial Sequence: Synthetic Antisense oligonucleotide
  modified_base 1: mod_base = OTHER; note = bicyclic nucleic acid (BNA)
  modified_base 11: mod_base = OTHER; note = bicyclic nucleic acid (BNA)
  source 1..11: mol_type = other DNA
caaggaagatg

SEQ ID NO: 7063 - DNA, 10 bp, synthetic construct
  misc_feature 1..10: note = Description of Artificial Sequence: Synthetic Antisense oligonucleotide
  modified_base 1: mod_base = OTHER; note = bicyclic nucleic acid (BNA)
  modified_base 10: mod_base = OTHER; note = bicyclic nucleic acid (BNA)
  source 1..10: mol_type = other DNA
caaggaagat

SEQ ID NO: 7064 - DNA, 20 bp, synthetic construct
  misc_feature 1..20: note = Description of Artificial Sequence: Synthetic Antisense oligonucleotide
  modified_base 1: mod_base = OTHER; note = bicyclic nucleic acid (BNA)
  modified_base 20: mod_base = OTHER; note = bicyclic nucleic acid (BNA)
  source 1..20: mol_type = other DNA
aaggaagatggcatttctag

SEQ ID NO: 7065 - DNA, 19 bp, synthetic construct
  misc_feature 1..19: note = Description of Artificial Sequence: Synthetic Antisense oligonucleotide
  modified_base 1: mod_base = OTHER; note = bicyclic nucleic acid (BNA)
  modified_base 19: mod_base = OTHER; note = bicyclic nucleic acid (BNA)
  source 1..19: mol_type = other DNA
aaggaagatggcatttcta

SEQ ID NO: 7066 - DNA, 18 bp, synthetic construct
  misc_feature 1..18: note = Description of Artificial Sequence: Synthetic Antisense oligonucleotide
  modified_base 1: mod_base = OTHER; note = bicyclic nucleic acid (BNA)
  modified_base 18: mod_base = OTHER; note = bicyclic nucleic acid (BNA)
  source 1..18: mol_type = other DNA
aaggaagatggcatttct

SEQ ID NO: 7067 - DNA, 17 bp, synthetic construct
  misc_feature 1..17: note = Description of Artificial Sequence: Synthetic Antisense oligonucleotide
  modified_base 1: mod_base = OTHER; note = bicyclic nucleic acid (BNA)
  modified_base 17: mod_base = OTHER; note = bicyclic nucleic acid (BNA)
  source 1..17: mol_type = other DNA
aaggaagatggcatttc

SEQ ID NO: 7068 - DNA, 16 bp, synthetic construct
  misc_feature 1..16: note = Description of Artificial Sequence: Synthetic Antisense oligonucleotide
  modified_base 1: mod_base = OTHER; note = bicyclic nucleic acid (BNA)
  modified_base 16: mod_base = OTHER; note = bicyclic nucleic acid (BNA)
  source 1..16: mol_type = other DNA
aaggaagatggcattt

SEQ ID NO: 7069 - DNA, 15 bp, synthetic construct
  misc_feature 1..15: note = Description of Artificial Sequence: Synthetic Antisense oligonucleotide
  modified_base 1: mod_base = OTHER; note = bicyclic nucleic acid (BNA)
  modified_base 15: mod_base = OTHER; note = bicyclic nucleic acid (BNA)
  source 1..15: mol_type = other DNA
aaggaagatggcatt

SEQ ID NO: 7070 - DNA, 14 bp, synthetic construct
  misc_feature 1..14: note = Description of Artificial Sequence: Synthetic Antisense oligonucleotide
  modified_base 1: mod_base = OTHER; note = bicyclic nucleic acid (BNA)
  modified_base 14: mod_base = OTHER; note = bicyclic nucleic acid (BNA)
  source 1..14: mol_type = other DNA
aaggaagatggcat

SEQ ID NO: 7071 - DNA, 13 bp, synthetic construct
  misc_feature 1..13: note = Description of Artificial Sequence: Synthetic Antisense oligonucleotide
  modified_base 1: mod_base = OTHER; note = bicyclic nucleic acid (BNA)
  modified_base 13: mod_base = OTHER; note = bicyclic nucleic acid (BNA)
  source 1..13: mol_type = other DNA
aaggaagatggca

SEQ ID NO: 7072 - DNA, 12 bp, synthetic construct
  misc_feature 1..12: note = Description of Artificial Sequence: Synthetic Antisense oligonucleotide
  modified_base 1: mod_base = OTHER; note = bicyclic nucleic acid (BNA)
  modified_base 12: mod_base = OTHER; note = bicyclic nucleic acid (BNA)
  source 1..12: mol_type = other DNA
aaggaagatggc

SEQ ID NO: 7073 - DNA, 11 bp, synthetic construct
  misc_feature 1..11: note = Description of Artificial Sequence: Synthetic Antisense oligonucleotide
  modified_base 1: mod_base = OTHER; note = bicyclic nucleic acid (BNA)
  modified_base 11: mod_base = OTHER; note = bicyclic nucleic acid (BNA)
  source 1..11: mol_type = other DNA
aaggaagatgg

SEQ ID NO: 7074 - DNA, 10 bp, synthetic construct
  misc_feature 1..10: note = Description of Artificial Sequence: Synthetic Antisense oligonucleotide
  modified_base 1: mod_base = OTHER; note = bicyclic nucleic acid (BNA)
  modified_base 10: mod_base = OTHER; note = bicyclic nucleic acid (BNA)
  source 1..10: mol_type = other DNA
aaggaagatg

SEQ ID NO: 7075 - skipped

SEQ ID NO: 7076 - DNA, 19 bp, synthetic construct
  misc_feature 1..19: note = Description of Artificial Sequence: Synthetic Antisense oligonucleotide
  modified_base 1: mod_base = OTHER; note = bicyclic nucleic acid (BNA)
  modified_base 19: mod_base = OTHER; note = bicyclic nucleic acid (BNA)
  source 1..19: mol_type = other DNA
aggaagatggcatttctag

SEQ ID NO: 7077 - DNA, 18 bp, synthetic construct
  misc_feature 1..18: note = Description of Artificial Sequence: Synthetic Antisense oligonucleotide
  modified_base 1: mod_base = OTHER; note = bicyclic nucleic acid (BNA)
  modified_base 18: mod_base = OTHER; note = bicyclic nucleic acid (BNA)
  source 1..18: mol_type = other DNA
aggaagatggcatttcta

SEQ ID NO: 7078 - DNA, 17 bp, synthetic construct
  misc_feature 1..17: note = Description of Artificial Sequence: Synthetic Antisense oligonucleotide
  modified_base 1: mod_base = OTHER; note = bicyclic nucleic acid (BNA)
  modified_base 17: mod_base = OTHER; note = bicyclic nucleic acid (BNA)
  source 1..17: mol_type = other DNA
aggaagatggcatttct

SEQ ID NO: 7079 - DNA, 16 bp, synthetic construct
  misc_feature 1..16: note = Description of Artificial Sequence: Synthetic Antisense oligonucleotide
  modified_base 1: mod_base = OTHER; note = bicyclic nucleic acid (BNA)
  modified_base 16: mod_base = OTHER; note = bicyclic nucleic acid (BNA)
  source 1..16: mol_type = other DNA
aggaagatggcatttc

SEQ ID NO: 7080 - DNA, 15 bp, synthetic construct
  misc_feature 1..15: note = Description of Artificial Sequence: Synthetic Antisense oligonucleotide
  modified_base 1: mod_base = OTHER; note = bicyclic nucleic acid (BNA)
  modified_base 15: mod_base = OTHER; note = bicyclic nucleic acid (BNA)
  source 1..15: mol_type = other DNA
aggaagatggcattt

SEQ ID NO: 7081 - DNA, 14 bp, synthetic construct
  misc_feature 1..14: note = Description of Artificial Sequence: Synthetic Antisense oligonucleotide
  modified_base 1: mod_base = OTHER; note = bicyclic nucleic acid (BNA)
  modified_base 14: mod_base = OTHER; note = bicyclic nucleic acid (BNA)
  source 1..14: mol_type = other DNA
aggaagatggcatt

SEQ ID NO: 7082 - DNA, 13 bp, synthetic construct
  misc_feature 1..13: note = Description of Artificial Sequence: Synthetic Antisense oligonucleotide
  modified_base 1: mod_base = OTHER; note = bicyclic nucleic acid (BNA)
  modified_base 13: mod_base = OTHER; note = bicyclic nucleic acid (BNA)
  source 1..13: mol_type = other DNA
aggaagatggcat

SEQ ID NO: 7083 - DNA, 12 bp, synthetic construct
  misc_feature 1..12: note = Description of Artificial Sequence: Synthetic Antisense oligonucleotide
  modified_base 1: mod_base = OTHER; note = bicyclic nucleic acid (BNA)
  modified_base 12: mod_base = OTHER; note = bicyclic nucleic acid (BNA)
  source 1..12: mol_type = other DNA
aggaagatggca

SEQ ID NO: 7084 - DNA, 10 bp, synthetic construct
  misc_feature 1..10: note = Description of Artificial Sequence: Synthetic Antisense oligonucleotide
  modified_base 1: mod_base = OTHER; note = bicyclic nucleic acid (BNA)
  modified_base 10: mod_base = OTHER; note = bicyclic nucleic acid (BNA)
  source 1..10: mol_type = other DNA
aggaagatgg

SEQ ID NO: 7085-7086 - skipped (2 entries)

SEQ ID NO: 7087 - DNA, 18 bp, synthetic construct
  misc_feature 1..18: note = Description of Artificial Sequence: Synthetic Antisense oligonucleotide
  modified_base 1: mod_base = OTHER; note = bicyclic nucleic acid (BNA)
  modified_base 18: mod_base = OTHER; note = bicyclic nucleic acid (BNA)
  source 1..18: mol_type = other DNA
ggaagatggcatttctag

SEQ ID NO: 7088 - DNA, 17 bp, synthetic construct
  misc_feature 1..17: note = Description of Artificial Sequence: Synthetic Antisense oligonucleotide
  modified_base 1: mod_base = OTHER; note = bicyclic nucleic acid (BNA)
  modified_base 17: mod_base = OTHER; note = bicyclic nucleic acid (BNA)
  source 1..17: mol_type = other DNA
ggaagatggcatttcta

SEQ ID NO: 7089 - DNA, 16 bp, synthetic construct
  misc_feature 1..16: note = Description of Artificial Sequence: Synthetic Antisense oligonucleotide
  modified_base 1: mod_base = OTHER; note = bicyclic nucleic acid (BNA)
  modified_base 16: mod_base = OTHER; note = bicyclic nucleic acid (BNA)
  source 1..16: mol_type = other DNA
ggaagatggcatttct

SEQ ID NO: 7090 - DNA, 15 bp, synthetic construct
  misc_feature 1..15: note = Description of Artificial Sequence: Synthetic Antisense oligonucleotide
  modified_base 1: mod_base = OTHER; note = bicyclic nucleic acid (BNA)
  modified_base 15: mod_base = OTHER; note = bicyclic nucleic acid (BNA)
  source 1..15: mol_type = other DNA
ggaagatggcatttc

SEQ ID NO: 7091 - DNA, 14 bp, synthetic construct
  misc_feature 1..14: note = Description of Artificial Sequence: Synthetic Antisense oligonucleotide
  modified_base 1: mod_base = OTHER; note = bicyclic nucleic acid (BNA)
  modified_base 14: mod_base = OTHER; note = bicyclic nucleic acid (BNA)
  source 1..14: mol_type = other DNA
ggaagatggcattt

SEQ ID NO: 7092 - DNA, 13 bp, synthetic construct
  misc_feature 1..13: note = Description of Artificial Sequence: Synthetic Antisense oligonucleotide
  modified_base 1: mod_base = OTHER; note = bicyclic nucleic acid (BNA)
  modified_base 13: mod_base = OTHER; note = bicyclic nucleic acid (BNA)
  source 1..13: mol_type = other DNA
ggaagatggcatt

SEQ ID NO: 7093 - DNA, 12 bp, synthetic construct
  misc_feature 1..12: note = Description of Artificial Sequence: Synthetic Antisense oligonucleotide
  modified_base 1: mod_base = OTHER; note = bicyclic nucleic acid (BNA)
  modified_base 12: mod_base = OTHER; note = bicyclic nucleic acid (BNA)
  source 1..12: mol_type = other DNA
ggaagatggcat

SEQ ID NO: 7094 - DNA, 11 bp, synthetic construct
  misc_feature 1..11: note = Description of Artificial Sequence: Synthetic Antisense oligonucleotide
  modified_base 1: mod_base = OTHER; note = bicyclic nucleic acid (BNA)
  modified_base 11: mod_base = OTHER; note = bicyclic nucleic acid (BNA)
  source 1..11: mol_type = other DNA
ggaagatggca

SEQ ID NO: 7095 - DNA, 10 bp, synthetic construct
  misc_feature 1..10: note = Description of Artificial Sequence: Synthetic Antisense oligonucleotide
  modified_base 1: mod_base = OTHER; note = bicyclic nucleic acid (BNA)
  modified_base 10: mod_base = OTHER; note = bicyclic nucleic acid (BNA)
  source 1..10: mol_type = other DNA
ggaagatggc

SEQ ID NO: 7096 - skipped

SEQ ID NO: 7097 - DNA, 17 bp, synthetic construct
  misc_feature 1..17: note = Description of Artificial Sequence: Synthetic Antisense oligonucleotide
  modified_base 1: mod_base = OTHER; note = bicyclic nucleic acid (BNA)
  modified_base 17: mod_base = OTHER; note = bicyclic nucleic acid (BNA)
  source 1..17: mol_type = other DNA
gaagatggcatttctag

SEQ ID NO: 7098 - DNA, 16 bp, synthetic construct
  misc_feature 1..16: note = Description of Artificial Sequence: Synthetic Antisense oligonucleotide
  modified_base 1: mod_base = OTHER; note = bicyclic nucleic acid (BNA)
  modified_base 16: mod_base = OTHER; note = bicyclic nucleic acid (BNA)
  source 1..16: mol_type = other DNA
gaagatggcatttcta

SEQ ID NO: 7099 - DNA, 14 bp, synthetic construct
  misc_feature 1..14: note = Description of Artificial Sequence: Synthetic Antisense oligonucleotide
  modified_base 1: mod_base = OTHER; note = bicyclic nucleic acid (BNA)
  modified_base 14: mod_base = OTHER; note = bicyclic nucleic acid (BNA)
  source 1..14: mol_type = other DNA
gaagatggcatttc

SEQ ID NO: 7100 - DNA, 13 bp, synthetic construct
  misc_feature 1..13: note = Description of Artificial Sequence: Synthetic Antisense oligonucleotide
  modified_base 1: mod_base = OTHER; note = bicyclic nucleic acid (BNA)
  modified_base 13: mod_base = OTHER; note = bicyclic nucleic acid (BNA)
  source 1..13: mol_type = other DNA
gaagatggcattt

SEQ ID NO: 7101 - DNA, 12 bp, synthetic construct
  misc_feature 1..12: note = Description of Artificial Sequence: Synthetic Antisense oligonucleotide
  modified_base 1: mod_base = OTHER; note = bicyclic nucleic acid (BNA)
  modified_base 12: mod_base = OTHER; note = bicyclic nucleic acid (BNA)
  source 1..12: mol_type = other DNA
gaagatggcatt

SEQ ID NO: 7102 - DNA, 11 bp, synthetic construct
  misc_feature 1..11: note = Description of Artificial Sequence: Synthetic Antisense oligonucleotide
  modified_base 1: mod_base = OTHER; note = bicyclic nucleic acid (BNA)
  modified_base 11: mod_base = OTHER; note = bicyclic nucleic acid (BNA)
  source 1..11: mol_type = other DNA
gaagatggcat

SEQ ID NO: 7103 - DNA, 10 bp, synthetic construct
  misc_feature 1..10: note = Description of Artificial Sequence: Synthetic Antisense oligonucleotide
  modified_base 1: mod_base = OTHER; note = bicyclic nucleic acid (BNA)
  modified_base 10: mod_base = OTHER; note = bicyclic nucleic acid (BNA)
  source 1..10: mol_type = other DNA
gaagatggca

SEQ ID NO: 7104-7105 - skipped (2 entries)

SEQ ID NO: 7106 - DNA, 16 bp, synthetic construct
  misc_feature 1..16: note = Description of Artificial Sequence: Synthetic Antisense oligonucleotide
  modified_base 1: mod_base = OTHER; note = bicyclic nucleic acid (BNA)
  modified_base 16: mod_base = OTHER; note = bicyclic nucleic acid (BNA)
  source 1..16: mol_type = other DNA
aagatggcatttctag

SEQ ID NO: 7107 - DNA, 15 bp, synthetic construct
  misc_feature 1..15: note = Description of Artificial Sequence: Synthetic Antisense oligonucleotide
  modified_base 1: mod_base = OTHER; note = bicyclic nucleic acid (BNA)
  modified_base 15: mod_base = OTHER; note = bicyclic nucleic acid (BNA)
  source 1..15: mol_type = other DNA
aagatggcatttcta

SEQ ID NO: 7108 - DNA, 14 bp, synthetic construct
  misc_feature 1..14: note = Description of Artificial Sequence: Synthetic Antisense oligonucleotide
  modified_base 1: mod_base = OTHER; note = bicyclic nucleic acid (BNA)
  modified_base 14: mod_base = OTHER; note = bicyclic nucleic acid (BNA)
  source 1..14: mol_type = other DNA
aagatggcatttct

SEQ ID NO: 7109 - DNA, 13 bp, synthetic construct
  misc_feature 1..13: note = Description of Artificial Sequence: Synthetic Antisense oligonucleotide
  modified_base 1: mod_base = OTHER; note = bicyclic nucleic acid (BNA)
  modified_base 13: mod_base = OTHER; note = bicyclic nucleic acid (BNA)
  source 1..13: mol_type = other DNA
aagatggcatttc

SEQ ID NO: 7110 - DNA, 12 bp, synthetic construct
  misc_feature 1..12: note = Description of Artificial Sequence: Synthetic Antisense oligonucleotide
  modified_base 1: mod_base = OTHER; note = bicyclic nucleic acid (BNA)
  modified_base 12: mod_base = OTHER; note = bicyclic nucleic acid (BNA)
  source 1..12: mol_type = other DNA
aagatggcattt

SEQ ID NO: 7111 - DNA, 11 bp, synthetic construct
  misc_feature 1..11: note = Description of Artificial Sequence: Synthetic Antisense oligonucleotide
  modified_base 1: mod_base = OTHER; note = bicyclic nucleic acid (BNA)
  modified_base 11: mod_base = OTHER; note = bicyclic nucleic acid (BNA)
  source 1..11: mol_type = other DNA
aagatggcatt

SEQ ID NO: 7112 - DNA, 10 bp, synthetic construct
  misc_feature 1..10: note = Description of Artificial Sequence: Synthetic Antisense oligonucleotide
  modified_base 1: mod_base = OTHER; note = bicyclic nucleic acid (BNA)
  modified_base 10: mod_base = OTHER; note = bicyclic nucleic acid (BNA)
  source 1..10: mol_type = other DNA
aagatggcat

SEQ ID NO: 7113-7114 - skipped (2 entries)

SEQ ID NO: 7115 - DNA, 15 bp, synthetic construct
  misc_feature 1..15: note = Description of Artificial Sequence: Synthetic Antisense oligonucleotide
  modified_base 1: mod_base = OTHER; note = bicyclic nucleic acid (BNA)
  modified_base 15: mod_base = OTHER; note = bicyclic nucleic acid (BNA)
  source 1..15: mol_type = other DNA
agatggcatttctag

SEQ ID NO: 7116 - DNA, 14 bp, synthetic construct
  misc_feature 1..14: note = Description of Artificial Sequence: Synthetic Antisense oligonucleotide
  modified_base 1: mod_base = OTHER; note = bicyclic nucleic acid (BNA)
  modified_base 14: mod_base = OTHER; note = bicyclic nucleic acid (BNA)
  source 1..14: mol_type = other DNA
agatggcatttcta

SEQ ID NO: 7117 - DNA, 13 bp, synthetic construct
  misc_feature 1..13: note = Description of Artificial Sequence: Synthetic Antisense oligonucleotide
  modified_base 1: mod_base = OTHER; note = bicyclic nucleic acid (BNA)
  modified_base 13: mod_base = OTHER; note = bicyclic nucleic acid (BNA)
  source 1..13: mol_type = other DNA
agatggcatttct

SEQ ID NO: 7118 - DNA, 12 bp, synthetic construct
  misc_feature 1..12: note = Description of Artificial Sequence: Synthetic Antisense oligonucleotide
  modified_base 1: mod_base = OTHER; note = bicyclic nucleic acid (BNA)
  modified_base 12: mod_base = OTHER; note = bicyclic nucleic acid (BNA)
  source 1..12: mol_type = other DNA
agatggcatttc

SEQ ID NO: 7119 - DNA, 11 bp, synthetic construct
  misc_feature 1..11: note = Description of Artificial Sequence: Synthetic Antisense oligonucleotide
  modified_base 1: mod_base = OTHER; note = bicyclic nucleic acid (BNA)
  modified_base 11: mod_base = OTHER; note = bicyclic nucleic acid (BNA)
  source 1..11: mol_type = other DNA
agatggcattt

SEQ ID NO: 7120 - DNA, 10 bp, synthetic construct
  misc_feature 1..10: note = Description of Artificial Sequence: Synthetic Antisense oligonucleotide
  modified_base 1: mod_base = OTHER; note = bicyclic nucleic acid (BNA)
  modified_base 10: mod_base = OTHER; note = bicyclic nucleic acid (BNA)
  source 1..10: mol_type = other DNA
agatggcatt

SEQ ID NO: 7121-7122 - skipped (2 entries)

SEQ ID NO: 7123 - DNA, 30 bp, synthetic construct; identical to SEQ ID NO: 8
  misc_feature 1..30: note = Description of Artificial Sequence: Synthetic Antisense oligonucleotide
  modified_base 1: mod_base = OTHER; note = bicyclic nucleic acid (BNA)
  modified_base 30: mod_base = OTHER; note = bicyclic nucleic acid (BNA)
  source 1..30: mol_type = other DNA

SEQ ID NO: 7124 - DNA, 29 bp, synthetic construct
  misc_feature 1..29: note = Description of Artificial Sequence: Synthetic Antisense oligonucleotide
  modified_base 1: mod_base = OTHER; note = bicyclic nucleic acid (BNA)
  modified_base 29: mod_base = OTHER; note = bicyclic nucleic acid (BNA)
  source 1..29: mol_type = other DNA
ctccaacatcaaggaagatggcatttcta

SEQ ID NO: 7125 - DNA, 28 bp, synthetic construct
  misc_feature 1..28: note = Description of Artificial Sequence: Synthetic Antisense oligonucleotide
  modified_base 1: mod_base = OTHER; note = bicyclic nucleic acid (BNA)
  modified_base 28: mod_base = OTHER; note = bicyclic nucleic acid (BNA)
  source 1..28: mol_type = other DNA
ctccaacatcaaggaagatggcatttct

SEQ ID NO: 7126 - DNA, 27 bp, synthetic construct
  misc_feature 1..27: note = Description of Artificial Sequence: Synthetic Antisense oligonucleotide
  modified_base 1: mod_base = OTHER; note = bicyclic nucleic acid (BNA)
  modified_base 27: mod_base = OTHER; note = bicyclic nucleic acid (BNA)
  source 1..27: mol_type = other DNA
ctccaacatcaaggaagatggcatttc

SEQ ID NO: 7127 - DNA, 26 bp, synthetic construct
  misc_feature 1..26: note = Description of Artificial Sequence: Synthetic Antisense oligonucleotide
  modified_base 1: mod_base = OTHER; note = bicyclic nucleic acid (BNA)
  modified_base 26: mod_base = OTHER; note = bicyclic nucleic acid (BNA)
  source 1..26: mol_type = other DNA
ctccaacatcaaggaagatggcattt

SEQ ID NO: 7128 - DNA, 25 bp, synthetic construct
  misc_feature 1..25: note = Description of Artificial Sequence: Synthetic Antisense oligonucleotide
  modified_base 1: mod_base = OTHER; note = bicyclic nucleic acid (BNA)
  modified_base 25: mod_base = OTHER; note = bicyclic nucleic acid (BNA)
  source 1..25: mol_type = other DNA
ctccaacatcaaggaagatggcatt

SEQ ID NO: 7129 - DNA, 24 bp, synthetic construct
  misc_feature 1..24: note = Description of Artificial Sequence: Synthetic Antisense oligonucleotide
  modified_base 1: mod_base = OTHER; note = bicyclic nucleic acid (BNA)
  modified_base 24: mod_base = OTHER; note = bicyclic nucleic acid (BNA)
  source 1..24: mol_type = other DNA
ctccaacatcaaggaagatggcat

SEQ ID NO: 7130 - DNA, 23 bp, synthetic construct
  misc_feature 1..23: note = Description of Artificial Sequence: Synthetic Antisense oligonucleotide
  modified_base 1: mod_base = OTHER; note = bicyclic nucleic acid (BNA)
  modified_base 23: mod_base = OTHER; note = bicyclic nucleic acid (BNA)
  source 1..23: mol_type = other DNA
ctccaacatcaaggaagatggca

SEQ ID NO: 7131 - DNA, 22 bp, synthetic construct
  misc_feature 1..22: note = Description of Artificial Sequence: Synthetic Antisense oligonucleotide
  modified_base 1: mod_base = OTHER; note = bicyclic nucleic acid (BNA)
  modified_base 22: mod_base = OTHER; note = bicyclic nucleic acid (BNA)
  source 1..22: mol_type = other DNA
ctccaacatcaaggaagatggc

SEQ ID NO: 7132 - DNA, 21 bp, synthetic construct
  misc_feature 1..21: note = Description of Artificial Sequence: Synthetic Antisense oligonucleotide
  modified_base 1: mod_base = OTHER; note = bicyclic nucleic acid (BNA)
  modified_base 21: mod_base = OTHER; note = bicyclic nucleic acid (BNA)
  source 1..21: mol_type = other DNA
ctccaacatcaaggaagatgg

SEQ ID NO: 7133 - DNA, 20 bp, synthetic construct
  misc_feature 1..20: note = Description of Artificial Sequence: Synthetic Antisense oligonucleotide
  modified_base 1: mod_base = OTHER; note = bicyclic nucleic acid (BNA)
  modified_base 20: mod_base = OTHER; note = bicyclic nucleic acid (BNA)
  source 1..20: mol_type = other DNA
ctccaacatcaaggaagatg

SEQ ID NO: 7134 - DNA, 19 bp, synthetic construct
  misc_feature 1..19: note = Description of Artificial Sequence: Synthetic Antisense oligonucleotide
  modified_base 1: mod_base = OTHER; note = bicyclic nucleic acid (BNA)
  modified_base 19: mod_base = OTHER; note = bicyclic nucleic acid (BNA)
  source 1..19: mol_type = other DNA
ctccaacatcaaggaagat

SEQ ID NO: 7135 - DNA, 18 bp, synthetic construct
  misc_feature 1..18: note = Description of Artificial Sequence: Synthetic Antisense oligonucleotide
  modified_base 1: mod_base = OTHER; note = bicyclic nucleic acid (BNA)
  modified_base 18: mod_base = OTHER; note = bicyclic nucleic acid (BNA)
  source 1..18: mol_type = other DNA
ctccaacatcaaggaaga

SEQ ID NO: 7136 - DNA, 17 bp, synthetic construct
  misc_feature 1..17: note = Description of Artificial Sequence: Synthetic Antisense oligonucleotide
  modified_base 1: mod_base = OTHER; note = bicyclic nucleic acid (BNA)
  modified_base 17: mod_base = OTHER; note = bicyclic nucleic acid (BNA)
  source 1..17: mol_type = other DNA
ctccaacatcaaggaag

SEQ ID NO: 7137 - DNA, 29 bp, synthetic construct
  misc_feature 1..29: note = Description of Artificial Sequence: Synthetic Antisense oligonucleotide
  modified_base 1: mod_base = OTHER; note = bicyclic nucleic acid (BNA)
  modified_base 29: mod_base = OTHER; note = bicyclic nucleic acid (BNA)
  source 1..29: mol_type = other DNA
tccaacatcaaggaagatggcatttctag

SEQ ID NO: 7138 - DNA, 28 bp, synthetic construct
  misc_feature 1..28: note = Description of Artificial Sequence: Synthetic Antisense oligonucleotide
  modified_base 1: mod_base = OTHER; note = bicyclic nucleic acid (BNA)
  modified_base 28: mod_base = OTHER; note = bicyclic nucleic acid (BNA)
  source 1..28: mol_type = other DNA
tccaacatcaaggaagatggcatttcta

SEQ ID NO: 7139 - DNA, 27 bp, synthetic construct
  misc_feature 1..27: note = Description of Artificial Sequence: Synthetic Antisense oligonucleotide
  modified_base 1: mod_base = OTHER; note = bicyclic nucleic acid (BNA)
  modified_base 27: mod_base = OTHER; note = bicyclic nucleic acid (BNA)
  source 1..27: mol_type = other DNA
tccaacatcaaggaagatggcatttct

SEQ ID NO: 7140 - DNA, 26 bp, synthetic construct
  misc_feature 1..26: note = Description of Artificial Sequence: Synthetic Antisense oligonucleotide
  modified_base 1: mod_base = OTHER; note = bicyclic nucleic acid (BNA)
  modified_base 26: mod_base = OTHER; note = bicyclic nucleic acid (BNA)
  source 1..26: mol_type = other DNA
tccaacatcaaggaagatggcatttc

SEQ ID NO: 7141 - DNA, 25 bp, synthetic construct
  misc_feature 1..25: note = Description of Artificial Sequence: Synthetic Antisense oligonucleotide
  modified_base 1: mod_base = OTHER; note = bicyclic nucleic acid (BNA)
  modified_base 25: mod_base = OTHER; note = bicyclic nucleic acid (BNA)
  source 1..25: mol_type = other DNA
tccaacatcaaggaagatggcattt

SEQ ID NO: 7142 - DNA, 24 bp, synthetic construct
  misc_feature 1..24: note = Description of Artificial Sequence: Synthetic Antisense oligonucleotide
  modified_base 1: mod_base = OTHER; note = bicyclic nucleic acid (BNA)
  modified_base 24: mod_base = OTHER; note = bicyclic nucleic acid (BNA)
  source 1..24: mol_type = other DNA
tccaacatcaaggaagatggcatt

SEQ ID NO: 7143 - DNA, 23 bp, synthetic construct
  misc_feature 1..23: note = Description of Artificial Sequence: Synthetic Antisense oligonucleotide
  modified_base 1: mod_base = OTHER; note = bicyclic nucleic acid (BNA)
  modified_base 23: mod_base = OTHER; note = bicyclic nucleic acid (BNA)
  source 1..23: mol_type = other DNA
tccaacatcaaggaagatggcat

SEQ ID NO: 7144 - DNA, 22 bp, synthetic construct
  misc_feature 1..22: note = Description of Artificial Sequence: Synthetic Antisense oligonucleotide
  modified_base 1: mod_base = OTHER; note = bicyclic nucleic acid (BNA)
  modified_base 22: mod_base = OTHER; note = bicyclic nucleic acid (BNA)
  source 1..22: mol_type = other DNA
tccaacatcaaggaagatggca

SEQ ID NO: 7145 - DNA, 21 bp, synthetic construct
  misc_feature 1..21: note = Description of Artificial Sequence: Synthetic Antisense oligonucleotide
  modified_base 1: mod_base = OTHER; note = bicyclic nucleic acid (BNA)
  modified_base 21: mod_base = OTHER; note = bicyclic nucleic acid (BNA)
  source 1..21: mol_type = other DNA
tccaacatcaaggaagatggc

SEQ ID NO: 7146 - DNA, 20 bp, synthetic construct
  misc_feature 1..20: note = Description of Artificial Sequence: Synthetic Antisense oligonucleotide
  modified_base 1: mod_base = OTHER; note = bicyclic nucleic acid (BNA)
  modified_base 20: mod_base = OTHER; note = bicyclic nucleic acid (BNA)
  source 1..20: mol_type = other DNA
tccaacatcaaggaagatgg

SEQ ID NO: 7147 - DNA, 19 bp, synthetic construct
  misc_feature 1..19: note = Description of Artificial Sequence: Synthetic Antisense oligonucleotide
  modified_base 1: mod_base = OTHER; note = bicyclic nucleic acid (BNA)
  modified_base 19: mod_base = OTHER; note = bicyclic nucleic acid (BNA)
  source 1..19: mol_type = other DNA
tccaacatcaaggaagatg

SEQ ID NO: 7148 - DNA, 18 bp, synthetic construct
  misc_feature 1..18: note = Description of Artificial Sequence: Synthetic Antisense oligonucleotide
  modified_base 1: mod_base = OTHER; note = bicyclic nucleic acid (BNA)
  modified_base 18: mod_base = OTHER; note = bicyclic nucleic acid (BNA)
  source 1..18: mol_type = other DNA
tccaacatcaaggaagat

SEQ ID NO: 7149 - DNA, 17 bp, synthetic construct
  misc_feature 1..17: note = Description of Artificial Sequence: Synthetic Antisense oligonucleotide
  modified_base 1: mod_base = OTHER; note = bicyclic nucleic acid (BNA)
  modified_base 17: mod_base = OTHER; note = bicyclic nucleic acid (BNA)
  source 1..17: mol_type = other DNA
tccaacatcaaggaaga

SEQ ID NO: 7150 - DNA, 16 bp, synthetic construct
  misc_feature 1..16: note = Description of Artificial Sequence: Synthetic Antisense oligonucleotide
  modified_base 1: mod_base = OTHER; note = bicyclic nucleic acid (BNA)
  modified_base 16: mod_base = OTHER; note = bicyclic nucleic acid (BNA)
  source 1..16: mol_type = other DNA
tccaacatcaaggaag

SEQ ID NO: 7151 - DNA, 28 bp, synthetic construct
  misc_feature 1..28: note = Description of Artificial Sequence: Synthetic Antisense oligonucleotide
  modified_base 1: mod_base = OTHER; note = bicyclic nucleic acid (BNA)
  modified_base 28: mod_base = OTHER; note = bicyclic nucleic acid (BNA)
  source 1..28: mol_type = other DNA
ccaacatcaaggaagatggcatttctag

SEQ ID NO: 7152 - DNA, 27 bp, synthetic construct
  misc_feature 1..27: note = Description of Artificial Sequence: Synthetic Antisense oligonucleotide
  modified_base 1: mod_base = OTHER; note = bicyclic nucleic acid (BNA)
  modified_base 27: mod_base = OTHER; note = bicyclic nucleic acid (BNA)
  source 1..27: mol_type = other DNA
ccaacatcaaggaagatggcatttcta

SEQ ID NO: 7153 - DNA, 26 bp, synthetic construct
  misc_feature 1..26: note = Description of Artificial Sequence: Synthetic Antisense oligonucleotide
  modified_base 1: mod_base = OTHER; note = bicyclic nucleic acid (BNA)
  modified_base 26: mod_base = OTHER; note = bicyclic nucleic acid (BNA)
  source 1..26: mol_type = other DNA
ccaacatcaaggaagatggcatttct

SEQ ID NO: 7154 - DNA, 25 bp, synthetic construct
  misc_feature 1..25: note = Description of Artificial Sequence: Synthetic Antisense oligonucleotide
  modified_base 1: mod_base = OTHER; note = bicyclic nucleic acid (BNA)
  modified_base 25: mod_base = OTHER; note = bicyclic nucleic acid (BNA)
  source 1..25: mol_type = other DNA
ccaacatcaaggaagatggcatttc

SEQ ID NO: 7155 - DNA, 24 bp, synthetic construct
  misc_feature 1..24: note = Description of Artificial Sequence: Synthetic Antisense oligonucleotide
  modified_base 1: mod_base = OTHER; note = bicyclic nucleic acid (BNA)
  modified_base 24: mod_base = OTHER; note = bicyclic nucleic acid (BNA)
  source 1..24: mol_type = other DNA
ccaacatcaaggaagatggcattt

SEQ ID NO: 7156 - DNA, 23 bp, synthetic construct
  misc_feature 1..23: note = Description of Artificial Sequence: Synthetic Antisense oligonucleotide
  modified_base 1: mod_base = OTHER; note = bicyclic nucleic acid (BNA)
  modified_base 23: mod_base = OTHER; note = bicyclic nucleic acid (BNA)
  source 1..23: mol_type = other DNA
ccaacatcaaggaagatggcatt

SEQ ID NO: 7157 - DNA, 22 bp, synthetic construct
  misc_feature 1..22: note = Description of Artificial Sequence: Synthetic Antisense oligonucleotide
  modified_base 1: mod_base = OTHER; note = bicyclic nucleic acid (BNA)
  modified_base 22: mod_base = OTHER; note = bicyclic nucleic acid (BNA)
  source 1..22: mol_type = other DNA
ccaacatcaaggaagatggcat

SEQ ID NO: 7158 - DNA, 21 bp, synthetic construct
  misc_feature 1..21: note = Description of Artificial Sequence: Synthetic Antisense oligonucleotide
  modified_base 1: mod_base = OTHER; note = bicyclic nucleic acid (BNA)
  modified_base 21: mod_base = OTHER; note = bicyclic nucleic acid (BNA)
  source 1..21: mol_type = other DNA
ccaacatcaaggaagatggca

SEQ ID NO: 7159 - DNA, 20 bp, synthetic construct
  misc_feature 1..20: note = Description of Artificial Sequence: Synthetic Antisense oligonucleotide
  modified_base 1: mod_base = OTHER; note = bicyclic nucleic acid (BNA)
  modified_base 20: mod_base = OTHER; note = bicyclic nucleic acid (BNA)
  source 1..20: mol_type = other DNA
ccaacatcaaggaagatggc

SEQ ID NO: 7160 - DNA, 19 bp, synthetic construct
  misc_feature 1..19: note = Description of Artificial Sequence: Synthetic Antisense oligonucleotide
  modified_base 1: mod_base = OTHER; note = bicyclic nucleic acid (BNA)
  modified_base 19: mod_base = OTHER; note = bicyclic nucleic acid (BNA)
  source 1..19: mol_type = other DNA
ccaacatcaaggaagatgg

SEQ ID NO: 7161 - DNA, 18 bp, synthetic construct
  misc_feature 1..18: note = Description of Artificial Sequence: Synthetic Antisense oligonucleotide
  modified_base 1: mod_base = OTHER; note = bicyclic nucleic acid (BNA)
  modified_base 18: mod_base = OTHER; note = bicyclic nucleic acid (BNA)
  source 1..18: mol_type = other DNA
ccaacatcaaggaagatg

SEQ ID NO: 7162 - DNA, 17 bp, synthetic construct
  misc_feature 1..17: note = Description of Artificial Sequence: Synthetic Antisense oligonucleotide
  modified_base 1: mod_base = OTHER; note = bicyclic nucleic acid (BNA)
  modified_base 17: mod_base = OTHER; note = bicyclic nucleic acid (BNA)
  source 1..17: mol_type = other DNA
ccaacatcaaggaagat

SEQ ID NO: 7163 - DNA, 16 bp, synthetic construct
  misc_feature 1..16: note = Description of Artificial Sequence: Synthetic Antisense oligonucleotide
  modified_base 1: mod_base = OTHER; note = bicyclic nucleic acid (BNA)
  modified_base 16: mod_base = OTHER; note = bicyclic nucleic acid (BNA)
  source 1..16: mol_type = other DNA
ccaacatcaaggaaga

SEQ ID NO: 7164 - DNA, 15 bp, synthetic construct
  misc_feature 1..15: note = Description of Artificial Sequence: Synthetic Antisense oligonucleotide
  modified_base 1: mod_base = OTHER; note = bicyclic nucleic acid (BNA)
  modified_base 15: mod_base = OTHER; note = bicyclic nucleic acid (BNA)
  source 1..15: mol_type = other DNA
ccaacatcaaggaag

SEQ ID NO: 7165 - DNA, 27 bp, synthetic construct
  misc_feature 1..27: note = Description of Artificial Sequence: Synthetic Antisense oligonucleotide
  modified_base 1: mod_base = OTHER; note = bicyclic nucleic acid (BNA)
  modified_base 27: mod_base = OTHER; note = bicyclic nucleic acid (BNA)
  source 1..27: mol_type = other DNA
caacatcaaggaagatggcatttctag

SEQ ID NO: 7166 - DNA, 26 bp, synthetic construct
  misc_feature 1..26: note = Description of Artificial Sequence: Synthetic Antisense oligonucleotide
  modified_base 1: mod_base = OTHER; note = bicyclic nucleic acid (BNA)
  modified_base 26: mod_base = OTHER; note = bicyclic nucleic acid (BNA)
  source 1..26: mol_type = other DNA
caacatcaaggaagatggcatttcta

SEQ ID NO: 7167 - DNA, 25 bp, synthetic construct
  misc_feature 1..25: note = Description of Artificial Sequence: Synthetic Antisense oligonucleotide
  modified_base 1: mod_base = OTHER; note = bicyclic nucleic acid (BNA)
  modified_base 25: mod_base = OTHER; note = bicyclic nucleic acid (BNA)
  source 1..25: mol_type = other DNA
caacatcaaggaagatggcatttct

SEQ ID NO: 7168 - DNA, 24 bp, synthetic construct
  misc_feature 1..24: note = Description of Artificial Sequence: Synthetic Antisense oligonucleotide
  modified_base 1: mod_base = OTHER; note = bicyclic nucleic acid (BNA)
  modified_base 24: mod_base = OTHER; note = bicyclic nucleic acid (BNA)
  source 1..24: mol_type = other DNA
caacatcaaggaagatggcatttc

SEQ ID NO: 7169 - DNA, 23 bp, synthetic construct
  misc_feature 1..23: note = Description of Artificial Sequence: Synthetic Antisense oligonucleotide
  modified_base 1: mod_base = OTHER; note = bicyclic nucleic acid (BNA)
  modified_base 23: mod_base = OTHER; note = bicyclic nucleic acid (BNA)
  source 1..23: mol_type = other DNA
caacatcaaggaagatggcattt

SEQ ID NO: 7170 - DNA, 22 bp, synthetic construct
  misc_feature 1..22: note = Description of Artificial Sequence: Synthetic Antisense oligonucleotide
  modified_base 1: mod_base = OTHER; note = bicyclic nucleic acid (BNA)
  modified_base 22: mod_base = OTHER; note = bicyclic nucleic acid (BNA)
  source 1..22: mol_type = other DNA
caacatcaaggaagatggcatt

SEQ ID NO: 7171 - DNA, 21 bp, synthetic construct
  misc_feature 1..21: note = Description of Artificial Sequence: Synthetic Antisense oligonucleotide
  modified_base 1: mod_base = OTHER; note = bicyclic nucleic acid (BNA)
  modified_base 21: mod_base = OTHER; note = bicyclic nucleic acid (BNA)
  source 1..21: mol_type = other DNA
caacatcaaggaagatggcat

SEQ ID NO: 7172 - DNA, 20 bp, synthetic construct
  misc_feature 1..20: note = Description of Artificial Sequence: Synthetic Antisense oligonucleotide
  modified_base 1: mod_base = OTHER; note = bicyclic nucleic acid (BNA)
  modified_base 20: mod_base = OTHER; note = bicyclic nucleic acid (BNA)
  source 1..20: mol_type = other DNA
caacatcaaggaagatggca

SEQ ID NO: 7173 - DNA, 19 bp, synthetic construct
  misc_feature 1..19: note = Description of Artificial Sequence: Synthetic Antisense oligonucleotide
  modified_base 1: mod_base = OTHER; note = bicyclic nucleic acid (BNA)
  modified_base 19: mod_base = OTHER; note = bicyclic nucleic acid (BNA)
  source 1..19: mol_type = other DNA
caacatcaaggaagatggc

SEQ ID NO: 7174 - DNA, 18 bp, synthetic construct
  misc_feature 1..18: note = Description of Artificial Sequence: Synthetic Antisense oligonucleotide
  modified_base 1: mod_base = OTHER; note = bicyclic nucleic acid (BNA)
  modified_base 18: mod_base = OTHER; note = bicyclic nucleic acid (BNA)
  source 1..18: mol_type = other DNA
caacatcaaggaagatgg

SEQ ID NO: 7175 - DNA, 17 bp, synthetic construct
  misc_feature 1..17: note = Description of Artificial Sequence: Synthetic Antisense oligonucleotide
  modified_base 1: mod_base = OTHER; note = bicyclic nucleic acid (BNA)
  modified_base 17: mod_base = OTHER; note = bicyclic nucleic acid (BNA)
  source 1..17: mol_type = other DNA
caacatcaaggaagatg

SEQ ID NO: 7176 - DNA, 16 bp, synthetic construct
  misc_feature 1..16: note = Description of Artificial Sequence: Synthetic Antisense oligonucleotide
  modified_base 1: mod_base = OTHER; note = bicyclic nucleic acid (BNA)
  modified_base 16: mod_base = OTHER; note = bicyclic nucleic acid (BNA)
  source 1..16: mol_type = other DNA
caacatcaaggaagat

SEQ ID NO: 7177 - DNA, 15 bp, synthetic construct
  misc_feature 1..15: note = Description of Artificial Sequence: Synthetic Antisense oligonucleotide
  modified_base 1: mod_base = OTHER; note = bicyclic nucleic acid (BNA)
  modified_base 15: mod_base = OTHER; note = bicyclic nucleic acid (BNA)
  source 1..15: mol_type = other DNA
caacatcaaggaaga

SEQ ID NO: 7178 - DNA, 14 bp, synthetic construct
  misc_feature 1..14: note = Description of Artificial Sequence: Synthetic Antisense oligonucleotide
  modified_base 1: mod_base = OTHER; note = bicyclic nucleic acid (BNA)
  modified_base 14: mod_base = OTHER; note = bicyclic nucleic acid (BNA)
  source 1..14: mol_type = other DNA
caacatcaaggaag

SEQ ID NO: 7179 - DNA, 26 bp, synthetic construct
  misc_feature 1..26: note = Description of Artificial Sequence: Synthetic Antisense oligonucleotide
  modified_base 1: mod_base = OTHER; note = bicyclic nucleic acid (BNA)
  modified_base 26: mod_base = OTHER; note = bicyclic nucleic acid (BNA)
  source 1..26: mol_type = other DNA
aacatcaaggaagatggcatttctag

SEQ ID NO: 7180 - DNA, 25 bp, synthetic construct
  misc_feature 1..25: note = Description of Artificial Sequence: Synthetic Antisense oligonucleotide
  modified_base 1: mod_base = OTHER; note = bicyclic nucleic acid (BNA)
  modified_base 25: mod_base = OTHER; note = bicyclic nucleic acid (BNA)
  source 1..25: mol_type = other DNA
aacatcaaggaagatggcatttcta

SEQ ID NO: 7181 - DNA, 24 bp, synthetic construct
  misc_feature 1..24: note = Description of Artificial Sequence: Synthetic Antisense oligonucleotide
  modified_base 1: mod_base = OTHER; note = bicyclic nucleic acid (BNA)
  modified_base 24: mod_base = OTHER; note = bicyclic nucleic acid (BNA)
  source 1..24: mol_type = other DNA
aacatcaaggaagatggcatttct

SEQ ID NO: 7182 - DNA, 23 bp, synthetic construct
  misc_feature 1..23: note = Description of Artificial Sequence: Synthetic Antisense oligonucleotide
  modified_base 1: mod_base = OTHER; note = bicyclic nucleic acid (BNA)
  modified_base 23: mod_base = OTHER; note = bicyclic nucleic acid (BNA)
  source 1..23: mol_type = other DNA
aacatcaaggaagatggcatttc

SEQ ID NO: 7183 - DNA, 22 bp, synthetic construct
  misc_feature 1..22: note = Description of Artificial Sequence: Synthetic Antisense oligonucleotide
  modified_base 1: mod_base = OTHER; note = bicyclic nucleic acid (BNA)
  modified_base 22: mod_base = OTHER; note = bicyclic nucleic acid (BNA)
  source 1..22: mol_type = other DNA
aacatcaaggaagatggcattt

SEQ ID NO: 7184 - DNA, 21 bp, synthetic construct
  misc_feature 1..21: note = Description of Artificial Sequence: Synthetic Antisense oligonucleotide
  modified_base 1: mod_base = OTHER; note = bicyclic nucleic acid (BNA)
  modified_base 21: mod_base = OTHER; note = bicyclic nucleic acid (BNA)
  source 1..21: mol_type = other DNA
aacatcaaggaagatggcatt

SEQ ID NO: 7185 - DNA, 20 bp, synthetic construct
  misc_feature 1..20: note = Description of Artificial Sequence: Synthetic Antisense oligonucleotide
  modified_base 1: mod_base = OTHER; note = bicyclic nucleic acid (BNA)
  modified_base 20: mod_base = OTHER; note = bicyclic nucleic acid (BNA)
  source 1..20: mol_type = other DNA
aacatcaaggaagatggcat

SEQ ID NO: 7186 - DNA, 19 bp, synthetic construct
  misc_feature 1..19: note = Description of Artificial Sequence: Synthetic Antisense oligonucleotide
  modified_base 1: mod_base = OTHER; note = bicyclic nucleic acid (BNA)
  modified_base 19: mod_base = OTHER; note = bicyclic nucleic acid (BNA)
  source 1..19: mol_type = other DNA
aacatcaaggaagatggca

SEQ ID NO: 7187 - DNA, 18 bp, synthetic construct
  misc_feature 1..18: note = Description of Artificial Sequence: Synthetic Antisense oligonucleotide
  modified_base 1: mod_base = OTHER; note = bicyclic nucleic acid (BNA)
  modified_base 18: mod_base = OTHER; note = bicyclic nucleic acid (BNA)
  source 1..18: mol_type = other DNA
aacatcaaggaagatggc

SEQ ID NO: 7188 - DNA, 17 bp, synthetic construct
  misc_feature 1..17: note = Description of Artificial Sequence: Synthetic Antisense oligonucleotide
  modified_base 1: mod_base = OTHER; note = bicyclic nucleic acid (BNA)
  modified_base 17: mod_base = OTHER; note = bicyclic nucleic acid (BNA)
  source 1..17: mol_type = other DNA
aacatcaaggaagatgg

SEQ ID NO: 7189 - DNA, 16 bp, synthetic construct
  misc_feature 1..16: note = Description of Artificial Sequence: Synthetic Antisense oligonucleotide
  modified_base 1: mod_base = OTHER; note = bicyclic nucleic acid (BNA)
  modified_base 16: mod_base = OTHER; note = bicyclic nucleic acid (BNA)
  source 1..16: mol_type = other DNA
aacatcaaggaagatg

SEQ ID NO: 7190 - DNA, 15 bp, synthetic construct
  misc_feature 1..15: note = Description of Artificial Sequence: Synthetic Antisense oligonucleotide
  modified_base 1: mod_base = OTHER; note = bicyclic nucleic acid (BNA)
  modified_base 15: mod_base = OTHER; note = bicyclic nucleic acid (BNA)
  source 1..15: mol_type = other DNA
aacatcaaggaagat

SEQ ID NO: 7191 - DNA, 14 bp, synthetic construct
  misc_feature 1..14: note = Description of Artificial Sequence: Synthetic Antisense oligonucleotide
  modified_base 1: mod_base = OTHER; note = bicyclic nucleic acid (BNA)
  modified_base 14: mod_base = OTHER; note = bicyclic nucleic acid (BNA)
  source 1..14: mol_type = other DNA
aacatcaaggaaga

SEQ ID NO: 7192 - DNA, 13 bp, synthetic construct
  misc_feature 1..13: note = Description of Artificial Sequence: Synthetic Antisense oligonucleotide
  modified_base 1: mod_base = OTHER; note = bicyclic nucleic acid (BNA)
  modified_base 13: mod_base = OTHER; note = bicyclic nucleic acid (BNA)
  source 1..13: mol_type = other DNA
aacatcaaggaag

SEQ ID NO: 7193 - DNA, 25 bp, synthetic construct
  misc_feature 1..25: note = Description of Artificial Sequence: Synthetic Antisense oligonucleotide
  modified_base 1: mod_base = OTHER; note = bicyclic nucleic acid (BNA)
  modified_base 25: mod_base = OTHER; note = bicyclic nucleic acid (BNA)
  source 1..25: mol_type = other DNA
acatcaaggaagatggcatttctag

SEQ ID NO: 7194 - DNA, 24 bp, synthetic construct
  misc_feature 1..24: note = Description of Artificial Sequence: Synthetic Antisense oligonucleotide
  modified_base 1: mod_base = OTHER; note = bicyclic nucleic acid (BNA)
  modified_base 24: mod_base = OTHER; note = bicyclic nucleic acid (BNA)
  source 1..24: mol_type = other DNA
acatcaaggaagatggcatttcta

SEQ ID NO: 7195 - DNA, 23 bp, synthetic construct
  misc_feature 1..23: note = Description of Artificial Sequence: Synthetic Antisense oligonucleotide
  modified_base 1: mod_base = OTHER; note = bicyclic nucleic acid (BNA)
  modified_base 23: mod_base = OTHER; note = bicyclic nucleic acid (BNA)
  source 1..23: mol_type = other DNA
acatcaaggaagatggcatttct

SEQ ID NO: 7196 - DNA, 22 bp, synthetic construct
  misc_feature 1..22: note = Description of Artificial Sequence: Synthetic Antisense oligonucleotide
  modified_base 1: mod_base = OTHER; note = bicyclic nucleic acid (BNA)
  modified_base 22: mod_base = OTHER; note = bicyclic nucleic acid (BNA)
  source 1..22: mol_type = other DNA
acatcaaggaagatggcatttc

SEQ ID NO: 7197 - DNA, 21 bp, synthetic construct
  misc_feature 1..21: note = Description of Artificial Sequence: Synthetic Antisense oligonucleotide
  modified_base 1: mod_base = OTHER; note = bicyclic nucleic acid (BNA)
  modified_base 21: mod_base = OTHER; note = bicyclic nucleic acid (BNA)
  source 1..21: mol_type = other DNA
acatcaaggaagatggcattt

SEQ ID NO: 7198 - DNA, 20 bp, synthetic construct
  misc_feature 1..20: note = Description of Artificial Sequence: Synthetic Antisense oligonucleotide
  modified_base 1: mod_base = OTHER; note = bicyclic nucleic acid (BNA)
  modified_base 20: mod_base = OTHER; note = bicyclic nucleic acid (BNA)
  source 1..20: mol_type = other DNA
acatcaaggaagatggcatt

SEQ ID NO: 7199 - DNA, 19 bp, synthetic construct
  misc_feature 1..19: note = Description of Artificial Sequence: Synthetic Antisense oligonucleotide
  modified_base 1: mod_base = OTHER; note = bicyclic nucleic acid (BNA)
  modified_base 19: mod_base = OTHER; note = bicyclic nucleic acid (BNA)
  source 1..19: mol_type = other DNA
acatcaaggaagatggcat

SEQ ID NO: 7200 - DNA, 18 bp, synthetic construct
  misc_feature 1..18: note = Description of Artificial Sequence: Synthetic Antisense oligonucleotide
  modified_base 1: mod_base = OTHER; note = bicyclic nucleic acid (BNA)
  modified_base 18: mod_base = OTHER; note = bicyclic nucleic acid (BNA)
  source 1..18: mol_type = other DNA
acatcaaggaagatggca

SEQ ID NO: 7201 - DNA, 17 bp, synthetic construct
  misc_feature 1..17: note = Description of Artificial Sequence: Synthetic Antisense oligonucleotide
  modified_base 1: mod_base = OTHER; note = bicyclic nucleic acid (BNA)
  modified_base 17: mod_base = OTHER; note = bicyclic nucleic acid (BNA)
  source 1..17: mol_type = other DNA
acatcaaggaagatggc

SEQ ID NO: 7202 - DNA, 16 bp, synthetic construct
  misc_feature 1..16: note = Description of Artificial Sequence: Synthetic Antisense oligonucleotide
  modified_base 1: mod_base = OTHER; note = bicyclic nucleic acid (BNA)
  modified_base 16: mod_base = OTHER; note = bicyclic nucleic acid (BNA)
  source 1..16: mol_type = other DNA
acatcaaggaagatgg

SEQ ID NO: 7203 - DNA, 15 bp, synthetic construct
  misc_feature 1..15: note = Description of Artificial Sequence: Synthetic Antisense oligonucleotide
  modified_base 1: mod_base = OTHER; note = bicyclic nucleic acid (BNA)
  modified_base 15: mod_base = OTHER; note = bicyclic nucleic acid (BNA)
  source 1..15: mol_type = other DNA
acatcaaggaagatg

SEQ ID NO: 7204 - DNA, 14 bp, synthetic construct
  misc_feature 1..14: note = Description of Artificial Sequence: Synthetic Antisense oligonucleotide
  modified_base 1: mod_base = OTHER; note = bicyclic nucleic acid (BNA)
  modified_base 14: mod_base = OTHER; note = bicyclic nucleic acid (BNA)
  source 1..14: mol_type = other DNA
acatcaaggaagat

SEQ ID NO: 7205 - DNA, 13 bp, synthetic construct
  misc_feature 1..13: note = Description of Artificial Sequence: Synthetic Antisense oligonucleotide
  modified_base 1: mod_base = OTHER; note = bicyclic nucleic acid (BNA)
  modified_base 13: mod_base = OTHER; note = bicyclic nucleic acid (BNA)
  source 1..13: mol_type = other DNA
acatcaaggaaga

SEQ ID NO: 7206 - DNA, 12 bp, synthetic construct
  misc_feature 1..12: note = Description of Artificial Sequence: Synthetic Antisense oligonucleotide
  modified_base 1: mod_base = OTHER; note = bicyclic nucleic acid (BNA)
  modified_base 12: mod_base = OTHER; note = bicyclic nucleic acid (BNA)
  source 1..12: mol_type = other DNA
acatcaaggaag

SEQ ID NO: 7207 - DNA, 24 bp, synthetic construct
  misc_feature 1..24: note = Description of Artificial Sequence: Synthetic Antisense oligonucleotide
  modified_base 1: mod_base = OTHER; note = bicyclic nucleic acid (BNA)
  modified_base 24: mod_base = OTHER; note = bicyclic nucleic acid (BNA)
  source 1..24: mol_type = other DNA
catcaaggaagatggcatttctag

SEQ ID NO: 7208 - DNA, 23 bp, synthetic construct
  misc_feature 1..23: note = Description of Artificial Sequence: Synthetic Antisense oligonucleotide
  modified_base 1: mod_base = OTHER; note = bicyclic nucleic acid (BNA)
  modified_base 23: mod_base = OTHER; note = bicyclic nucleic acid (BNA)
  source 1..23: mol_type = other DNA
catcaaggaagatggcatttcta

SEQ ID NO: 7209 - DNA, 22 bp, synthetic construct
  misc_feature 1..22: note = Description of Artificial Sequence: Synthetic Antisense oligonucleotide
  modified_base 1: mod_base = OTHER; note = bicyclic nucleic acid (BNA)
  modified_base 22: mod_base = OTHER; note = bicyclic nucleic acid (BNA)
  source 1..22: mol_type = other DNA
catcaaggaagatggcatttct

SEQ ID NO: 7210 - DNA, 21 bp, synthetic construct
  misc_feature 1..21: note = Description of Artificial Sequence: Synthetic Antisense oligonucleotide
  modified_base 1: mod_base = OTHER; note = bicyclic nucleic acid (BNA)
  modified_base 21: mod_base = OTHER; note = bicyclic nucleic acid (BNA)
  source 1..21: mol_type = other DNA
catcaaggaagatggcatttc

SEQ ID NO: 7211 - DNA, 20 bp, synthetic construct
  misc_feature 1..20: note = Description of Artificial Sequence: Synthetic Antisense oligonucleotide
  modified_base 1: mod_base = OTHER; note = bicyclic nucleic acid (BNA)
  modified_base 20: mod_base = OTHER; note = bicyclic nucleic acid (BNA)
  source 1..20: mol_type = other DNA
catcaaggaagatggcattt

SEQ ID NO: 7212 - DNA, 19 bp, synthetic construct
  misc_feature 1..19: note = Description of Artificial Sequence: Synthetic Antisense oligonucleotide
  modified_base 1: mod_base = OTHER; note = bicyclic nucleic acid (BNA)
  modified_base 19: mod_base = OTHER; note = bicyclic nucleic acid (BNA)
  source 1..19: mol_type = other DNA
catcaaggaagatggcatt

SEQ ID NO: 7213 - DNA, 18 bp, synthetic construct
  misc_feature 1..18: note = Description of Artificial Sequence: Synthetic Antisense oligonucleotide
  modified_base 1: mod_base = OTHER; note = bicyclic nucleic acid (BNA)
  modified_base 18: mod_base = OTHER; note = bicyclic nucleic acid (BNA)
  source 1..18: mol_type = other DNA
catcaaggaagatggcat

SEQ ID NO: 7214 - DNA, 17 bp, synthetic construct
  misc_feature 1..17: note = Description of Artificial Sequence: Synthetic Antisense oligonucleotide
  modified_base 1: mod_base = OTHER; note = bicyclic nucleic acid (BNA)
  modified_base 17: mod_base = OTHER; note = bicyclic nucleic acid (BNA)
  source 1..17: mol_type = other DNA
catcaaggaagatggca

SEQ ID NO: 7215 - DNA, 16 bp, synthetic construct
  misc_feature 1..16: note = Description of Artificial Sequence: Synthetic Antisense oligonucleotide
  modified_base 1: mod_base = OTHER; note = bicyclic nucleic acid (BNA)
  modified_base 16: mod_base = OTHER; note = bicyclic nucleic acid (BNA)
  source 1..16: mol_type = other DNA
catcaaggaagatggc

SEQ ID NO: 7216 - DNA, 15 bp, synthetic construct
  misc_feature 1..15: note = Description of Artificial Sequence: Synthetic Antisense oligonucleotide
  modified_base 1: mod_base = OTHER; note = bicyclic nucleic acid (BNA)
  modified_base 15: mod_base = OTHER; note = bicyclic nucleic acid (BNA)
  source 1..15: mol_type = other DNA
catcaaggaagatgg

SEQ ID NO: 7217 - DNA, 14 bp, synthetic construct
  misc_feature 1..14: note = Description of Artificial Sequence: Synthetic Antisense oligonucleotide
  modified_base 1: mod_base = OTHER; note = bicyclic nucleic acid (BNA)
  modified_base 14: mod_base = OTHER; note = bicyclic nucleic acid (BNA)
  source 1..14: mol_type = other DNA
catcaaggaagatg

SEQ ID NO: 7218 - DNA, 13 bp, synthetic construct
  misc_feature 1..13: note = Description of Artificial Sequence: Synthetic Antisense oligonucleotide
  modified_base 1: mod_base = OTHER; note = bicyclic nucleic acid (BNA)
  modified_base 13: mod_base = OTHER; note = bicyclic nucleic acid (BNA)
  source 1..13: mol_type = other DNA
catcaaggaagat

SEQ ID NO: 7219 - DNA, 12 bp, synthetic construct
  misc_feature 1..12: note = Description of Artificial Sequence: Synthetic Antisense oligonucleotide
  modified_base 1: mod_base = OTHER; note = bicyclic nucleic acid (BNA)
  modified_base 12: mod_base = OTHER; note = bicyclic nucleic acid (BNA)
  source 1..12: mol_type = other DNA
catcaaggaaga

SEQ ID NO: 7220 - DNA, 11 bp, synthetic construct
  misc_feature 1..11: note = Description of Artificial Sequence: Synthetic Antisense oligonucleotide
  modified_base 1: mod_base = OTHER; note = bicyclic nucleic acid (BNA)
  modified_base 11: mod_base = OTHER; note = bicyclic nucleic acid (BNA)
  source 1..11: mol_type = other DNA
catcaaggaag

SEQ ID NO: 7221 - DNA, 23 bp, synthetic construct
  misc_feature 1..23: note = Description of Artificial Sequence: Synthetic Antisense oligonucleotide
  modified_base 1: mod_base = OTHER; note = bicyclic nucleic acid (BNA)
  modified_base 23: mod_base = OTHER; note = bicyclic nucleic acid (BNA)
  source 1..23: mol_type = other DNA
atcaaggaagatggcatttctag

SEQ ID NO: 7222 - DNA, 22 bp, synthetic construct
  misc_feature 1..22: note = Description of Artificial Sequence: Synthetic Antisense oligonucleotide
  modified_base 1: mod_base = OTHER; note = bicyclic nucleic acid (BNA)
  modified_base 22: mod_base = OTHER; note = bicyclic nucleic acid (BNA)
  source 1..22: mol_type = other DNA
atcaaggaagatggcatttcta

SEQ ID NO: 7223 - DNA, 21 bp, synthetic construct
  misc_feature 1..21: note = Description of Artificial Sequence: Synthetic Antisense oligonucleotide
  modified_base 1: mod_base = OTHER; note = bicyclic nucleic acid (BNA)
  modified_base 21: mod_base = OTHER; note = bicyclic nucleic acid (BNA)
  source 1..21: mol_type = other DNA
atcaaggaagatggcatttct

SEQ ID NO: 7224 - DNA, 20 bp, synthetic construct
  misc_feature 1..20: note = Description of Artificial Sequence: Synthetic Antisense oligonucleotide
  modified_base 1: mod_base = OTHER; note = bicyclic nucleic acid (BNA)
  modified_base 20: mod_base = OTHER; note = bicyclic nucleic acid (BNA)
  source 1..20: mol_type = other DNA
atcaaggaagatggcatttc

SEQ ID NO: 7225 - DNA, 19 bp, synthetic construct
  misc_feature 1..19: note = Description of Artificial Sequence: Synthetic Antisense oligonucleotide
  modified_base 1: mod_base = OTHER; note = bicyclic nucleic acid (BNA)
  modified_base 19: mod_base = OTHER; note = bicyclic nucleic acid (BNA)
  source 1..19: mol_type = other DNA
atcaaggaagatggcattt

SEQ ID NO: 7226 - DNA, 18 bp, synthetic construct
  misc_feature 1..18: note = Description of Artificial Sequence: Synthetic Antisense oligonucleotide
  modified_base 1: mod_base = OTHER; note = bicyclic nucleic acid (BNA)
  modified_base 18: mod_base = OTHER; note = bicyclic nucleic acid (BNA)
  source 1..18: mol_type = other DNA
atcaaggaagatggcatt

SEQ ID NO: 7227 - DNA, 17 bp, synthetic construct
  misc_feature 1..17: note = Description of Artificial Sequence: Synthetic Antisense oligonucleotide
  modified_base 1: mod_base = OTHER; note = bicyclic nucleic acid (BNA)
  modified_base 17: mod_base = OTHER; note = bicyclic nucleic acid (BNA)
  source 1..17: mol_type = other DNA
atcaaggaagatggcat

SEQ ID NO: 7228 - DNA, 16 bp, synthetic construct
  misc_feature 1..16: note = Description of Artificial Sequence: Synthetic Antisense oligonucleotide
  modified_base 1: mod_base = OTHER; note = bicyclic nucleic acid (BNA)
  modified_base 16: mod_base = OTHER; note = bicyclic nucleic acid (BNA)
  source 1..16: mol_type = other DNA
atcaaggaagatggca

SEQ ID NO: 7229 - DNA, 15 bp, synthetic construct
  misc_feature 1..15: note = Description of Artificial Sequence: Synthetic Antisense oligonucleotide
  modified_base 1: mod_base = OTHER; note = bicyclic nucleic acid (BNA)
  modified_base 15: mod_base = OTHER; note = bicyclic nucleic acid (BNA)
  source 1..15: mol_type = other DNA
atcaaggaagatggc

SEQ ID NO: 7230 - DNA, 14 bp, synthetic construct
  misc_feature 1..14: note = Description of Artificial Sequence: Synthetic Antisense oligonucleotide
  modified_base 1: mod_base = OTHER; note = bicyclic nucleic acid (BNA)
  modified_base 14: mod_base = OTHER; note = bicyclic nucleic acid (BNA)
  source 1..14: mol_type = other DNA
atcaaggaagatgg

SEQ ID NO: 7231 - DNA, 13 bp, synthetic construct
  misc_feature 1..13: note = Description of Artificial Sequence: Synthetic Antisense oligonucleotide
  modified_base 1: mod_base = OTHER; note = bicyclic nucleic acid (BNA)
  modified_base 13: mod_base = OTHER; note = bicyclic nucleic acid (BNA)
  source 1..13: mol_type = other DNA
atcaaggaagatg

SEQ ID NO: 7232 - DNA, 12 bp, synthetic construct
  misc_feature 1..12: note = Description of Artificial Sequence: Synthetic Antisense oligonucleotide
  modified_base 1: mod_base = OTHER; note = bicyclic nucleic acid (BNA)
  modified_base 12: mod_base = OTHER; note = bicyclic nucleic acid (BNA)
  source 1..12: mol_type = other DNA
atcaaggaagat

SEQ ID NO: 7233 - DNA, 11 bp, synthetic construct
  misc_feature 1..11: note = Description of Artificial Sequence: Synthetic Antisense oligonucleotide
  modified_base 1: mod_base = OTHER; note = bicyclic nucleic acid (BNA)
  modified_base 11: mod_base = OTHER; note = bicyclic nucleic acid (BNA)
  source 1..11: mol_type = other DNA
atcaaggaaga

SEQ ID NO: 7234 - DNA, 10 bp, synthetic construct
  misc_feature 1..10: note = Description of Artificial Sequence: Synthetic Antisense oligonucleotide
  modified_base 1: mod_base = OTHER; note = bicyclic nucleic acid (BNA)
  modified_base 10: mod_base = OTHER; note = bicyclic nucleic acid (BNA)
  source 1..10: mol_type = other DNA
atcaaggaag

SEQ ID NO: 7235 - DNA, 18 bp, synthetic construct
  misc_feature 1..18: note = Description of Artificial Sequence: Synthetic Antisense oligonucleotide
  modified_base 1..2: mod_base = OTHER; note = bicyclic nucleic acid (BNA)
  source 1..18: mol_type = other DNA
ggtaagttctgtccaagc

SEQ ID NO: 7236 - DNA, 18 bp, synthetic construct
  misc_feature 1..18: note = Description of Artificial Sequence: Synthetic Antisense oligonucleotide
  modified_base 1..2: mod_base = OTHER; note = bicyclic nucleic acid (BNA)
  source 1..18: mol_type = other DNA
gtaagttctgtccaagcc

SEQ ID NO: 7237 - DNA, 18 bp, synthetic construct
  misc_feature 1..18: note = Description of Artificial Sequence: Synthetic Antisense oligonucleotide
  modified_base 1..2: mod_base = OTHER; note = bicyclic nucleic acid (BNA)
  source 1..18: mol_type = other DNA
agtcggtaagttctgtcc

SEQ ID NO: 7238 - DNA, 18 bp, synthetic construct
  misc_feature 1..18: note = Description of Artificial Sequence: Synthetic Antisense oligonucleotide
  modified_base 1..2: mod_base = OTHER; note = bicyclic nucleic acid (BNA)
  source 1..18: mol_type = other DNA
ctgtccaagcccggttga

SEQ ID NO: 7239 - DNA, 15 bp, synthetic construct
  misc_feature 1..15: note = Description of Artificial Sequence: Synthetic Antisense oligonucleotide
  modified_base 1..2: mod_base = OTHER; note = bicyclic nucleic acid (BNA)
  source 1..15: mol_type = other DNA
taagttctgtccaag

SEQ ID NO: 7240 - DNA, 20 bp, synthetic construct
  misc_feature 1..20: note = Description of Artificial Sequence: Synthetic Antisense oligonucleotide
  modified_base 1..2: mod_base = OTHER; note = bicyclic nucleic acid (BNA)
  source 1..20: mol_type = other DNA
ttctgtccaagcccggttga

SEQ ID NO: 7241 - DNA, 19 bp, synthetic construct
  misc_feature 1..19: note = Description of Artificial Sequence: Synthetic Antisense oligonucleotide
  modified_base 1..2: mod_base = OTHER; note = bicyclic nucleic acid (BNA)
  source 1..19: mol_type = other DNA
ttctgtccaagcccggttg

SEQ ID NO: 7242 - DNA, 18 bp, synthetic construct
  misc_feature 1..18: note = Description of Artificial Sequence: Synthetic Antisense oligonucleotide
  modified_base 1..2: mod_base = OTHER; note = bicyclic nucleic acid (BNA)
  source 1..18: mol_type = other DNA
ttctgtccaagcccggtt

SEQ ID NO: 7243 - DNA, 17 bp, synthetic construct
  misc_feature 1..17: note = Description of Artificial Sequence: Synthetic Antisense oligonucleotide
  modified_base 1..2: mod_base = OTHER; note = bicyclic nucleic acid (BNA)
  source 1..17: mol_type = other DNA
ttctgtccaagcccggt

SEQ ID NO: 7244 - DNA, 16 bp, synthetic construct
  misc_feature 1..16: note = Description of Artificial Sequence: Synthetic Antisense oligonucleotide
  modified_base 1..2: mod_base = OTHER; note = bicyclic nucleic acid (BNA)
  source 1..16: mol_type = other DNA
ttctgtccaagcccgg

SEQ ID NO: 7245 - DNA, 15 bp, synthetic construct
  misc_feature 1..15: note = Description of Artificial Sequence: Synthetic Antisense oligonucleotide
  modified_base 1..2: mod_base = OTHER; note = bicyclic nucleic acid (BNA)
  source 1..15: mol_type = other DNA
ttctgtccaagcccg

SEQ ID NO: 7246 - DNA, 14 bp, synthetic construct
  misc_feature 1..14: note = Description of Artificial Sequence: Synthetic Antisense oligonucleotide
  modified_base 1..2: mod_base = OTHER; note = bicyclic nucleic acid (BNA)
  source 1..14: mol_type = other DNA
ttctgtccaagccc

SEQ ID NO: 7247 - DNA, 13 bp, synthetic construct
  misc_feature 1..13: note = Description of Artificial Sequence: Synthetic Antisense oligonucleotide
  modified_base 1..2: mod_base = OTHER; note = bicyclic nucleic acid (BNA)
  source 1..13: mol_type = other DNA
ttctgtccaagcc

SEQ ID NO: 7248 - DNA, 12 bp, synthetic construct
  misc_feature 1..12: note = Description of Artificial Sequence: Synthetic Antisense oligonucleotide
  modified_base 1..2: mod_base = OTHER; note = bicyclic nucleic acid (BNA)
  source 1..12: mol_type = other DNA
ttctgtccaagc

SEQ ID NO: 7249 - DNA, 11 bp, synthetic construct
  misc_feature 1..11: note = Description of Artificial Sequence: Synthetic Antisense oligonucleotide
  modified_base 1..2: mod_base = OTHER; note = bicyclic nucleic acid (BNA)
  source 1..11: mol_type = other DNA
ttctgtccaag

SEQ ID NO: 7250 - DNA, 10 bp, synthetic construct
  misc_feature 1..10: note = Description of Artificial Sequence: Synthetic Antisense oligonucleotide
  modified_base 1..2: mod_base = OTHER; note = bicyclic nucleic acid (BNA)
  source 1..10: mol_type = other DNA
ttctgtccaa

SEQ ID NO: 7251-7252 - skipped (2 entries)

SEQ ID NO: 7253 - DNA, 19 bp, synthetic construct
  misc_feature 1..19: note = Description of Artificial Sequence: Synthetic Antisense oligonucleotide
  modified_base 1..2: mod_base = OTHER; note = bicyclic nucleic acid (BNA)
  source 1..19: mol_type = other DNA
tctgtccaagcccggttga

SEQ ID NO: 7254 - DNA, 18 bp, synthetic construct
  misc_feature 1..18: note = Description of Artificial Sequence: Synthetic Antisense oligonucleotide
  modified_base 1..2: mod_base = OTHER; note = bicyclic nucleic acid (BNA)
  source 1..18: mol_type = other DNA
tctgtccaagcccggttg

SEQ ID NO: 7255 - DNA, 17 bp, synthetic construct
  misc_feature 1..17: note = Description of Artificial Sequence: Synthetic Antisense oligonucleotide
  modified_base 1..2: mod_base = OTHER; note = bicyclic nucleic acid (BNA)
  source 1..17: mol_type = other DNA
tctgtccaagcccggtt

SEQ ID NO: 7256 - DNA, 16 bp, synthetic construct
  misc_feature 1..16: note = Description of Artificial Sequence: Synthetic Antisense oligonucleotide
  modified_base 1..2: mod_base = OTHER; note = bicyclic nucleic acid (BNA)
  source 1..16: mol_type = other DNA
tctgtccaagcccggt

SEQ ID NO: 7257 - DNA, 15 bp, synthetic construct
  misc_feature 1..15: note = Description of Artificial Sequence: Synthetic Antisense oligonucleotide
  modified_base 1..2: mod_base = OTHER; note = bicyclic nucleic acid (BNA)
  source 1..15: mol_type = other DNA
tctgtccaagcccgg

SEQ ID NO: 7258 - DNA, 14 bp, synthetic construct
  misc_feature 1..14: note = Description of Artificial Sequence: Synthetic Antisense oligonucleotide
  modified_base 1..2: mod_base = OTHER; note = bicyclic nucleic acid (BNA)
  source 1..14: mol_type = other DNA
tctgtccaagcccg

SEQ ID NO: 7259 - DNA, 13 bp, synthetic construct
  misc_feature 1..13: note = Description of Artificial Sequence: Synthetic Antisense oligonucleotide
  modified_base 1..2: mod_base = OTHER; note = bicyclic nucleic acid (BNA)
  source 1..13: mol_type = other DNA
tctgtccaagccc

SEQ ID NO: 7260 - DNA, 12 bp, synthetic construct
  misc_feature 1..12: note = Description of Artificial Sequence: Synthetic Antisense oligonucleotide
  modified_base 1..2: mod_base = OTHER; note = bicyclic nucleic acid (BNA)
  source 1..12: mol_type = other DNA
tctgtccaagcc

SEQ ID NO: 7261 - DNA, 11 bp, synthetic construct
  misc_feature 1..11: note = Description of Artificial Sequence: Synthetic Antisense oligonucleotide
  modified_base 1..2: mod_base = OTHER; note = bicyclic nucleic acid (BNA)
  source 1..11: mol_type = other DNA
tctgtccaagc

SEQ ID NO: 7262 - DNA, 10 bp, synthetic construct
  misc_feature 1..10: note = Description of Artificial Sequence: Synthetic Antisense oligonucleotide
  modified_base 1..2: mod_base = OTHER; note = bicyclic nucleic acid (BNA)
  source 1..10: mol_type = other DNA
tctgtccaag

SEQ ID NO: 7263-7264 - skipped (2 entries)

SEQ ID NO: 7265 - DNA, 17 bp, synthetic construct
  misc_feature 1..17: note = Description of Artificial Sequence: Synthetic Antisense oligonucleotide
  modified_base 1..2: mod_base = OTHER; note = bicyclic nucleic acid (BNA)
  source 1..17: mol_type = other DNA
ctgtccaagcccggttg

SEQ ID NO: 7266 - DNA, 16 bp, synthetic construct
  misc_feature 1..16: note = Description of Artificial Sequence: Synthetic Antisense oligonucleotide
  modified_base 1..2: mod_base = OTHER; note = bicyclic nucleic acid (BNA)
  source 1..16: mol_type = other DNA
ctgtccaagcccggtt

SEQ ID NO: 7267 - DNA, 15 bp, synthetic construct
  misc_feature 1..15: note = Description of Artificial Sequence: Synthetic Antisense oligonucleotide
  modified_base 1..2: mod_base = OTHER; note = bicyclic nucleic acid (BNA)
  source 1..15: mol_type = other DNA
ctgtccaagcccggt

SEQ ID NO: 7268 - DNA, 14 bp, synthetic construct
  misc_feature 1..14: note = Description of Artificial Sequence: Synthetic Antisense oligonucleotide
  modified_base 1..2: mod_base = OTHER; note = bicyclic nucleic acid (BNA)
  source 1..14: mol_type = other DNA
ctgtccaagcccgg

SEQ ID NO: 7269 - DNA, 13 bp, synthetic construct
  misc_feature 1..13: note = Description of Artificial Sequence: Synthetic Antisense oligonucleotide
  modified_base 1..2: mod_base = OTHER; note = bicyclic nucleic acid (BNA)
  source 1..13: mol_type = other DNA
ctgtccaagcccg

SEQ ID NO: 7270 - DNA, 12 bp, synthetic construct
  misc_feature 1..12: note = Description of Artificial Sequence: Synthetic Antisense oligonucleotide
  modified_base 1..2: mod_base = OTHER; note = bicyclic nucleic acid (BNA)
  source 1..12: mol_type = other DNA
ctgtccaagccc

SEQ ID NO: 7271 - DNA, 11 bp, synthetic construct
  misc_feature 1..11: note = Description of Artificial Sequence: Synthetic Antisense oligonucleotide
  modified_base 1..2: mod_base = OTHER; note = bicyclic nucleic acid (BNA)
  source 1..11: mol_type = other DNA
ctgtccaagcc

SEQ ID NO: 7272 - DNA, 10 bp, synthetic construct
  misc_feature 1..10: note = Description of Artificial Sequence: Synthetic Antisense oligonucleotide
  modified_base 1..2: mod_base = OTHER; note = bicyclic nucleic acid (BNA)
  source 1..10: mol_type = other DNA
ctgtccaagc

SEQ ID NO: 7273-7274 - skipped (2 entries)

SEQ ID NO: 7275 - DNA, 20 bp, synthetic construct
  misc_feature 1..20: note = Description of Artificial Sequence: Synthetic Antisense oligonucleotide
  modified_base 1..2: mod_base = OTHER; note = bicyclic nucleic acid (BNA)
  source 1..20: mol_type = other DNA
gttctgtccaagcccggttg

SEQ ID NO: 7276 - DNA, 19 bp, synthetic construct
  misc_feature 1..19: note = Description of Artificial Sequence: Synthetic Antisense oligonucleotide
  modified_base 1..2: mod_base = OTHER; note = bicyclic nucleic acid (BNA)
  source 1..19: mol_type = other DNA
gttctgtccaagcccggtt

SEQ ID NO: 7277 - DNA, 18 bp, synthetic construct
  misc_feature 1..18: note = Description of Artificial Sequence: Synthetic Antisense oligonucleotide
  modified_base 1..2: mod_base = OTHER; note = bicyclic nucleic acid (BNA)
  source 1..18: mol_type = other DNA
gttctgtccaagcccggt

SEQ ID NO: 7278 - DNA, 17 bp, synthetic construct
  misc_feature 1..17: note = Description of Artificial Sequence: Synthetic Antisense oligonucleotide
  modified_base 1..2: mod_base = OTHER; note = bicyclic nucleic acid (BNA)
  source 1..17: mol_type = other DNA
gttctgtccaagcccgg

SEQ ID NO: 7279 - DNA, 16 bp, synthetic construct
  misc_feature 1..16: note = Description of Artificial Sequence: Synthetic Antisense oligonucleotide
  modified_base 1..2: mod_base = OTHER; note = bicyclic nucleic acid (BNA)
  source 1..16: mol_type = other DNA
gttctgtccaagcccg

SEQ ID NO: 7280 - DNA, 15 bp, synthetic construct
  misc_feature 1..15: note = Description of Artificial Sequence: Synthetic Antisense oligonucleotide
  modified_base 1..2: mod_base = OTHER; note = bicyclic nucleic acid (BNA)
  source 1..15: mol_type = other DNA
gttctgtccaagccc

SEQ ID NO: 7281 - DNA, 14 bp, synthetic construct
  misc_feature 1..14: note = Description of Artificial Sequence: Synthetic Antisense oligonucleotide
  modified_base 1..2: mod_base = OTHER; note = bicyclic nucleic acid (BNA)
  source 1..14: mol_type = other DNA
gttctgtccaagcc

SEQ ID NO: 7282 - DNA, 13 bp, synthetic construct
  misc_feature 1..13: note = Description of Artificial Sequence: Synthetic Antisense oligonucleotide
  modified_base 1..2: mod_base = OTHER; note = bicyclic nucleic acid (BNA)
  source 1..13: mol_type = other DNA
gttctgtccaagc

SEQ ID NO: 7283 - DNA, 12 bp, synthetic construct
  misc_feature 1..12: note = Description of Artificial Sequence: Synthetic Antisense oligonucleotide
  modified_base 1..2: mod_base = OTHER; note = bicyclic nucleic acid (BNA)
  source 1..12: mol_type = other DNA
gttctgtccaag

SEQ ID NO: 7284 - DNA, 11 bp, synthetic construct
  misc_feature 1..11: note = Description of Artificial Sequence: Synthetic Antisense oligonucleotide
  modified_base 1..2: mod_base = OTHER; note = bicyclic nucleic acid (BNA)
  source 1..11: mol_type = other DNA
gttctgtccaa

SEQ ID NO: 7285 - DNA, 10 bp, synthetic construct
  misc_feature 1..10: note = Description of Artificial Sequence: Synthetic Antisense oligonucleotide
  modified_base 1..2: mod_base = OTHER; note = bicyclic nucleic acid (BNA)
  source 1..10: mol_type = other DNA
gttctgtcca

SEQ ID NO: 7286-7287 - skipped (2 entries)

SEQ ID NO: 7288 - DNA, 20 bp, synthetic construct
  misc_feature 1..20: note = Description of Artificial Sequence: Synthetic Antisense oligonucleotide
  modified_base 1..2: mod_base = OTHER; note = bicyclic nucleic acid (BNA)
  source 1..20: mol_type = other DNA
agttctgtccaagcccggtt

SEQ ID NO: 7289 - DNA, 19 bp, synthetic construct
  misc_feature 1..19: note = Description of Artificial Sequence: Synthetic Antisense oligonucleotide
  modified_base 1..2: mod_base = OTHER; note = bicyclic nucleic acid (BNA)
  source 1..19: mol_type = other DNA
agttctgtccaagcccggt

SEQ ID NO: 7290 - DNA, 18 bp, synthetic construct
  misc_feature 1..18: note = Description of Artificial Sequence: Synthetic Antisense oligonucleotide
  modified_base 1..2: mod_base = OTHER; note = bicyclic nucleic acid (BNA)
  source 1..18: mol_type = other DNA
agttctgtccaagcccgg

SEQ ID NO: 7291 - DNA, 17 bp, synthetic construct
  misc_feature 1..17: note = Description of Artificial Sequence: Synthetic Antisense oligonucleotide
  modified_base 1..2: mod_base = OTHER; note = bicyclic nucleic acid (BNA)
  source 1..17: mol_type = other DNA
agttctgtccaagcccg

SEQ ID NO: 7292 - DNA, 16 bp, synthetic construct
  misc_feature 1..16: note = Description of Artificial Sequence: Synthetic Antisense oligonucleotide
  modified_base 1..2: mod_base = OTHER; note = bicyclic nucleic acid (BNA)
  source 1..16: mol_type = other DNA
agttctgtccaagccc

SEQ ID NO: 7293 - DNA, 15 bp, synthetic construct
  misc_feature 1..15: note = Description of Artificial Sequence: Synthetic Antisense oligonucleotide
  modified_base 1..2: mod_base = OTHER; note = bicyclic nucleic acid (BNA)
  source 1..15: mol_type = other DNA
agttctgtccaagcc

SEQ ID NO: 7294 - DNA, 14 bp, synthetic construct
  misc_feature 1..14: note = Description of Artificial Sequence: Synthetic Antisense oligonucleotide
  modified_base 1..2: mod_base = OTHER; note = bicyclic nucleic acid (BNA)
  source 1..14: mol_type = other DNA
agttctgtccaagc

SEQ ID NO: 7295 - DNA, 13 bp, synthetic construct
  misc_feature 1..13: note = Description of Artificial Sequence: Synthetic Antisense oligonucleotide
  modified_base 1..2: mod_base = OTHER; note = bicyclic nucleic acid (BNA)
  source 1..13: mol_type = other DNA
agttctgtccaag

SEQ ID NO: 7296 - DNA, 12 bp, synthetic construct
  misc_feature 1..12: note = Description of Artificial Sequence: Synthetic Antisense oligonucleotide
  modified_base 1..2: mod_base = OTHER; note = bicyclic nucleic acid (BNA)
  source 1..12: mol_type = other DNA
agttctgtccaa

SEQ ID NO: 7297 - DNA, 11 bp, synthetic construct
  misc_feature 1..11: note = Description of Artificial Sequence: Synthetic Antisense oligonucleotide
  modified_base 1..2: mod_base = OTHER; note = bicyclic nucleic acid (BNA)
  source 1..11: mol_type = other DNA
agttctgtcca

SEQ ID NO: 7298 - DNA, 10 bp, synthetic construct
  misc_feature 1..10: note = Description of Artificial Sequence: Synthetic Antisense oligonucleotide
  modified_base 1..2: mod_base = OTHER; note = bicyclic nucleic acid (BNA)
  source 1..10: mol_type = other DNA
agttctgtcc

SEQ ID NO: 7299-7300 - skipped (2 entries)

SEQ ID NO: 7301 - DNA, 20 bp, synthetic construct
  misc_feature 1..20: note = Description of Artificial Sequence: Synthetic Antisense oligonucleotide
  modified_base 1..2: mod_base = OTHER; note = bicyclic nucleic acid (BNA)
  source 1..20: mol_type = other DNA
aagttctgtccaagcccggt

SEQ ID NO: 7302 - DNA, 19 bp, synthetic construct
  misc_feature 1..19: note = Description of Artificial Sequence: Synthetic Antisense oligonucleotide
  modified_base 1..2: mod_base = OTHER; note = bicyclic nucleic acid (BNA)
  source 1..19: mol_type = other DNA
aagttctgtccaagcccgg

SEQ ID NO: 7303 - DNA, 18 bp, synthetic construct
  misc_feature 1..18: note = Description of Artificial Sequence: Synthetic Antisense oligonucleotide
  modified_base 1..2: mod_base = OTHER; note = bicyclic nucleic acid (BNA)
  source 1..18: mol_type = other DNA
aagttctgtccaagcccg

SEQ ID NO: 7304 - DNA, 17 bp, synthetic construct
  misc_feature 1..17: note = Description of Artificial Sequence: Synthetic Antisense oligonucleotide
  modified_base 1..2: mod_base = OTHER; note = bicyclic nucleic acid (BNA)
  source 1..17: mol_type = other DNA
aagttctgtccaagccc

SEQ ID NO: 7305 - DNA, 16 bp, synthetic construct
  misc_feature 1..16: note = Description of Artificial Sequence: Synthetic Antisense oligonucleotide
  modified_base 1..2: mod_base = OTHER; note = bicyclic nucleic acid (BNA)
  source 1..16: mol_type = other DNA
aagttctgtccaagcc

SEQ ID NO: 7306 - DNA, 15 bp, synthetic construct
  misc_feature 1..15: note = Description of Artificial Sequence: Synthetic Antisense oligonucleotide
  modified_base 1..2: mod_base = OTHER; note = bicyclic nucleic acid (BNA)
  source 1..15: mol_type = other DNA
aagttctgtccaagc

SEQ ID NO: 7307 - DNA, 14 bp, synthetic construct
  misc_feature 1..14: note = Description of Artificial Sequence: Synthetic Antisense oligonucleotide
  modified_base 1..2: mod_base = OTHER; note = bicyclic nucleic acid (BNA)
  source 1..14: mol_type = other DNA
aagttctgtccaag

SEQ ID NO: 7308 - DNA, 13 bp, synthetic construct
  misc_feature 1..13: note = Description of Artificial Sequence: Synthetic Antisense oligonucleotide
  modified_base 1..2: mod_base = OTHER; note = bicyclic nucleic acid (BNA)
  source 1..13: mol_type = other DNA
aagttctgtccaa

SEQ ID NO: 7309 - DNA, 12 bp, synthetic construct
  misc_feature 1..12: note = Description of Artificial Sequence: Synthetic Antisense oligonucleotide
  modified_base 1..2: mod_base = OTHER; note = bicyclic nucleic acid (BNA)
  source 1..12: mol_type = other DNA
aagttctgtcca

SEQ ID NO: 7310 - DNA, 11 bp, synthetic construct
  misc_feature 1..11: note = Description of Artificial Sequence: Synthetic Antisense oligonucleotide
  modified_base 1..2: mod_base = OTHER; note = bicyclic nucleic acid (BNA)
  source 1..11: mol_type = other DNA
aagttctgtcc

SEQ ID NO: 7311 - DNA, 10 bp, synthetic construct
  misc_feature 1..10: note = Description of Artificial Sequence: Synthetic Antisense oligonucleotide
  modified_base 1..2: mod_base = OTHER; note = bicyclic nucleic acid (BNA)
  source 1..10: mol_type = other DNA
aagttctgtc

SEQ ID NO: 7312-7313 - skipped (2 entries)

SEQ ID NO: 7314 - DNA, 20 bp, synthetic construct
  misc_feature 1..20: note = Description of Artificial Sequence: Synthetic Antisense oligonucleotide
  modified_base 1..2: mod_base = OTHER; note = bicyclic nucleic acid (BNA)
  source 1..20: mol_type = other DNA
taagttctgtccaagcccgg

SEQ ID NO: 7315 - DNA, 19 bp, synthetic construct
  misc_feature 1..19: note = Description of Artificial Sequence: Synthetic Antisense oligonucleotide
  modified_base 1..2: mod_base = OTHER; note = bicyclic nucleic acid (BNA)
  source 1..19: mol_type = other DNA
taagttctgtccaagcccg

SEQ ID NO: 7316 - DNA, 18 bp, synthetic construct
  misc_feature 1..18: note = Description of Artificial Sequence: Synthetic Antisense oligonucleotide
  modified_base 1..2: mod_base = OTHER; note = bicyclic nucleic acid (BNA)
  source 1..18: mol_type = other DNA
taagttctgtccaagccc

SEQ ID NO: 7317 - DNA, 17 bp, synthetic construct
  misc_feature 1..17: note = Description of Artificial Sequence: Synthetic Antisense oligonucleotide
  modified_base 1..2: mod_base = OTHER; note = bicyclic nucleic acid (BNA)
  source 1..17: mol_type = other DNA
taagttctgtccaagcc

SEQ ID NO: 7318 - DNA, 16 bp, synthetic construct
  misc_feature 1..16: note = Description of Artificial Sequence: Synthetic Antisense oligonucleotide
  modified_base 1..2: mod_base = OTHER; note = bicyclic nucleic acid (BNA)
  source 1..16: mol_type = other DNA
taagttctgtccaagc

SEQ ID NO: 7319 - DNA, 14 bp, synthetic construct
  misc_feature 1..14: note = Description of Artificial Sequence: Synthetic Antisense oligonucleotide
  modified_base 1..2: mod_base = OTHER; note = bicyclic nucleic acid (BNA)
  source 1..14: mol_type = other DNA
taagttctgtccaa

SEQ ID NO: 7320 - DNA, 13 bp, synthetic construct
  misc_feature 1..13: note = Description of Artificial Sequence: Synthetic Antisense oligonucleotide
  modified_base 1..2: mod_base = OTHER; note = bicyclic nucleic acid (BNA)
  source 1..13: mol_type = other DNA
taagttctgtcca

SEQ ID NO: 7321 - DNA, 12 bp, synthetic construct
  misc_feature 1..12: note = Description of Artificial Sequence: Synthetic Antisense oligonucleotide
  modified_base 1..2: mod_base = OTHER; note = bicyclic nucleic acid (BNA)
  source 1..12: mol_type = other DNA
taagttctgtcc

SEQ ID NO: 7322 - DNA, 11 bp, synthetic construct
  misc_feature 1..11: note = Description of Artificial Sequence: Synthetic Antisense oligonucleotide
  modified_base 1..2: mod_base = OTHER; note = bicyclic nucleic acid (BNA)
  source 1..11: mol_type = other DNA
taagttctgtc

SEQ ID NO: 7323 - DNA, 10 bp, synthetic construct
  misc_feature 1..10: note = Description of Artificial Sequence: Synthetic Antisense oligonucleotide
  modified_base 1..2: mod_base = OTHER; note = bicyclic nucleic acid (BNA)
  source 1..10: mol_type = other DNA
taagttctgt

SEQ ID NO: 7324-7325 - skipped (2 entries)

SEQ ID NO: 7326 - DNA, 20 bp, synthetic construct
  misc_feature 1..20: note = Description of Artificial Sequence: Synthetic Antisense oligonucleotide
  modified_base 1..2: mod_base = OTHER; note = bicyclic nucleic acid (BNA)
  source 1..20: mol_type = other DNA
gtaagttctgtccaagcccg

SEQ ID NO: 7327 - DNA, 19 bp, synthetic construct
  misc_feature 1..19: note = Description of Artificial Sequence: Synthetic Antisense oligonucleotide
  modified_base 1..2: mod_base = OTHER; note = bicyclic nucleic acid (BNA)
  source 1..19: mol_type = other DNA
gtaagttctgtccaagccc

SEQ ID NO: 7328 - DNA, 17 bp, synthetic construct
  misc_feature 1..17: note = Description of Artificial Sequence: Synthetic Antisense oligonucleotide
  modified_base 1..2: mod_base = OTHER; note = bicyclic nucleic acid (BNA)
  source 1..17: mol_type = other DNA
gtaagttctgtccaagc

SEQ ID NO: 7329 - DNA, 16 bp, synthetic construct
  misc_feature 1..16: note = Description of Artificial Sequence: Synthetic Antisense oligonucleotide
  modified_base 1..2: mod_base = OTHER; note = bicyclic nucleic acid (BNA)
  source 1..16: mol_type = other DNA
gtaagttctgtccaag

SEQ ID NO: 7330 - DNA, 15 bp, synthetic construct
  misc_feature 1..15: note = Description of Artificial Sequence: Synthetic Antisense oligonucleotide
  modified_base 1..2: mod_base = OTHER; note = bicyclic nucleic acid (BNA)
  source 1..15: mol_type = other DNA
gtaagttctgtccaa

SEQ ID NO: 7331 - DNA, 14 bp, synthetic construct
  misc_feature 1..14: note = Description of Artificial Sequence: Synthetic Antisense oligonucleotide
  modified_base 1..2: mod_base = OTHER; note = bicyclic nucleic acid (BNA)
  source 1..14: mol_type = other DNA
gtaagttctgtcca

SEQ ID NO: 7332 - DNA, 13 bp, synthetic construct
  misc_feature 1..13: note = Description of Artificial Sequence: Synthetic Antisense oligonucleotide
  modified_base 1..2: mod_base = OTHER; note = bicyclic nucleic acid (BNA)
  source 1..13: mol_type = other DNA
gtaagttctgtcc

SEQ ID NO: 7333 - DNA, 12 bp, synthetic construct
  misc_feature 1..12: note = Description of Artificial Sequence: Synthetic Antisense oligonucleotide
  modified_base 1..2: mod_base = OTHER; note = bicyclic nucleic acid (BNA)
  source 1..12: mol_type = other DNA
gtaagttctgtc

SEQ ID NO: 7334 - DNA, 11 bp, synthetic construct
  misc_feature 1..11: note = Description of Artificial Sequence: Synthetic Antisense oligonucleotide
  modified_base 1..2: mod_base = OTHER; note = bicyclic nucleic acid (BNA)
  source 1..11: mol_type = other DNA
gtaagttctgt

SEQ ID NO: 7335 - DNA, 10 bp, synthetic construct
  misc_feature 1..10: note = Description of Artificial Sequence: Synthetic Antisense oligonucleotide
  modified_base 1..2: mod_base = OTHER; note = bicyclic nucleic acid (BNA)
  source 1..10: mol_type = other DNA
gtaagttctg

SEQ ID NO: 7336-7337 - skipped (2 entries)

SEQ ID NO: 7338 - DNA, 20 bp, synthetic construct
  misc_feature 1..20: note = Description of Artificial Sequence: Synthetic Antisense oligonucleotide
  modified_base 1..2: mod_base = OTHER; note = bicyclic nucleic acid (BNA)
  source 1..20: mol_type = other DNA
ggtaagttctgtccaagccc

SEQ ID NO: 7339 - DNA, 19 bp, synthetic construct
  misc_feature 1..19: note = Description of Artificial Sequence: Synthetic Antisense oligonucleotide
  modified_base 1..2: mod_base = OTHER; note = bicyclic nucleic acid (BNA)
  source 1..19: mol_type = other DNA
ggtaagttctgtccaagcc

SEQ ID NO: 7340 - DNA, 17 bp, synthetic construct
  misc_feature 1..17: note = Description of Artificial Sequence: Synthetic Antisense oligonucleotide
  modified_base 1..2: mod_base = OTHER; note = bicyclic nucleic acid (BNA)
  source 1..17: mol_type = other DNA
ggtaagttctgtccaag

SEQ ID NO: 7341 - DNA, 16 bp, synthetic construct
  misc_feature 1..16: note = Description of Artificial Sequence: Synthetic Antisense oligonucleotide
  modified_base 1..2: mod_base = OTHER; note = bicyclic nucleic acid (BNA)
  source 1..16: mol_type = other DNA
ggtaagttctgtccaa

SEQ ID NO: 7342 - DNA, 15 bp, synthetic construct
  misc_feature 1..15: note = Description of Artificial Sequence: Synthetic Antisense oligonucleotide
  modified_base 1..2: mod_base = OTHER; note = bicyclic nucleic acid (BNA)
  source 1..15: mol_type = other DNA
ggtaagttctgtcca

SEQ ID NO: 7343 - DNA, 14 bp, synthetic construct
  misc_feature 1..14: note = Description of Artificial Sequence: Synthetic Antisense oligonucleotide
  modified_base 1..2: mod_base = OTHER; note = bicyclic nucleic acid (BNA)
  source 1..14: mol_type = other DNA
ggtaagttctgtcc

SEQ ID NO: 7344 - DNA, 13 bp, synthetic construct
  misc_feature 1..13: note = Description of Artificial Sequence: Synthetic Antisense oligonucleotide
  modified_base 1..2: mod_base = OTHER; note = bicyclic nucleic acid (BNA)
  source 1..13: mol_type = other DNA
ggtaagttctgtc

SEQ ID NO: 7345 - DNA, 12 bp, synthetic construct
  misc_feature 1..12: note = Description of Artificial Sequence: Synthetic Antisense oligonucleotide
  modified_base 1..2: mod_base = OTHER; note = bicyclic nucleic acid (BNA)
  source 1..12: mol_type = other DNA
ggtaagttctgt

SEQ ID NO: 7346 - DNA, 11 bp, synthetic construct
  misc_feature 1..11: note = Description of Artificial Sequence: Synthetic Antisense oligonucleotide
  modified_base 1..2: mod_base = OTHER; note = bicyclic nucleic acid (BNA)
  source 1..11: mol_type = other DNA
ggtaagttctg

SEQ ID NO: 7347 - DNA, 10 bp, synthetic construct
  misc_feature 1..10: note = Description of Artificial Sequence: Synthetic Antisense oligonucleotide
  modified_base 1..2: mod_base = OTHER; note = bicyclic nucleic acid (BNA)
  source 1..10: mol_type = other DNA
ggtaagttct

SEQ ID NO: 7348-7349 - skipped (2 entries)

SEQ ID NO: 7350 - DNA, 20 bp, synthetic construct
  misc_feature 1..20: note = Description of Artificial Sequence: Synthetic Antisense oligonucleotide
  modified_base 1..2: mod_base = OTHER; note = bicyclic nucleic acid (BNA)
  source 1..20: mol_type = other DNA
cggtaagttctgtccaagcc

SEQ ID NO: 7351 - DNA, 19 bp, synthetic construct
  misc_feature 1..19: note = Description of Artificial Sequence: Synthetic Antisense oligonucleotide
  modified_base 1..2: mod_base = OTHER; note = bicyclic nucleic acid (BNA)
  source 1..19: mol_type = other DNA
cggtaagttctgtccaagc

SEQ ID NO: 7352 - DNA, 18 bp, synthetic construct
  misc_feature 1..18: note = Description of Artificial Sequence: Synthetic Antisense oligonucleotide
  modified_base 1..2: mod_base = OTHER; note = bicyclic nucleic acid (BNA)
  source 1..18: mol_type = other DNA
cggtaagttctgtccaag

SEQ ID NO: 7353 - DNA, 17 bp, synthetic construct
  misc_feature 1..17: note = Description of Artificial Sequence: Synthetic Antisense oligonucleotide
  modified_base 1..2: mod_base = OTHER; note = bicyclic nucleic acid (BNA)
  source 1..17: mol_type = other DNA
cggtaagttctgtccaa

SEQ ID NO: 7354 - DNA, 16 bp, synthetic construct
  misc_feature 1..16: note = Description of Artificial Sequence: Synthetic Antisense oligonucleotide
  modified_base 1..2: mod_base = OTHER; note = bicyclic nucleic acid (BNA)
  source 1..16: mol_type = other DNA
cggtaagttctgtcca

SEQ ID NO: 7355 - DNA, 15 bp, synthetic construct
  misc_feature 1..15: note = Description of Artificial Sequence: Synthetic Antisense oligonucleotide
  modified_base 1..2: mod_base = OTHER; note = bicyclic nucleic acid (BNA)
  source 1..15: mol_type = other DNA
cggtaagttctgtcc

SEQ ID NO: 7356 - DNA, 14 bp, synthetic construct
  misc_feature 1..14: note = Description of Artificial Sequence: Synthetic Antisense oligonucleotide
  modified_base 1..2: mod_base = OTHER; note = bicyclic nucleic acid (BNA)
  source 1..14: mol_type = other DNA
cggtaagttctgtc

SEQ ID NO: 7357 - DNA, 13 bp, synthetic construct
  misc_feature 1..13: note = Description of Artificial Sequence: Synthetic Antisense oligonucleotide
  modified_base 1..2: mod_base = OTHER; note = bicyclic nucleic acid (BNA)
  source 1..13: mol_type = other DNA
cggtaagttctgt

SEQ ID NO: 7358 - DNA, 12 bp, synthetic construct
  misc_feature 1..12: note = Description of Artificial Sequence: Synthetic Antisense oligonucleotide
  modified_base 1..2: mod_base = OTHER; note = bicyclic nucleic acid (BNA)
  source 1..12: mol_type = other DNA
cggtaagttctg

SEQ ID NO: 7359 - DNA, 11 bp, synthetic construct
  misc_feature 1..11: note = Description of Artificial Sequence: Synthetic Antisense oligonucleotide
  modified_base 1..2: mod_base = OTHER; note = bicyclic nucleic acid (BNA)
  source 1..11: mol_type = other DNA
cggtaagttct

SEQ ID NO: 7360 - DNA, 10 bp, synthetic construct
  misc_feature 1..10: note = Description of Artificial Sequence: Synthetic Antisense oligonucleotide
  modified_base 1..2: mod_base = OTHER; note = bicyclic nucleic acid (BNA)
  source 1..10: mol_type = other DNA
cggtaagttc

SEQ ID NO: 7361-7362 - skipped (2 entries)

SEQ ID NO: 7363 - DNA, 20 bp, synthetic construct
  misc_feature 1..20: note = Description of Artificial Sequence: Synthetic Antisense oligonucleotide
  modified_base 1..2: mod_base = OTHER; note = bicyclic nucleic acid (BNA)
  source 1..20: mol_type = other DNA
tcggtaagttctgtccaagc

SEQ ID NO: 7364 - DNA, 19 bp, synthetic construct
  misc_feature 1..19: note = Description of Artificial Sequence: Synthetic Antisense oligonucleotide
  modified_base 1..2: mod_base = OTHER; note = bicyclic nucleic acid (BNA)
  source 1..19: mol_type = other DNA
tcggtaagttctgtccaag

SEQ ID NO: 7365 - DNA, 18 bp, synthetic construct
  misc_feature 1..18: note = Description of Artificial Sequence: Synthetic Antisense oligonucleotide
  modified_base 1..2: mod_base = OTHER; note = bicyclic nucleic acid (BNA)
  source 1..18: mol_type = other DNA
tcggtaagttctgtccaa

SEQ ID NO: 7366 - DNA, 17 bp, synthetic construct
  misc_feature 1..17: note = Description of Artificial Sequence: Synthetic Antisense oligonucleotide
  modified_base 1..2: mod_base = OTHER; note = bicyclic nucleic acid (BNA)
  source 1..17: mol_type = other DNA
tcggtaagttctgtcca

SEQ ID NO: 7367 - DNA, 16 bp, synthetic construct
  misc_feature 1..16: note = Description of Artificial Sequence: Synthetic Antisense oligonucleotide
  modified_base 1..2: mod_base = OTHER; note = bicyclic nucleic acid (BNA)
  source 1..16: mol_type = other DNA
tcggtaagttctgtcc

SEQ ID NO: 7368 - DNA, 15 bp, synthetic construct
  misc_feature 1..15: note = Description of Artificial Sequence: Synthetic Antisense oligonucleotide
  modified_base 1..2: mod_base = OTHER; note = bicyclic nucleic acid (BNA)
  source 1..15: mol_type = other DNA
tcggtaagttctgtc

SEQ ID NO: 7369 - DNA, 14 bp, synthetic construct
  misc_feature 1..14: note = Description of Artificial Sequence: Synthetic Antisense oligonucleotide
  modified_base 1..2: mod_base = OTHER; note = bicyclic nucleic acid (BNA)
  source 1..14: mol_type = other DNA
tcggtaagttctgt

SEQ ID NO: 7370 - DNA, 13 bp, synthetic construct
  misc_feature 1..13: note = Description of Artificial Sequence: Synthetic Antisense oligonucleotide
  modified_base 1..2: mod_base = OTHER; note = bicyclic nucleic acid (BNA)
  source 1..13: mol_type = other DNA
tcggtaagttctg

SEQ ID NO: 7371 - DNA, 12 bp, synthetic construct
  misc_feature 1..12: note = Description of Artificial Sequence: Synthetic Antisense oligonucleotide
  modified_base 1..2: mod_base = OTHER; note = bicyclic nucleic acid (BNA)
  source 1..12: mol_type = other DNA
tcggtaagttct

SEQ ID NO: 7372 - DNA, 11 bp, synthetic construct
  misc_feature 1..11: note = Description of Artificial Sequence: Synthetic Antisense oligonucleotide
  modified_base 1..2: mod_base = OTHER; note = bicyclic nucleic acid (BNA)
  source 1..11: mol_type = other DNA
tcggtaagttc

SEQ ID NO: 7373 - DNA, 10 bp, synthetic construct
  misc_feature 1..10: note = Description of Artificial Sequence: Synthetic Antisense oligonucleotide
  modified_base 1..2: mod_base = OTHER; note = bicyclic nucleic acid (BNA)
  source 1..10: mol_type = other DNA
tcggtaagtt

SEQ ID NO: 7374 - skipped

SEQ ID NO: 7375 - DNA, 20 bp, synthetic construct
  misc_feature 1..20: note = Description of Artificial Sequence: Synthetic Antisense oligonucleotide
  modified_base 1..2: mod_base = OTHER; note = bicyclic nucleic acid (BNA)
  source 1..20: mol_type = other DNA
gtcggtaagttctgtccaag

SEQ ID NO: 7376 - DNA, 19 bp, synthetic construct
  misc_feature 1..19: note = Description of Artificial Sequence: Synthetic Antisense oligonucleotide
  modified_base 1..2: mod_base = OTHER; note = bicyclic nucleic acid (BNA)
  source 1..19: mol_type = other DNA
gtcggtaagttctgtccaa

SEQ ID NO: 7377 - DNA, 18 bp, synthetic construct
  misc_feature 1..18: note = Description of Artificial Sequence: Synthetic Antisense oligonucleotide
  modified_base 1..2: mod_base = OTHER; note = bicyclic nucleic acid (BNA)
  source 1..18: mol_type = other DNA
gtcggtaagttctgtcca

SEQ ID NO: 7378 - DNA, 17 bp, synthetic construct
  misc_feature 1..17: note = Description of Artificial Sequence: Synthetic Antisense oligonucleotide
  modified_base 1..2: mod_base = OTHER; note = bicyclic nucleic acid (BNA)
  source 1..17: mol_type = other DNA
gtcggtaagttctgtcc

SEQ ID NO: 7379 - DNA, 16 bp, synthetic construct
  misc_feature 1..16: note = Description of Artificial Sequence: Synthetic Antisense oligonucleotide
  modified_base 1..2: mod_base = OTHER; note = bicyclic nucleic acid (BNA)
  source 1..16: mol_type = other DNA
gtcggtaagttctgtc

SEQ ID NO: 7380 - DNA, 15 bp, synthetic construct
  misc_feature 1..15: note = Description of Artificial Sequence: Synthetic Antisense oligonucleotide
  modified_base 1..2: mod_base = OTHER; note = bicyclic nucleic acid (BNA)
  source 1..15: mol_type = other DNA
gtcggtaagttctgt

SEQ ID NO: 7381 - DNA, 14 bp, synthetic construct
  misc_feature 1..14: note = Description of Artificial Sequence: Synthetic Antisense oligonucleotide
  modified_base 1..2: mod_base = OTHER; note = bicyclic nucleic acid (BNA)
  source 1..14: mol_type = other DNA
gtcggtaagttctg

SEQ ID NO: 7382 - DNA, 13 bp, synthetic construct
  misc_feature 1..13: note = Description of Artificial Sequence: Synthetic Antisense oligonucleotide
  modified_base 1..2: mod_base = OTHER; note = bicyclic nucleic acid (BNA)
  source 1..13: mol_type = other DNA
gtcggtaagttct

SEQ ID NO: 7383 - DNA, 12 bp, synthetic construct
  misc_feature 1..12: note = Description of Artificial Sequence: Synthetic Antisense oligonucleotide
  modified_base 1..2: mod_base = OTHER; note = bicyclic nucleic acid (BNA)
  source 1..12: mol_type = other DNA
gtcggtaagttc

SEQ ID NO: 7384 - DNA, 11 bp, synthetic construct
  misc_feature 1..11: note = Description of Artificial Sequence: Synthetic Antisense oligonucleotide
  modified_base 1..2: mod_base = OTHER; note = bicyclic nucleic acid (BNA)
  source 1..11: mol_type = other DNA
gtcggtaagtt

SEQ ID NO: 7385 - DNA, 10 bp, synthetic construct
  misc_feature 1..10: note = Description of Artificial Sequence: Synthetic Antisense oligonucleotide
  modified_base 1..2: mod_base = OTHER; note = bicyclic nucleic acid (BNA)
  source 1..10: mol_type = other DNA
gtcggtaagt

SEQ ID NO: 7386 - DNA, 20 bp, synthetic construct
  misc_feature 1..20: note = Description of Artificial Sequence: Synthetic Antisense oligonucleotide
  modified_base 1..2: mod_base = OTHER; note = bicyclic nucleic acid (BNA)
  source 1..20: mol_type = other DNA
agtcggtaagttctgtccaa

SEQ ID NO: 7387 - DNA, 19 bp, synthetic construct
  misc_feature 1..19: note = Description of Artificial Sequence: Synthetic Antisense oligonucleotide
  modified_base 1..2: mod_base = OTHER; note = bicyclic nucleic acid (BNA)
  source 1..19: mol_type = other DNA
agtcggtaagttctgtcca

SEQ ID NO: 7388 - DNA, 17 bp, synthetic construct
  misc_feature 1..17: note = Description of Artificial Sequence: Synthetic Antisense oligonucleotide
  modified_base 1..2: mod_base = OTHER; note = bicyclic nucleic acid (BNA)
  source 1..17: mol_type = other DNA
agtcggtaagttctgtc

SEQ ID NO: 7389 - DNA, 16 bp, synthetic construct
  misc_feature 1..16: note = Description of Artificial Sequence: Synthetic Antisense oligonucleotide
  modified_base 1..2: mod_base = OTHER; note = bicyclic nucleic acid (BNA)
  source 1..16: mol_type = other DNA
agtcggtaagttctgt

SEQ ID NO: 7390 - DNA, 15 bp, synthetic construct
  misc_feature 1..15: note = Description of Artificial Sequence: Synthetic Antisense oligonucleotide
  modified_base 1..2: mod_base = OTHER; note = bicyclic nucleic acid (BNA)
  source 1..15: mol_type = other DNA
agtcggtaagttctg

SEQ ID NO: 7391 - DNA, 14 bp, synthetic construct
  misc_feature 1..14: note = Description of Artificial Sequence: Synthetic Antisense oligonucleotide
  modified_base 1..2: mod_base = OTHER; note = bicyclic nucleic acid (BNA)
  source 1..14: mol_type = other DNA
agtcggtaagttct

SEQ ID NO: 7392 - DNA, 13 bp, synthetic construct
  misc_feature 1..13: note = Description of Artificial Sequence: Synthetic Antisense oligonucleotide
  modified_base 1..2: mod_base = OTHER; note = bicyclic nucleic acid (BNA)
  source 1..13: mol_type = other DNA
agtcggtaagttc

SEQ ID NO: 7393 - DNA, 12 bp, synthetic construct
  misc_feature 1..12: note = Description of Artificial Sequence: Synthetic Antisense oligonucleotide
  modified_base 1..2: mod_base = OTHER; note = bicyclic nucleic acid (BNA)
  source 1..12: mol_type = other DNA
agtcggtaagtt

SEQ ID NO: 7394 - DNA, 11 bp, synthetic construct
  misc_feature 1..11: note = Description of Artificial Sequence: Synthetic Antisense oligonucleotide
  modified_base 1..2: mod_base = OTHER; note = bicyclic nucleic acid (BNA)
  source 1..11: mol_type = other DNA
agtcggtaagt

SEQ ID NO: 7395 - DNA, 20 bp, synthetic construct
  misc_feature 1..20: note = Description of Artificial Sequence: Synthetic Antisense oligonucleotide
  modified_base 1..2: mod_base = OTHER; note = bicyclic nucleic acid (BNA)
  source 1..20: mol_type = other DNA
cagtcggtaagttctgtcca

SEQ ID NO: 7396 - DNA, 19 bp, synthetic construct
  misc_feature 1..19: note = Description of Artificial Sequence: Synthetic Antisense oligonucleotide
  modified_base 1..2: mod_base = OTHER; note = bicyclic nucleic acid (BNA)
  source 1..19: mol_type = other DNA
cagtcggtaagttctgtcc

SEQ ID NO: 7397 - DNA, 18 bp, synthetic construct
  misc_feature 1..18: note = Description of Artificial Sequence: Synthetic Antisense oligonucleotide
  modified_base 1..2: mod_base = OTHER; note = bicyclic nucleic acid (BNA)
  source 1..18: mol_type = other DNA
cagtcggtaagttctgtc

SEQ ID NO: 7398 - DNA, 17 bp, synthetic construct
  misc_feature 1..17: note = Description of Artificial Sequence: Synthetic Antisense oligonucleotide
  modified_base 1..2: mod_base = OTHER; note = bicyclic nucleic acid (BNA)
  source 1..17: mol_type = other DNA
cagtcggtaagttctgt

SEQ ID NO: 7399 - DNA, 16 bp, synthetic construct
  misc_feature 1..16: note = Description of Artificial Sequence: Synthetic Antisense oligonucleotide
  modified_base 1..2: mod_base = OTHER; note = bicyclic nucleic acid (BNA)
  source 1..16: mol_type = other DNA
cagtcggtaagttctg

SEQ ID NO: 7400 - DNA, 15 bp, synthetic construct
  misc_feature 1..15: note = Description of Artificial Sequence: Synthetic Antisense oligonucleotide
  modified_base 1..2: mod_base = OTHER; note = bicyclic nucleic acid (BNA)
  source 1..15: mol_type = other DNA
cagtcggtaagttct

SEQ ID NO: 7401 - DNA, 14 bp, synthetic construct
  misc_feature 1..14: note = Description of Artificial Sequence: Synthetic Antisense oligonucleotide
  modified_base 1..2: mod_base = OTHER; note = bicyclic nucleic acid (BNA)
  source 1..14: mol_type = other DNA
cagtcggtaagttc

SEQ ID NO: 7402 - DNA, 13 bp, synthetic construct
  misc_feature 1..13: note = Description of Artificial Sequence: Synthetic Antisense oligonucleotide
  modified_base 1..2: mod_base = OTHER; note = bicyclic nucleic acid (BNA)
  source 1..13: mol_type = other DNA
cagtcggtaagtt

SEQ ID NO: 7403 - DNA, 12 bp, synthetic construct
  misc_feature 1..12: note = Description of Artificial Sequence: Synthetic Antisense oligonucleotide
  modified_base 1..2: mod_base = OTHER; note = bicyclic nucleic acid (BNA)
  source 1..12: mol_type = other DNA
cagtcggtaagt

SEQ ID NO: 7404 - DNA, 20 bp, synthetic construct
  misc_feature 1..20: note = Description of Artificial Sequence: Synthetic Antisense oligonucleotide
  modified_base 1..2: mod_base = OTHER; note = bicyclic nucleic acid (BNA)
  source 1..20: mol_type = other DNA
ccagtcggtaagttctgtcc

SEQ ID NO: 7405 - DNA, 19 bp, synthetic construct
  misc_feature 1..19: note = Description of Artificial Sequence: Synthetic Antisense oligonucleotide
  modified_base 1..2: mod_base = OTHER; note = bicyclic nucleic acid (BNA)
  source 1..19: mol_type = other DNA
ccagtcggtaagttctgtc

SEQ ID NO: 7406 - DNA, 18 bp, synthetic construct
  misc_feature 1..18: note = Description of Artificial Sequence: Synthetic Antisense oligonucleotide
  modified_base 1..2: mod_base = OTHER; note = bicyclic nucleic acid (BNA)
  source 1..18: mol_type = other DNA
ccagtcggtaagttctgt

SEQ ID NO: 7407 - DNA, 17 bp, synthetic construct
  misc_feature 1..17: note = Description of Artificial Sequence: Synthetic Antisense oligonucleotide
  modified_base 1..2: mod_base = OTHER; note = bicyclic nucleic acid (BNA)
  source 1..17: mol_type = other DNA
ccagtcggtaagttctg

SEQ ID NO: 7408 - DNA, 16 bp, synthetic construct
  misc_feature 1..16: note = Description of Artificial Sequence: Synthetic Antisense oligonucleotide
  modified_base 1..2: mod_base = OTHER; note = bicyclic nucleic acid (BNA)
  source 1..16: mol_type = other DNA
ccagtcggtaagttct

SEQ ID NO: 7409 - DNA, 15 bp, synthetic construct
  misc_feature 1..15: note = Description of Artificial Sequence: Synthetic Antisense oligonucleotide
  modified_base 1..2: mod_base = OTHER; note = bicyclic nucleic acid (BNA)
  source 1..15: mol_type = other DNA
ccagtcggtaagttc

SEQ ID NO: 7410 - DNA, 14 bp, synthetic construct
  misc_feature 1..14: note = Description of Artificial Sequence: Synthetic Antisense oligonucleotide
  modified_base 1..2: mod_base = OTHER; note = bicyclic nucleic acid (BNA)
  source 1..14: mol_type = other DNA
ccagtcggtaagtt

SEQ ID NO: 7411 - DNA, 13 bp, synthetic construct
  misc_feature 1..13: note = Description of Artificial Sequence: Synthetic Antisense oligonucleotide
  modified_base 1..2: mod_base = OTHER; note = bicyclic nucleic acid (BNA)
  source 1..13: mol_type = other DNA
ccagtcggtaagt

SEQ ID NO: 7412 - DNA, 20 bp, synthetic construct
  misc_feature 1..20: note = Description of Artificial Sequence: Synthetic Antisense oligonucleotide
  modified_base 1..2: mod_base = OTHER; note = bicyclic nucleic acid (BNA)
  source 1..20: mol_type = other DNA
gccagtcggtaagttctgtc

SEQ ID NO: 7413 - DNA, 19 bp, synthetic construct
  misc_feature 1..19: note = Description of Artificial Sequence: Synthetic Antisense oligonucleotide
  modified_base 1..2: mod_base = OTHER; note = bicyclic nucleic acid (BNA)
  source 1..19: mol_type = other DNA
gccagtcggtaagttctgt

SEQ ID NO: 7414 - DNA, 18 bp, synthetic construct
  misc_feature 1..18: note = Description of Artificial Sequence: Synthetic Antisense oligonucleotide
  modified_base 1..2: mod_base = OTHER; note = bicyclic nucleic acid (BNA)
  source 1..18: mol_type = other DNA
gccagtcggtaagttctg

SEQ ID NO: 7415 - DNA, 17 bp, synthetic construct
  misc_feature 1..17: note = Description of Artificial Sequence: Synthetic Antisense oligonucleotide
  modified_base 1..2: mod_base = OTHER; note = bicyclic nucleic acid (BNA)
  source 1..17: mol_type = other DNA
gccagtcggtaagttct

SEQ ID NO: 7416 - DNA, 16 bp, synthetic construct
  misc_feature 1..16: note = Description of Artificial Sequence: Synthetic Antisense oligonucleotide
  modified_base 1..2: mod_base = OTHER; note = bicyclic nucleic acid (BNA)
  source 1..16: mol_type = other DNA
gccagtcggtaagttc

SEQ ID NO: 7417 - DNA, 15 bp, synthetic construct
  misc_feature 1..15: note = Description of Artificial Sequence: Synthetic Antisense oligonucleotide
  modified_base 1..2: mod_base = OTHER; note = bicyclic nucleic acid (BNA)
  source 1..15: mol_type = other DNA
gccagtcggtaagtt

SEQ ID NO: 7418 - DNA, 14 bp, synthetic construct
  misc_feature 1..14: note = Description of Artificial Sequence: Synthetic Antisense oligonucleotide
  modified_base 1..2: mod_base = OTHER; note = bicyclic nucleic acid (BNA)
  source 1..14: mol_type = other DNA
gccagtcggtaagt

SEQ ID NO: 7419 - DNA, 20 bp, synthetic construct
  misc_feature 1..20: note = Description of Artificial Sequence: Synthetic Antisense oligonucleotide
  modified_base 1..2: mod_base = OTHER; note = bicyclic nucleic acid (BNA)
  source 1..20: mol_type = other DNA
tcaaggaagatggcatttct

SEQ ID NO: 7420 - DNA, 22 bp, synthetic construct
  misc_feature 1..22: note = Description of Artificial Sequence: Synthetic Antisense oligonucleotide
  modified_base 1..2: mod_base = OTHER; note = bicyclic nucleic acid (BNA)
  source 1..22: mol_type = other DNA
tcaaggaagatggcatttctag

SEQ ID NO: 7421 - DNA, 16 bp, synthetic construct
  misc_feature 1..16: note = Description of Artificial Sequence: Synthetic Antisense oligonucleotide
  modified_base 1..2: mod_base = OTHER; note = bicyclic nucleic acid (BNA)
  source 1..16: mol_type = other DNA
tcaaggaagatggcat

SEQ ID NO: 7422 - DNA, 15 bp, synthetic construct
  misc_feature 1..15: note = Description of Artificial Sequence: Synthetic Antisense oligonucleotide
  modified_base 1..2: mod_base = OTHER; note = bicyclic nucleic acid (BNA)
  source 1..15: mol_type = other DNA
gaagatggcatttct

SEQ ID NO: 7423 - DNA, 21 bp, synthetic construct
  misc_feature 1..21: note = Description of Artificial Sequence: Synthetic Antisense oligonucleotide
  modified_base 1..2: mod_base = OTHER; note = bicyclic nucleic acid (BNA)
  source 1..21: mol_type = other DNA
tcaaggaagatggcatttcta

SEQ ID NO: 7424 - DNA, 19 bp, synthetic construct
  misc_feature 1..19: note = Description of Artificial Sequence: Synthetic Antisense oligonucleotide
  modified_base 1..2: mod_base = OTHER; note = bicyclic nucleic acid (BNA)
  source 1..19: mol_type = other DNA
tcaaggaagatggcatttc

SEQ ID NO: 7425 - DNA, 18 bp, synthetic construct
  misc_feature 1..18: note = Description of Artificial Sequence: Synthetic Antisense oligonucleotide
  modified_base 1..2: mod_base = OTHER; note = bicyclic nucleic acid (BNA)
  source 1..18: mol_type = other DNA
tcaaggaagatggcattt

SEQ ID NO: 7426 - DNA, 17 bp, synthetic construct
  misc_feature 1..17: note = Description of Artificial Sequence: Synthetic Antisense oligonucleotide
  modified_base 1..2: mod_base = OTHER; note = bicyclic nucleic acid (BNA)
  source 1..17: mol_type = other DNA
tcaaggaagatggcatt

SEQ ID NO: 7427 - DNA, 15 bp, synthetic construct
  misc_feature 1..15: note = Description of Artificial Sequence: Synthetic Antisense oligonucleotide
  modified_base 1..2: mod_base = OTHER; note = bicyclic nucleic acid (BNA)
  source 1..15: mol_type = other DNA
tcaaggaagatggca

SEQ ID NO: 7428 - DNA, 14 bp, synthetic construct
  misc_feature 1..14: note = Description of Artificial Sequence: Synthetic Antisense oligonucleotide
  modified_base 1..2: mod_base = OTHER; note = bicyclic nucleic acid (BNA)
  source 1..14: mol_type = other DNA
tcaaggaagatggc

SEQ ID NO: 7429 - DNA, 13 bp, synthetic construct
  misc_feature 1..13: note = Description of Artificial Sequence: Synthetic Antisense oligonucleotide
  modified_base 1..2: mod_base = OTHER; note = bicyclic nucleic acid (BNA)
  source 1..13: mol_type = other DNA
tcaaggaagatgg

SEQ ID NO: 7430 - DNA, 12 bp, synthetic construct
  misc_feature 1..12: note = Description of Artificial Sequence: Synthetic Antisense oligonucleotide
  modified_base 1..2: mod_base = OTHER; note = bicyclic nucleic acid (BNA)
  source 1..12: mol_type = other DNA
tcaaggaagatg

SEQ ID NO: 7431 - DNA, 11 bp, synthetic construct
  misc_feature 1..11: note = Description of Artificial Sequence: Synthetic Antisense oligonucleotide
  modified_base 1..2: mod_base = OTHER; note = bicyclic nucleic acid (BNA)
  source 1..11: mol_type = other DNA
tcaaggaagat

SEQ ID NO: 7432 - DNA, 10 bp, synthetic construct
  misc_feature 1..10: note = Description of Artificial Sequence: Synthetic Antisense oligonucleotide
  modified_base 1..2: mod_base = OTHER; note = bicyclic nucleic acid (BNA)
  source 1..10: mol_type = other DNA
tcaaggaaga

SEQ ID NO: 7433 - skipped

SEQ ID NO: 7434 - DNA, 21 bp, synthetic construct
  misc_feature 1..21: note = Description of Artificial Sequence: Synthetic Antisense oligonucleotide
  modified_base 1..2: mod_base = OTHER; note = bicyclic nucleic acid (BNA)
  source 1..21: mol_type = other DNA
caaggaagatggcatttctag

SEQ ID NO: 7435 - DNA, 20 bp, synthetic construct
  misc_feature 1..20: note = Description of Artificial Sequence: Synthetic Antisense oligonucleotide
  modified_base 1..2: mod_base = OTHER; note = bicyclic nucleic acid (BNA)
  source 1..20: mol_type = other DNA
caaggaagatggcatttcta

SEQ ID NO: 7436 - DNA, 19 bp, synthetic construct
  misc_feature 1..19: note = Description of Artificial Sequence: Synthetic Antisense oligonucleotide
  modified_base 1..2: mod_base = OTHER; note = bicyclic nucleic acid (BNA)
  source 1..19: mol_type = other DNA
caaggaagatggcatttct

SEQ ID NO: 7437 - DNA, 18 bp, synthetic construct
  misc_feature 1..18: note = Description of Artificial Sequence: Synthetic Antisense oligonucleotide
  modified_base 1..2: mod_base = OTHER; note = bicyclic nucleic acid (BNA)
  source 1..18: mol_type = other DNA
caaggaagatggcatttc

SEQ ID NO: 7438 - DNA, 17 bp, synthetic construct
  misc_feature 1..17: note = Description of Artificial Sequence: Synthetic Antisense oligonucleotide
  modified_base 1..2: mod_base = OTHER; note = bicyclic nucleic acid (BNA)
  source 1..17: mol_type = other DNA
caaggaagatggcattt

SEQ ID NO: 7439 - DNA, 16 bp, synthetic construct
  misc_feature 1..16: note = Description of Artificial Sequence: Synthetic Antisense oligonucleotide
  modified_base 1..2: mod_base = OTHER; note = bicyclic nucleic acid (BNA)
  source 1..16: mol_type = other DNA
caaggaagatggcatt

SEQ ID NO: 7440 - DNA, 15 bp, synthetic construct
  misc_feature 1..15: note = Description of Artificial Sequence: Synthetic Antisense oligonucleotide
  modified_base 1..2: mod_base = OTHER; note = bicyclic nucleic acid (BNA)
  source 1..15: mol_type = other DNA
caaggaagatggcat

SEQ ID NO: 7441 - DNA, 14 bp, synthetic construct
  misc_feature 1..14: note = Description of Artificial Sequence: Synthetic Antisense oligonucleotide
  modified_base 1..2: mod_base = OTHER; note = bicyclic nucleic acid (BNA)
  source 1..14: mol_type = other DNA
caaggaagatggca

SEQ ID NO: 7442 - DNA, 13 bp, synthetic construct
  misc_feature 1..13: note = Description of Artificial Sequence: Synthetic Antisense oligonucleotide
  modified_base 1..2: mod_base = OTHER; note = bicyclic nucleic acid (BNA)
  source 1..13: mol_type = other DNA
caaggaagatggc

SEQ ID NO: 7443 - DNA, 12 bp, synthetic construct
  misc_feature 1..12: note = Description of Artificial Sequence: Synthetic Antisense oligonucleotide
  modified_base 1..2: mod_base = OTHER; note = bicyclic nucleic acid (BNA)
  source 1..12: mol_type = other DNA
caaggaagatgg

SEQ ID NO: 7444 - DNA, 11 bp, synthetic construct
  misc_feature 1..11: note = Description of Artificial Sequence: Synthetic Antisense oligonucleotide
  modified_base 1..2: mod_base = OTHER; note = bicyclic nucleic acid (BNA)
  source 1..11: mol_type = other DNA
caaggaagatg

SEQ ID NO: 7445 - DNA, 10 bp, synthetic construct
  misc_feature 1..10: note = Description of Artificial Sequence: Synthetic Antisense oligonucleotide
  modified_base 1..2: mod_base = OTHER; note = bicyclic nucleic acid (BNA)
  source 1..10: mol_type = other DNA
caaggaagat

SEQ ID NO: 7446 - DNA, 20 bp, synthetic construct
  misc_feature 1..20: note = Description of Artificial Sequence: Synthetic Antisense oligonucleotide
  modified_base 1..2: mod_base = OTHER; note = bicyclic nucleic acid (BNA)
  source 1..20: mol_type = other DNA
aaggaagatggcatttctag

SEQ ID NO: 7447 - DNA, 19 bp, synthetic construct
  misc_feature 1..19: note = Description of Artificial Sequence: Synthetic Antisense oligonucleotide
  modified_base 1..2: mod_base = OTHER; note = bicyclic nucleic acid (BNA)
  source 1..19: mol_type = other DNA
aaggaagatggcatttcta

SEQ ID NO: 7448 - DNA, 18 bp, synthetic construct
  misc_feature 1..18: note = Description of Artificial Sequence: Synthetic Antisense oligonucleotide
  modified_base 1..2: mod_base = OTHER; note = bicyclic nucleic acid (BNA)
  source 1..18: mol_type = other DNA
aaggaagatggcatttct

SEQ ID NO: 7449 - DNA, 17 bp, synthetic construct
  misc_feature 1..17: note = Description of Artificial Sequence: Synthetic Antisense oligonucleotide
  modified_base 1..2: mod_base = OTHER; note = bicyclic nucleic acid (BNA)
  source 1..17: mol_type = other DNA
aaggaagatggcatttc

SEQ ID NO: 7450 - DNA, 16 bp, synthetic construct
  misc_feature 1..16: note = Description of Artificial Sequence: Synthetic Antisense oligonucleotide
  modified_base 1..2: mod_base = OTHER; note = bicyclic nucleic acid (BNA)
  source 1..16: mol_type = other DNA
aaggaagatggcattt

SEQ ID NO: 7451 - DNA, 15 bp, synthetic construct
  misc_feature 1..15: note = Description of Artificial Sequence: Synthetic Antisense oligonucleotide
  modified_base 1..2: mod_base = OTHER; note = bicyclic nucleic acid (BNA)
  source 1..15: mol_type = other DNA
aaggaagatggcatt

SEQ ID NO: 7452 - DNA, 14 bp, synthetic construct
  misc_feature 1..14: note = Description of Artificial Sequence: Synthetic Antisense oligonucleotide
  modified_base 1..2: mod_base = OTHER; note = bicyclic nucleic acid (BNA)
  source 1..14: mol_type = other DNA
aaggaagatggcat

SEQ ID NO: 7453 - DNA, 13 bp, synthetic construct
  misc_feature 1..13: note = Description of Artificial Sequence: Synthetic Antisense oligonucleotide
  modified_base 1..2: mod_base = OTHER; note = bicyclic nucleic acid (BNA)
  source 1..13: mol_type = other DNA
aaggaagatggca

SEQ ID NO: 7454 - DNA, 12 bp, synthetic construct
  misc_feature 1..12: note = Description of Artificial Sequence: Synthetic Antisense oligonucleotide
  modified_base 1..2: mod_base = OTHER; note = bicyclic nucleic acid (BNA)
  source 1..12: mol_type = other DNA
aaggaagatggc

SEQ ID NO: 7455 - DNA, 11 bp, synthetic construct
  misc_feature 1..11: note = Description of Artificial Sequence: Synthetic Antisense oligonucleotide
  modified_base 1..2: mod_base = OTHER; note = bicyclic nucleic acid (BNA)
  source 1..11: mol_type = other DNA
aaggaagatgg

SEQ ID NO: 7456 - DNA, 10 bp, synthetic construct
  misc_feature 1..10: note = Description of Artificial Sequence: Synthetic Antisense oligonucleotide
  modified_base 1..2: mod_base = OTHER; note = bicyclic nucleic acid (BNA)
  source 1..10: mol_type = other DNA
aaggaagatg

SEQ ID NO: 7457 - skipped

SEQ ID NO: 7458 - DNA, 19 bp, synthetic construct
  misc_feature 1..19: note = Description of Artificial Sequence: Synthetic Antisense oligonucleotide
  modified_base 1..2: mod_base = OTHER; note = bicyclic nucleic acid (BNA)
  source 1..19: mol_type = other DNA
aggaagatggcatttctag

SEQ ID NO: 7459 - DNA, 18 bp, synthetic construct
  misc_feature 1..18: note = Description of Artificial Sequence: Synthetic Antisense oligonucleotide
  modified_base 1..2: mod_base = OTHER; note = bicyclic nucleic acid (BNA)
  source 1..18: mol_type = other DNA
aggaagatggcatttcta

SEQ ID NO: 7460 - DNA, 17 bp, synthetic construct
  misc_feature 1..17: note = Description of Artificial Sequence: Synthetic Antisense oligonucleotide
  modified_base 1..2: mod_base = OTHER; note = bicyclic nucleic acid (BNA)
  source 1..17: mol_type = other DNA
aggaagatggcatttct

SEQ ID NO: 7461 - DNA, 16 bp, synthetic construct
  misc_feature 1..16: note = Description of Artificial Sequence: Synthetic Antisense oligonucleotide
  modified_base 1..2: mod_base = OTHER; note = bicyclic nucleic acid (BNA)
  source 1..16: mol_type = other DNA
aggaagatggcatttc

SEQ ID NO: 7462 - DNA, 15 bp, synthetic construct
  misc_feature 1..15: note = Description of Artificial Sequence: Synthetic Antisense oligonucleotide
  modified_base 1..2: mod_base = OTHER; note = bicyclic nucleic acid (BNA)
  source 1..15: mol_type = other DNA
aggaagatggcattt

SEQ ID NO: 7463 - DNA, 14 bp, synthetic construct
  misc_feature 1..14: note = Description of Artificial Sequence: Synthetic Antisense oligonucleotide
  modified_base 1..2: mod_base = OTHER; note = bicyclic nucleic acid (BNA)
  source 1..14: mol_type = other DNA
aggaagatggcatt

SEQ ID NO: 7464 - DNA, 13 bp, synthetic construct
  misc_feature 1..13: note = Description of Artificial Sequence: Synthetic Antisense oligonucleotide
  modified_base 1..2: mod_base = OTHER; note = bicyclic nucleic acid (BNA)
  source 1..13: mol_type = other DNA
aggaagatggcat

SEQ ID NO: 7465 - DNA, 12 bp, synthetic construct
  misc_feature 1..12: note = Description of Artificial Sequence: Synthetic Antisense oligonucleotide
  modified_base 1..2: mod_base = OTHER; note = bicyclic nucleic acid (BNA)
  source 1..12: mol_type = other DNA
aggaagatggca

SEQ ID NO: 7466 - DNA, 10 bp, synthetic construct
  misc_feature 1..10: note = Description of Artificial Sequence: Synthetic Antisense oligonucleotide
  modified_base 1..2: mod_base = OTHER; note = bicyclic nucleic acid (BNA)
  source 1..10: mol_type = other DNA
aggaagatgg

SEQ ID NO: 7467-7468 - skipped (2 entries)

SEQ ID NO: 7469 - DNA, 18 bp, synthetic construct
  misc_feature 1..18: note = Description of Artificial Sequence: Synthetic Antisense oligonucleotide
  modified_base 1..2: mod_base = OTHER; note = bicyclic nucleic acid (BNA)
  source 1..18: mol_type = other DNA
ggaagatggcatttctag

SEQ ID NO: 7470 - DNA, 17 bp, synthetic construct
  misc_feature 1..17: note = Description of Artificial Sequence: Synthetic Antisense oligonucleotide
  modified_base 1..2: mod_base = OTHER; note = bicyclic nucleic acid (BNA)
  source 1..17: mol_type = other DNA
ggaagatggcatttcta

SEQ ID NO: 7471 - DNA, 16 bp, synthetic construct
  misc_feature 1..16: note = Description of Artificial Sequence: Synthetic Antisense oligonucleotide
  modified_base 1..2: mod_base = OTHER; note = bicyclic nucleic acid (BNA)
  source 1..16: mol_type = other DNA
ggaagatggcatttct

SEQ ID NO: 7472 - DNA, 15 bp, synthetic construct
  misc_feature 1..15: note = Description of Artificial Sequence: Synthetic Antisense oligonucleotide
  modified_base 1..2: mod_base = OTHER; note = bicyclic nucleic acid (BNA)
  source 1..15: mol_type = other DNA
ggaagatggcatttc

SEQ ID NO: 7473 - DNA, 14 bp, synthetic construct
  misc_feature 1..14: note = Description of Artificial Sequence: Synthetic Antisense oligonucleotide
  modified_base 1..2: mod_base = OTHER; note = bicyclic nucleic acid (BNA)
  source 1..14: mol_type = other DNA
ggaagatggcattt

SEQ ID NO: 7474 - DNA, 13 bp, synthetic construct
  misc_feature 1..13: note = Description of Artificial Sequence: Synthetic Antisense oligonucleotide
  modified_base 1..2: mod_base = OTHER; note = bicyclic nucleic acid (BNA)
  source 1..13: mol_type = other DNA
ggaagatggcatt

SEQ ID NO: 7475 - DNA, 12 bp, synthetic construct
  misc_feature 1..12: note = Description of Artificial Sequence: Synthetic Antisense oligonucleotide
  modified_base 1..2: mod_base = OTHER; note = bicyclic nucleic acid (BNA)
  source 1..12: mol_type = other DNA
ggaagatggcat

SEQ ID NO: 7476 - DNA, 11 bp, synthetic construct
  misc_feature 1..11: note = Description of Artificial Sequence: Synthetic Antisense oligonucleotide
  modified_base 1..2: mod_base = OTHER; note = bicyclic nucleic acid (BNA)
  source 1..11: mol_type = other DNA
ggaagatggca

SEQ ID NO: 7477 - DNA, 10 bp, synthetic construct
  misc_feature 1..10: note = Description of Artificial Sequence: Synthetic Antisense oligonucleotide
  modified_base 1..2: mod_base = OTHER; note = bicyclic nucleic acid (BNA)
  source 1..10: mol_type = other DNA
ggaagatggc

SEQ ID NO: 7478 - skipped

SEQ ID NO: 7479 - DNA, 17 bp, synthetic construct
  misc_feature 1..17: note = Description of Artificial Sequence: Synthetic Antisense oligonucleotide
  modified_base 1..2: mod_base = OTHER; note = bicyclic nucleic acid (BNA)
  source 1..17: mol_type = other DNA
gaagatggcatttctag

SEQ ID NO: 7480 - DNA, 16 bp, synthetic construct
  misc_feature 1..16: note = Description of Artificial Sequence: Synthetic Antisense oligonucleotide
  modified_base 1..2: mod_base = OTHER; note = bicyclic nucleic acid (BNA)
  source 1..16: mol_type = other DNA
gaagatggcatttcta

SEQ ID NO: 7481 - DNA, 14 bp, synthetic construct
  misc_feature 1..14: note = Description of Artificial Sequence: Synthetic Antisense oligonucleotide
  modified_base 1..2: mod_base = OTHER; note = bicyclic nucleic acid (BNA)
  source 1..14: mol_type = other DNA
gaagatggcatttc

SEQ ID NO: 7482 - DNA, 13 bp, synthetic construct
  misc_feature 1..13: note = Description of Artificial Sequence: Synthetic Antisense oligonucleotide
  modified_base 1..2: mod_base = OTHER; note = bicyclic nucleic acid (BNA)
  source 1..13: mol_type = other DNA
gaagatggcattt

SEQ ID NO: 7483 - DNA, 12 bp, synthetic construct
  misc_feature 1..12: note = Description of Artificial Sequence: Synthetic Antisense oligonucleotide
  modified_base 1..2: mod_base = OTHER; note = bicyclic nucleic acid (BNA)
  source 1..12: mol_type = other DNA
gaagatggcatt

SEQ ID NO: 7484 - DNA, 11 bp, synthetic construct
  misc_feature 1..11: note = Description of Artificial Sequence: Synthetic Antisense oligonucleotide
  modified_base 1..2: mod_base = OTHER; note = bicyclic nucleic acid (BNA)
  source 1..11: mol_type = other DNA
gaagatggcat

SEQ ID NO: 7485 - DNA, 10 bp, synthetic construct
  misc_feature 1..10: note = Description of Artificial Sequence: Synthetic Antisense oligonucleotide
  modified_base 1..2: mod_base = OTHER; note = bicyclic nucleic acid (BNA)
  source 1..10: mol_type = other DNA
gaagatggca

SEQ ID NO: 7486-7487 - skipped (2 entries)

SEQ ID NO: 7488 - DNA, 16 bp, synthetic construct
  misc_feature 1..16: note = Description of Artificial Sequence: Synthetic Antisense oligonucleotide
  modified_base 1..2: mod_base = OTHER; note = bicyclic nucleic acid (BNA)
  source 1..16: mol_type = other DNA
aagatggcatttctag

SEQ ID NO: 7489 - DNA, 15 bp, synthetic construct
  misc_feature 1..15: note = Description of Artificial Sequence: Synthetic Antisense oligonucleotide
  modified_base 1..2: mod_base = OTHER; note = bicyclic nucleic acid (BNA)
  source 1..15: mol_type = other DNA
aagatggcatttcta

SEQ ID NO: 7490 - DNA, 14 bp, synthetic construct
  misc_feature 1..14: note = Description of Artificial Sequence: Synthetic Antisense oligonucleotide
  modified_base 1..2: mod_base = OTHER; note = bicyclic nucleic acid (BNA)
  source 1..14: mol_type = other DNA
aagatggcatttct

SEQ ID NO: 7491 - DNA, 13 bp, synthetic construct
  misc_feature 1..13: note = Description of Artificial Sequence: Synthetic Antisense oligonucleotide
  modified_base 1..2: mod_base = OTHER; note = bicyclic nucleic acid (BNA)
  source 1..13: mol_type = other DNA
aagatggcatttc

SEQ ID NO: 7492 - DNA, 12 bp, synthetic construct
  misc_feature 1..12: note = Description of Artificial Sequence: Synthetic Antisense oligonucleotide
  modified_base 1..2: mod_base = OTHER; note = bicyclic nucleic acid (BNA)
  source 1..12: mol_type = other DNA
aagatggcattt

SEQ ID NO: 7493 - DNA, 11 bp, synthetic construct
  misc_feature 1..11: note = Description of Artificial Sequence: Synthetic Antisense oligonucleotide
  modified_base 1..2: mod_base = OTHER; note = bicyclic nucleic acid (BNA)
  source 1..11: mol_type = other DNA
aagatggcatt

SEQ ID NO: 7494 - DNA, 10 bp, synthetic construct
  misc_feature 1..10: note = Description of Artificial Sequence: Synthetic Antisense oligonucleotide
  modified_base 1..2: mod_base = OTHER; note = bicyclic nucleic acid (BNA)
  source 1..10: mol_type = other DNA
aagatggcat

SEQ ID NO: 7495-7496 - skipped (2 entries)

SEQ ID NO: 7497 - DNA, 15 bp, synthetic construct
  misc_feature 1..15: note = Description of Artificial Sequence: Synthetic Antisense oligonucleotide
  modified_base 1..2: mod_base = OTHER; note = bicyclic nucleic acid (BNA)
  source 1..15: mol_type = other DNA
agatggcatttctag

SEQ ID NO: 7498 - DNA, 14 bp, synthetic construct
  misc_feature 1..14: note = Description of Artificial Sequence: Synthetic Antisense oligonucleotide
  modified_base 1..2: mod_base = OTHER; note = bicyclic nucleic acid (BNA)
  source 1..14: mol_type = other DNA
agatggcatttcta

SEQ ID NO: 7499 - DNA, 13 bp, synthetic construct
  misc_feature 1..13: note = Description of Artificial Sequence: Synthetic Antisense oligonucleotide
  modified_base 1..2: mod_base = OTHER; note = bicyclic nucleic acid (BNA)
  source 1..13: mol_type = other DNA
agatggcatttct

SEQ ID NO: 7500 - DNA, 12 bp, synthetic construct
  misc_feature 1..12: note = Description of Artificial Sequence: Synthetic Antisense oligonucleotide
  modified_base 1..2: mod_base = OTHER; note = bicyclic nucleic acid (BNA)
  source 1..12: mol_type = other DNA
agatggcatttc

SEQ ID NO: 7501 - DNA, 11 bp, synthetic construct
  misc_feature 1..11: note = Description of Artificial Sequence: Synthetic Antisense oligonucleotide
  modified_base 1..2: mod_base = OTHER; note = bicyclic nucleic acid (BNA)
  source 1..11: mol_type = other DNA
agatggcattt

SEQ ID NO: 7502 - DNA, 10 bp, synthetic construct
  misc_feature 1..10: note = Description of Artificial Sequence: Synthetic Antisense oligonucleotide
  modified_base 1..2: mod_base = OTHER; note = bicyclic nucleic acid (BNA)
  source 1..10: mol_type = other DNA
agatggcatt

SEQ ID NO: 7503-7504 - skipped (2 entries)

SEQ ID NO: 7505 - DNA, 30 bp, synthetic construct; identical to SEQ ID NO: 8
  misc_feature 1..30: note = Description of Artificial Sequence: Synthetic Antisense oligonucleotide
  modified_base 1..2: mod_base = OTHER; note = bicyclic nucleic acid (BNA)
  source 1..30: mol_type = other DNA

SEQ ID NO: 7506 - DNA, 29 bp, synthetic construct
  misc_feature 1..29: note = Description of Artificial Sequence: Synthetic Antisense oligonucleotide
  modified_base 1..2: mod_base = OTHER; note = bicyclic nucleic acid (BNA)
  source 1..29: mol_type = other DNA
ctccaacatcaaggaagatggcatttcta

SEQ ID NO: 7507 - DNA, 28 bp, synthetic construct
  misc_feature 1..28: note = Description of Artificial Sequence: Synthetic Antisense oligonucleotide
  modified_base 1..2: mod_base = OTHER; note = bicyclic nucleic acid (BNA)
  source 1..28: mol_type = other DNA
ctccaacatcaaggaagatggcatttct

SEQ ID NO: 7508 - DNA, 27 bp, synthetic construct
  misc_feature 1..27: note = Description of Artificial Sequence: Synthetic Antisense oligonucleotide
  modified_base 1..2: mod_base = OTHER; note = bicyclic nucleic acid (BNA)
  source 1..27: mol_type = other DNA
ctccaacatcaaggaagatggcatttc

SEQ ID NO: 7509 - DNA, 26 bp, synthetic construct
  misc_feature 1..26: note = Description of Artificial Sequence: Synthetic Antisense oligonucleotide
  modified_base 1..2: mod_base = OTHER; note = bicyclic nucleic acid (BNA)
  source 1..26: mol_type = other DNA
ctccaacatcaaggaagatggcattt

SEQ ID NO: 7510 - DNA, 25 bp, synthetic construct
  misc_feature 1..25: note = Description of Artificial Sequence: Synthetic Antisense oligonucleotide
  modified_base 1..2: mod_base = OTHER; note = bicyclic nucleic acid (BNA)
  source 1..25: mol_type = other DNA
ctccaacatcaaggaagatggcatt

SEQ ID NO: 7511 - DNA, 24 bp, synthetic construct
  misc_feature 1..24: note = Description of Artificial Sequence: Synthetic Antisense oligonucleotide
  modified_base 1..2: mod_base = OTHER; note = bicyclic nucleic acid (BNA)
  source 1..24: mol_type = other DNA
ctccaacatcaaggaagatggcat

SEQ ID NO: 7512 - DNA, 23 bp, synthetic construct
  misc_feature 1..23: note = Description of Artificial Sequence: Synthetic Antisense oligonucleotide
  modified_base 1..2: mod_base = OTHER; note = bicyclic nucleic acid (BNA)
  source 1..23: mol_type = other DNA
ctccaacatcaaggaagatggca

SEQ ID NO: 7513 - DNA, 22 bp, synthetic construct
  misc_feature 1..22: note = Description of Artificial Sequence: Synthetic Antisense oligonucleotide
  modified_base 1..2: mod_base = OTHER; note = bicyclic nucleic acid (BNA)
  source 1..22: mol_type = other DNA
ctccaacatcaaggaagatggc

SEQ ID NO: 7514 - DNA, 21 bp, synthetic construct
  misc_feature 1..21: note = Description of Artificial Sequence: Synthetic Antisense oligonucleotide
  modified_base 1..2: mod_base = OTHER; note = bicyclic nucleic acid (BNA)
  source 1..21: mol_type = other DNA
ctccaacatcaaggaagatgg

SEQ ID NO: 7515 - DNA, 20 bp, synthetic construct
  misc_feature 1..20: note = Description of Artificial Sequence: Synthetic Antisense oligonucleotide
  modified_base 1..2: mod_base = OTHER; note = bicyclic nucleic acid (BNA)
  source 1..20: mol_type = other DNA
ctccaacatcaaggaagatg

SEQ ID NO: 7516 - DNA, 19 bp, synthetic construct
  misc_feature 1..19: note = Description of Artificial Sequence: Synthetic Antisense oligonucleotide
  modified_base 1..2: mod_base = OTHER; note = bicyclic nucleic acid (BNA)
  source 1..19: mol_type = other DNA
ctccaacatcaaggaagat

SEQ ID NO: 7517 - DNA, 18 bp, synthetic construct
  misc_feature 1..18: note = Description of Artificial Sequence: Synthetic Antisense oligonucleotide
  modified_base 1..2: mod_base = OTHER; note = bicyclic nucleic acid (BNA)
  source 1..18: mol_type = other DNA
ctccaacatcaaggaaga

SEQ ID NO: 7518 - DNA, 17 bp, synthetic construct
  misc_feature 1..17: note = Description of Artificial Sequence: Synthetic Antisense oligonucleotide
  modified_base 1..2: mod_base = OTHER; note = bicyclic nucleic acid (BNA)
  source 1..17: mol_type = other DNA
ctccaacatcaaggaag

SEQ ID NO: 7519 - DNA, 29 bp, synthetic construct
  misc_feature 1..29: note = Description of Artificial Sequence: Synthetic Antisense oligonucleotide
  modified_base 1..2: mod_base = OTHER; note = bicyclic nucleic acid (BNA)
  source 1..29: mol_type = other DNA
tccaacatcaaggaagatggcatttctag

SEQ ID NO: 7520 - DNA, 28 bp, synthetic construct
  misc_feature 1..28: note = Description of Artificial Sequence: Synthetic Antisense oligonucleotide
  modified_base 1..2: mod_base = OTHER; note = bicyclic nucleic acid (BNA)
  source 1..28: mol_type = other DNA
tccaacatcaaggaagatggcatttcta

SEQ ID NO: 7521 - DNA, 27 bp, synthetic construct
  misc_feature 1..27: note = Description of Artificial Sequence: Synthetic Antisense oligonucleotide
  modified_base 1..2: mod_base = OTHER; note = bicyclic nucleic acid (BNA)
  source 1..27: mol_type = other DNA
tccaacatcaaggaagatggcatttct

SEQ ID NO: 7522 - DNA, 26 bp, synthetic construct
  misc_feature 1..26: note = Description of Artificial Sequence: Synthetic Antisense oligonucleotide
  modified_base 1..2: mod_base = OTHER; note = bicyclic nucleic acid (BNA)
  source 1..26: mol_type = other DNA
tccaacatcaaggaagatggcatttc

SEQ ID NO: 7523 - DNA, 25 bp, synthetic construct
  misc_feature 1..25: note = Description of Artificial Sequence: Synthetic Antisense oligonucleotide
  modified_base 1..2: mod_base = OTHER; note = bicyclic nucleic acid (BNA)
  source 1..25: mol_type = other DNA
tccaacatcaaggaagatggcattt

SEQ ID NO: 7524 - DNA, 24 bp, synthetic construct
  misc_feature 1..24: note = Description of Artificial Sequence: Synthetic Antisense oligonucleotide
  modified_base 1..2: mod_base = OTHER; note = bicyclic nucleic acid (BNA)
  source 1..24: mol_type = other DNA
tccaacatcaaggaagatggcatt

SEQ ID NO: 7525 - DNA, 23 bp, synthetic construct
  misc_feature 1..23: note = Description of Artificial Sequence: Synthetic Antisense oligonucleotide
  modified_base 1..2: mod_base = OTHER; note = bicyclic nucleic acid (BNA)
  source 1..23: mol_type = other DNA
tccaacatcaaggaagatggcat

SEQ ID NO: 7526 - DNA, 22 bp, synthetic construct
  misc_feature 1..22: note = Description of Artificial Sequence: Synthetic Antisense oligonucleotide
  modified_base 1..2: mod_base = OTHER; note = bicyclic nucleic acid (BNA)
  source 1..22: mol_type = other DNA
tccaacatcaaggaagatggca

SEQ ID NO: 7527 - DNA, 21 bp, synthetic construct
  misc_feature 1..21: note = Description of Artificial Sequence: Synthetic Antisense oligonucleotide
  modified_base 1..2: mod_base = OTHER; note = bicyclic nucleic acid (BNA)
  source 1..21: mol_type = other DNA
tccaacatcaaggaagatggc

SEQ ID NO: 7528 - DNA, 20 bp, synthetic construct
  misc_feature 1..20: note = Description of Artificial Sequence: Synthetic Antisense oligonucleotide
  modified_base 1..2: mod_base = OTHER; note = bicyclic nucleic acid (BNA)
  source 1..20: mol_type = other DNA
tccaacatcaaggaagatgg

SEQ ID NO: 7529 - DNA, 19 bp, synthetic construct
  misc_feature 1..19: note = Description of Artificial Sequence: Synthetic Antisense oligonucleotide
  modified_base 1..2: mod_base = OTHER; note = bicyclic nucleic acid (BNA)
  source 1..19: mol_type = other DNA
tccaacatcaaggaagatg

SEQ ID NO: 7530 - DNA, 18 bp, synthetic construct
  misc_feature 1..18: note = Description of Artificial Sequence: Synthetic Antisense oligonucleotide
  modified_base 1..2: mod_base = OTHER; note = bicyclic nucleic acid (BNA)
  source 1..18: mol_type = other DNA
tccaacatcaaggaagat

SEQ ID NO: 7531 - DNA, 17 bp, synthetic construct
  misc_feature 1..17: note = Description of Artificial Sequence: Synthetic Antisense oligonucleotide
  modified_base 1..2: mod_base = OTHER; note = bicyclic nucleic acid (BNA)
  source 1..17: mol_type = other DNA
tccaacatcaaggaaga

SEQ ID NO: 7532 - DNA, 16 bp, synthetic construct
  misc_feature 1..16: note = Description of Artificial Sequence: Synthetic Antisense oligonucleotide
  modified_base 1..2: mod_base = OTHER; note = bicyclic nucleic acid (BNA)
  source 1..16: mol_type = other DNA
tccaacatcaaggaag

SEQ ID NO: 7533 - DNA, 28 bp, synthetic construct
  misc_feature 1..28: note = Description of Artificial Sequence: Synthetic Antisense oligonucleotide
  modified_base 1..2: mod_base = OTHER; note = bicyclic nucleic acid (BNA)
  source 1..28: mol_type = other DNA
ccaacatcaaggaagatggcatttctag

SEQ ID NO: 7534 - DNA, 27 bp, synthetic construct
  misc_feature 1..27: note = Description of Artificial Sequence: Synthetic Antisense oligonucleotide
  modified_base 1..2: mod_base = OTHER; note = bicyclic nucleic acid (BNA)
  source 1..27: mol_type = other DNA
ccaacatcaaggaagatggcatttcta

SEQ ID NO: 7535 - DNA, 26 bp, synthetic construct
  misc_feature 1..26: note = Description of Artificial Sequence: Synthetic Antisense oligonucleotide
  modified_base 1..2: mod_base = OTHER; note = bicyclic nucleic acid (BNA)
  source 1..26: mol_type = other DNA
ccaacatcaaggaagatggcatttct

SEQ ID NO: 7536 - DNA, 25 bp, synthetic construct
  misc_feature 1..25: note = Description of Artificial Sequence: Synthetic Antisense oligonucleotide
  modified_base 1..2: mod_base = OTHER; note = bicyclic nucleic acid (BNA)
  source 1..25: mol_type = other DNA
ccaacatcaaggaagatggcatttc

SEQ ID NO: 7537 - DNA, 24 bp, synthetic construct
  misc_feature 1..24: note = Description of Artificial Sequence: Synthetic Antisense oligonucleotide
  modified_base 1..2: mod_base = OTHER; note = bicyclic nucleic acid (BNA)
  source 1..24: mol_type = other DNA
ccaacatcaaggaagatggcattt

SEQ ID NO: 7538 - DNA, 23 bp, synthetic construct
  misc_feature 1..23: note = Description of Artificial Sequence: Synthetic Antisense oligonucleotide
  modified_base 1..2: mod_base = OTHER; note = bicyclic nucleic acid (BNA)
  source 1..23: mol_type = other DNA
ccaacatcaaggaagatggcatt

SEQ ID NO: 7539 - DNA, 22 bp, synthetic construct
  misc_feature 1..22: note = Description of Artificial Sequence: Synthetic Antisense oligonucleotide
  modified_base 1..2: mod_base = OTHER; note = bicyclic nucleic acid (BNA)
  source 1..22: mol_type = other DNA
ccaacatcaaggaagatggcat

SEQ ID NO: 7540 - DNA, 21 bp, synthetic construct
  misc_feature 1..21: note = Description of Artificial Sequence: Synthetic Antisense oligonucleotide
  modified_base 1..2: mod_base = OTHER; note = bicyclic nucleic acid (BNA)
  source 1..21: mol_type = other DNA
ccaacatcaaggaagatggca

SEQ ID NO: 7541 - DNA, 20 bp, synthetic construct
  misc_feature 1..20: note = Description of Artificial Sequence: Synthetic Antisense oligonucleotide
  modified_base 1..2: mod_base = OTHER; note = bicyclic nucleic acid (BNA)
  source 1..20: mol_type = other DNA
ccaacatcaaggaagatggc

SEQ ID NO: 7542 - DNA, 19 bp, synthetic construct
  misc_feature 1..19: note = Description of Artificial Sequence: Synthetic Antisense oligonucleotide
  modified_base 1..2: mod_base = OTHER; note = bicyclic nucleic acid (BNA)
  source 1..19: mol_type = other DNA
ccaacatcaaggaagatgg

SEQ ID NO: 7543 - DNA, 18 bp, synthetic construct
  misc_feature 1..18: note = Description of Artificial Sequence: Synthetic Antisense oligonucleotide
  modified_base 1..2: mod_base = OTHER; note = bicyclic nucleic acid (BNA)
  source 1..18: mol_type = other DNA
ccaacatcaaggaagatg

SEQ ID NO: 7544 - DNA, 17 bp, synthetic construct
  misc_feature 1..17: note = Description of Artificial Sequence: Synthetic Antisense oligonucleotide
  modified_base 1..2: mod_base = OTHER; note = bicyclic nucleic acid (BNA)
  source 1..17: mol_type = other DNA
ccaacatcaaggaagat

SEQ ID NO: 7545 - DNA, 16 bp, synthetic construct
  misc_feature 1..16: note = Description of Artificial Sequence: Synthetic Antisense oligonucleotide
  modified_base 1..2: mod_base = OTHER; note = bicyclic nucleic acid (BNA)
  source 1..16: mol_type = other DNA
ccaacatcaaggaaga

SEQ ID NO: 7546 - DNA, 15 bp, synthetic construct
  misc_feature 1..15: note = Description of Artificial Sequence: Synthetic Antisense oligonucleotide
  modified_base 1..2: mod_base = OTHER; note = bicyclic nucleic acid (BNA)
  source 1..15: mol_type = other DNA
ccaacatcaaggaag

SEQ ID NO: 7547 - DNA, 27 bp, synthetic construct
  misc_feature 1..27: note = Description of Artificial Sequence: Synthetic Antisense oligonucleotide
  modified_base 1..2: mod_base = OTHER; note = bicyclic nucleic acid (BNA)
  source 1..27: mol_type = other DNA
caacatcaaggaagatggcatttctag

SEQ ID NO: 7548 - DNA, 26 bp, synthetic construct
  misc_feature 1..26: note = Description of Artificial Sequence: Synthetic Antisense oligonucleotide
  modified_base 1..2: mod_base = OTHER; note = bicyclic nucleic acid (BNA)
  source 1..26: mol_type = other DNA
caacatcaaggaagatggcatttcta

SEQ ID NO: 7549 - DNA, 25 bp, synthetic construct
  misc_feature 1..25: note = Description of Artificial Sequence: Synthetic Antisense oligonucleotide
  modified_base 1..2: mod_base = OTHER; note = bicyclic nucleic acid (BNA)
  source 1..25: mol_type = other DNA
caacatcaaggaagatggcatttct

SEQ ID NO: 7550 - DNA, 24 bp, synthetic construct
  misc_feature 1..24: note = Description of Artificial Sequence: Synthetic Antisense oligonucleotide
  modified_base 1..2: mod_base = OTHER; note = bicyclic nucleic acid (BNA)
  source 1..24: mol_type = other DNA
caacatcaaggaagatggcatttc

SEQ ID NO: 7551 - DNA, 23 bp, synthetic construct
  misc_feature 1..23: note = Description of Artificial Sequence: Synthetic Antisense oligonucleotide
  modified_base 1..2: mod_base = OTHER; note = bicyclic nucleic acid (BNA)
  source 1..23: mol_type = other DNA
caacatcaaggaagatggcattt

SEQ ID NO: 7552 - DNA, 22 bp, synthetic construct
  misc_feature 1..22: note = Description of Artificial Sequence: Synthetic Antisense oligonucleotide
  modified_base 1..2: mod_base = OTHER; note = bicyclic nucleic acid (BNA)
  source 1..22: mol_type = other DNA
caacatcaaggaagatggcatt

SEQ ID NO: 7553 - DNA, 21 bp, synthetic construct
  misc_feature 1..21: note = Description of Artificial Sequence: Synthetic Antisense oligonucleotide
  modified_base 1..2: mod_base = OTHER; note = bicyclic nucleic acid (BNA)
  source 1..21: mol_type = other DNA
caacatcaaggaagatggcat

SEQ ID NO: 7554 - DNA, 20 bp, synthetic construct
  misc_feature 1..20: note = Description of Artificial Sequence: Synthetic Antisense oligonucleotide
  modified_base 1..2: mod_base = OTHER; note = bicyclic nucleic acid (BNA)
  source 1..20: mol_type = other DNA
caacatcaaggaagatggca

SEQ ID NO: 7555 - DNA, 19 bp, synthetic construct
  misc_feature 1..19: note = Description of Artificial Sequence: Synthetic Antisense oligonucleotide
  modified_base 1..2: mod_base = OTHER; note = bicyclic nucleic acid (BNA)
  source 1..19: mol_type = other DNA
caacatcaaggaagatggc

SEQ ID NO: 7556 - DNA, 18 bp, synthetic construct
  misc_feature 1..18: note = Description of Artificial Sequence: Synthetic Antisense oligonucleotide
  modified_base 1..2: mod_base = OTHER; note = bicyclic nucleic acid (BNA)
  source 1..18: mol_type = other DNA
caacatcaaggaagatgg

SEQ ID NO: 7557 - DNA, 17 bp, synthetic construct
  misc_feature 1..17: note = Description of Artificial Sequence: Synthetic Antisense oligonucleotide
  modified_base 1..2: mod_base = OTHER; note = bicyclic nucleic acid (BNA)
  source 1..17: mol_type = other DNA
caacatcaaggaagatg

SEQ ID NO: 7558 - DNA, 16 bp, synthetic construct
  misc_feature 1..16: note = Description of Artificial Sequence: Synthetic Antisense oligonucleotide
  modified_base 1..2: mod_base = OTHER; note = bicyclic nucleic acid (BNA)
  source 1..16: mol_type = other DNA
caacatcaaggaagat

SEQ ID NO: 7559 - DNA, 15 bp, synthetic construct
  misc_feature 1..15: note = Description of Artificial Sequence: Synthetic Antisense oligonucleotide
  modified_base 1..2: mod_base = OTHER; note = bicyclic nucleic acid (BNA)
  source 1..15: mol_type = other DNA
caacatcaaggaaga

SEQ ID NO: 7560 - DNA, 14 bp, synthetic construct
  misc_feature 1..14: note = Description of Artificial Sequence: Synthetic Antisense oligonucleotide
  modified_base 1..2: mod_base = OTHER; note = bicyclic nucleic acid (BNA)
  source 1..14: mol_type = other DNA
caacatcaaggaag

SEQ ID NO: 7561 - DNA, 26 bp, synthetic construct
  misc_feature 1..26: note = Description of Artificial Sequence: Synthetic Antisense oligonucleotide
  modified_base 1..2: mod_base = OTHER; note = bicyclic nucleic acid (BNA)
  source 1..26: mol_type = other DNA
aacatcaaggaagatggcatttctag

SEQ ID NO: 7562 - DNA, 25 bp, synthetic construct
  misc_feature 1..25: note = Description of Artificial Sequence: Synthetic Antisense oligonucleotide
  modified_base 1..2: mod_base = OTHER; note = bicyclic nucleic acid (BNA)
  source 1..25: mol_type = other DNA
aacatcaaggaagatggcatttcta

SEQ ID NO: 7563 - DNA, 24 bp, synthetic construct
  misc_feature 1..24: note = Description of Artificial Sequence: Synthetic Antisense oligonucleotide
  modified_base 1..2: mod_base = OTHER; note = bicyclic nucleic acid (BNA)
  source 1..24: mol_type = other DNA
aacatcaaggaagatggcatttct

SEQ ID NO: 7564 - DNA, 23 bp, synthetic construct
  misc_feature 1..23: note = Description of Artificial Sequence: Synthetic Antisense oligonucleotide
  modified_base 1..2: mod_base = OTHER; note = bicyclic nucleic acid (BNA)
  source 1..23: mol_type = other DNA
aacatcaaggaagatggcatttc

SEQ ID NO: 7565 - DNA, 22 bp, synthetic construct
  misc_feature 1..22: note = Description of Artificial Sequence: Synthetic Antisense oligonucleotide
  modified_base 1..2: mod_base = OTHER; note = bicyclic nucleic acid (BNA)
  source 1..22: mol_type = other DNA
aacatcaaggaagatggcattt

SEQ ID NO: 7566 - DNA, 21 bp, synthetic construct
  misc_feature 1..21: note = Description of Artificial Sequence: Synthetic Antisense oligonucleotide
  modified_base 1..2: mod_base = OTHER; note = bicyclic nucleic acid (BNA)
  source 1..21: mol_type = other DNA
aacatcaaggaagatggcatt

SEQ ID NO: 7567 - DNA, 20 bp, synthetic construct
  misc_feature 1..20: note = Description of Artificial Sequence: Synthetic Antisense oligonucleotide
  modified_base 1..2: mod_base = OTHER; note = bicyclic nucleic acid (BNA)
  source 1..20: mol_type = other DNA
aacatcaaggaagatggcat

SEQ ID NO: 7568 - DNA, 19 bp, synthetic construct
  misc_feature 1..19: note = Description of Artificial Sequence: Synthetic Antisense oligonucleotide
  modified_base 1..2: mod_base = OTHER; note = bicyclic nucleic acid (BNA)
  source 1..19: mol_type = other DNA
aacatcaaggaagatggca

SEQ ID NO: 7569 - DNA, 18 bp, synthetic construct
  misc_feature 1..18: note = Description of Artificial Sequence: Synthetic Antisense oligonucleotide
  modified_base 1..2: mod_base = OTHER; note = bicyclic nucleic acid (BNA)
  source 1..18: mol_type = other DNA
aacatcaaggaagatggc

SEQ ID NO: 7570 - DNA, 17 bp, synthetic construct
  misc_feature 1..17: note = Description of Artificial Sequence: Synthetic Antisense oligonucleotide
  modified_base 1..2: mod_base = OTHER; note = bicyclic nucleic acid (BNA)
  source 1..17: mol_type = other DNA
aacatcaaggaagatgg

SEQ ID NO: 7571 - DNA, 16 bp, synthetic construct
  misc_feature 1..16: note = Description of Artificial Sequence: Synthetic Antisense oligonucleotide
  modified_base 1..2: mod_base = OTHER; note = bicyclic nucleic acid (BNA)
  source 1..16: mol_type = other DNA
aacatcaaggaagatg

SEQ ID NO: 7572 - DNA, 15 bp, synthetic construct
  misc_feature 1..15: note = Description of Artificial Sequence: Synthetic Antisense oligonucleotide
  modified_base 1..2: mod_base = OTHER; note = bicyclic nucleic acid (BNA)
  source 1..15: mol_type = other DNA
aacatcaaggaagat

SEQ ID NO: 7573 - DNA, 14 bp, synthetic construct
  misc_feature 1..14: note = Description of Artificial Sequence: Synthetic Antisense oligonucleotide
  modified_base 1..2: mod_base = OTHER; note = bicyclic nucleic acid (BNA)
  source 1..14: mol_type = other DNA
aacatcaaggaaga

SEQ ID NO: 7574 - DNA, 13 bp, synthetic construct
  misc_feature 1..13: note = Description of Artificial Sequence: Synthetic Antisense oligonucleotide
  modified_base 1..2: mod_base = OTHER; note = bicyclic nucleic acid (BNA)
  source 1..13: mol_type = other DNA
aacatcaaggaag

SEQ ID NO: 7575 - DNA, 25 bp, synthetic construct
  misc_feature 1..25: note = Description of Artificial Sequence: Synthetic Antisense oligonucleotide
  modified_base 1..2: mod_base = OTHER; note = bicyclic nucleic acid (BNA)
  source 1..25: mol_type = other DNA
acatcaaggaagatggcatttctag

SEQ ID NO: 7576 - DNA, 24 bp, synthetic construct
  misc_feature 1..24: note = Description of Artificial Sequence: Synthetic Antisense oligonucleotide
  modified_base 1..2: mod_base = OTHER; note = bicyclic nucleic acid (BNA)
  source 1..24: mol_type = other DNA
acatcaaggaagatggcatttcta

SEQ ID NO: 7577 - DNA, 23 bp, synthetic construct
  misc_feature 1..23: note = Description of Artificial Sequence: Synthetic Antisense oligonucleotide
  modified_base 1..2: mod_base = OTHER; note = bicyclic nucleic acid (BNA)
  source 1..23: mol_type = other DNA
acatcaaggaagatggcatttct

SEQ ID NO: 7578 - DNA, 22 bp, synthetic construct
  misc_feature 1..22: note = Description of Artificial Sequence: Synthetic Antisense oligonucleotide
  modified_base 1..2: mod_base = OTHER; note = bicyclic nucleic acid (BNA)
  source 1..22: mol_type = other DNA
acatcaaggaagatggcatttc

SEQ ID NO: 7579 - DNA, 21 bp, synthetic construct
  misc_feature 1..21: note = Description of Artificial Sequence: Synthetic Antisense oligonucleotide
  modified_base 1..2: mod_base = OTHER; note = bicyclic nucleic acid (BNA)
  source 1..21: mol_type = other DNA
acatcaaggaagatggcattt

SEQ ID NO: 7580 - DNA, 20 bp, synthetic construct
  misc_feature 1..20: note = Description of Artificial Sequence: Synthetic Antisense oligonucleotide
  modified_base 1..2: mod_base = OTHER; note = bicyclic nucleic acid (BNA)
  source 1..20: mol_type = other DNA
acatcaaggaagatggcatt

SEQ ID NO: 7581 - DNA, 19 bp, synthetic construct
  misc_feature 1..19: note = Description of Artificial Sequence: Synthetic Antisense oligonucleotide
  modified_base 1..2: mod_base = OTHER; note = bicyclic nucleic acid (BNA)
  source 1..19: mol_type = other DNA
acatcaaggaagatggcat

SEQ ID NO: 7582 - DNA, 18 bp, synthetic construct
  misc_feature 1..18: note = Description of Artificial Sequence: Synthetic Antisense oligonucleotide
  modified_base 1..2: mod_base = OTHER; note = bicyclic nucleic acid (BNA)
  source 1..18: mol_type = other DNA
acatcaaggaagatggca

SEQ ID NO: 7583 - DNA, 17 bp, synthetic construct
  misc_feature 1..17: note = Description of Artificial Sequence: Synthetic Antisense oligonucleotide
  modified_base 1..2: mod_base = OTHER; note = bicyclic nucleic acid (BNA)
  source 1..17: mol_type = other DNA
acatcaaggaagatggc

SEQ ID NO: 7584 - DNA, 16 bp, synthetic construct
  misc_feature 1..16: note = Description of Artificial Sequence: Synthetic Antisense oligonucleotide
  modified_base 1..2: mod_base = OTHER; note = bicyclic nucleic acid (BNA)
  source 1..16: mol_type = other DNA
acatcaaggaagatgg

SEQ ID NO: 7585 - DNA, 15 bp, synthetic construct
  misc_feature 1..15: note = Description of Artificial Sequence: Synthetic Antisense oligonucleotide
  modified_base 1..2: mod_base = OTHER; note = bicyclic nucleic acid (BNA)
  source 1..15: mol_type = other DNA
acatcaaggaagatg

SEQ ID NO: 7586 - DNA, 14 bp, synthetic construct
  misc_feature 1..14: note = Description of Artificial Sequence: Synthetic Antisense oligonucleotide
  modified_base 1..2: mod_base = OTHER; note = bicyclic nucleic acid (BNA)
  source 1..14: mol_type = other DNA
acatcaaggaagat

SEQ ID NO: 7587 - DNA, 13 bp, synthetic construct
  misc_feature 1..13: note = Description of Artificial Sequence: Synthetic Antisense oligonucleotide
  modified_base 1..2: mod_base = OTHER; note = bicyclic nucleic acid (BNA)
  source 1..13: mol_type = other DNA
acatcaaggaaga

SEQ ID NO: 7588 - DNA, 12 bp, synthetic construct
  misc_feature 1..12: note = Description of Artificial Sequence: Synthetic Antisense oligonucleotide
  modified_base 1..2: mod_base = OTHER; note = bicyclic nucleic acid (BNA)
  source 1..12: mol_type = other DNA
acatcaaggaag

SEQ ID NO: 7589 - DNA, 24 bp, synthetic construct
  misc_feature 1..24: note = Description of Artificial Sequence: Synthetic Antisense oligonucleotide
  modified_base 1..2: mod_base = OTHER; note = bicyclic nucleic acid (BNA)
  source 1..24: mol_type = other DNA
catcaaggaagatggcatttctag

SEQ ID NO: 7590 - DNA, 23 bp, synthetic construct
  misc_feature 1..23: note = Description of Artificial Sequence: Synthetic Antisense oligonucleotide
  modified_base 1..2: mod_base = OTHER; note = bicyclic nucleic acid (BNA)
  source 1..23: mol_type = other DNA
catcaaggaagatggcatttcta

SEQ ID NO: 7591 - DNA, 22 bp, synthetic construct
  misc_feature 1..22: note = Description of Artificial Sequence: Synthetic Antisense oligonucleotide
  modified_base 1..2: mod_base = OTHER; note = bicyclic nucleic acid (BNA)
  source 1..22: mol_type = other DNA
catcaaggaagatggcatttct

SEQ ID NO: 7592 - DNA, 21 bp, synthetic construct
  misc_feature 1..21: note = Description of Artificial Sequence: Synthetic Antisense oligonucleotide
  modified_base 1..2: mod_base = OTHER; note = bicyclic nucleic acid (BNA)
  source 1..21: mol_type = other DNA
catcaaggaagatggcatttc

SEQ ID NO: 7593 - DNA, 20 bp, synthetic construct
  misc_feature 1..20: note = Description of Artificial Sequence: Synthetic Antisense oligonucleotide
  modified_base 1..2: mod_base = OTHER; note = bicyclic nucleic acid (BNA)
  source 1..20: mol_type = other DNA
catcaaggaagatggcattt

SEQ ID NO: 7594 - DNA, 19 bp, synthetic construct
  misc_feature 1..19: note = Description of Artificial Sequence: Synthetic Antisense oligonucleotide
  modified_base 1..2: mod_base = OTHER; note = bicyclic nucleic acid (BNA)
  source 1..19: mol_type = other DNA
catcaaggaagatggcatt

SEQ ID NO: 7595 - DNA, 18 bp, synthetic construct
  misc_feature 1..18: note = Description of Artificial Sequence: Synthetic Antisense oligonucleotide
  modified_base 1..2: mod_base = OTHER; note = bicyclic nucleic acid (BNA)
  source 1..18: mol_type = other DNA
catcaaggaagatggcat

SEQ ID NO: 7596 - DNA, 17 bp, synthetic construct
  misc_feature 1..17: note = Description of Artificial Sequence: Synthetic Antisense oligonucleotide
  modified_base 1..2: mod_base = OTHER; note = bicyclic nucleic acid (BNA)
  source 1..17: mol_type = other DNA
catcaaggaagatggca

SEQ ID NO: 7597 - DNA, 16 bp, synthetic construct
  misc_feature 1..16: note = Description of Artificial Sequence: Synthetic Antisense oligonucleotide
  modified_base 1..2: mod_base = OTHER; note = bicyclic nucleic acid (BNA)
  source 1..16: mol_type = other DNA
catcaaggaagatggc

SEQ ID NO: 7598 - DNA, 15 bp, synthetic construct
  misc_feature 1..15: note = Description of Artificial Sequence: Synthetic Antisense oligonucleotide
  modified_base 1..2: mod_base = OTHER; note = bicyclic nucleic acid (BNA)
  source 1..15: mol_type = other DNA
catcaaggaagatgg

SEQ ID NO: 7599 - DNA, 14 bp, synthetic construct
  misc_feature 1..14: note = Description of Artificial Sequence: Synthetic Antisense oligonucleotide
  modified_base 1..2: mod_base = OTHER; note = bicyclic nucleic acid (BNA)
  source 1..14: mol_type = other DNA
catcaaggaagatg

SEQ ID NO: 7600 - DNA, 13 bp, synthetic construct
  misc_feature 1..13: note = Description of Artificial Sequence: Synthetic Antisense oligonucleotide
  modified_base 1..2: mod_base = OTHER; note = bicyclic nucleic acid (BNA)
  source 1..13: mol_type = other DNA
catcaaggaagat

SEQ ID NO: 7601 - DNA, 12 bp, synthetic construct
  misc_feature 1..12: note = Description of Artificial Sequence: Synthetic Antisense oligonucleotide
  modified_base 1..2: mod_base = OTHER; note = bicyclic nucleic acid (BNA)
  source 1..12: mol_type = other DNA
catcaaggaaga

SEQ ID NO: 7602 - DNA, 11 bp, synthetic construct
  misc_feature 1..11: note = Description of Artificial Sequence: Synthetic Antisense oligonucleotide
  modified_base 1..2: mod_base = OTHER; note = bicyclic nucleic acid (BNA)
  source 1..11: mol_type = other DNA
catcaaggaag

SEQ ID NO: 7603 - DNA, 23 bp, synthetic construct
  misc_feature 1..23: note = Description of Artificial Sequence: Synthetic Antisense oligonucleotide
  modified_base 1..2: mod_base = OTHER; note = bicyclic nucleic acid (BNA)
  source 1..23: mol_type = other DNA
atcaaggaagatggcatttctag

SEQ ID NO: 7604 - DNA, 22 bp, synthetic construct
  misc_feature 1..22: note = Description of Artificial Sequence: Synthetic Antisense oligonucleotide
  modified_base 1..2: mod_base = OTHER; note = bicyclic nucleic acid (BNA)
  source 1..22: mol_type = other DNA
atcaaggaagatggcatttcta

SEQ ID NO: 7605 - DNA, 21 bp, synthetic construct
  misc_feature 1..21: note = Description of Artificial Sequence: Synthetic Antisense oligonucleotide
  modified_base 1..2: mod_base = OTHER; note = bicyclic nucleic acid (BNA)
  source 1..21: mol_type = other DNA
atcaaggaagatggcatttct

SEQ ID NO: 7606 - DNA, 20 bp, synthetic construct
  misc_feature 1..20: note = Description of Artificial Sequence: Synthetic Antisense oligonucleotide
  modified_base 1..2: mod_base = OTHER; note = bicyclic nucleic acid (BNA)
  source 1..20: mol_type = other DNA
atcaaggaagatggcatttc

SEQ ID NO: 7607 - DNA, 19 bp, synthetic construct
  misc_feature 1..19: note = Description of Artificial Sequence: Synthetic Antisense oligonucleotide
  modified_base 1..2: mod_base = OTHER; note = bicyclic nucleic acid (BNA)
  source 1..19: mol_type = other DNA
atcaaggaagatggcattt

SEQ ID NO: 7608 - DNA, 18 bp, synthetic construct
  misc_feature 1..18: note = Description of Artificial Sequence: Synthetic Antisense oligonucleotide
  modified_base 1..2: mod_base = OTHER; note = bicyclic nucleic acid (BNA)
  source 1..18: mol_type = other DNA
atcaaggaagatggcatt

SEQ ID NO: 7609 - DNA, 17 bp, synthetic construct
  misc_feature 1..17: note = Description of Artificial Sequence: Synthetic Antisense oligonucleotide
  modified_base 1..2: mod_base = OTHER; note = bicyclic nucleic acid (BNA)
  source 1..17: mol_type = other DNA
atcaaggaagatggcat

SEQ ID NO: 7610 - DNA, 16 bp, synthetic construct
  misc_feature 1..16: note = Description of Artificial Sequence: Synthetic Antisense oligonucleotide
  modified_base 1..2: mod_base = OTHER; note = bicyclic nucleic acid (BNA)
  source 1..16: mol_type = other DNA
atcaaggaagatggca

SEQ ID NO: 7611 - DNA, 15 bp, synthetic construct
  misc_feature 1..15: note = Description of Artificial Sequence: Synthetic Antisense oligonucleotide
  modified_base 1..2: mod_base = OTHER; note = bicyclic nucleic acid (BNA)
  source 1..15: mol_type = other DNA
atcaaggaagatggc

SEQ ID NO: 7612 - DNA, 14 bp, synthetic construct
  misc_feature 1..14: note = Description of Artificial Sequence: Synthetic Antisense oligonucleotide
  modified_base 1..2: mod_base = OTHER; note = bicyclic nucleic acid (BNA)
  source 1..14: mol_type = other DNA
atcaaggaagatgg

SEQ ID NO: 7613 - DNA, 13 bp, synthetic construct
  misc_feature 1..13: note = Description of Artificial Sequence: Synthetic Antisense oligonucleotide
  modified_base 1..2: mod_base = OTHER; note = bicyclic nucleic acid (BNA)
  source 1..13: mol_type = other DNA
atcaaggaagatg

SEQ ID NO: 7614 - DNA, 12 bp, synthetic construct
  misc_feature 1..12: note = Description of Artificial Sequence: Synthetic Antisense oligonucleotide
  modified_base 1..2: mod_base = OTHER; note = bicyclic nucleic acid (BNA)
  source 1..12: mol_type = other DNA
atcaaggaagat

SEQ ID NO: 7615 - DNA, 11 bp, synthetic construct
  misc_feature 1..11: note = Description of Artificial Sequence: Synthetic Antisense oligonucleotide
  modified_base 1..2: mod_base = OTHER; note = bicyclic nucleic acid (BNA)
  source 1..11: mol_type = other DNA
atcaaggaaga

SEQ ID NO: 7616 - DNA, 10 bp, synthetic construct
  misc_feature 1..10: note = Description of Artificial Sequence: Synthetic Antisense oligonucleotide
  modified_base 1..2: mod_base = OTHER; note = bicyclic nucleic acid (BNA)
  source 1..10: mol_type = other DNA
atcaaggaag

SEQ ID NO: 7617 - DNA, 18 bp, synthetic construct
  misc_feature 1..18: note = Description of Artificial Sequence: Synthetic Antisense oligonucleotide
  modified_base 17..18: mod_base = OTHER; note = bicyclic nucleic acid (BNA)
  source 1..18: mol_type = other DNA
ggtaagttctgtccaagc

SEQ ID NO: 7618 - DNA, 18 bp, synthetic construct
  misc_feature 1..18: note = Description of Artificial Sequence: Synthetic Antisense oligonucleotide
  modified_base 17..18: mod_base = OTHER; note = bicyclic nucleic acid (BNA)
  source 1..18: mol_type = other DNA
gtaagttctgtccaagcc

SEQ ID NO: 7619 - DNA, 18 bp, synthetic construct
  misc_feature 1..18: note = Description of Artificial Sequence: Synthetic Antisense oligonucleotide
  modified_base 17..18: mod_base = OTHER; note = bicyclic nucleic acid (BNA)
  source 1..18: mol_type = other DNA
agtcggtaagttctgtcc

SEQ ID NO: 7620 - DNA, 18 bp, synthetic construct
  misc_feature 1..18: note = Description of Artificial Sequence: Synthetic Antisense oligonucleotide
  modified_base 17..18: mod_base = OTHER; note = bicyclic nucleic acid (BNA)
  source 1..18: mol_type = other DNA
ctgtccaagcccggttga

SEQ ID NO: 7621 - DNA, 15 bp, synthetic construct
  misc_feature 1..15: note = Description of Artificial Sequence: Synthetic Antisense oligonucleotide
  modified_base 14..15: mod_base = OTHER; note = bicyclic nucleic acid (BNA)
  source 1..15: mol_type = other DNA
taagttctgtccaag

SEQ ID NO: 7622 - DNA, 20 bp, synthetic construct
  misc_feature 1..20: note = Description of Artificial Sequence: Synthetic Antisense oligonucleotide
  modified_base 19..20: mod_base = OTHER; note = bicyclic nucleic acid (BNA)
  source 1..20: mol_type = other DNA
ttctgtccaagcccggttga

SEQ ID NO: 7623 - DNA, 19 bp, synthetic construct
  misc_feature 1..19: note = Description of Artificial Sequence: Synthetic Antisense oligonucleotide
  modified_base 18..19: mod_base = OTHER; note = bicyclic nucleic acid (BNA)
  source 1..19: mol_type = other DNA
ttctgtccaagcccggttg

SEQ ID NO: 7624 - DNA, 18 bp, synthetic construct
  misc_feature 1..18: note = Description of Artificial Sequence: Synthetic Antisense oligonucleotide
  modified_base 17..18: mod_base = OTHER; note = bicyclic nucleic acid (BNA)
  source 1..18: mol_type = other DNA
ttctgtccaagcccggtt

SEQ ID NO: 7625 - DNA, 17 bp, synthetic construct
  misc_feature 1..17: note = Description of Artificial Sequence: Synthetic Antisense oligonucleotide
  modified_base 16..17: mod_base = OTHER; note = bicyclic nucleic acid (BNA)
  source 1..17: mol_type = other DNA
ttctgtccaagcccggt

SEQ ID NO: 7626 - DNA, 16 bp, synthetic construct
  misc_feature 1..16: note = Description of Artificial Sequence: Synthetic Antisense oligonucleotide
  modified_base 15..16: mod_base = OTHER; note = bicyclic nucleic acid (BNA)
  source 1..16: mol_type = other DNA
ttctgtccaagcccgg

SEQ ID NO: 7627 - DNA, 15 bp, synthetic construct
  misc_feature 1..15: note = Description of Artificial Sequence: Synthetic Antisense oligonucleotide
  modified_base 14..15: mod_base = OTHER; note = bicyclic nucleic acid (BNA)
  source 1..15: mol_type = other DNA
ttctgtccaagcccg

SEQ ID NO: 7628 - DNA, 14 bp, synthetic construct
  misc_feature 1..14: note = Description of Artificial Sequence: Synthetic Antisense oligonucleotide
  modified_base 13..14: mod_base = OTHER; note = bicyclic nucleic acid (BNA)
  source 1..14: mol_type = other DNA
ttctgtccaagccc

SEQ ID NO: 7629 - DNA, 13 bp, synthetic construct
  misc_feature 1..13: note = Description of Artificial Sequence: Synthetic Antisense oligonucleotide
  modified_base 12..13: mod_base = OTHER; note = bicyclic nucleic acid (BNA)
  source 1..13: mol_type = other DNA
ttctgtccaagcc

SEQ ID NO: 7630 - DNA, 12 bp, synthetic construct
  misc_feature 1..12: note = Description of Artificial Sequence: Synthetic Antisense oligonucleotide
  modified_base 11..12: mod_base = OTHER; note = bicyclic nucleic acid (BNA)
  source 1..12: mol_type = other DNA
ttctgtccaagc

SEQ ID NO: 7631 - DNA, 11 bp, synthetic construct
  misc_feature 1..11: note = Description of Artificial Sequence: Synthetic Antisense oligonucleotide
  modified_base 10..11: mod_base = OTHER; note = bicyclic nucleic acid (BNA)
  source 1..11: mol_type = other DNA
ttctgtccaag

SEQ ID NO: 7632 - DNA, 10 bp, synthetic construct
  misc_feature 1..10: note = Description of Artificial Sequence: Synthetic Antisense oligonucleotide
  modified_base 9..10: mod_base = OTHER; note = bicyclic nucleic acid (BNA)
  source 1..10: mol_type = other DNA
ttctgtccaa

SEQ ID NO: 7633-7634 - skipped (2 entries)

SEQ ID NO: 7635 - DNA, 19 bp, synthetic construct
  misc_feature 1..19: note = Description of Artificial Sequence: Synthetic Antisense oligonucleotide
  modified_base 18..19: mod_base = OTHER; note = bicyclic nucleic acid (BNA)
  source 1..19: mol_type = other DNA
tctgtccaagcccggttga

SEQ ID NO: 7636 - DNA, 18 bp, synthetic construct
  misc_feature 1..18: note = Description of Artificial Sequence: Synthetic Antisense oligonucleotide
  modified_base 17..18: mod_base = OTHER; note = bicyclic nucleic acid (BNA)
  source 1..18: mol_type = other DNA
tctgtccaagcccggttg

SEQ ID NO: 7637 - DNA, 17 bp, synthetic construct
  misc_feature 1..17: note = Description of Artificial Sequence: Synthetic Antisense oligonucleotide
  modified_base 16..17: mod_base = OTHER; note = bicyclic nucleic acid (BNA)
  source 1..17: mol_type = other DNA
tctgtccaagcccggtt

SEQ ID NO: 7638 - DNA, 16 bp, synthetic construct
  misc_feature 1..16: note = Description of Artificial Sequence: Synthetic Antisense oligonucleotide
  modified_base 15..16: mod_base = OTHER; note = bicyclic nucleic acid (BNA)
  source 1..16: mol_type = other DNA
tctgtccaagcccggt

SEQ ID NO: 7639 - DNA, 15 bp, synthetic construct
  misc_feature 1..15: note = Description of Artificial Sequence: Synthetic Antisense oligonucleotide
  modified_base 14..15: mod_base = OTHER; note = bicyclic nucleic acid (BNA)
  source 1..15: mol_type = other DNA
tctgtccaagcccgg

SEQ ID NO: 7640 - DNA, 14 bp, synthetic construct
  misc_feature 1..14: note = Description of Artificial Sequence: Synthetic Antisense oligonucleotide
  modified_base 13..14: mod_base = OTHER; note = bicyclic nucleic acid (BNA)
  source 1..14: mol_type = other DNA
tctgtccaagcccg

SEQ ID NO: 7641 - DNA, 13 bp, synthetic construct
  misc_feature 1..13: note = Description of Artificial Sequence: Synthetic Antisense oligonucleotide
  modified_base 12..13: mod_base = OTHER; note = bicyclic nucleic acid (BNA)
  source 1..13: mol_type = other DNA
tctgtccaagccc

SEQ ID NO: 7642 - DNA, 12 bp, synthetic construct
  misc_feature 1..12: note = Description of Artificial Sequence: Synthetic Antisense oligonucleotide
  modified_base 11..12: mod_base = OTHER; note = bicyclic nucleic acid (BNA)
  source 1..12: mol_type = other DNA
tctgtccaagcc

SEQ ID NO: 7643 - DNA, 11 bp, synthetic construct
  misc_feature 1..11: note = Description of Artificial Sequence: Synthetic Antisense oligonucleotide
  modified_base 10..11: mod_base = OTHER; note = bicyclic nucleic acid (BNA)
  source 1..11: mol_type = other DNA
tctgtccaagc

SEQ ID NO: 7644 - DNA, 10 bp, synthetic construct
  misc_feature 1..10: note = Description of Artificial Sequence: Synthetic Antisense oligonucleotide
  modified_base 9..10: mod_base = OTHER; note = bicyclic nucleic acid (BNA)
  source 1..10: mol_type = other DNA
tctgtccaag

SEQ ID NO: 7645-7646 - skipped (2 entries)

SEQ ID NO: 7647 - DNA, 17 bp, synthetic construct
  misc_feature 1..17: note = Description of Artificial Sequence: Synthetic Antisense oligonucleotide
  modified_base 16..17: mod_base = OTHER; note = bicyclic nucleic acid (BNA)
  source 1..17: mol_type = other DNA
ctgtccaagcccggttg

SEQ ID NO: 7648 - DNA, 16 bp, synthetic construct
  misc_feature 1..16: note = Description of Artificial Sequence: Synthetic Antisense oligonucleotide
  modified_base 15..16: mod_base = OTHER; note = bicyclic nucleic acid (BNA)
  source 1..16: mol_type = other DNA
ctgtccaagcccggtt

SEQ ID NO: 7649 - DNA, 15 bp, synthetic construct
  misc_feature 1..15: note = Description of Artificial Sequence: Synthetic Antisense oligonucleotide
  modified_base 14..15: mod_base = OTHER; note = bicyclic nucleic acid (BNA)
  source 1..15: mol_type = other DNA
ctgtccaagcccggt

SEQ ID NO: 7650 - DNA, 14 bp, synthetic construct
  misc_feature 1..14: note = Description of Artificial Sequence: Synthetic Antisense oligonucleotide
  modified_base 13..14: mod_base = OTHER; note = bicyclic nucleic acid (BNA)
  source 1..14: mol_type = other DNA
ctgtccaagcccgg

SEQ ID NO: 7651 - DNA, 13 bp, synthetic construct
  misc_feature 1..13: note = Description of Artificial Sequence: Synthetic Antisense oligonucleotide
  modified_base 12..13: mod_base = OTHER; note = bicyclic nucleic acid (BNA)
  source 1..13: mol_type = other DNA
ctgtccaagcccg

SEQ ID NO: 7652 - DNA, 12 bp, synthetic construct
  misc_feature 1..12: note = Description of Artificial Sequence: Synthetic Antisense oligonucleotide
  modified_base 11..12: mod_base = OTHER; note = bicyclic nucleic acid (BNA)
  source 1..12: mol_type = other DNA
ctgtccaagccc

SEQ ID NO: 7653 - DNA, 11 bp, synthetic construct
  misc_feature 1..11: note = Description of Artificial Sequence: Synthetic Antisense oligonucleotide
  modified_base 10..11: mod_base = OTHER; note = bicyclic nucleic acid (BNA)
  source 1..11: mol_type = other DNA
ctgtccaagcc

SEQ ID NO: 7654 - DNA, 10 bp, synthetic construct
  misc_feature 1..10: note = Description of Artificial Sequence: Synthetic Antisense oligonucleotide
  modified_base 9..10: mod_base = OTHER; note = bicyclic nucleic acid (BNA)
  source 1..10: mol_type = other DNA
ctgtccaagc

SEQ ID NO: 7655-7656 - skipped (2 entries)

SEQ ID NO: 7657 - DNA, 20 bp, synthetic construct
  misc_feature 1..20: note = Description of Artificial Sequence: Synthetic Antisense oligonucleotide
  modified_base 19..20: mod_base = OTHER; note = bicyclic nucleic acid (BNA)
  source 1..20: mol_type = other DNA
gttctgtccaagcccggttg

SEQ ID NO: 7658 - DNA, 19 bp, synthetic construct
  misc_feature 1..19: note = Description of Artificial Sequence: Synthetic Antisense oligonucleotide
  modified_base 18..19: mod_base = OTHER; note = bicyclic nucleic acid (BNA)
  source 1..19: mol_type = other DNA
gttctgtccaagcccggtt

SEQ ID NO: 7659 - DNA, 18 bp, synthetic construct
  misc_feature 1..18: note = Description of Artificial Sequence: Synthetic Antisense oligonucleotide
  modified_base 17..18: mod_base = OTHER; note = bicyclic nucleic acid (BNA)
  source 1..18: mol_type = other DNA
gttctgtccaagcccggt

SEQ ID NO: 7660 - DNA, 17 bp, synthetic construct
  misc_feature 1..17: note = Description of Artificial Sequence: Synthetic Antisense oligonucleotide
  modified_base 16..17: mod_base = OTHER; note = bicyclic nucleic acid (BNA)
  source 1..17: mol_type = other DNA
gttctgtccaagcccgg

SEQ ID NO: 7661 - DNA, 16 bp, synthetic construct
  misc_feature 1..16: note = Description of Artificial Sequence: Synthetic Antisense oligonucleotide
  modified_base 15..16: mod_base = OTHER; note = bicyclic nucleic acid (BNA)
  source 1..16: mol_type = other DNA
gttctgtccaagcccg

SEQ ID NO: 7662 - DNA, 15 bp, synthetic construct
  misc_feature 1..15: note = Description of Artificial Sequence: Synthetic Antisense oligonucleotide
  modified_base 14..15: mod_base = OTHER; note = bicyclic nucleic acid (BNA)
  source 1..15: mol_type = other DNA
gttctgtccaagccc

SEQ ID NO: 7663 - DNA, 14 bp, synthetic construct
  misc_feature 1..14: note = Description of Artificial Sequence: Synthetic Antisense oligonucleotide
  modified_base 13..14: mod_base = OTHER; note = bicyclic nucleic acid (BNA)
  source 1..14: mol_type = other DNA
gttctgtccaagcc

SEQ ID NO: 7664 - DNA, 13 bp, synthetic construct
  misc_feature 1..13: note = Description of Artificial Sequence: Synthetic Antisense oligonucleotide
  modified_base 12..13: mod_base = OTHER; note = bicyclic nucleic acid (BNA)
  source 1..13: mol_type = other DNA
gttctgtccaagc

SEQ ID NO: 7665 - DNA, 12 bp, synthetic construct
  misc_feature 1..12: note = Description of Artificial Sequence: Synthetic Antisense oligonucleotide
  modified_base 11..12: mod_base = OTHER; note = bicyclic nucleic acid (BNA)
  source 1..12: mol_type = other DNA
gttctgtccaag

SEQ ID NO: 7666 - DNA, 11 bp, synthetic construct
  misc_feature 1..11: note = Description of Artificial Sequence: Synthetic Antisense oligonucleotide
  modified_base 10..11: mod_base = OTHER; note = bicyclic nucleic acid (BNA)
  source 1..11: mol_type = other DNA
gttctgtccaa

SEQ ID NO: 7667 - DNA, 10 bp, synthetic construct
  misc_feature 1..10: note = Description of Artificial Sequence: Synthetic Antisense oligonucleotide
  modified_base 9..10: mod_base = OTHER; note = bicyclic nucleic acid (BNA)
  source 1..10: mol_type = other DNA
gttctgtcca

SEQ ID NO: 7668-7669 - skipped (2 entries)

SEQ ID NO: 7670 - DNA, 20 bp, synthetic construct
  misc_feature 1..20: note = Description of Artificial Sequence: Synthetic Antisense oligonucleotide
  modified_base 19..20: mod_base = OTHER; note = bicyclic nucleic acid (BNA)
  source 1..20: mol_type = other DNA
agttctgtccaagcccggtt

SEQ ID NO: 7671 - DNA, 19 bp, synthetic construct
  misc_feature 1..19: note = Description of Artificial Sequence: Synthetic Antisense oligonucleotide
  modified_base 18..19: mod_base = OTHER; note = bicyclic nucleic acid (BNA)
  source 1..19: mol_type = other DNA
agttctgtccaagcccggt

SEQ ID NO: 7672 - DNA, 18 bp, synthetic construct
  misc_feature 1..18: note = Description of Artificial Sequence: Synthetic Antisense oligonucleotide
  modified_base 17..18: mod_base = OTHER; note = bicyclic nucleic acid (BNA)
  source 1..18: mol_type = other DNA
agttctgtccaagcccgg

SEQ ID NO: 7673 - DNA, 17 bp, synthetic construct
  misc_feature 1..17: note = Description of Artificial Sequence: Synthetic Antisense oligonucleotide
  modified_base 16..17: mod_base = OTHER; note = bicyclic nucleic acid (BNA)
  source 1..17: mol_type = other DNA
agttctgtccaagcccg

SEQ ID NO: 7674 - DNA, 16 bp, synthetic construct
  misc_feature 1..16: note = Description of Artificial Sequence: Synthetic Antisense oligonucleotide
  modified_base 15..16: mod_base = OTHER; note = bicyclic nucleic acid (BNA)
  source 1..16: mol_type = other DNA
agttctgtccaagccc

SEQ ID NO: 7675 - DNA, 15 bp, synthetic construct
  misc_feature 1..15: note = Description of Artificial Sequence: Synthetic Antisense oligonucleotide
  modified_base 14..15: mod_base = OTHER; note = bicyclic nucleic acid (BNA)
  source 1..15: mol_type = other DNA
agttctgtccaagcc

SEQ ID NO: 7676 - DNA, 14 bp, synthetic construct
  misc_feature 1..14: note = Description of Artificial Sequence: Synthetic Antisense oligonucleotide
  modified_base 13..14: mod_base = OTHER; note = bicyclic nucleic acid (BNA)
  source 1..14: mol_type = other DNA
agttctgtccaagc

SEQ ID NO: 7677 - DNA, 13 bp, synthetic construct
  misc_feature 1..13: note = Description of Artificial Sequence: Synthetic Antisense oligonucleotide
  modified_base 12..13: mod_base = OTHER; note = bicyclic nucleic acid (BNA)
  source 1..13: mol_type = other DNA
agttctgtccaag

SEQ ID NO: 7678 - DNA, 12 bp, synthetic construct
  misc_feature 1..12: note = Description of Artificial Sequence: Synthetic Antisense oligonucleotide
  modified_base 11..12: mod_base = OTHER; note = bicyclic nucleic acid (BNA)
  source 1..12: mol_type = other DNA
agttctgtccaa

SEQ ID NO: 7679 - DNA, 11 bp, synthetic construct
  misc_feature 1..11: note = Description of Artificial Sequence: Synthetic Antisense oligonucleotide
  modified_base 10..11: mod_base = OTHER; note = bicyclic nucleic acid (BNA)
  source 1..11: mol_type = other DNA
agttctgtcca

SEQ ID NO: 7680 - DNA, 10 bp, synthetic construct
  misc_feature 1..10: note = Description of Artificial Sequence: Synthetic Antisense oligonucleotide
  modified_base 9..10: mod_base = OTHER; note = bicyclic nucleic acid (BNA)
  source 1..10: mol_type = other DNA
agttctgtcc

SEQ ID NO: 7681-7682 - skipped (2 entries)

SEQ ID NO: 7683 - DNA, 20 bp, synthetic construct
  misc_feature 1..20: note = Description of Artificial Sequence: Synthetic Antisense oligonucleotide
  modified_base 19..20: mod_base = OTHER; note = bicyclic nucleic acid (BNA)
  source 1..20: mol_type = other DNA
aagttctgtccaagcccggt

SEQ ID NO: 7684 - DNA, 19 bp, synthetic construct
  misc_feature 1..19: note = Description of Artificial Sequence: Synthetic Antisense oligonucleotide
  modified_base 18..19: mod_base = OTHER; note = bicyclic nucleic acid (BNA)
  source 1..19: mol_type = other DNA
aagttctgtccaagcccgg

SEQ ID NO: 7685 - DNA, 18 bp, synthetic construct
  misc_feature 1..18: note = Description of Artificial Sequence: Synthetic Antisense oligonucleotide
  modified_base 17..18: mod_base = OTHER; note = bicyclic nucleic acid (BNA)
  source 1..18: mol_type = other DNA
aagttctgtccaagcccg

SEQ ID NO: 7686 - DNA, 17 bp, synthetic construct
  misc_feature 1..17: note = Description of Artificial Sequence: Synthetic Antisense oligonucleotide
  modified_base 16..17: mod_base = OTHER; note = bicyclic nucleic acid (BNA)
  source 1..17: mol_type = other DNA
aagttctgtccaagccc

SEQ ID NO: 7687 - DNA, 16 bp, synthetic construct
  misc_feature 1..16: note = Description of Artificial Sequence: Synthetic Antisense oligonucleotide
  modified_base 15..16: mod_base = OTHER; note = bicyclic nucleic acid (BNA)
  source 1..16: mol_type = other DNA
aagttctgtccaagcc

SEQ ID NO: 7688 - DNA, 15 bp, synthetic construct
  misc_feature 1..15: note = Description of Artificial Sequence: Synthetic Antisense oligonucleotide
  modified_base 14..15: mod_base = OTHER; note = bicyclic nucleic acid (BNA)
  source 1..15: mol_type = other DNA
aagttctgtccaagc

SEQ ID NO: 7689 - DNA, 14 bp, synthetic construct
  misc_feature 1..14: note = Description of Artificial Sequence: Synthetic Antisense oligonucleotide
  modified_base 13..14: mod_base = OTHER; note = bicyclic nucleic acid (BNA)
  source 1..14: mol_type = other DNA
aagttctgtccaag

SEQ ID NO: 7690 - DNA, 13 bp, synthetic construct
  misc_feature 1..13: note = Description of Artificial Sequence: Synthetic Antisense oligonucleotide
  modified_base 12..13: mod_base = OTHER; note = bicyclic nucleic acid (BNA)
  source 1..13: mol_type = other DNA
aagttctgtccaa

SEQ ID NO: 7691 - DNA, 12 bp, synthetic construct
  misc_feature 1..12: note = Description of Artificial Sequence: Synthetic Antisense oligonucleotide
  modified_base 11..12: mod_base = OTHER; note = bicyclic nucleic acid (BNA)
  source 1..12: mol_type = other DNA
aagttctgtcca

SEQ ID NO: 7692 - DNA, 11 bp, synthetic construct
  misc_feature 1..11: note = Description of Artificial Sequence: Synthetic Antisense oligonucleotide
  modified_base 10..11: mod_base = OTHER; note = bicyclic nucleic acid (BNA)
  source 1..11: mol_type = other DNA
aagttctgtcc

SEQ ID NO: 7693 - DNA, 10 bp, synthetic construct
  misc_feature 1..10: note = Description of Artificial Sequence: Synthetic Antisense oligonucleotide
  modified_base 9..10: mod_base = OTHER; note = bicyclic nucleic acid (BNA)
  source 1..10: mol_type = other DNA
aagttctgtc

SEQ ID NO: 7694-7695 - skipped (2 entries)

SEQ ID NO: 7696 - DNA, 20 bp, synthetic construct
  misc_feature 1..20: note = Description of Artificial Sequence: Synthetic Antisense oligonucleotide
  modified_base 19..20: mod_base = OTHER; note = bicyclic nucleic acid (BNA)
  source 1..20: mol_type = other DNA
taagttctgtccaagcccgg

SEQ ID NO: 7697 - DNA, 19 bp, synthetic construct
  misc_feature 1..19: note = Description of Artificial Sequence: Synthetic Antisense oligonucleotide
  modified_base 18..19: mod_base = OTHER; note = bicyclic nucleic acid (BNA)
  source 1..19: mol_type = other DNA
taagttctgtccaagcccg

SEQ ID NO: 7698 - DNA, 18 bp, synthetic construct
  misc_feature 1..18: note = Description of Artificial Sequence: Synthetic Antisense oligonucleotide
  modified_base 17..18: mod_base = OTHER; note = bicyclic nucleic acid (BNA)
  source 1..18: mol_type = other DNA
taagttctgtccaagccc

SEQ ID NO: 7699 - DNA, 17 bp, synthetic construct
  misc_feature 1..17: note = Description of Artificial Sequence: Synthetic Antisense oligonucleotide
  modified_base 16..17: mod_base = OTHER; note = bicyclic nucleic acid (BNA)
  source 1..17: mol_type = other DNA
taagttctgtccaagcc

SEQ ID NO: 7700 - DNA, 16 bp, synthetic construct
  misc_feature 1..16: note = Description of Artificial Sequence: Synthetic Antisense oligonucleotide
  modified_base 15..16: mod_base = OTHER; note = bicyclic nucleic acid (BNA)
  source 1..16: mol_type = other DNA
taagttctgtccaagc

SEQ ID NO: 7701 - DNA, 14 bp, synthetic construct
  misc_feature 1..14: note = Description of Artificial Sequence: Synthetic Antisense oligonucleotide
  modified_base 13..14: mod_base = OTHER; note = bicyclic nucleic acid (BNA)
  source 1..14: mol_type = other DNA
taagttctgtccaa

SEQ ID NO: 7702 - DNA, 13 bp, synthetic construct
  misc_feature 1..13: note = Description of Artificial Sequence: Synthetic Antisense oligonucleotide
  modified_base 12..13: mod_base = OTHER; note = bicyclic nucleic acid (BNA)
  source 1..13: mol_type = other DNA
taagttctgtcca

SEQ ID NO: 7703 - DNA, 12 bp, synthetic construct
  misc_feature 1..12: note = Description of Artificial Sequence: Synthetic Antisense oligonucleotide
  modified_base 11..12: mod_base = OTHER; note = bicyclic nucleic acid (BNA)
  source 1..12: mol_type = other DNA
taagttctgtcc

SEQ ID NO: 7704 - DNA, 11 bp, synthetic construct
  misc_feature 1..11: note = Description of Artificial Sequence: Synthetic Antisense oligonucleotide
  modified_base 10..11: mod_base = OTHER; note = bicyclic nucleic acid (BNA)
  source 1..11: mol_type = other DNA
taagttctgtc

SEQ ID NO: 7705 - DNA, 10 bp, synthetic construct
  misc_feature 1..10: note = Description of Artificial Sequence: Synthetic Antisense oligonucleotide
  modified_base 9..10: mod_base = OTHER; note = bicyclic nucleic acid (BNA)
  source 1..10: mol_type = other DNA
taagttctgt

SEQ ID NO: 7706-7707 - skipped (2 entries)

SEQ ID NO: 7708 - DNA, 20 bp, synthetic construct
  misc_feature 1..20: note = Description of Artificial Sequence: Synthetic Antisense oligonucleotide
  modified_base 19..20: mod_base = OTHER; note = bicyclic nucleic acid (BNA)
  source 1..20: mol_type = other DNA
gtaagttctgtccaagcccg

SEQ ID NO: 7709 - DNA, 19 bp, synthetic construct
  misc_feature 1..19: note = Description of Artificial Sequence: Synthetic Antisense oligonucleotide
  modified_base 18..19: mod_base = OTHER; note = bicyclic nucleic acid (BNA)
  source 1..19: mol_type = other DNA
gtaagttctgtccaagccc

SEQ ID NO: 7710 - DNA, 17 bp, synthetic construct
  misc_feature 1..17: note = Description of Artificial Sequence: Synthetic Antisense oligonucleotide
  modified_base 16..17: mod_base = OTHER; note = bicyclic nucleic acid (BNA)
  source 1..17: mol_type = other DNA
gtaagttctgtccaagc

SEQ ID NO: 7711 - DNA, 16 bp, synthetic construct
  misc_feature 1..16: note = Description of Artificial Sequence: Synthetic Antisense oligonucleotide
  modified_base 15..16: mod_base = OTHER; note = bicyclic nucleic acid (BNA)
  source 1..16: mol_type = other DNA
gtaagttctgtccaag

SEQ ID NO: 7712 - DNA, 15 bp, synthetic construct
  misc_feature 1..15: note = Description of Artificial Sequence: Synthetic Antisense oligonucleotide
  modified_base 14..15: mod_base = OTHER; note = bicyclic nucleic acid (BNA)
  source 1..15: mol_type = other DNA
gtaagttctgtccaa

SEQ ID NO: 7713 - DNA, 14 bp, synthetic construct
  misc_feature 1..14: note = Description of Artificial Sequence: Synthetic Antisense oligonucleotide
  modified_base 13..14: mod_base = OTHER; note = bicyclic nucleic acid (BNA)
  source 1..14: mol_type = other DNA
gtaagttctgtcca

SEQ ID NO: 7714 - DNA, 13 bp, synthetic construct
  misc_feature 1..13: note = Description of Artificial Sequence: Synthetic Antisense oligonucleotide
  modified_base 12..13: mod_base = OTHER; note = bicyclic nucleic acid (BNA)
  source 1..13: mol_type = other DNA
gtaagttctgtcc

SEQ ID NO: 7715 - DNA, 12 bp, synthetic construct
  misc_feature 1..12: note = Description of Artificial Sequence: Synthetic Antisense oligonucleotide
  modified_base 11..12: mod_base = OTHER; note = bicyclic nucleic acid (BNA)
  source 1..12: mol_type = other DNA
gtaagttctgtc

SEQ ID NO: 7716 - DNA, 11 bp, synthetic construct
  misc_feature 1..11: note = Description of Artificial Sequence: Synthetic Antisense oligonucleotide
  modified_base 10..11: mod_base = OTHER; note = bicyclic nucleic acid (BNA)
  source 1..11: mol_type = other DNA
gtaagttctgt

SEQ ID NO: 7717 - DNA, 10 bp, synthetic construct
  misc_feature 1..10: note = Description of Artificial Sequence: Synthetic Antisense oligonucleotide
  modified_base 9..10: mod_base = OTHER; note = bicyclic nucleic acid (BNA)
  source 1..10: mol_type = other DNA
gtaagttctg

SEQ ID NO: 7718-7719 - skipped (2 entries)

SEQ ID NO: 7720 - DNA, 20 bp, synthetic construct
  misc_feature 1..20: note = Description of Artificial Sequence: Synthetic Antisense oligonucleotide
  modified_base 19..20: mod_base = OTHER; note = bicyclic nucleic acid (BNA)
  source 1..20: mol_type = other DNA
ggtaagttctgtccaagccc

SEQ ID NO: 7721 - DNA, 19 bp, synthetic construct
  misc_feature 1..19: note = Description of Artificial Sequence: Synthetic Antisense oligonucleotide
  modified_base 18..19: mod_base = OTHER; note = bicyclic nucleic acid (BNA)
  source 1..19: mol_type = other DNA
ggtaagttctgtccaagcc

SEQ ID NO: 7722 - DNA, 17 bp, synthetic construct
  misc_feature 1..17: note = Description of Artificial Sequence: Synthetic Antisense oligonucleotide
  modified_base 16..17: mod_base = OTHER; note = bicyclic nucleic acid (BNA)
  source 1..17: mol_type = other DNA
ggtaagttctgtccaag

SEQ ID NO: 7723 - DNA, 16 bp, synthetic construct
  misc_feature 1..16: note = Description of Artificial Sequence: Synthetic Antisense oligonucleotide
  modified_base 15..16: mod_base = OTHER; note = bicyclic nucleic acid (BNA)
  source 1..16: mol_type = other DNA
ggtaagttctgtccaa

SEQ ID NO: 7724 - DNA, 15 bp, synthetic construct
  misc_feature 1..15: note = Description of Artificial Sequence: Synthetic Antisense oligonucleotide
  modified_base 14..15: mod_base = OTHER; note = bicyclic nucleic acid (BNA)
  source 1..15: mol_type = other DNA
ggtaagttctgtcca

SEQ ID NO: 7725 - DNA, 14 bp, synthetic construct
  misc_feature 1..14: note = Description of Artificial Sequence: Synthetic Antisense oligonucleotide
  modified_base 13..14: mod_base = OTHER; note = bicyclic nucleic acid (BNA)
  source 1..14: mol_type = other DNA
ggtaagttctgtcc

SEQ ID NO: 7726 - DNA, 13 bp, synthetic construct
  misc_feature 1..13: note = Description of Artificial Sequence: Synthetic Antisense oligonucleotide
  modified_base 12..13: mod_base = OTHER; note = bicyclic nucleic acid (BNA)
  source 1..13: mol_type = other DNA
ggtaagttctgtc

SEQ ID NO: 7727 - DNA, 12 bp, synthetic construct
  misc_feature 1..12: note = Description of Artificial Sequence: Synthetic Antisense oligonucleotide
  modified_base 11..12: mod_base = OTHER; note = bicyclic nucleic acid (BNA)
  source 1..12: mol_type = other DNA
ggtaagttctgt

SEQ ID NO: 7728 - DNA, 11 bp, synthetic construct
  misc_feature 1..11: note = Description of Artificial Sequence: Synthetic Antisense oligonucleotide
  modified_base 10..11: mod_base = OTHER; note = bicyclic nucleic acid (BNA)
  source 1..11: mol_type = other DNA
ggtaagttctg

SEQ ID NO: 7729 - DNA, 10 bp, synthetic construct
  misc_feature 1..10: note = Description of Artificial Sequence: Synthetic Antisense oligonucleotide
  modified_base 9..10: mod_base = OTHER; note = bicyclic nucleic acid (BNA)
  source 1..10: mol_type = other DNA
ggtaagttct

SEQ ID NO: 7730-7731 - skipped (2 entries)

SEQ ID NO: 7732 - DNA, 20 bp, synthetic construct
  misc_feature 1..20: note = Description of Artificial Sequence: Synthetic Antisense oligonucleotide
  modified_base 19..20: mod_base = OTHER; note = bicyclic nucleic acid (BNA)
  source 1..20: mol_type = other DNA
cggtaagttctgtccaagcc

SEQ ID NO: 7733 - DNA, 19 bp, synthetic construct
  misc_feature 1..19: note = Description of Artificial Sequence: Synthetic Antisense oligonucleotide
  modified_base 18..19: mod_base = OTHER; note = bicyclic nucleic acid (BNA)
  source 1..19: mol_type = other DNA
cggtaagttctgtccaagc

SEQ ID NO: 7734 - DNA, 18 bp, synthetic construct
  misc_feature 1..18: note = Description of Artificial Sequence: Synthetic Antisense oligonucleotide
  modified_base 17..18: mod_base = OTHER; note = bicyclic nucleic acid (BNA)
  source 1..18: mol_type = other DNA
cggtaagttctgtccaag

SEQ ID NO: 7735 - DNA, 17 bp, synthetic construct
  misc_feature 1..17: note = Description of Artificial Sequence: Synthetic Antisense oligonucleotide
  modified_base 16..17: mod_base = OTHER; note = bicyclic nucleic acid (BNA)
  source 1..17: mol_type = other DNA
cggtaagttctgtccaa

SEQ ID NO: 7736 - DNA, 16 bp, synthetic construct
  misc_feature 1..16: note = Description of Artificial Sequence: Synthetic Antisense oligonucleotide
  modified_base 15..16: mod_base = OTHER; note = bicyclic nucleic acid (BNA)
  source 1..16: mol_type = other DNA
cggtaagttctgtcca

SEQ ID NO: 7737 - DNA, 15 bp, synthetic construct
  misc_feature 1..15: note = Description of Artificial Sequence: Synthetic Antisense oligonucleotide
  modified_base 14..15: mod_base = OTHER; note = bicyclic nucleic acid (BNA)
  source 1..15: mol_type = other DNA
cggtaagttctgtcc

SEQ ID NO: 7738 - DNA, 14 bp, synthetic construct
  misc_feature 1..14: note = Description of Artificial Sequence: Synthetic Antisense oligonucleotide
  modified_base 13..14: mod_base = OTHER; note = bicyclic nucleic acid (BNA)
  source 1..14: mol_type = other DNA
cggtaagttctgtc

SEQ ID NO: 7739 - DNA, 13 bp, synthetic construct
  misc_feature 1..13: note = Description of Artificial Sequence: Synthetic Antisense oligonucleotide
  modified_base 12..13: mod_base = OTHER; note = bicyclic nucleic acid (BNA)
  source 1..13: mol_type = other DNA
cggtaagttctgt

SEQ ID NO: 7740 - DNA, 12 bp, synthetic construct
  misc_feature 1..12: note = Description of Artificial Sequence: Synthetic Antisense oligonucleotide
  modified_base 11..12: mod_base = OTHER; note = bicyclic nucleic acid (BNA)
  source 1..12: mol_type = other DNA
cggtaagttctg

SEQ ID NO: 7741 - DNA, 11 bp, synthetic construct
  misc_feature 1..11: note = Description of Artificial Sequence: Synthetic Antisense oligonucleotide
  modified_base 10..11: mod_base = OTHER; note = bicyclic nucleic acid (BNA)
  source 1..11: mol_type = other DNA
cggtaagttct

SEQ ID NO: 7742 - DNA, 10 bp, synthetic construct
  misc_feature 1..10: note = Description of Artificial Sequence: Synthetic Antisense oligonucleotide
  modified_base 9..10: mod_base = OTHER; note = bicyclic nucleic acid (BNA)
  source 1..10: mol_type = other DNA
cggtaagttc

SEQ ID NO: 7743-7744 - skipped (2 entries)

SEQ ID NO: 7745 - DNA, 20 bp, synthetic construct
  misc_feature 1..20: note = Description of Artificial Sequence: Synthetic Antisense oligonucleotide
  modified_base 19..20: mod_base = OTHER; note = bicyclic nucleic acid (BNA)
  source 1..20: mol_type = other DNA
tcggtaagttctgtccaagc

SEQ ID NO: 7746 - DNA, 19 bp, synthetic construct
  misc_feature 1..19: note = Description of Artificial Sequence: Synthetic Antisense oligonucleotide
  modified_base 18..19: mod_base = OTHER; note = bicyclic nucleic acid (BNA)
  source 1..19: mol_type = other DNA
tcggtaagttctgtccaag

SEQ ID NO: 7747 - DNA, 18 bp, synthetic construct
  misc_feature 1..18: note = Description of Artificial Sequence: Synthetic Antisense oligonucleotide
  modified_base 17..18: mod_base = OTHER; note = bicyclic nucleic acid (BNA)
  source 1..18: mol_type = other DNA
tcggtaagttctgtccaa

SEQ ID NO: 7748 - DNA, 17 bp, synthetic construct
  misc_feature 1..17: note = Description of Artificial Sequence: Synthetic Antisense oligonucleotide
  modified_base 16..17: mod_base = OTHER; note = bicyclic nucleic acid (BNA)
  source 1..17: mol_type = other DNA
tcggtaagttctgtcca

SEQ ID NO: 7749 - DNA, 16 bp, synthetic construct
  misc_feature 1..16: note = Description of Artificial Sequence: Synthetic Antisense oligonucleotide
  modified_base 15..16: mod_base = OTHER; note = bicyclic nucleic acid (BNA)
  source 1..16: mol_type = other DNA
tcggtaagttctgtcc

SEQ ID NO: 7750 - DNA, 15 bp, synthetic construct
  misc_feature 1..15: note = Description of Artificial Sequence: Synthetic Antisense oligonucleotide
  modified_base 14..15: mod_base = OTHER; note = bicyclic nucleic acid (BNA)
  source 1..15: mol_type = other DNA
tcggtaagttctgtc

SEQ ID NO: 7751 - DNA, 14 bp, synthetic construct
  misc_feature 1..14: note = Description of Artificial Sequence: Synthetic Antisense oligonucleotide
  modified_base 13..14: mod_base = OTHER; note = bicyclic nucleic acid (BNA)
  source 1..14: mol_type = other DNA
tcggtaagttctgt

SEQ ID NO: 7752 - DNA, 13 bp, synthetic construct
  misc_feature 1..13: note = Description of Artificial Sequence: Synthetic Antisense oligonucleotide
  modified_base 12..13: mod_base = OTHER; note = bicyclic nucleic acid (BNA)
  source 1..13: mol_type = other DNA
tcggtaagttctg

SEQ ID NO: 7753 - DNA, 12 bp, synthetic construct
  misc_feature 1..12: note = Description of Artificial Sequence: Synthetic Antisense oligonucleotide
  modified_base 11..12: mod_base = OTHER; note = bicyclic nucleic acid (BNA)
  source 1..12: mol_type = other DNA
tcggtaagttct

SEQ ID NO: 7754 - DNA, 11 bp, synthetic construct
  misc_feature 1..11: note = Description of Artificial Sequence: Synthetic Antisense oligonucleotide
  modified_base 10..11: mod_base = OTHER; note = bicyclic nucleic acid (BNA)
  source 1..11: mol_type = other DNA
tcggtaagttc

SEQ ID NO: 7755 - DNA, 10 bp, synthetic construct
  misc_feature 1..10: note = Description of Artificial Sequence: Synthetic Antisense oligonucleotide
  modified_base 9..10: mod_base = OTHER; note = bicyclic nucleic acid (BNA)
  source 1..10: mol_type = other DNA
tcggtaagtt

SEQ ID NO: 7756 - skipped

SEQ ID NO: 7757 - DNA, 20 bp, synthetic construct
  misc_feature 1..20: note = Description of Artificial Sequence: Synthetic Antisense oligonucleotide
  modified_base 19..20: mod_base = OTHER; note = bicyclic nucleic acid (BNA)
  source 1..20: mol_type = other DNA
gtcggtaagttctgtccaag

SEQ ID NO: 7758 - DNA, 19 bp, synthetic construct
  misc_feature 1..19: note = Description of Artificial Sequence: Synthetic Antisense oligonucleotide
  modified_base 18..19: mod_base = OTHER; note = bicyclic nucleic acid (BNA)
  source 1..19: mol_type = other DNA
gtcggtaagttctgtccaa

SEQ ID NO: 7759 - DNA, 18 bp, synthetic construct
  misc_feature 1..18: note = Description of Artificial Sequence: Synthetic Antisense oligonucleotide
  modified_base 17..18: mod_base = OTHER; note = bicyclic nucleic acid (BNA)
  source 1..18: mol_type = other DNA
gtcggtaagttctgtcca

SEQ ID NO: 7760 - DNA, 17 bp, synthetic construct
  misc_feature 1..17: note = Description of Artificial Sequence: Synthetic Antisense oligonucleotide
  modified_base 16..17: mod_base = OTHER; note = bicyclic nucleic acid (BNA)
  source 1..17: mol_type = other DNA
gtcggtaagttctgtcc

SEQ ID NO: 7761 - DNA, 16 bp, synthetic construct
  misc_feature 1..16: note = Description of Artificial Sequence: Synthetic Antisense oligonucleotide
  modified_base 15..16: mod_base = OTHER; note = bicyclic nucleic acid (BNA)
  source 1..16: mol_type = other DNA
gtcggtaagttctgtc

SEQ ID NO: 7762 - DNA, 15 bp, synthetic construct
  misc_feature 1..15: note = Description of Artificial Sequence: Synthetic Antisense oligonucleotide
  modified_base 14..15: mod_base = OTHER; note = bicyclic nucleic acid (BNA)
  source 1..15: mol_type = other DNA
gtcggtaagttctgt

SEQ ID NO: 7763 - DNA, 14 bp, synthetic construct
  misc_feature 1..14: note = Description of Artificial Sequence: Synthetic Antisense oligonucleotide
  modified_base 13..14: mod_base = OTHER; note = bicyclic nucleic acid (BNA)
  source 1..14: mol_type = other DNA
gtcggtaagttctg

SEQ ID NO: 7764 - DNA, 13 bp, synthetic construct
  misc_feature 1..13: note = Description of Artificial Sequence: Synthetic Antisense oligonucleotide
  modified_base 12..13: mod_base = OTHER; note = bicyclic nucleic acid (BNA)
  source 1..13: mol_type = other DNA
gtcggtaagttct

SEQ ID NO: 7765 - DNA, 12 bp, synthetic construct
  misc_feature 1..12: note = Description of Artificial Sequence: Synthetic Antisense oligonucleotide
  modified_base 11..12: mod_base = OTHER; note = bicyclic nucleic acid (BNA)
  source 1..12: mol_type = other DNA
gtcggtaagttc

SEQ ID NO: 7766 - DNA, 11 bp, synthetic construct
  misc_feature 1..11: note = Description of Artificial Sequence: Synthetic Antisense oligonucleotide
  modified_base 10..11: mod_base = OTHER; note = bicyclic nucleic acid (BNA)
  source 1..11: mol_type = other DNA
gtcggtaagtt

SEQ ID NO: 7767 - DNA, 10 bp, synthetic construct
  misc_feature 1..10: note = Description of Artificial Sequence: Synthetic Antisense oligonucleotide
  modified_base 9..10: mod_base = OTHER; note = bicyclic nucleic acid (BNA)
  source 1..10: mol_type = other DNA
gtcggtaagt

SEQ ID NO: 7768 - DNA, 20 bp, synthetic construct
  misc_feature 1..20: note = Description of Artificial Sequence: Synthetic Antisense oligonucleotide
  modified_base 19..20: mod_base = OTHER; note = bicyclic nucleic acid (BNA)
  source 1..20: mol_type = other DNA
agtcggtaagttctgtccaa

SEQ ID NO: 7769 - DNA, 19 bp, synthetic construct
  misc_feature 1..19: note = Description of Artificial Sequence: Synthetic Antisense oligonucleotide
  modified_base 18..19: mod_base = OTHER; note = bicyclic nucleic acid (BNA)
  source 1..19: mol_type = other DNA
agtcggtaagttctgtcca

SEQ ID NO: 7770 - DNA, 17 bp, synthetic construct
  misc_feature 1..17: note = Description of Artificial Sequence: Synthetic Antisense oligonucleotide
  modified_base 16..17: mod_base = OTHER; note = bicyclic nucleic acid (BNA)
  source 1..17: mol_type = other DNA
agtcggtaagttctgtc

SEQ ID NO: 7771 - DNA, 16 bp, synthetic construct
  misc_feature 1..16: note = Description of Artificial Sequence: Synthetic Antisense oligonucleotide
  modified_base 15..16: mod_base = OTHER; note = bicyclic nucleic acid (BNA)
  source 1..16: mol_type = other DNA
agtcggtaagttctgt

SEQ ID NO: 7772 - DNA, 15 bp, synthetic construct
  misc_feature 1..15: note = Description of Artificial Sequence: Synthetic Antisense oligonucleotide
  modified_base 14..15: mod_base = OTHER; note = bicyclic nucleic acid (BNA)
  source 1..15: mol_type = other DNA
agtcggtaagttctg

SEQ ID NO: 7773 - DNA, 14 bp, synthetic construct
  misc_feature 1..14: note = Description of Artificial Sequence: Synthetic Antisense oligonucleotide
  modified_base 13..14: mod_base = OTHER; note = bicyclic nucleic acid (BNA)
  source 1..14: mol_type = other DNA
agtcggtaagttct

SEQ ID NO: 7774 - DNA, 13 bp, synthetic construct
  misc_feature 1..13: note = Description of Artificial Sequence: Synthetic Antisense oligonucleotide
  modified_base 12..13: mod_base = OTHER; note = bicyclic nucleic acid (BNA)
  source 1..13: mol_type = other DNA
agtcggtaagttc

SEQ ID NO: 7775 - DNA, 12 bp, synthetic construct
  misc_feature 1..12: note = Description of Artificial Sequence: Synthetic Antisense oligonucleotide
  modified_base 11..12: mod_base = OTHER; note = bicyclic nucleic acid (BNA)
  source 1..12: mol_type = other DNA
agtcggtaagtt

SEQ ID NO: 7776 - DNA, 11 bp, synthetic construct
  misc_feature 1..11: note = Description of Artificial Sequence: Synthetic Antisense oligonucleotide
  modified_base 10..11: mod_base = OTHER; note = bicyclic nucleic acid (BNA)
  source 1..11: mol_type = other DNA
agtcggtaagt

SEQ ID NO: 7777 - DNA, 20 bp, synthetic construct
  misc_feature 1..20: note = Description of Artificial Sequence: Synthetic Antisense oligonucleotide
  modified_base 19..20: mod_base = OTHER; note = bicyclic nucleic acid (BNA)
  source 1..20: mol_type = other DNA
cagtcggtaagttctgtcca

SEQ ID NO: 7778 - DNA, 19 bp, synthetic construct
  misc_feature 1..19: note = Description of Artificial Sequence: Synthetic Antisense oligonucleotide
  modified_base 18..19: mod_base = OTHER; note = bicyclic nucleic acid (BNA)
  source 1..19: mol_type = other DNA
cagtcggtaagttctgtcc

SEQ ID NO: 7779 - DNA, 18 bp, synthetic construct
  misc_feature 1..18: note = Description of Artificial Sequence: Synthetic Antisense oligonucleotide
  modified_base 17..18: mod_base = OTHER; note = bicyclic nucleic acid (BNA)
  source 1..18: mol_type = other DNA
cagtcggtaagttctgtc

SEQ ID NO: 7780 - DNA, 17 bp, synthetic construct
  misc_feature 1..17: note = Description of Artificial Sequence: Synthetic Antisense oligonucleotide
  modified_base 16..17: mod_base = OTHER; note = bicyclic nucleic acid (BNA)
  source 1..17: mol_type = other DNA
cagtcggtaagttctgt

SEQ ID NO: 7781 - DNA, 16 bp, synthetic construct
  misc_feature 1..16: note = Description of Artificial Sequence: Synthetic Antisense oligonucleotide
  modified_base 15..16: mod_base = OTHER; note = bicyclic nucleic acid (BNA)
  source 1..16: mol_type = other DNA
cagtcggtaagttctg

SEQ ID NO: 7782 - DNA, 15 bp, synthetic construct
  misc_feature 1..15: note = Description of Artificial Sequence: Synthetic Antisense oligonucleotide
  modified_base 14..15: mod_base = OTHER; note = bicyclic nucleic acid (BNA)
  source 1..15: mol_type = other DNA
cagtcggtaagttct

SEQ ID NO: 7783 - DNA, 14 bp, synthetic construct
  misc_feature 1..14: note = Description of Artificial Sequence: Synthetic Antisense oligonucleotide
  modified_base 13..14: mod_base = OTHER; note = bicyclic nucleic acid (BNA)
  source 1..14: mol_type = other DNA
cagtcggtaagttc

SEQ ID NO: 7784 - DNA, 13 bp, synthetic construct
  misc_feature 1..13: note = Description of Artificial Sequence: Synthetic Antisense oligonucleotide
  modified_base 12..13: mod_base = OTHER; note = bicyclic nucleic acid (BNA)
  source 1..13: mol_type = other DNA
cagtcggtaagtt

SEQ ID NO: 7785 - DNA, 12 bp, synthetic construct
  misc_feature 1..12: note = Description of Artificial Sequence: Synthetic Antisense oligonucleotide
  modified_base 11..12: mod_base = OTHER; note = bicyclic nucleic acid (BNA)
  source 1..12: mol_type = other DNA
cagtcggtaagt

SEQ ID NO: 7786 - DNA, 20 bp, synthetic construct
  misc_feature 1..20: note = Description of Artificial Sequence: Synthetic Antisense oligonucleotide
  modified_base 19..20: mod_base = OTHER; note = bicyclic nucleic acid (BNA)
  source 1..20: mol_type = other DNA
ccagtcggtaagttctgtcc

SEQ ID NO: 7787 - DNA, 19 bp, synthetic construct
  misc_feature 1..19: note = Description of Artificial Sequence: Synthetic Antisense oligonucleotide
  modified_base 18..19: mod_base = OTHER; note = bicyclic nucleic acid (BNA)
  source 1..19: mol_type = other DNA
ccagtcggtaagttctgtc

SEQ ID NO: 7788 - DNA, 18 bp, synthetic construct
  misc_feature 1..18: note = Description of Artificial Sequence: Synthetic Antisense oligonucleotide
  modified_base 17..18: mod_base = OTHER; note = bicyclic nucleic acid (BNA)
  source 1..18: mol_type = other DNA
ccagtcggtaagttctgt

SEQ ID NO: 7789 - DNA, 17 bp, synthetic construct
  misc_feature 1..17: note = Description of Artificial Sequence: Synthetic Antisense oligonucleotide
  modified_base 16..17: mod_base = OTHER; note = bicyclic nucleic acid (BNA)
  source 1..17: mol_type = other DNA
ccagtcggtaagttctg

SEQ ID NO: 7790 - DNA, 16 bp, synthetic construct
  misc_feature 1..16: note = Description of Artificial Sequence: Synthetic Antisense oligonucleotide
  modified_base 15..16: mod_base = OTHER; note = bicyclic nucleic acid (BNA)
  source 1..16: mol_type = other DNA
ccagtcggtaagttct

SEQ ID NO: 7791 - DNA, 15 bp, synthetic construct
  misc_feature 1..15: note = Description of Artificial Sequence: Synthetic Antisense oligonucleotide
  modified_base 14..15: mod_base = OTHER; note = bicyclic nucleic acid (BNA)
  source 1..15: mol_type = other DNA
ccagtcggtaagttc

SEQ ID NO: 7792 - DNA, 14 bp, synthetic construct
  misc_feature 1..14: note = Description of Artificial Sequence: Synthetic Antisense oligonucleotide
  modified_base 13..14: mod_base = OTHER; note = bicyclic nucleic acid (BNA)
  source 1..14: mol_type = other DNA
ccagtcggtaagtt

SEQ ID NO: 7793 - DNA, 13 bp, synthetic construct
  misc_feature 1..13: note = Description of Artificial Sequence: Synthetic Antisense oligonucleotide
  modified_base 12..13: mod_base = OTHER; note = bicyclic nucleic acid (BNA)
  source 1..13: mol_type = other DNA
ccagtcggtaagt

SEQ ID NO: 7794 - DNA, 20 bp, synthetic construct
  misc_feature 1..20: note = Description of Artificial Sequence: Synthetic Antisense oligonucleotide
  modified_base 19..20: mod_base = OTHER; note = bicyclic nucleic acid (BNA)
  source 1..20: mol_type = other DNA
gccagtcggtaagttctgtc

SEQ ID NO: 7795 - DNA, 19 bp, synthetic construct
  misc_feature 1..19: note = Description of Artificial Sequence: Synthetic Antisense oligonucleotide
  modified_base 18..19: mod_base = OTHER; note = bicyclic nucleic acid (BNA)
  source 1..19: mol_type = other DNA
gccagtcggtaagttctgt

SEQ ID NO: 7796 - DNA, 18 bp, synthetic construct
  misc_feature 1..18: note = Description of Artificial Sequence: Synthetic Antisense oligonucleotide
  modified_base 17..18: mod_base = OTHER; note = bicyclic nucleic acid (BNA)
  source 1..18: mol_type = other DNA
gccagtcggtaagttctg

SEQ ID NO: 7797 - DNA, 17 bp, synthetic construct
  misc_feature 1..17: note = Description of Artificial Sequence: Synthetic Antisense oligonucleotide
  modified_base 16..17: mod_base = OTHER; note = bicyclic nucleic acid (BNA)
  source 1..17: mol_type = other DNA
gccagtcggtaagttct

SEQ ID NO: 7798 - DNA, 16 bp, synthetic construct
  misc_feature 1..16: note = Description of Artificial Sequence: Synthetic Antisense oligonucleotide
  modified_base 15..16: mod_base = OTHER; note = bicyclic nucleic acid (BNA)
  source 1..16: mol_type = other DNA
gccagtcggtaagttc

SEQ ID NO: 7799 - DNA, 15 bp, synthetic construct
  misc_feature 1..15: note = Description of Artificial Sequence: Synthetic Antisense oligonucleotide
  modified_base 14..15: mod_base = OTHER; note = bicyclic nucleic acid (BNA)
  source 1..15: mol_type = other DNA
gccagtcggtaagtt

SEQ ID NO: 7800 - DNA, 14 bp, synthetic construct
  misc_feature 1..14: note = Description of Artificial Sequence: Synthetic Antisense oligonucleotide
  modified_base 13..14: mod_base = OTHER; note = bicyclic nucleic acid (BNA)
  source 1..14: mol_type = other DNA
gccagtcggtaagt

SEQ ID NO: 7801 - DNA, 20 bp, synthetic construct
  misc_feature 1..20: note = Description of Artificial Sequence: Synthetic Antisense oligonucleotide
  modified_base 19..20: mod_base = OTHER; note = bicyclic nucleic acid (BNA)
  source 1..20: mol_type = other DNA
tcaaggaagatggcatttct

SEQ ID NO: 7802 - DNA, 22 bp, synthetic construct
  misc_feature 1..22: note = Description of Artificial Sequence: Synthetic Antisense oligonucleotide
  modified_base 21..22: mod_base = OTHER; note = bicyclic nucleic acid (BNA)
  source 1..22: mol_type = other DNA
tcaaggaagatggcatttctag

SEQ ID NO: 7803 - DNA, 16 bp, synthetic construct
  misc_feature 1..16: note = Description of Artificial Sequence: Synthetic Antisense oligonucleotide
  modified_base 15..16: mod_base = OTHER; note = bicyclic nucleic acid (BNA)
  source 1..16: mol_type = other DNA
tcaaggaagatggcat

SEQ ID NO: 7804 - DNA, 15 bp, synthetic construct
  misc_feature 1..15: note = Description of Artificial Sequence: Synthetic Antisense oligonucleotide
  modified_base 14..15: mod_base = OTHER; note = bicyclic nucleic acid (BNA)
  source 1..15: mol_type = other DNA
gaagatggcatttct

SEQ ID NO: 7805 - DNA, 21 bp, synthetic construct
  misc_feature 1..21: note = Description of Artificial Sequence: Synthetic Antisense oligonucleotide
  modified_base 20..21: mod_base = OTHER; note = bicyclic nucleic acid (BNA)
  source 1..21: mol_type = other DNA
tcaaggaagatggcatttcta

SEQ ID NO: 7806 - DNA, 19 bp, synthetic construct
  misc_feature 1..19: note = Description of Artificial Sequence: Synthetic Antisense oligonucleotide
  modified_base 18..19: mod_base = OTHER; note = bicyclic nucleic acid (BNA)
  source 1..19: mol_type = other DNA
tcaaggaagatggcatttc

SEQ ID NO: 7807 - DNA, 18 bp, synthetic construct
  misc_feature 1..18: note = Description of Artificial Sequence: Synthetic Antisense oligonucleotide
  modified_base 17..18: mod_base = OTHER; note = bicyclic nucleic acid (BNA)
  source 1..18: mol_type = other DNA
tcaaggaagatggcattt

SEQ ID NO: 7808 - DNA, 17 bp, synthetic construct
  misc_feature 1..17: note = Description of Artificial Sequence: Synthetic Antisense oligonucleotide
  modified_base 16..17: mod_base = OTHER; note = bicyclic nucleic acid (BNA)
  source 1..17: mol_type = other DNA
tcaaggaagatggcatt

SEQ ID NO: 7809 - DNA, 15 bp, synthetic construct
  misc_feature 1..15: note = Description of Artificial Sequence: Synthetic Antisense oligonucleotide
  modified_base 14..15: mod_base = OTHER; note = bicyclic nucleic acid (BNA)
  source 1..15: mol_type = other DNA
tcaaggaagatggca

SEQ ID NO: 7810 - DNA, 14 bp, synthetic construct
  misc_feature 1..14: note = Description of Artificial Sequence: Synthetic Antisense oligonucleotide
  modified_base 13..14: mod_base = OTHER; note = bicyclic nucleic acid (BNA)
  source 1..14: mol_type = other DNA
tcaaggaagatggc

SEQ ID NO: 7811 - DNA, 13 bp, synthetic construct
  misc_feature 1..13: note = Description of Artificial Sequence: Synthetic Antisense oligonucleotide
  modified_base 12..13: mod_base = OTHER; note = bicyclic nucleic acid (BNA)
  source 1..13: mol_type = other DNA
tcaaggaagatgg

SEQ ID NO: 7812 - DNA, 12 bp, synthetic construct
  misc_feature 1..12: note = Description of Artificial Sequence: Synthetic Antisense oligonucleotide
  modified_base 11..12: mod_base = OTHER; note = bicyclic nucleic acid (BNA)
  source 1..12: mol_type = other DNA
tcaaggaagatg

SEQ ID NO: 7813 - DNA, 11 bp, synthetic construct
  misc_feature 1..11: note = Description of Artificial Sequence: Synthetic Antisense oligonucleotide
  modified_base 10..11: mod_base = OTHER; note = bicyclic nucleic acid (BNA)
  source 1..11: mol_type = other DNA
tcaaggaagat

SEQ ID NO: 7814 - DNA, 10 bp, synthetic construct
  misc_feature 1..10: note = Description of Artificial Sequence: Synthetic Antisense oligonucleotide
  modified_base 9..10: mod_base = OTHER; note = bicyclic nucleic acid (BNA)
  source 1..10: mol_type = other DNA
tcaaggaaga

SEQ ID NO: 7815 - skipped

SEQ ID NO: 7816 - DNA, 21 bp, synthetic construct
  misc_feature 1..21: note = Description of Artificial Sequence: Synthetic Antisense oligonucleotide
  modified_base 20..21: mod_base = OTHER; note = bicyclic nucleic acid (BNA)
  source 1..21: mol_type = other DNA
caaggaagatggcatttctag

SEQ ID NO: 7817 - DNA, 20 bp, synthetic construct
  misc_feature 1..20: note = Description of Artificial Sequence: Synthetic Antisense oligonucleotide
  modified_base 19..20: mod_base = OTHER; note = bicyclic nucleic acid (BNA)
  source 1..20: mol_type = other DNA
caaggaagatggcatttcta

SEQ ID NO: 7818 - DNA, 19 bp, synthetic construct
  misc_feature 1..19: note = Description of Artificial Sequence: Synthetic Antisense oligonucleotide
  modified_base 18..19: mod_base = OTHER; note = bicyclic nucleic acid (BNA)
  source 1..19: mol_type = other DNA
caaggaagatggcatttct

SEQ ID NO: 7819 - DNA, 18 bp, synthetic construct
  misc_feature 1..18: note = Description of Artificial Sequence: Synthetic Antisense oligonucleotide
  modified_base 17..18: mod_base = OTHER; note = bicyclic nucleic acid (BNA)
  source 1..18: mol_type = other DNA
caaggaagatggcatttc

SEQ ID NO: 7820 - DNA, 17 bp, synthetic construct
  misc_feature 1..17: note = Description of Artificial Sequence: Synthetic Antisense oligonucleotide
  modified_base 16..17: mod_base = OTHER; note = bicyclic nucleic acid (BNA)
  source 1..17: mol_type = other DNA
caaggaagatggcattt

SEQ ID NO: 7821 - DNA, 16 bp, synthetic construct
  misc_feature 1..16: note = Description of Artificial Sequence: Synthetic Antisense oligonucleotide
  modified_base 15..16: mod_base = OTHER; note = bicyclic nucleic acid (BNA)
  source 1..16: mol_type = other DNA
caaggaagatggcatt

SEQ ID NO: 7822 - DNA, 15 bp, synthetic construct
  misc_feature 1..15: note = Description of Artificial Sequence: Synthetic Antisense oligonucleotide
  modified_base 14..15: mod_base = OTHER; note = bicyclic nucleic acid (BNA)
  source 1..15: mol_type = other DNA
caaggaagatggcat

SEQ ID NO: 7823 - DNA, 14 bp, synthetic construct
  misc_feature 1..14: note = Description of Artificial Sequence: Synthetic Antisense oligonucleotide
  modified_base 13..14: mod_base = OTHER; note = bicyclic nucleic acid (BNA)
  source 1..14: mol_type = other DNA
caaggaagatggca

SEQ ID NO: 7824 - DNA, 13 bp, synthetic construct
  misc_feature 1..13: note = Description of Artificial Sequence: Synthetic Antisense oligonucleotide
  modified_base 12..13: mod_base = OTHER; note = bicyclic nucleic acid (BNA)
  source 1..13: mol_type = other DNA
caaggaagatggc

SEQ ID NO: 7825 - DNA, 12 bp, synthetic construct
  misc_feature 1..12: note = Description of Artificial Sequence: Synthetic Antisense oligonucleotide
  modified_base 11..12: mod_base = OTHER; note = bicyclic nucleic acid (BNA)
  source 1..12: mol_type = other DNA
caaggaagatgg

SEQ ID NO: 7826 - DNA, 11 bp, synthetic construct
  misc_feature 1..11: note = Description of Artificial Sequence: Synthetic Antisense oligonucleotide
  modified_base 10..11: mod_base = OTHER; note = bicyclic nucleic acid (BNA)
  source 1..11: mol_type = other DNA
caaggaagatg

SEQ ID NO: 7827 - DNA, 10 bp, synthetic construct
  misc_feature 1..10: note = Description of Artificial Sequence: Synthetic Antisense oligonucleotide
  modified_base 9..10: mod_base = OTHER; note = bicyclic nucleic acid (BNA)
  source 1..10: mol_type = other DNA
caaggaagat

SEQ ID NO: 7828 - DNA, 20 bp, synthetic construct
  misc_feature 1..20: note = Description of Artificial Sequence: Synthetic Antisense oligonucleotide
  modified_base 19..20: mod_base = OTHER; note = bicyclic nucleic acid (BNA)
  source 1..20: mol_type = other DNA
aaggaagatggcatttctag

SEQ ID NO: 7829 - DNA, 19 bp, synthetic construct
  misc_feature 1..19: note = Description of Artificial Sequence: Synthetic Antisense oligonucleotide
  modified_base 18..19: mod_base = OTHER; note = bicyclic nucleic acid (BNA)
  source 1..19: mol_type = other DNA
aaggaagatggcatttcta

SEQ ID NO: 7830 - DNA, 18 bp, synthetic construct
  misc_feature 1..18: note = Description of Artificial Sequence: Synthetic Antisense oligonucleotide
  modified_base 17..18: mod_base = OTHER; note = bicyclic nucleic acid (BNA)
  source 1..18: mol_type = other DNA
aaggaagatggcatttct

SEQ ID NO: 7831 - DNA, 17 bp, synthetic construct
  misc_feature 1..17: note = Description of Artificial Sequence: Synthetic Antisense oligonucleotide
  modified_base 16..17: mod_base = OTHER; note = bicyclic nucleic acid (BNA)
  source 1..17: mol_type = other DNA
aaggaagatggcatttc

SEQ ID NO: 7832 - DNA, 16 bp, synthetic construct
  misc_feature 1..16: note = Description of Artificial Sequence: Synthetic Antisense oligonucleotide
  modified_base 15..16: mod_base = OTHER; note = bicyclic nucleic acid (BNA)
  source 1..16: mol_type = other DNA
aaggaagatggcattt

SEQ ID NO: 7833 - DNA, 15 bp, synthetic construct
  misc_feature 1..15: note = Description of Artificial Sequence: Synthetic Antisense oligonucleotide
  modified_base 14..15: mod_base = OTHER; note = bicyclic nucleic acid (BNA)
  source 1..15: mol_type = other DNA
aaggaagatggcatt

SEQ ID NO: 7834 - DNA, 14 bp, synthetic construct
  misc_feature 1..14: note = Description of Artificial Sequence: Synthetic Antisense oligonucleotide
  modified_base 13..14: mod_base = OTHER; note = bicyclic nucleic acid (BNA)
  source 1..14: mol_type = other DNA
aaggaagatggcat

SEQ ID NO: 7835 - DNA, 13 bp, synthetic construct
  misc_feature 1..13: note = Description of Artificial Sequence: Synthetic Antisense oligonucleotide
  modified_base 12..13: mod_base = OTHER; note = bicyclic nucleic acid (BNA)
  source 1..13: mol_type = other DNA
aaggaagatggca

SEQ ID NO: 7836 - DNA, 12 bp, synthetic construct
  misc_feature 1..12: note = Description of Artificial Sequence: Synthetic Antisense oligonucleotide
  modified_base 11..12: mod_base = OTHER; note = bicyclic nucleic acid (BNA)
  source 1..12: mol_type = other DNA
aaggaagatggc

SEQ ID NO: 7837 - DNA, 11 bp, synthetic construct
  misc_feature 1..11: note = Description of Artificial Sequence: Synthetic Antisense oligonucleotide
  modified_base 10..11: mod_base = OTHER; note = bicyclic nucleic acid (BNA)
  source 1..11: mol_type = other DNA
aaggaagatgg

SEQ ID NO: 7838 - DNA, 10 bp, synthetic construct
  misc_feature 1..10: note = Description of Artificial Sequence: Synthetic Antisense oligonucleotide
  modified_base 9..10: mod_base = OTHER; note = bicyclic nucleic acid (BNA)
  source 1..10: mol_type = other DNA
aaggaagatg

SEQ ID NO: 7839 - skipped

SEQ ID NO: 7840 - DNA, 19 bp, synthetic construct
  misc_feature 1..19: note = Description of Artificial Sequence: Synthetic Antisense oligonucleotide
  modified_base 18..19: mod_base = OTHER; note = bicyclic nucleic acid (BNA)
  source 1..19: mol_type = other DNA
aggaagatggcatttctag

SEQ ID NO: 7841 - DNA, 18 bp, synthetic construct
  misc_feature 1..18: note = Description of Artificial Sequence: Synthetic Antisense oligonucleotide
  modified_base 17..18: mod_base = OTHER; note = bicyclic nucleic acid (BNA)
  source 1..18: mol_type = other DNA
aggaagatggcatttcta

SEQ ID NO: 7842 - DNA, 17 bp, synthetic construct
  misc_feature 1..17: note = Description of Artificial Sequence: Synthetic Antisense oligonucleotide
  modified_base 16..17: mod_base = OTHER; note = bicyclic nucleic acid (BNA)
  source 1..17: mol_type = other DNA
aggaagatggcatttct

SEQ ID NO: 7843 - DNA, 16 bp, synthetic construct
  misc_feature 1..16: note = Description of Artificial Sequence: Synthetic Antisense oligonucleotide
  modified_base 15..16: mod_base = OTHER; note = bicyclic nucleic acid (BNA)
  source 1..16: mol_type = other DNA
aggaagatggcatttc

SEQ ID NO: 7844 - DNA, 15 bp, synthetic construct
  misc_feature 1..15: note = Description of Artificial Sequence: Synthetic Antisense oligonucleotide
  modified_base 14..15: mod_base = OTHER; note = bicyclic nucleic acid (BNA)
  source 1..15: mol_type = other DNA
aggaagatggcattt

SEQ ID NO: 7845 - DNA, 14 bp, synthetic construct
  misc_feature 1..14: note = Description of Artificial Sequence: Synthetic Antisense oligonucleotide
  modified_base 13..14: mod_base = OTHER; note = bicyclic nucleic acid (BNA)
  source 1..14: mol_type = other DNA
aggaagatggcatt

SEQ ID NO: 7846 - DNA, 13 bp, synthetic construct
  misc_feature 1..13: note = Description of Artificial Sequence: Synthetic Antisense oligonucleotide
  modified_base 12..13: mod_base = OTHER; note = bicyclic nucleic acid (BNA)
  source 1..13: mol_type = other DNA
aggaagatggcat

SEQ ID NO: 7847 - DNA, 12 bp, synthetic construct
  misc_feature 1..12: note = Description of Artificial Sequence: Synthetic Antisense oligonucleotide
  modified_base 11..12: mod_base = OTHER; note = bicyclic nucleic acid (BNA)
  source 1..12: mol_type = other DNA
aggaagatggca

SEQ ID NO: 7848 - DNA, 10 bp, synthetic construct
  misc_feature 1..10: note = Description of Artificial Sequence: Synthetic Antisense oligonucleotide
  modified_base 9..10: mod_base = OTHER; note = bicyclic nucleic acid (BNA)
  source 1..10: mol_type = other DNA
aggaagatgg

SEQ ID NO: 7849-7850 - skipped (2 entries)

SEQ ID NO: 7851 - DNA, 18 bp, synthetic construct
  misc_feature 1..18: note = Description of Artificial Sequence: Synthetic Antisense oligonucleotide
  modified_base 17..18: mod_base = OTHER; note = bicyclic nucleic acid (BNA)
  source 1..18: mol_type = other DNA
ggaagatggcatttctag

SEQ ID NO: 7852 - DNA, 17 bp, synthetic construct
  misc_feature 1..17: note = Description of Artificial Sequence: Synthetic Antisense oligonucleotide
  modified_base 16..17: mod_base = OTHER; note = bicyclic nucleic acid (BNA)
  source 1..17: mol_type = other DNA
ggaagatggcatttcta

SEQ ID NO: 7853 - DNA, 16 bp, synthetic construct
  misc_feature 1..16: note = Description of Artificial Sequence: Synthetic Antisense oligonucleotide
  modified_base 15..16: mod_base = OTHER; note = bicyclic nucleic acid (BNA)
  source 1..16: mol_type = other DNA
ggaagatggcatttct

SEQ ID NO: 7854 - DNA, 15 bp, synthetic construct
  misc_feature 1..15: note = Description of Artificial Sequence: Synthetic Antisense oligonucleotide
  modified_base 14..15: mod_base = OTHER; note = bicyclic nucleic acid (BNA)
  source 1..15: mol_type = other DNA
ggaagatggcatttc

SEQ ID NO: 7855 - DNA, 14 bp, synthetic construct
  misc_feature 1..14: note = Description of Artificial Sequence: Synthetic Antisense oligonucleotide
  modified_base 13..14: mod_base = OTHER; note = bicyclic nucleic acid (BNA)
  source 1..14: mol_type = other DNA
ggaagatggcattt

SEQ ID NO: 7856 - DNA, 13 bp, synthetic construct
  misc_feature 1..13: note = Description of Artificial Sequence: Synthetic Antisense oligonucleotide
  modified_base 12..13: mod_base = OTHER; note = bicyclic nucleic acid (BNA)
  source 1..13: mol_type = other DNA
ggaagatggcatt

SEQ ID NO: 7857 - DNA, 12 bp, synthetic construct
  misc_feature 1..12: note = Description of Artificial Sequence: Synthetic Antisense oligonucleotide
  modified_base 11..12: mod_base = OTHER; note = bicyclic nucleic acid (BNA)
  source 1..12: mol_type = other DNA
ggaagatggcat

SEQ ID NO: 7858 - DNA, 11 bp, synthetic construct
  misc_feature 1..11: note = Description of Artificial Sequence: Synthetic Antisense oligonucleotide
  modified_base 10..11: mod_base = OTHER; note = bicyclic nucleic acid (BNA)
  source 1..11: mol_type = other DNA
ggaagatggca

SEQ ID NO: 7859 - DNA, 10 bp, synthetic construct
  misc_feature 1..10: note = Description of Artificial Sequence: Synthetic Antisense oligonucleotide
  modified_base 9..10: mod_base = OTHER; note = bicyclic nucleic acid (BNA)
  source 1..10: mol_type = other DNA
ggaagatggc

SEQ ID NO: 7860 - skipped

SEQ ID NO: 7861 - DNA, 17 bp, synthetic construct
  misc_feature 1..17: note = Description of Artificial Sequence: Synthetic Antisense oligonucleotide
  modified_base 16..17: mod_base = OTHER; note = bicyclic nucleic acid (BNA)
  source 1..17: mol_type = other DNA
gaagatggcatttctag

SEQ ID NO: 7862 - DNA, 16 bp, synthetic construct
  misc_feature 1..16: note = Description of Artificial Sequence: Synthetic Antisense oligonucleotide
  modified_base 15..16: mod_base = OTHER; note = bicyclic nucleic acid (BNA)
  source 1..16: mol_type = other DNA
gaagatggcatttcta

SEQ ID NO: 7863 - DNA, 14 bp, synthetic construct
  misc_feature 1..14: note = Description of Artificial Sequence: Synthetic Antisense oligonucleotide
  modified_base 13..14: mod_base = OTHER; note = bicyclic nucleic acid (BNA)
  source 1..14: mol_type = other DNA
gaagatggcatttc

SEQ ID NO: 7864 - DNA, 13 bp, synthetic construct
  misc_feature 1..13: note = Description of Artificial Sequence: Synthetic Antisense oligonucleotide
  modified_base 12..13: mod_base = OTHER; note = bicyclic nucleic acid (BNA)
  source 1..13: mol_type = other DNA
gaagatggcattt

SEQ ID NO: 7865 - DNA, 12 bp, synthetic construct
  misc_feature 1..12: note = Description of Artificial Sequence: Synthetic Antisense oligonucleotide
  modified_base 11..12: mod_base = OTHER; note = bicyclic nucleic acid (BNA)
  source 1..12: mol_type = other DNA
gaagatggcatt

SEQ ID NO: 7866 - DNA, 11 bp, synthetic construct
  misc_feature 1..11: note = Description of Artificial Sequence: Synthetic Antisense oligonucleotide
  modified_base 10..11: mod_base = OTHER; note = bicyclic nucleic acid (BNA)
  source 1..11: mol_type = other DNA
gaagatggcat

SEQ ID NO: 7867 - DNA, 10 bp, synthetic construct
  misc_feature 1..10: note = Description of Artificial Sequence: Synthetic Antisense oligonucleotide
  modified_base 9..10: mod_base = OTHER; note = bicyclic nucleic acid (BNA)
  source 1..10: mol_type = other DNA
gaagatggca

SEQ ID NO: 7868-7869 - skipped (2 entries)

SEQ ID NO: 7870 - DNA, 16 bp, synthetic construct
  misc_feature 1..16: note = Description of Artificial Sequence: Synthetic Antisense oligonucleotide
  modified_base 15..16: mod_base = OTHER; note = bicyclic nucleic acid (BNA)
  source 1..16: mol_type = other DNA
aagatggcatttctag

SEQ ID NO: 7871 - DNA, 15 bp, synthetic construct
  misc_feature 1..15: note = Description of Artificial Sequence: Synthetic Antisense oligonucleotide
  modified_base 14..15: mod_base = OTHER; note = bicyclic nucleic acid (BNA)
  source 1..15: mol_type = other DNA
aagatggcatttcta

SEQ ID NO: 7872 - DNA, 14 bp, synthetic construct
  misc_feature 1..14: note = Description of Artificial Sequence: Synthetic Antisense oligonucleotide
  modified_base 13..14: mod_base = OTHER; note = bicyclic nucleic acid (BNA)
  source 1..14: mol_type = other DNA
aagatggcatttct

SEQ ID NO: 7873 - DNA, 13 bp, synthetic construct
  misc_feature 1..13: note = Description of Artificial Sequence: Synthetic Antisense oligonucleotide
  modified_base 12..13: mod_base = OTHER; note = bicyclic nucleic acid (BNA)
  source 1..13: mol_type = other DNA
aagatggcatttc

SEQ ID NO: 7874 - DNA, 12 bp, synthetic construct
  misc_feature 1..12: note = Description of Artificial Sequence: Synthetic Antisense oligonucleotide
  modified_base 11..12: mod_base = OTHER; note = bicyclic nucleic acid (BNA)
  source 1..12: mol_type = other DNA
aagatggcattt

SEQ ID NO: 7875 - DNA, 11 bp, synthetic construct
  misc_feature 1..11: note = Description of Artificial Sequence: Synthetic Antisense oligonucleotide
  modified_base 10..11: mod_base = OTHER; note = bicyclic nucleic acid (BNA)
  source 1..11: mol_type = other DNA
aagatggcatt

SEQ ID NO: 7876 - DNA, 10 bp, synthetic construct
  misc_feature 1..10: note = Description of Artificial Sequence: Synthetic Antisense oligonucleotide
  modified_base 9..10: mod_base = OTHER; note = bicyclic nucleic acid (BNA)
  source 1..10: mol_type = other DNA
aagatggcat

SEQ ID NO: 7877-7878 - skipped (2 entries)

SEQ ID NO: 7879 - DNA, 15 bp, synthetic construct
  misc_feature 1..15: note = Description of Artificial Sequence: Synthetic Antisense oligonucleotide
  modified_base 14..15: mod_base = OTHER; note = bicyclic nucleic acid (BNA)
  source 1..15: mol_type = other DNA
agatggcatttctag

SEQ ID NO: 7880 - DNA, 14 bp, synthetic construct
  misc_feature 1..14: note = Description of Artificial Sequence: Synthetic Antisense oligonucleotide
  modified_base 13..14: mod_base = OTHER; note = bicyclic nucleic acid (BNA)
  source 1..14: mol_type = other DNA
agatggcatttcta

SEQ ID NO: 7881 - DNA, 13 bp, synthetic construct
  misc_feature 1..13: note = Description of Artificial Sequence: Synthetic Antisense oligonucleotide
  modified_base 12..13: mod_base = OTHER; note = bicyclic nucleic acid (BNA)
  source 1..13: mol_type = other DNA
agatggcatttct

SEQ ID NO: 7882 - DNA, 12 bp, synthetic construct
  misc_feature 1..12: note = Description of Artificial Sequence: Synthetic Antisense oligonucleotide
  modified_base 11..12: mod_base = OTHER; note = bicyclic nucleic acid (BNA)
  source 1..12: mol_type = other DNA
agatggcatttc

SEQ ID NO: 7883 - DNA, 11 bp, synthetic construct
  misc_feature 1..11: note = Description of Artificial Sequence: Synthetic Antisense oligonucleotide
  modified_base 10..11: mod_base = OTHER; note = bicyclic nucleic acid (BNA)
  source 1..11: mol_type = other DNA
agatggcattt

SEQ ID NO: 7884 - DNA, 10 bp, synthetic construct
  misc_feature 1..10: note = Description of Artificial Sequence: Synthetic Antisense oligonucleotide
  modified_base 9..10: mod_base = OTHER; note = bicyclic nucleic acid (BNA)
  source 1..10: mol_type = other DNA
agatggcatt

SEQ ID NO: 7885-7886 - skipped (2 entries)

SEQ ID NO: 7887 - DNA, 30 bp, synthetic construct; identical to SEQ ID NO: 8
  misc_feature 1..30: note = Description of Artificial Sequence: Synthetic Antisense oligonucleotide
  modified_base 29..30: mod_base = OTHER; note = bicyclic nucleic acid (BNA)
  source 1..30: mol_type = other DNA

SEQ ID NO: 7888 - DNA, 29 bp, synthetic construct
  misc_feature 1..29: note = Description of Artificial Sequence: Synthetic Antisense oligonucleotide
  modified_base 28..29: mod_base = OTHER; note = bicyclic nucleic acid (BNA)
  source 1..29: mol_type = other DNA
ctccaacatcaaggaagatggcatttcta

SEQ ID NO: 7889 - DNA, 28 bp, synthetic construct
  misc_feature 1..28: note = Description of Artificial Sequence: Synthetic Antisense oligonucleotide
  modified_base 27..28: mod_base = OTHER; note = bicyclic nucleic acid (BNA)
  source 1..28: mol_type = other DNA
ctccaacatcaaggaagatggcatttct

SEQ ID NO: 7890 - DNA, 27 bp, synthetic construct
  misc_feature 1..27: note = Description of Artificial Sequence: Synthetic Antisense oligonucleotide
  modified_base 26..27: mod_base = OTHER; note = bicyclic nucleic acid (BNA)
  source 1..27: mol_type = other DNA
ctccaacatcaaggaagatggcatttc

SEQ ID NO: 7891 - DNA, 26 bp, synthetic construct
  misc_feature 1..26: note = Description of Artificial Sequence: Synthetic Antisense oligonucleotide
  modified_base 25..26: mod_base = OTHER; note = bicyclic nucleic acid (BNA)
  source 1..26: mol_type = other DNA
ctccaacatcaaggaagatggcattt

SEQ ID NO: 7892 - DNA, 25 bp, synthetic construct
  misc_feature 1..25: note = Description of Artificial Sequence: Synthetic Antisense oligonucleotide
  modified_base 24..25: mod_base = OTHER; note = bicyclic nucleic acid (BNA)
  source 1..25: mol_type = other DNA
ctccaacatcaaggaagatggcatt

SEQ ID NO: 7893 - DNA, 24 bp, synthetic construct
  misc_feature 1..24: note = Description of Artificial Sequence: Synthetic Antisense oligonucleotide
  modified_base 23..24: mod_base = OTHER; note = bicyclic nucleic acid (BNA)
  source 1..24: mol_type = other DNA
ctccaacatcaaggaagatggcat

SEQ ID NO: 7894 - DNA, 23 bp, synthetic construct
  misc_feature 1..23: note = Description of Artificial Sequence: Synthetic Antisense oligonucleotide
  modified_base 22..23: mod_base = OTHER; note = bicyclic nucleic acid (BNA)
  source 1..23: mol_type = other DNA
ctccaacatcaaggaagatggca

SEQ ID NO: 7895 - DNA, 22 bp, synthetic construct
  misc_feature 1..22: note = Description of Artificial Sequence: Synthetic Antisense oligonucleotide
  modified_base 21..22: mod_base = OTHER; note = bicyclic nucleic acid (BNA)
  source 1..22: mol_type = other DNA
ctccaacatcaaggaagatggc

SEQ ID NO: 7896 - DNA, 21 bp, synthetic construct
  misc_feature 1..21: note = Description of Artificial Sequence: Synthetic Antisense oligonucleotide
  modified_base 20..21: mod_base = OTHER; note = bicyclic nucleic acid (BNA)
  source 1..21: mol_type = other DNA
ctccaacatcaaggaagatgg

SEQ ID NO: 7897 - DNA, 20 bp, synthetic construct
  misc_feature 1..20: note = Description of Artificial Sequence: Synthetic Antisense oligonucleotide
  modified_base 19..20: mod_base = OTHER; note = bicyclic nucleic acid (BNA)
  source 1..20: mol_type = other DNA
ctccaacatcaaggaagatg

SEQ ID NO: 7898 - DNA, 19 bp, synthetic construct
  misc_feature 1..19: note = Description of Artificial Sequence: Synthetic Antisense oligonucleotide
  modified_base 18..19: mod_base = OTHER; note = bicyclic nucleic acid (BNA)
  source 1..19: mol_type = other DNA
ctccaacatcaaggaagat

SEQ ID NO: 7899 - DNA, 18 bp, synthetic construct
  misc_feature 1..18: note = Description of Artificial Sequence: Synthetic Antisense oligonucleotide
  modified_base 17..18: mod_base = OTHER; note = bicyclic nucleic acid (BNA)
  source 1..18: mol_type = other DNA
ctccaacatcaaggaaga

SEQ ID NO: 7900 - DNA, 17 bp, synthetic construct
  misc_feature 1..17: note = Description of Artificial Sequence: Synthetic Antisense oligonucleotide
  modified_base 16..17: mod_base = OTHER; note = bicyclic nucleic acid (BNA)
  source 1..17: mol_type = other DNA
ctccaacatcaaggaag

SEQ ID NO: 7901 - DNA, 29 bp, synthetic construct
  misc_feature 1..29: note = Description of Artificial Sequence: Synthetic Antisense oligonucleotide
  modified_base 28..29: mod_base = OTHER; note = bicyclic nucleic acid (BNA)
  source 1..29: mol_type = other DNA
tccaacatcaaggaagatggcatttctag

SEQ ID NO: 7902 - DNA, 28 bp, synthetic construct
  misc_feature 1..28: note = Description of Artificial Sequence: Synthetic Antisense oligonucleotide
  modified_base 27..28: mod_base = OTHER; note = bicyclic nucleic acid (BNA)
  source 1..28: mol_type = other DNA
tccaacatcaaggaagatggcatttcta

SEQ ID NO: 7903 - DNA, 27 bp, synthetic construct
  misc_feature 1..27: note = Description of Artificial Sequence: Synthetic Antisense oligonucleotide
  modified_base 26..27: mod_base = OTHER; note = bicyclic nucleic acid (BNA)
  source 1..27: mol_type = other DNA
tccaacatcaaggaagatggcatttct

SEQ ID NO: 7904 - DNA, 26 bp, synthetic construct
  misc_feature 1..26: note = Description of Artificial Sequence: Synthetic Antisense oligonucleotide
  modified_base 25..26: mod_base = OTHER; note = bicyclic nucleic acid (BNA)
  source 1..26: mol_type = other DNA
tccaacatcaaggaagatggcatttc

SEQ ID NO: 7905 - DNA, 25 bp, synthetic construct
  misc_feature 1..25: note = Description of Artificial Sequence: Synthetic Antisense oligonucleotide
  modified_base 24..25: mod_base = OTHER; note = bicyclic nucleic acid (BNA)
  source 1..25: mol_type = other DNA
tccaacatcaaggaagatggcattt

SEQ ID NO: 7906 - DNA, 24 bp, synthetic construct
  misc_feature 1..24: note = Description of Artificial Sequence: Synthetic Antisense oligonucleotide
  modified_base 23..24: mod_base = OTHER; note = bicyclic nucleic acid (BNA)
  source 1..24: mol_type = other DNA
tccaacatcaaggaagatggcatt

SEQ ID NO: 7907 - DNA, 23 bp, synthetic construct
  misc_feature 1..23: note = Description of Artificial Sequence: Synthetic Antisense oligonucleotide
  modified_base 22..23: mod_base = OTHER; note = bicyclic nucleic acid (BNA)
  source 1..23: mol_type = other DNA
tccaacatcaaggaagatggcat

SEQ ID NO: 7908 - DNA, 22 bp, synthetic construct
  misc_feature 1..22: note = Description of Artificial Sequence: Synthetic Antisense oligonucleotide
  modified_base 21..22: mod_base = OTHER; note = bicyclic nucleic acid (BNA)
  source 1..22: mol_type = other DNA
tccaacatcaaggaagatggca

SEQ ID NO: 7909 - DNA, 21 bp, synthetic construct
  misc_feature 1..21: note = Description of Artificial Sequence: Synthetic Antisense oligonucleotide
  modified_base 20..21: mod_base = OTHER; note = bicyclic nucleic acid (BNA)
  source 1..21: mol_type = other DNA
tccaacatcaaggaagatggc

SEQ ID NO: 7910 - DNA, 20 bp, synthetic construct
  misc_feature 1..20: note = Description of Artificial Sequence: Synthetic Antisense oligonucleotide
  modified_base 19..20: mod_base = OTHER; note = bicyclic nucleic acid (BNA)
  source 1..20: mol_type = other DNA
tccaacatcaaggaagatgg

SEQ ID NO: 7911 - DNA, 19 bp, synthetic construct
  misc_feature 1..19: note = Description of Artificial Sequence: Synthetic Antisense oligonucleotide
  modified_base 18..19: mod_base = OTHER; note = bicyclic nucleic acid (BNA)
  source 1..19: mol_type = other DNA
tccaacatcaaggaagatg

SEQ ID NO: 7912 - DNA, 18 bp, synthetic construct
  misc_feature 1..18: note = Description of Artificial Sequence: Synthetic Antisense oligonucleotide
  modified_base 17..18: mod_base = OTHER; note = bicyclic nucleic acid (BNA)
  source 1..18: mol_type = other DNA
tccaacatcaaggaagat

SEQ ID NO: 7913 - DNA, 17 bp, synthetic construct
  misc_feature 1..17: note = Description of Artificial Sequence: Synthetic Antisense oligonucleotide
  modified_base 16..17: mod_base = OTHER; note = bicyclic nucleic acid (BNA)
  source 1..17: mol_type = other DNA
tccaacatcaaggaaga

SEQ ID NO: 7914 - DNA, 16 bp, synthetic construct
  misc_feature 1..16: note = Description of Artificial Sequence: Synthetic Antisense oligonucleotide
  modified_base 15..16: mod_base = OTHER; note = bicyclic nucleic acid (BNA)
  source 1..16: mol_type = other DNA
tccaacatcaaggaag

SEQ ID NO: 7915 - DNA, 28 bp, synthetic construct
  misc_feature 1..28: note = Description of Artificial Sequence: Synthetic Antisense oligonucleotide
  modified_base 27..28: mod_base = OTHER; note = bicyclic nucleic acid (BNA)
  source 1..28: mol_type = other DNA
ccaacatcaaggaagatggcatttctag

SEQ ID NO: 7916 - DNA, 27 bp, synthetic construct
  misc_feature 1..27: note = Description of Artificial Sequence: Synthetic Antisense oligonucleotide
  modified_base 26..27: mod_base = OTHER; note = bicyclic nucleic acid (BNA)
  source 1..27: mol_type = other DNA
ccaacatcaaggaagatggcatttcta

SEQ ID NO: 7917 - DNA, 26 bp, synthetic construct
  misc_feature 1..26: note = Description of Artificial Sequence: Synthetic Antisense oligonucleotide
  modified_base 25..26: mod_base = OTHER; note = bicyclic nucleic acid (BNA)
  source 1..26: mol_type = other DNA
ccaacatcaaggaagatggcatttct

SEQ ID NO: 7918 - DNA, 25 bp, synthetic construct
  misc_feature 1..25: note = Description of Artificial Sequence: Synthetic Antisense oligonucleotide
  modified_base 24..25: mod_base = OTHER; note = bicyclic nucleic acid (BNA)
  source 1..25: mol_type = other DNA
ccaacatcaaggaagatggcatttc

SEQ ID NO: 7919 - DNA, 24 bp, synthetic construct
  misc_feature 1..24: note = Description of Artificial Sequence: Synthetic Antisense oligonucleotide
  modified_base 23..24: mod_base = OTHER; note = bicyclic nucleic acid (BNA)
  source 1..24: mol_type = other DNA
ccaacatcaaggaagatggcattt

SEQ ID NO: 7920 - DNA, 23 bp, synthetic construct
  misc_feature 1..23: note = Description of Artificial Sequence: Synthetic Antisense oligonucleotide
  modified_base 22..23: mod_base = OTHER; note = bicyclic nucleic acid (BNA)
  source 1..23: mol_type = other DNA
ccaacatcaaggaagatggcatt

SEQ ID NO: 7921 - DNA, 22 bp, synthetic construct
  misc_feature 1..22: note = Description of Artificial Sequence: Synthetic Antisense oligonucleotide
  modified_base 21..22: mod_base = OTHER; note = bicyclic nucleic acid (BNA)
  source 1..22: mol_type = other DNA
ccaacatcaaggaagatggcat

SEQ ID NO: 7922 - DNA, 21 bp, synthetic construct
  misc_feature 1..21: note = Description of Artificial Sequence: Synthetic Antisense oligonucleotide
  modified_base 20..21: mod_base = OTHER; note = bicyclic nucleic acid (BNA)
  source 1..21: mol_type = other DNA
ccaacatcaaggaagatggca

SEQ ID NO: 7923 - DNA, 20 bp, synthetic construct
  misc_feature 1..20: note = Description of Artificial Sequence: Synthetic Antisense oligonucleotide
  modified_base 19..20: mod_base = OTHER; note = bicyclic nucleic acid (BNA)
  source 1..20: mol_type = other DNA
ccaacatcaaggaagatggc

SEQ ID NO: 7924 - DNA, 19 bp, synthetic construct
  misc_feature 1..19: note = Description of Artificial Sequence: Synthetic Antisense oligonucleotide
  modified_base 18..19: mod_base = OTHER; note = bicyclic nucleic acid (BNA)
  source 1..19: mol_type = other DNA
ccaacatcaaggaagatgg

SEQ ID NO: 7925 - DNA, 18 bp, synthetic construct
  misc_feature 1..18: note = Description of Artificial Sequence: Synthetic Antisense oligonucleotide
  modified_base 17..18: mod_base = OTHER; note = bicyclic nucleic acid (BNA)
  source 1..18: mol_type = other DNA
ccaacatcaaggaagatg

SEQ ID NO: 7926 - DNA, 17 bp, synthetic construct
  misc_feature 1..17: note = Description of Artificial Sequence: Synthetic Antisense oligonucleotide
  modified_base 16..17: mod_base = OTHER; note = bicyclic nucleic acid (BNA)
  source 1..17: mol_type = other DNA
ccaacatcaaggaagat

SEQ ID NO: 7927 - DNA, 16 bp, synthetic construct
  misc_feature 1..16: note = Description of Artificial Sequence: Synthetic Antisense oligonucleotide
  modified_base 15..16: mod_base = OTHER; note = bicyclic nucleic acid (BNA)
  source 1..16: mol_type = other DNA
ccaacatcaaggaaga

SEQ ID NO: 7928 - DNA, 15 bp, synthetic construct
  misc_feature 1..15: note = Description of Artificial Sequence: Synthetic Antisense oligonucleotide
  modified_base 14..15: mod_base = OTHER; note = bicyclic nucleic acid (BNA)
  source 1..15: mol_type = other DNA
ccaacatcaaggaag

SEQ ID NO: 7929 - DNA, 27 bp, synthetic construct
  misc_feature 1..27: note = Description of Artificial Sequence: Synthetic Antisense oligonucleotide
  modified_base 26..27: mod_base = OTHER; note = bicyclic nucleic acid (BNA)
  source 1..27: mol_type = other DNA
caacatcaaggaagatggcatttctag

SEQ ID NO: 7930 - DNA, 26 bp, synthetic construct
  misc_feature 1..26: note = Description of Artificial Sequence: Synthetic Antisense oligonucleotide
  modified_base 25..26: mod_base = OTHER; note = bicyclic nucleic acid (BNA)
  source 1..26: mol_type = other DNA
caacatcaaggaagatggcatttcta

SEQ ID NO: 7931 - DNA, 25 bp, synthetic construct
  misc_feature 1..25: note = Description of Artificial Sequence: Synthetic Antisense oligonucleotide
  modified_base 24..25: mod_base = OTHER; note = bicyclic nucleic acid (BNA)
  source 1..25: mol_type = other DNA
caacatcaaggaagatggcatttct

SEQ ID NO: 7932 - DNA, 24 bp, synthetic construct
  misc_feature 1..24: note = Description of Artificial Sequence: Synthetic Antisense oligonucleotide
  modified_base 23..24: mod_base = OTHER; note = bicyclic nucleic acid (BNA)
  source 1..24: mol_type = other DNA
caacatcaaggaagatggcatttc

SEQ ID NO: 7933 - DNA, 23 bp, synthetic construct
  misc_feature 1..23: note = Description of Artificial Sequence: Synthetic Antisense oligonucleotide
  modified_base 22..23: mod_base = OTHER; note = bicyclic nucleic acid (BNA)
  source 1..23: mol_type = other DNA
caacatcaaggaagatggcattt

SEQ ID NO: 7934 - DNA, 22 bp, synthetic construct
  misc_feature 1..22: note = Description of Artificial Sequence: Synthetic Antisense oligonucleotide
  modified_base 21..22: mod_base = OTHER; note = bicyclic nucleic acid (BNA)
  source 1..22: mol_type = other DNA
caacatcaaggaagatggcatt

SEQ ID NO: 7935 - DNA, 21 bp, synthetic construct
  misc_feature 1..21: note = Description of Artificial Sequence: Synthetic Antisense oligonucleotide
  modified_base 20..21: mod_base = OTHER; note = bicyclic nucleic acid (BNA)
  source 1..21: mol_type = other DNA
caacatcaaggaagatggcat

SEQ ID NO: 7936 - DNA, 20 bp, synthetic construct
  misc_feature 1..20: note = Description of Artificial Sequence: Synthetic Antisense oligonucleotide
  modified_base 19..20: mod_base = OTHER; note = bicyclic nucleic acid (BNA)
  source 1..20: mol_type = other DNA
caacatcaaggaagatggca

SEQ ID NO: 7937 - DNA, 19 bp, synthetic construct
  misc_feature 1..19: note = Description of Artificial Sequence: Synthetic Antisense oligonucleotide
  modified_base 18..19: mod_base = OTHER; note = bicyclic nucleic acid (BNA)
  source 1..19: mol_type = other DNA
caacatcaaggaagatggc

SEQ ID NO: 7938 - DNA, 18 bp, synthetic construct
  misc_feature 1..18: note = Description of Artificial Sequence: Synthetic Antisense oligonucleotide
  modified_base 17..18: mod_base = OTHER; note = bicyclic nucleic acid (BNA)
  source 1..18: mol_type = other DNA
caacatcaaggaagatgg

SEQ ID NO: 7939 - DNA, 17 bp, synthetic construct
  misc_feature 1..17: note = Description of Artificial Sequence: Synthetic Antisense oligonucleotide
  modified_base 16..17: mod_base = OTHER; note = bicyclic nucleic acid (BNA)
  source 1..17: mol_type = other DNA
caacatcaaggaagatg

SEQ ID NO: 7940 - DNA, 16 bp, synthetic construct
  misc_feature 1..16: note = Description of Artificial Sequence: Synthetic Antisense oligonucleotide
  modified_base 15..16: mod_base = OTHER; note = bicyclic nucleic acid (BNA)
  source 1..16: mol_type = other DNA
caacatcaaggaagat

SEQ ID NO: 7941 - DNA, 15 bp, synthetic construct
  misc_feature 1..15: note = Description of Artificial Sequence: Synthetic Antisense oligonucleotide
  modified_base 14..15: mod_base = OTHER; note = bicyclic nucleic acid (BNA)
  source 1..15: mol_type = other DNA
caacatcaaggaaga

SEQ ID NO: 7942 - DNA, 14 bp, synthetic construct
  misc_feature 1..14: note = Description of Artificial Sequence: Synthetic Antisense oligonucleotide
  modified_base 13..14: mod_base = OTHER; note = bicyclic nucleic acid (BNA)
  source 1..14: mol_type = other DNA
caacatcaaggaag

SEQ ID NO: 7943 - DNA, 26 bp, synthetic construct
  misc_feature 1..26: note = Description of Artificial Sequence: Synthetic Antisense oligonucleotide
  modified_base 25..26: mod_base = OTHER; note = bicyclic nucleic acid (BNA)
  source 1..26: mol_type = other DNA
aacatcaaggaagatggcatttctag

SEQ ID NO: 7944 - DNA, 25 bp, synthetic construct
  misc_feature 1..25: note = Description of Artificial Sequence: Synthetic Antisense oligonucleotide
  modified_base 24..25: mod_base = OTHER; note = bicyclic nucleic acid (BNA)
  source 1..25: mol_type = other DNA
aacatcaaggaagatggcatttcta

SEQ ID NO: 7945 - DNA, 24 bp, synthetic construct
  misc_feature 1..24: note = Description of Artificial Sequence: Synthetic Antisense oligonucleotide
  modified_base 23..24: mod_base = OTHER; note = bicyclic nucleic acid (BNA)
  source 1..24: mol_type = other DNA
aacatcaaggaagatggcatttct

SEQ ID NO: 7946 - DNA, 23 bp, synthetic construct
  misc_feature 1..23: note = Description of Artificial Sequence: Synthetic Antisense oligonucleotide
  modified_base 22..23: mod_base = OTHER; note = bicyclic nucleic acid (BNA)
  source 1..23: mol_type = other DNA
aacatcaaggaagatggcatttc

SEQ ID NO: 7947 - DNA, 22 bp, synthetic construct
  misc_feature 1..22: note = Description of Artificial Sequence: Synthetic Antisense oligonucleotide
  modified_base 21..22: mod_base = OTHER; note = bicyclic nucleic acid (BNA)
  source 1..22: mol_type = other DNA
aacatcaaggaagatggcattt

SEQ ID NO: 7948 - DNA, 21 bp, synthetic construct
  misc_feature 1..21: note = Description of Artificial Sequence: Synthetic Antisense oligonucleotide
  modified_base 20..21: mod_base = OTHER; note = bicyclic nucleic acid (BNA)
  source 1..21: mol_type = other DNA
aacatcaaggaagatggcatt

SEQ ID NO: 7949 - DNA, 20 bp, synthetic construct
  misc_feature 1..20: note = Description of Artificial Sequence: Synthetic Antisense oligonucleotide
  modified_base 19..20: mod_base = OTHER; note = bicyclic nucleic acid (BNA)
  source 1..20: mol_type = other DNA
aacatcaaggaagatggcat

SEQ ID NO: 7950 - DNA, 19 bp, synthetic construct
  misc_feature 1..19: note = Description of Artificial Sequence: Synthetic Antisense oligonucleotide
  modified_base 18..19: mod_base = OTHER; note = bicyclic nucleic acid (BNA)
  source 1..19: mol_type = other DNA
aacatcaaggaagatggca

SEQ ID NO: 7951 - DNA, 18 bp, synthetic construct
  misc_feature 1..18: note = Description of Artificial Sequence: Synthetic Antisense oligonucleotide
  modified_base 17..18: mod_base = OTHER; note = bicyclic nucleic acid (BNA)
  source 1..18: mol_type = other DNA
aacatcaaggaagatggc

SEQ ID NO: 7952 - DNA, 17 bp, synthetic construct
  misc_feature 1..17: note = Description of Artificial Sequence: Synthetic Antisense oligonucleotide
  modified_base 16..17: mod_base = OTHER; note = bicyclic nucleic acid (BNA)
  source 1..17: mol_type = other DNA
aacatcaaggaagatgg

SEQ ID NO: 7953 - DNA, 16 bp, synthetic construct
  misc_feature 1..16: note = Description of Artificial Sequence: Synthetic Antisense oligonucleotide
  modified_base 15..16: mod_base = OTHER; note = bicyclic nucleic acid (BNA)
  source 1..16: mol_type = other DNA
aacatcaaggaagatg

SEQ ID NO: 7954 - DNA, 15 bp, synthetic construct
  misc_feature 1..15: note = Description of Artificial Sequence: Synthetic Antisense oligonucleotide
  modified_base 14..15: mod_base = OTHER; note = bicyclic nucleic acid (BNA)
  source 1..15: mol_type = other DNA
aacatcaaggaagat

SEQ ID NO: 7955 - DNA, 14 bp, synthetic construct
  misc_feature 1..14: note = Description of Artificial Sequence: Synthetic Antisense oligonucleotide
  modified_base 13..14: mod_base = OTHER; note = bicyclic nucleic acid (BNA)
  source 1..14: mol_type = other DNA
aacatcaaggaaga

SEQ ID NO: 7956 - DNA, 13 bp, synthetic construct
  misc_feature 1..13: note = Description of Artificial Sequence: Synthetic Antisense oligonucleotide
  modified_base 12..13: mod_base = OTHER; note = bicyclic nucleic acid (BNA)
  source 1..13: mol_type = other DNA
aacatcaaggaag

SEQ ID NO: 7957 - DNA, 25 bp, synthetic construct
  misc_feature 1..25: note = Description of Artificial Sequence: Synthetic Antisense oligonucleotide
  modified_base 24..25: mod_base = OTHER; note = bicyclic nucleic acid (BNA)
  source 1..25: mol_type = other DNA
acatcaaggaagatggcatttctag

SEQ ID NO: 7958 - DNA, 24 bp, synthetic construct
  misc_feature 1..24: note = Description of Artificial Sequence: Synthetic Antisense oligonucleotide
  modified_base 23..24: mod_base = OTHER; note = bicyclic nucleic acid (BNA)
  source 1..24: mol_type = other DNA
acatcaaggaagatggcatttcta

SEQ ID NO: 7959 - DNA, 23 bp, synthetic construct
  misc_feature 1..23: note = Description of Artificial Sequence: Synthetic Antisense oligonucleotide
  modified_base 22..23: mod_base = OTHER; note = bicyclic nucleic acid (BNA)
  source 1..23: mol_type = other DNA
acatcaaggaagatggcatttct

SEQ ID NO: 7960 - DNA, 22 bp, synthetic construct
  misc_feature 1..22: note = Description of Artificial Sequence: Synthetic Antisense oligonucleotide
  modified_base 21..22: mod_base = OTHER; note = bicyclic nucleic acid (BNA)
  source 1..22: mol_type = other DNA
acatcaaggaagatggcatttc

SEQ ID NO: 7961 - DNA, 21 bp, synthetic construct
  misc_feature 1..21: note = Description of Artificial Sequence: Synthetic Antisense oligonucleotide
  modified_base 20..21: mod_base = OTHER; note = bicyclic nucleic acid (BNA)
  source 1..21: mol_type = other DNA
acatcaaggaagatggcattt

SEQ ID NO: 7962 - DNA, 20 bp, synthetic construct
  misc_feature 1..20: note = Description of Artificial Sequence: Synthetic Antisense oligonucleotide
  modified_base 19..20: mod_base = OTHER; note = bicyclic nucleic acid (BNA)
  source 1..20: mol_type = other DNA
acatcaaggaagatggcatt

SEQ ID NO: 7963 - DNA, 19 bp, synthetic construct
  misc_feature 1..19: note = Description of Artificial Sequence: Synthetic Antisense oligonucleotide
  modified_base 18..19: mod_base = OTHER; note = bicyclic nucleic acid (BNA)
  source 1..19: mol_type = other DNA
acatcaaggaagatggcat

SEQ ID NO: 7964 - DNA, 18 bp, synthetic construct
  misc_feature 1..18: note = Description of Artificial Sequence: Synthetic Antisense oligonucleotide
  modified_base 17..18: mod_base = OTHER; note = bicyclic nucleic acid (BNA)
  source 1..18: mol_type = other DNA
acatcaaggaagatggca

SEQ ID NO: 7965 - DNA, 17 bp, synthetic construct
  misc_feature 1..17: note = Description of Artificial Sequence: Synthetic Antisense oligonucleotide
  modified_base 16..17: mod_base = OTHER; note = bicyclic nucleic acid (BNA)
  source 1..17: mol_type = other DNA
acatcaaggaagatggc

SEQ ID NO: 7966 - DNA, 16 bp, synthetic construct
  misc_feature 1..16: note = Description of Artificial Sequence: Synthetic Antisense oligonucleotide
  modified_base 15..16: mod_base = OTHER; note = bicyclic nucleic acid (BNA)
  source 1..16: mol_type = other DNA
acatcaaggaagatgg

SEQ ID NO: 7967 - DNA, 15 bp, synthetic construct
  misc_feature 1..15: note = Description of Artificial Sequence: Synthetic Antisense oligonucleotide
  modified_base 14..15: mod_base = OTHER; note = bicyclic nucleic acid (BNA)
  source 1..15: mol_type = other DNA
acatcaaggaagatg

SEQ ID NO: 7968 - DNA, 14 bp, synthetic construct
  misc_feature 1..14: note = Description of Artificial Sequence: Synthetic Antisense oligonucleotide
  modified_base 13..14: mod_base = OTHER; note = bicyclic nucleic acid (BNA)
  source 1..14: mol_type = other DNA
acatcaaggaagat

SEQ ID NO: 7969 - DNA, 13 bp, synthetic construct
  misc_feature 1..13: note = Description of Artificial Sequence: Synthetic Antisense oligonucleotide
  modified_base 12..13: mod_base = OTHER; note = bicyclic nucleic acid (BNA)
  source 1..13: mol_type = other DNA
acatcaaggaaga

SEQ ID NO: 7970 - DNA, 12 bp, synthetic construct
  misc_feature 1..12: note = Description of Artificial Sequence: Synthetic Antisense oligonucleotide
  modified_base 11..12: mod_base = OTHER; note = bicyclic nucleic acid (BNA)
  source 1..12: mol_type = other DNA
acatcaaggaag

SEQ ID NO: 7971 - DNA, 24 bp, synthetic construct
  misc_feature 1..24: note = Description of Artificial Sequence: Synthetic Antisense oligonucleotide
  modified_base 23..24: mod_base = OTHER; note = bicyclic nucleic acid (BNA)
  source 1..24: mol_type = other DNA
catcaaggaagatggcatttctag

SEQ ID NO: 7972 - DNA, 23 bp, synthetic construct
  misc_feature 1..23: note = Description of Artificial Sequence: Synthetic Antisense oligonucleotide
  modified_base 22..23: mod_base = OTHER; note = bicyclic nucleic acid (BNA)
  source 1..23: mol_type = other DNA
catcaaggaagatggcatttcta

SEQ ID NO: 7973 - DNA, 22 bp, synthetic construct
  misc_feature 1..22: note = Description of Artificial Sequence: Synthetic Antisense oligonucleotide
  modified_base 21..22: mod_base = OTHER; note = bicyclic nucleic acid (BNA)
  source 1..22: mol_type = other DNA
catcaaggaagatggcatttct

SEQ ID NO: 7974 - DNA, 21 bp, synthetic construct
  misc_feature 1..21: note = Description of Artificial Sequence: Synthetic Antisense oligonucleotide
  modified_base 20..21: mod_base = OTHER; note = bicyclic nucleic acid (BNA)
  source 1..21: mol_type = other DNA
catcaaggaagatggcatttc

SEQ ID NO: 7975 - DNA, 20 bp, synthetic construct
  misc_feature 1..20: note = Description of Artificial Sequence: Synthetic Antisense oligonucleotide
  modified_base 19..20: mod_base = OTHER; note = bicyclic nucleic acid (BNA)
  source 1..20: mol_type = other DNA
catcaaggaagatggcattt

SEQ ID NO: 7976 - DNA, 19 bp, synthetic construct
  misc_feature 1..19: note = Description of Artificial Sequence: Synthetic Antisense oligonucleotide
  modified_base 18..19: mod_base = OTHER; note = bicyclic nucleic acid (BNA)
  source 1..19: mol_type = other DNA
catcaaggaagatggcatt

SEQ ID NO: 7977 - DNA, 18 bp, synthetic construct
  misc_feature 1..18: note = Description of Artificial Sequence: Synthetic Antisense oligonucleotide
  modified_base 17..18: mod_base = OTHER; note = bicyclic nucleic acid (BNA)
  source 1..18: mol_type = other DNA
catcaaggaagatggcat

SEQ ID NO: 7978 - DNA, 17 bp, synthetic construct
  misc_feature 1..17: note = Description of Artificial Sequence: Synthetic Antisense oligonucleotide
  modified_base 16..17: mod_base = OTHER; note = bicyclic nucleic acid (BNA)
  source 1..17: mol_type = other DNA
catcaaggaagatggca

SEQ ID NO: 7979 - DNA, 16 bp, synthetic construct
  misc_feature 1..16: note = Description of Artificial Sequence: Synthetic Antisense oligonucleotide
  modified_base 15..16: mod_base = OTHER; note = bicyclic nucleic acid (BNA)
  source 1..16: mol_type = other DNA
catcaaggaagatggc

SEQ ID NO: 7980 - DNA, 15 bp, synthetic construct
  misc_feature 1..15: note = Description of Artificial Sequence: Synthetic Antisense oligonucleotide
  modified_base 14..15: mod_base = OTHER; note = bicyclic nucleic acid (BNA)
  source 1..15: mol_type = other DNA
catcaaggaagatgg

SEQ ID NO: 7981 - DNA, 14 bp, synthetic construct
  misc_feature 1..14: note = Description of Artificial Sequence: Synthetic Antisense oligonucleotide
  modified_base 13..14: mod_base = OTHER; note = bicyclic nucleic acid (BNA)
  source 1..14: mol_type = other DNA
catcaaggaagatg

SEQ ID NO: 7982 - DNA, 13 bp, synthetic construct
  misc_feature 1..13: note = Description of Artificial Sequence: Synthetic Antisense oligonucleotide
  modified_base 12..13: mod_base = OTHER; note = bicyclic nucleic acid (BNA)
  source 1..13: mol_type = other DNA
catcaaggaagat

SEQ ID NO: 7983 - DNA, 12 bp, synthetic construct
  misc_feature 1..12: note = Description of Artificial Sequence: Synthetic Antisense oligonucleotide
  modified_base 11..12: mod_base = OTHER; note = bicyclic nucleic acid (BNA)
  source 1..12: mol_type = other DNA
catcaaggaaga

SEQ ID NO: 7984 - DNA, 11 bp, synthetic construct
  misc_feature 1..11: note = Description of Artificial Sequence: Synthetic Antisense oligonucleotide
  modified_base 10..11: mod_base = OTHER; note = bicyclic nucleic acid (BNA)
  source 1..11: mol_type = other DNA
catcaaggaag

SEQ ID NO: 7985 - DNA, 23 bp, synthetic construct
  misc_feature 1..23: note = Description of Artificial Sequence: Synthetic Antisense oligonucleotide
  modified_base 22..23: mod_base = OTHER; note = bicyclic nucleic acid (BNA)
  source 1..23: mol_type = other DNA
atcaaggaagatggcatttctag

SEQ ID NO: 7986 - DNA, 22 bp, synthetic construct
  misc_feature 1..22: note = Description of Artificial Sequence: Synthetic Antisense oligonucleotide
  modified_base 21..22: mod_base = OTHER; note = bicyclic nucleic acid (BNA)
  source 1..22: mol_type = other DNA
atcaaggaagatggcatttcta

SEQ ID NO: 7987 - DNA, 21 bp, synthetic construct
  misc_feature 1..21: note = Description of Artificial Sequence: Synthetic Antisense oligonucleotide
  modified_base 20..21: mod_base = OTHER; note = bicyclic nucleic acid (BNA)
  source 1..21: mol_type = other DNA
atcaaggaagatggcatttct

SEQ ID NO: 7988 - DNA, 20 bp, synthetic construct
  misc_feature 1..20: note = Description of Artificial Sequence: Synthetic Antisense oligonucleotide
  modified_base 19..20: mod_base = OTHER; note = bicyclic nucleic acid (BNA)
  source 1..20: mol_type = other DNA
atcaaggaagatggcatttc

SEQ ID NO: 7989 - DNA, 19 bp, synthetic construct
  misc_feature 1..19: note = Description of Artificial Sequence: Synthetic Antisense oligonucleotide
  modified_base 18..19: mod_base = OTHER; note = bicyclic nucleic acid (BNA)
  source 1..19: mol_type = other DNA
atcaaggaagatggcattt

SEQ ID NO: 7990 - DNA, 18 bp, synthetic construct
  misc_feature 1..18: note = Description of Artificial Sequence: Synthetic Antisense oligonucleotide
  modified_base 17..18: mod_base = OTHER; note = bicyclic nucleic acid (BNA)
  source 1..18: mol_type = other DNA
atcaaggaagatggcatt

SEQ ID NO: 7991 - DNA, 17 bp, synthetic construct
  misc_feature 1..17: note = Description of Artificial Sequence: Synthetic Antisense oligonucleotide
  modified_base 16..17: mod_base = OTHER; note = bicyclic nucleic acid (BNA)
  source 1..17: mol_type = other DNA
atcaaggaagatggcat

SEQ ID NO: 7992 - DNA, 16 bp, synthetic construct
  misc_feature 1..16: note = Description of Artificial Sequence: Synthetic Antisense oligonucleotide
  modified_base 15..16: mod_base = OTHER; note = bicyclic nucleic acid (BNA)
  source 1..16: mol_type = other DNA
atcaaggaagatggca

SEQ ID NO: 7993 - DNA, 15 bp, synthetic construct
  misc_feature 1..15: note = Description of Artificial Sequence: Synthetic Antisense oligonucleotide
  modified_base 14..15: mod_base = OTHER; note = bicyclic nucleic acid (BNA)
  source 1..15: mol_type = other DNA
atcaaggaagatggc

SEQ ID NO: 7994 - DNA, 14 bp, synthetic construct
  misc_feature 1..14: note = Description of Artificial Sequence: Synthetic Antisense oligonucleotide
  modified_base 13..14: mod_base = OTHER; note = bicyclic nucleic acid (BNA)
  source 1..14: mol_type = other DNA
atcaaggaagatgg

SEQ ID NO: 7995 - DNA, 13 bp, synthetic construct
  misc_feature 1..13: note = Description of Artificial Sequence: Synthetic Antisense oligonucleotide
  modified_base 12..13: mod_base = OTHER; note = bicyclic nucleic acid (BNA)
  source 1..13: mol_type = other DNA
atcaaggaagatg

SEQ ID NO: 7996 - DNA, 12 bp, synthetic construct
  misc_feature 1..12: note = Description of Artificial Sequence: Synthetic Antisense oligonucleotide
  modified_base 11..12: mod_base = OTHER; note = bicyclic nucleic acid (BNA)
  source 1..12: mol_type = other DNA
atcaaggaagat

SEQ ID NO: 7997 - DNA, 11 bp, synthetic construct
  misc_feature 1..11: note = Description of Artificial Sequence: Synthetic Antisense oligonucleotide
  modified_base 10..11: mod_base = OTHER; note = bicyclic nucleic acid (BNA)
  source 1..11: mol_type = other DNA
atcaaggaaga

SEQ ID NO: 7998 - DNA, 10 bp, synthetic construct
  misc_feature 1..10: note = Description of Artificial Sequence: Synthetic Antisense oligonucleotide
  modified_base 9..10: mod_base = OTHER; note = bicyclic nucleic acid (BNA)
  source 1..10: mol_type = other DNA
atcaaggaag

SEQ ID NO: 7999 - DNA, 18 bp, synthetic construct
  misc_feature 1..18: note = Description of Artificial Sequence: Synthetic Antisense oligonucleotide
  modified_base 1..2: mod_base = OTHER; note = bicyclic nucleic acid (BNA)
  modified_base 17..18: mod_base = OTHER; note = bicyclic nucleic acid (BNA)
  source 1..18: mol_type = other DNA
ggtaagttctgtccaagc

SEQ ID NO: 8000 - DNA, 18 bp, synthetic construct
  misc_feature 1..18: note = Description of Artificial Sequence: Synthetic Antisense oligonucleotide
  modified_base 1..2: mod_base = OTHER; note = bicyclic nucleic acid (BNA)
  modified_base 17..18: mod_base = OTHER; note = bicyclic nucleic acid (BNA)
  source 1..18: mol_type = other DNA
gtaagttctgtccaagcc

SEQ ID NO: 8001 - DNA, 18 bp, synthetic construct
  misc_feature 1..18: note = Description of Artificial Sequence: Synthetic Antisense oligonucleotide
  modified_base 1..2: mod_base = OTHER; note = bicyclic nucleic acid (BNA)
  modified_base 17..18: mod_base = OTHER; note = bicyclic nucleic acid (BNA)
  source 1..18: mol_type = other DNA
agtcggtaagttctgtcc

SEQ ID NO: 8002 - DNA, 18 bp, synthetic construct
  misc_feature 1..18: note = Description of Artificial Sequence: Synthetic Antisense oligonucleotide
  modified_base 1..2: mod_base = OTHER; note = bicyclic nucleic acid (BNA)
  modified_base 17..18: mod_base = OTHER; note = bicyclic nucleic acid (BNA)
  source 1..18: mol_type = other DNA
ctgtccaagcccggttga

SEQ ID NO: 8003 - DNA, 15 bp, synthetic construct
  misc_feature 1..15: note = Description of Artificial Sequence: Synthetic Antisense oligonucleotide
  modified_base 1..2: mod_base = OTHER; note = bicyclic nucleic acid (BNA)
  modified_base 14..15: mod_base = OTHER; note = bicyclic nucleic acid (BNA)
  source 1..15: mol_type = other DNA
taagttctgtccaag

SEQ ID NO: 8004 - DNA, 20 bp, synthetic construct
  misc_feature 1..20: note = Description of Artificial Sequence: Synthetic Antisense oligonucleotide
  modified_base 1..2: mod_base = OTHER; note = bicyclic nucleic acid (BNA)
  modified_base 19..20: mod_base = OTHER; note = bicyclic nucleic acid (BNA)
  source 1..20: mol_type = other DNA
ttctgtccaagcccggttga

SEQ ID NO: 8005 - DNA, 19 bp, synthetic construct
  misc_feature 1..19: note = Description of Artificial Sequence: Synthetic Antisense oligonucleotide
  modified_base 1..2: mod_base = OTHER; note = bicyclic nucleic acid (BNA)
  modified_base 18..19: mod_base = OTHER; note = bicyclic nucleic acid (BNA)
  source 1..19: mol_type = other DNA
ttctgtccaagcccggttg

SEQ ID NO: 8006 - DNA, 18 bp, synthetic construct
  misc_feature 1..18: note = Description of Artificial Sequence: Synthetic Antisense oligonucleotide
  modified_base 1..2: mod_base = OTHER; note = bicyclic nucleic acid (BNA)
  modified_base 17..18: mod_base = OTHER; note = bicyclic nucleic acid (BNA)
  source 1..18: mol_type = other DNA
ttctgtccaagcccggtt

SEQ ID NO: 8007 - DNA, 17 bp, synthetic construct
  misc_feature 1..17: note = Description of Artificial Sequence: Synthetic Antisense oligonucleotide
  modified_base 1..2: mod_base = OTHER; note = bicyclic nucleic acid (BNA)
  modified_base 16..17: mod_base = OTHER; note = bicyclic nucleic acid (BNA)
  source 1..17: mol_type = other DNA
ttctgtccaagcccggt

SEQ ID NO: 8008 - DNA, 16 bp, synthetic construct
  misc_feature 1..16: note = Description of Artificial Sequence: Synthetic Antisense oligonucleotide
  modified_base 1..2: mod_base = OTHER; note = bicyclic nucleic acid (BNA)
  modified_base 15..16: mod_base = OTHER; note = bicyclic nucleic acid (BNA)
  source 1..16: mol_type = other DNA
ttctgtccaagcccgg

SEQ ID NO: 8009 - DNA, 15 bp, synthetic construct
  misc_feature 1..15: note = Description of Artificial Sequence: Synthetic Antisense oligonucleotide
  modified_base 1..2: mod_base = OTHER; note = bicyclic nucleic acid (BNA)
  modified_base 14..15: mod_base = OTHER; note = bicyclic nucleic acid (BNA)
  source 1..15: mol_type = other DNA
ttctgtccaagcccg

SEQ ID NO: 8010 - DNA, 14 bp, synthetic construct
  misc_feature 1..14: note = Description of Artificial Sequence: Synthetic Antisense oligonucleotide
  modified_base 1..2: mod_base = OTHER; note = bicyclic nucleic acid (BNA)
  modified_base 13..14: mod_base = OTHER; note = bicyclic nucleic acid (BNA)
  source 1..14: mol_type = other DNA
ttctgtccaagccc

SEQ ID NO: 8011 - DNA, 13 bp, synthetic construct
  misc_feature 1..13: note = Description of Artificial Sequence: Synthetic Antisense oligonucleotide
  modified_base 1..2: mod_base = OTHER; note = bicyclic nucleic acid (BNA)
  modified_base 12..13: mod_base = OTHER; note = bicyclic nucleic acid (BNA)
  source 1..13: mol_type = other DNA
ttctgtccaagcc

SEQ ID NO: 8012 - DNA, 12 bp, synthetic construct
  misc_feature 1..12: note = Description of Artificial Sequence: Synthetic Antisense oligonucleotide
  modified_base 1..2: mod_base = OTHER; note = bicyclic nucleic acid (BNA)
  modified_base 11..12: mod_base = OTHER; note = bicyclic nucleic acid (BNA)
  source 1..12: mol_type = other DNA
ttctgtccaagc

SEQ ID NO: 8013 - DNA, 11 bp, synthetic construct
  misc_feature 1..11: note = Description of Artificial Sequence: Synthetic Antisense oligonucleotide
  modified_base 1..2: mod_base = OTHER; note = bicyclic nucleic acid (BNA)
  modified_base 10..11: mod_base = OTHER; note = bicyclic nucleic acid (BNA)
  source 1..11: mol_type = other DNA
ttctgtccaag

SEQ ID NO: 8014 - DNA, 10 bp, synthetic construct
  misc_feature 1..10: note = Description of Artificial Sequence: Synthetic Antisense oligonucleotide
  modified_base 1..2: mod_base = OTHER; note = bicyclic nucleic acid (BNA)
  modified_base 9..10: mod_base = OTHER; note = bicyclic nucleic acid (BNA)
  source 1..10: mol_type = other DNA
ttctgtccaa

SEQ ID NO: 8015-8016 - skipped (2 entries)

SEQ ID NO: 8017 - DNA, 19 bp, synthetic construct
  misc_feature 1..19: note = Description of Artificial Sequence: Synthetic Antisense oligonucleotide
  modified_base 1..2: mod_base = OTHER; note = bicyclic nucleic acid (BNA)
  modified_base 18..19: mod_base = OTHER; note = bicyclic nucleic acid (BNA)
  source 1..19: mol_type = other DNA
tctgtccaagcccggttga

SEQ ID NO: 8018 - DNA, 18 bp, synthetic construct
  misc_feature 1..18: note = Description of Artificial Sequence: Synthetic Antisense oligonucleotide
  modified_base 1..2: mod_base = OTHER; note = bicyclic nucleic acid (BNA)
  modified_base 17..18: mod_base = OTHER; note = bicyclic nucleic acid (BNA)
  source 1..18: mol_type = other DNA
tctgtccaagcccggttg

SEQ ID NO: 8019 - DNA, 17 bp, synthetic construct
  misc_feature 1..17: note = Description of Artificial Sequence: Synthetic Antisense oligonucleotide
  modified_base 1..2: mod_base = OTHER; note = bicyclic nucleic acid (BNA)
  modified_base 16..17: mod_base = OTHER; note = bicyclic nucleic acid (BNA)
  source 1..17: mol_type = other DNA
tctgtccaagcccggtt

SEQ ID NO: 8020 - DNA, 16 bp, synthetic construct
  misc_feature 1..16: note = Description of Artificial Sequence: Synthetic Antisense oligonucleotide
  modified_base 1..2: mod_base = OTHER; note = bicyclic nucleic acid (BNA)
  modified_base 15..16: mod_base = OTHER; note = bicyclic nucleic acid (BNA)
  source 1..16: mol_type = other DNA
tctgtccaagcccggt

SEQ ID NO: 8021 - DNA, 15 bp, synthetic construct
  misc_feature 1..15: note = Description of Artificial Sequence: Synthetic Antisense oligonucleotide
  modified_base 1..2: mod_base = OTHER; note = bicyclic nucleic acid (BNA)
  modified_base 14..15: mod_base = OTHER; note = bicyclic nucleic acid (BNA)
  source 1..15: mol_type = other DNA
tctgtccaagcccgg

SEQ ID NO: 8022 - DNA, 14 bp, synthetic construct
  misc_feature 1..14: note = Description of Artificial Sequence: Synthetic Antisense oligonucleotide
  modified_base 1..2: mod_base = OTHER; note = bicyclic nucleic acid (BNA)
  modified_base 13..14: mod_base = OTHER; note = bicyclic nucleic acid (BNA)
  source 1..14: mol_type = other DNA
tctgtccaagcccg

SEQ ID NO: 8023 - DNA, 13 bp, synthetic construct
  misc_feature 1..13: note = Description of Artificial Sequence: Synthetic Antisense oligonucleotide
  modified_base 1..2: mod_base = OTHER; note = bicyclic nucleic acid (BNA)
  modified_base 12..13: mod_base = OTHER; note = bicyclic nucleic acid (BNA)
  source 1..13: mol_type = other DNA
tctgtccaagccc

SEQ ID NO: 8024 - DNA, 12 bp, synthetic construct
  misc_feature 1..12: note = Description of Artificial Sequence: Synthetic Antisense oligonucleotide
  modified_base 1..2: mod_base = OTHER; note = bicyclic nucleic acid (BNA)
  modified_base 11..12: mod_base = OTHER; note = bicyclic nucleic acid (BNA)
  source 1..12: mol_type = other DNA
tctgtccaagcc

SEQ ID NO: 8025 - DNA, 11 bp, synthetic construct
  misc_feature 1..11: note = Description of Artificial Sequence: Synthetic Antisense oligonucleotide
  modified_base 1..2: mod_base = OTHER; note = bicyclic nucleic acid (BNA)
  modified_base 10..11: mod_base = OTHER; note = bicyclic nucleic acid (BNA)
  source 1..11: mol_type = other DNA
tctgtccaagc

SEQ ID NO: 8026 - DNA, 10 bp, synthetic construct
  misc_feature 1..10: note = Description of Artificial Sequence: Synthetic Antisense oligonucleotide
  modified_base 1..2: mod_base = OTHER; note = bicyclic nucleic acid (BNA)
  modified_base 9..10: mod_base = OTHER; note = bicyclic nucleic acid (BNA)
  source 1..10: mol_type = other DNA
tctgtccaag

SEQ ID NO: 8027-8028 - skipped (2 entries)

SEQ ID NO: 8029 - DNA, 17 bp, synthetic construct
  misc_feature 1..17: note = Description of Artificial Sequence: Synthetic Antisense oligonucleotide
  modified_base 1..2: mod_base = OTHER; note = bicyclic nucleic acid (BNA)
  modified_base 16..17: mod_base = OTHER; note = bicyclic nucleic acid (BNA)
  source 1..17: mol_type = other DNA
ctgtccaagcccggttg

SEQ ID NO: 8030 - DNA, 16 bp, synthetic construct
  misc_feature 1..16: note = Description of Artificial Sequence: Synthetic Antisense oligonucleotide
  modified_base 1..2: mod_base = OTHER; note = bicyclic nucleic acid (BNA)
  modified_base 15..16: mod_base = OTHER; note = bicyclic nucleic acid (BNA)
  source 1..16: mol_type = other DNA
ctgtccaagcccggtt

SEQ ID NO: 8031 - DNA, 15 bp, synthetic construct
  misc_feature 1..15: note = Description of Artificial Sequence: Synthetic Antisense oligonucleotide
  modified_base 1..2: mod_base = OTHER; note = bicyclic nucleic acid (BNA)
  modified_base 14..15: mod_base = OTHER; note = bicyclic nucleic acid (BNA)
  source 1..15: mol_type = other DNA
ctgtccaagcccggt

SEQ ID NO: 8032 - DNA, 14 bp, synthetic construct
  misc_feature 1..14: note = Description of Artificial Sequence: Synthetic Antisense oligonucleotide
  modified_base 1..2: mod_base = OTHER; note = bicyclic nucleic acid (BNA)
  modified_base 13..14: mod_base = OTHER; note = bicyclic nucleic acid (BNA)
  source 1..14: mol_type = other DNA
ctgtccaagcccgg

SEQ ID NO: 8033 - DNA, 13 bp, synthetic construct
  misc_feature 1..13: note = Description of Artificial Sequence: Synthetic Antisense oligonucleotide
  modified_base 1..2: mod_base = OTHER; note = bicyclic nucleic acid (BNA)
  modified_base 12..13: mod_base = OTHER; note = bicyclic nucleic acid (BNA)
  source 1..13: mol_type = other DNA
ctgtccaagcccg

SEQ ID NO: 8034 - DNA, 12 bp, synthetic construct
  misc_feature 1..12: note = Description of Artificial Sequence: Synthetic Antisense oligonucleotide
  modified_base 1..2: mod_base = OTHER; note = bicyclic nucleic acid (BNA)
  modified_base 11..12: mod_base = OTHER; note = bicyclic nucleic acid (BNA)
  source 1..12: mol_type = other DNA
ctgtccaagccc

SEQ ID NO: 8035 - DNA, 11 bp, synthetic construct
  misc_feature 1..11: note = Description of Artificial Sequence: Synthetic Antisense oligonucleotide
  modified_base 1..2: mod_base = OTHER; note = bicyclic nucleic acid (BNA)
  modified_base 10..11: mod_base = OTHER; note = bicyclic nucleic acid (BNA)
  source 1..11: mol_type = other DNA
ctgtccaagcc

SEQ ID NO: 8036 - DNA, 10 bp, synthetic construct
  misc_feature 1..10: note = Description of Artificial Sequence: Synthetic Antisense oligonucleotide
  modified_base 1..2: mod_base = OTHER; note = bicyclic nucleic acid (BNA)
  modified_base 9..10: mod_base = OTHER; note = bicyclic nucleic acid (BNA)
  source 1..10: mol_type = other DNA
ctgtccaagc

SEQ ID NO: 8037-8038 - skipped (2 entries)

SEQ ID NO: 8039 - DNA, 20 bp, synthetic construct
  misc_feature 1..20: note = Description of Artificial Sequence: Synthetic Antisense oligonucleotide
  modified_base 1..2: mod_base = OTHER; note = bicyclic nucleic acid (BNA)
  modified_base 19..20: mod_base = OTHER; note = bicyclic nucleic acid (BNA)
  source 1..20: mol_type = other DNA
gttctgtccaagcccggttg

SEQ ID NO: 8040 - DNA, 19 bp, synthetic construct
  misc_feature 1..19: note = Description of Artificial Sequence: Synthetic Antisense oligonucleotide
  modified_base 1..2: mod_base = OTHER; note = bicyclic nucleic acid (BNA)
  modified_base 18..19: mod_base = OTHER; note = bicyclic nucleic acid (BNA)
  source 1..19: mol_type = other DNA
gttctgtccaagcccggtt

SEQ ID NO: 8041 - DNA, 18 bp, synthetic construct
  misc_feature 1..18: note = Description of Artificial Sequence: Synthetic Antisense oligonucleotide
  modified_base 1..2: mod_base = OTHER; note = bicyclic nucleic acid (BNA)
  modified_base 17..18: mod_base = OTHER; note = bicyclic nucleic acid (BNA)
  source 1..18: mol_type = other DNA
gttctgtccaagcccggt

SEQ ID NO: 8042 - DNA, 17 bp, synthetic construct
  misc_feature 1..17: note = Description of Artificial Sequence: Synthetic Antisense oligonucleotide
  modified_base 1..2: mod_base = OTHER; note = bicyclic nucleic acid (BNA)
  modified_base 16..17: mod_base = OTHER; note = bicyclic nucleic acid (BNA)
  source 1..17: mol_type = other DNA
gttctgtccaagcccgg

SEQ ID NO: 8043 - DNA, 16 bp, synthetic construct
  misc_feature 1..16: note = Description of Artificial Sequence: Synthetic Antisense oligonucleotide
  modified_base 1..2: mod_base = OTHER; note = bicyclic nucleic acid (BNA)
  modified_base 15..16: mod_base = OTHER; note = bicyclic nucleic acid (BNA)
  source 1..16: mol_type = other DNA
gttctgtccaagcccg

SEQ ID NO: 8044 - DNA, 15 bp, synthetic construct
  misc_feature 1..15: note = Description of Artificial Sequence: Synthetic Antisense oligonucleotide
  modified_base 1..2: mod_base = OTHER; note = bicyclic nucleic acid (BNA)
  modified_base 14..15: mod_base = OTHER; note = bicyclic nucleic acid (BNA)
  source 1..15: mol_type = other DNA
gttctgtccaagccc

SEQ ID NO: 8045 - DNA, 14 bp, synthetic construct
  misc_feature 1..14: note = Description of Artificial Sequence: Synthetic Antisense oligonucleotide
  modified_base 1..2: mod_base = OTHER; note = bicyclic nucleic acid (BNA)
  modified_base 13..14: mod_base = OTHER; note = bicyclic nucleic acid (BNA)
  source 1..14: mol_type = other DNA
gttctgtccaagcc

SEQ ID NO: 8046 - DNA, 13 bp, synthetic construct
  misc_feature 1..13: note = Description of Artificial Sequence: Synthetic Antisense oligonucleotide
  modified_base 1..2: mod_base = OTHER; note = bicyclic nucleic acid (BNA)
  modified_base 12..13: mod_base = OTHER; note = bicyclic nucleic acid (BNA)
  source 1..13: mol_type = other DNA
gttctgtccaagc

SEQ ID NO: 8047 - DNA, 12 bp, synthetic construct
  misc_feature 1..12: note = Description of Artificial Sequence: Synthetic Antisense oligonucleotide
  modified_base 1..2: mod_base = OTHER; note = bicyclic nucleic acid (BNA)
  modified_base 11..12: mod_base = OTHER; note = bicyclic nucleic acid (BNA)
  source 1..12: mol_type = other DNA
gttctgtccaag

SEQ ID NO: 8048 - DNA, 11 bp, synthetic construct
  misc_feature 1..11: note = Description of Artificial Sequence: Synthetic Antisense oligonucleotide
  modified_base 1..2: mod_base = OTHER; note = bicyclic nucleic acid (BNA)
  modified_base 10..11: mod_base = OTHER; note = bicyclic nucleic acid (BNA)
  source 1..11: mol_type = other DNA
gttctgtccaa

SEQ ID NO: 8049 - DNA, 10 bp, synthetic construct
  misc_feature 1..10: note = Description of Artificial Sequence: Synthetic Antisense oligonucleotide
  modified_base 1..2: mod_base = OTHER; note = bicyclic nucleic acid (BNA)
  modified_base 9..10: mod_base = OTHER; note = bicyclic nucleic acid (BNA)
  source 1..10: mol_type = other DNA
gttctgtcca

SEQ ID NO: 8050-8051 - skipped (2 entries)

SEQ ID NO: 8052 - DNA, 20 bp, synthetic construct
  misc_feature 1..20: note = Description of Artificial Sequence: Synthetic Antisense oligonucleotide
  modified_base 1..2: mod_base = OTHER; note = bicyclic nucleic acid (BNA)
  modified_base 19..20: mod_base = OTHER; note = bicyclic nucleic acid (BNA)
  source 1..20: mol_type = other DNA
agttctgtccaagcccggtt

SEQ ID NO: 8053 - DNA, 19 bp, synthetic construct
  misc_feature 1..19: note = Description of Artificial Sequence: Synthetic Antisense oligonucleotide
  modified_base 1..2: mod_base = OTHER; note = bicyclic nucleic acid (BNA)
  modified_base 18..19: mod_base = OTHER; note = bicyclic nucleic acid (BNA)
  source 1..19: mol_type = other DNA
agttctgtccaagcccggt

SEQ ID NO: 8054 - DNA, 18 bp, synthetic construct
  misc_feature 1..18: note = Description of Artificial Sequence: Synthetic Antisense oligonucleotide
  modified_base 1..2: mod_base = OTHER; note = bicyclic nucleic acid (BNA)
  modified_base 17..18: mod_base = OTHER; note = bicyclic nucleic acid (BNA)
  source 1..18: mol_type = other DNA
agttctgtccaagcccgg

SEQ ID NO: 8055 - DNA, 17 bp, synthetic construct
  misc_feature 1..17: note = Description of Artificial Sequence: Synthetic Antisense oligonucleotide
  modified_base 1..2: mod_base = OTHER; note = bicyclic nucleic acid (BNA)
  modified_base 16..17: mod_base = OTHER; note = bicyclic nucleic acid (BNA)
  source 1..17: mol_type = other DNA
agttctgtccaagcccg

SEQ ID NO: 8056 - DNA, 16 bp, synthetic construct
  misc_feature 1..16: note = Description of Artificial Sequence: Synthetic Antisense oligonucleotide
  modified_base 1..2: mod_base = OTHER; note = bicyclic nucleic acid (BNA)
  modified_base 15..16: mod_base = OTHER; note = bicyclic nucleic acid (BNA)
  source 1..16: mol_type = other DNA
agttctgtccaagccc

SEQ ID NO: 8057 - DNA, 15 bp, synthetic construct
  misc_feature 1..15: note = Description of Artificial Sequence: Synthetic Antisense oligonucleotide
  modified_base 1..2: mod_base = OTHER; note = bicyclic nucleic acid (BNA)
  modified_base 14..15: mod_base = OTHER; note = bicyclic nucleic acid (BNA)
  source 1..15: mol_type = other DNA
agttctgtccaagcc

SEQ ID NO: 8058 - DNA, 14 bp, synthetic construct
  misc_feature 1..14: note = Description of Artificial Sequence: Synthetic Antisense oligonucleotide
  modified_base 1..2: mod_base = OTHER; note = bicyclic nucleic acid (BNA)
  modified_base 13..14: mod_base = OTHER; note = bicyclic nucleic acid (BNA)
  source 1..14: mol_type = other DNA
agttctgtccaagc

SEQ ID NO: 8059 - DNA, 13 bp, synthetic construct
  misc_feature 1..13: note = Description of Artificial Sequence: Synthetic Antisense oligonucleotide
  modified_base 1..2: mod_base = OTHER; note = bicyclic nucleic acid (BNA)
  modified_base 12..13: mod_base = OTHER; note = bicyclic nucleic acid (BNA)
  source 1..13: mol_type = other DNA
agttctgtccaag

SEQ ID NO: 8060 - DNA, 12 bp, synthetic construct
  misc_feature 1..12: note = Description of Artificial Sequence: Synthetic Antisense oligonucleotide
  modified_base 1..2: mod_base = OTHER; note = bicyclic nucleic acid (BNA)
  modified_base 11..12: mod_base = OTHER; note = bicyclic nucleic acid (BNA)
  source 1..12: mol_type = other DNA
agttctgtccaa

SEQ ID NO: 8061 - DNA, 11 bp, synthetic construct
  misc_feature 1..11: note = Description of Artificial Sequence: Synthetic Antisense oligonucleotide
  modified_base 1..2: mod_base = OTHER; note = bicyclic nucleic acid (BNA)
  modified_base 10..11: mod_base = OTHER; note = bicyclic nucleic acid (BNA)
  source 1..11: mol_type = other DNA
agttctgtcca

SEQ ID NO: 8062 - DNA, 10 bp, synthetic construct
  misc_feature 1..10: note = Description of Artificial Sequence: Synthetic Antisense oligonucleotide
  modified_base 1..2: mod_base = OTHER; note = bicyclic nucleic acid (BNA)
  modified_base 9..10: mod_base = OTHER; note = bicyclic nucleic acid (BNA)
  source 1..10: mol_type = other DNA
agttctgtcc

SEQ ID NO: 8063-8064 - skipped (2 entries)

SEQ ID NO: 8065 - DNA, 20 bp, synthetic construct
  misc_feature 1..20: note = Description of Artificial Sequence: Synthetic Antisense oligonucleotide
  modified_base 1..2: mod_base = OTHER; note = bicyclic nucleic acid (BNA)
  modified_base 19..20: mod_base = OTHER; note = bicyclic nucleic acid (BNA)
  source 1..20: mol_type = other DNA
aagttctgtccaagcccggt

SEQ ID NO: 8066 - DNA, 19 bp, synthetic construct
  misc_feature 1..19: note = Description of Artificial Sequence: Synthetic Antisense oligonucleotide
  modified_base 1..2: mod_base = OTHER; note = bicyclic nucleic acid (BNA)
  modified_base 18..19: mod_base = OTHER; note = bicyclic nucleic acid (BNA)
  source 1..19: mol_type = other DNA
aagttctgtccaagcccgg

SEQ ID NO: 8067 - DNA, 18 bp, synthetic construct
  misc_feature 1..18: note = Description of Artificial Sequence: Synthetic Antisense oligonucleotide
  modified_base 1..2: mod_base = OTHER; note = bicyclic nucleic acid (BNA)
  modified_base 17..18: mod_base = OTHER; note = bicyclic nucleic acid (BNA)
  source 1..18: mol_type = other DNA
aagttctgtccaagcccg

SEQ ID NO: 8068 - DNA, 17 bp, synthetic construct
  misc_feature 1..17: note = Description of Artificial Sequence: Synthetic Antisense oligonucleotide
  modified_base 1..2: mod_base = OTHER; note = bicyclic nucleic acid (BNA)
  modified_base 16..17: mod_base = OTHER; note = bicyclic nucleic acid (BNA)
  source 1..17: mol_type = other DNA
aagttctgtccaagccc

SEQ ID NO: 8069 - DNA, 16 bp, synthetic construct
  misc_feature 1..16: note = Description of Artificial Sequence: Synthetic Antisense oligonucleotide
  modified_base 1..2: mod_base = OTHER; note = bicyclic nucleic acid (BNA)
  modified_base 15..16: mod_base = OTHER; note = bicyclic nucleic acid (BNA)
  source 1..16: mol_type = other DNA
aagttctgtccaagcc

SEQ ID NO: 8070 - DNA, 15 bp, synthetic construct
  misc_feature 1..15: note = Description of Artificial Sequence: Synthetic Antisense oligonucleotide
  modified_base 1..2: mod_base = OTHER; note = bicyclic nucleic acid (BNA)
  modified_base 14..15: mod_base = OTHER; note = bicyclic nucleic acid (BNA)
  source 1..15: mol_type = other DNA
aagttctgtccaagc

SEQ ID NO: 8071 - DNA, 14 bp, synthetic construct
  misc_feature 1..14: note = Description of Artificial Sequence: Synthetic Antisense oligonucleotide
  modified_base 1..2: mod_base = OTHER; note = bicyclic nucleic acid (BNA)
  modified_base 13..14: mod_base = OTHER; note = bicyclic nucleic acid (BNA)
  source 1..14: mol_type = other DNA
aagttctgtccaag

SEQ ID NO: 8072 - DNA, 13 bp, synthetic construct
  misc_feature 1..13: note = Description of Artificial Sequence: Synthetic Antisense oligonucleotide
  modified_base 1..2: mod_base = OTHER; note = bicyclic nucleic acid (BNA)
  modified_base 12..13: mod_base = OTHER; note = bicyclic nucleic acid (BNA)
  source 1..13: mol_type = other DNA
aagttctgtccaa

SEQ ID NO: 8073 - DNA, 12 bp, synthetic construct
  misc_feature 1..12: note = Description of Artificial Sequence: Synthetic Antisense oligonucleotide
  modified_base 1..2: mod_base = OTHER; note = bicyclic nucleic acid (BNA)
  modified_base 11..12: mod_base = OTHER; note = bicyclic nucleic acid (BNA)
  source 1..12: mol_type = other DNA
aagttctgtcca

SEQ ID NO: 8074 - DNA, 11 bp, synthetic construct
  misc_feature 1..11: note = Description of Artificial Sequence: Synthetic Antisense oligonucleotide
  modified_base 1..2: mod_base = OTHER; note = bicyclic nucleic acid (BNA)
  modified_base 10..11: mod_base = OTHER; note = bicyclic nucleic acid (BNA)
  source 1..11: mol_type = other DNA
aagttctgtcc

SEQ ID NO: 8075 - DNA, 10 bp, synthetic construct
  misc_feature 1..10: note = Description of Artificial Sequence: Synthetic Antisense oligonucleotide
  modified_base 1..2: mod_base = OTHER; note = bicyclic nucleic acid (BNA)
  modified_base 9..10: mod_base = OTHER; note = bicyclic nucleic acid (BNA)
  source 1..10: mol_type = other DNA
aagttctgtc

SEQ ID NO: 8076-8077 - skipped (2 entries)

SEQ ID NO: 8078 - DNA, 20 bp, synthetic construct
  misc_feature 1..20: note = Description of Artificial Sequence: Synthetic Antisense oligonucleotide
  modified_base 1..2: mod_base = OTHER; note = bicyclic nucleic acid (BNA)
  modified_base 19..20: mod_base = OTHER; note = bicyclic nucleic acid (BNA)
  source 1..20: mol_type = other DNA
taagttctgtccaagcccgg

SEQ ID NO: 8079 - DNA, 19 bp, synthetic construct
  misc_feature 1..19: note = Description of Artificial Sequence: Synthetic Antisense oligonucleotide
  modified_base 1..2: mod_base = OTHER; note = bicyclic nucleic acid (BNA)
  modified_base 18..19: mod_base = OTHER; note = bicyclic nucleic acid (BNA)
  source 1..19: mol_type = other DNA
taagttctgtccaagcccg

SEQ ID NO: 8080 - DNA, 18 bp, synthetic construct
  misc_feature 1..18: note = Description of Artificial Sequence: Synthetic Antisense oligonucleotide
  modified_base 1..2: mod_base = OTHER; note = bicyclic nucleic acid (BNA)
  modified_base 17..18: mod_base = OTHER; note = bicyclic nucleic acid (BNA)
  source 1..18: mol_type = other DNA
taagttctgtccaagccc

SEQ ID NO: 8081 - DNA, 17 bp, synthetic construct
  misc_feature 1..17: note = Description of Artificial Sequence: Synthetic Antisense oligonucleotide
  modified_base 1..2: mod_base = OTHER; note = bicyclic nucleic acid (BNA)
  modified_base 16..17: mod_base = OTHER; note = bicyclic nucleic acid (BNA)
  source 1..17: mol_type = other DNA
taagttctgtccaagcc

SEQ ID NO: 8082 - DNA, 16 bp, synthetic construct
  misc_feature 1..16: note = Description of Artificial Sequence: Synthetic Antisense oligonucleotide
  modified_base 1..2: mod_base = OTHER; note = bicyclic nucleic acid (BNA)
  modified_base 15..16: mod_base = OTHER; note = bicyclic nucleic acid (BNA)
  source 1..16: mol_type = other DNA
taagttctgtccaagc

SEQ ID NO: 8083 - DNA, 14 bp, synthetic construct
  misc_feature 1..14: note = Description of Artificial Sequence: Synthetic Antisense oligonucleotide
  modified_base 1..2: mod_base = OTHER; note = bicyclic nucleic acid (BNA)
  modified_base 13..14: mod_base = OTHER; note = bicyclic nucleic acid (BNA)
  source 1..14: mol_type = other DNA
taagttctgtccaa

SEQ ID NO: 8084 - DNA, 13 bp, synthetic construct
  misc_feature 1..13: note = Description of Artificial Sequence: Synthetic Antisense oligonucleotide
  modified_base 1..2: mod_base = OTHER; note = bicyclic nucleic acid (BNA)
  modified_base 12..13: mod_base = OTHER; note = bicyclic nucleic acid (BNA)
  source 1..13: mol_type = other DNA
taagttctgtcca

SEQ ID NO: 8085 - DNA, 12 bp, synthetic construct
  misc_feature 1..12: note = Description of Artificial Sequence: Synthetic Antisense oligonucleotide
  modified_base 1..2: mod_base = OTHER; note = bicyclic nucleic acid (BNA)
  modified_base 11..12: mod_base = OTHER; note = bicyclic nucleic acid (BNA)
  source 1..12: mol_type = other DNA
taagttctgtcc

SEQ ID NO: 8086 - DNA, 11 bp, synthetic construct
  misc_feature 1..11: note = Description of Artificial Sequence: Synthetic Antisense oligonucleotide
  modified_base 1..2: mod_base = OTHER; note = bicyclic nucleic acid (BNA)
  modified_base 10..11: mod_base = OTHER; note = bicyclic nucleic acid (BNA)
  source 1..11: mol_type = other DNA
taagttctgtc

SEQ ID NO: 8087 - DNA, 10 bp, synthetic construct
  misc_feature 1..10: note = Description of Artificial Sequence: Synthetic Antisense oligonucleotide
  modified_base 1..2: mod_base = OTHER; note = bicyclic nucleic acid (BNA)
  modified_base 9..10: mod_base = OTHER; note = bicyclic nucleic acid (BNA)
  source 1..10: mol_type = other DNA
taagttctgt

SEQ ID NO: 8088-8089 - skipped (2 entries)

SEQ ID NO: 8090 - DNA, 20 bp, synthetic construct
  misc_feature 1..20: note = Description of Artificial Sequence: Synthetic Antisense oligonucleotide
  modified_base 1..2: mod_base = OTHER; note = bicyclic nucleic acid (BNA)
  modified_base 19..20: mod_base = OTHER; note = bicyclic nucleic acid (BNA)
  source 1..20: mol_type = other DNA
gtaagttctgtccaagcccg

SEQ ID NO: 8091 - DNA, 19 bp, synthetic construct
  misc_feature 1..19: note = Description of Artificial Sequence: Synthetic Antisense oligonucleotide
  modified_base 1..2: mod_base = OTHER; note = bicyclic nucleic acid (BNA)
  modified_base 18..19: mod_base = OTHER; note = bicyclic nucleic acid (BNA)
  source 1..19: mol_type = other DNA
gtaagttctgtccaagccc

SEQ ID NO: 8092 - DNA, 17 bp, synthetic construct
  misc_feature 1..17: note = Description of Artificial Sequence: Synthetic Antisense oligonucleotide
  modified_base 1..2: mod_base = OTHER; note = bicyclic nucleic acid (BNA)
  modified_base 16..17: mod_base = OTHER; note = bicyclic nucleic acid (BNA)
  source 1..17: mol_type = other DNA
gtaagttctgtccaagc

SEQ ID NO: 8093 - DNA, 16 bp, synthetic construct
  misc_feature 1..16: note = Description of Artificial Sequence: Synthetic Antisense oligonucleotide
  modified_base 1..2: mod_base = OTHER; note = bicyclic nucleic acid (BNA)
  modified_base 15..16: mod_base = OTHER; note = bicyclic nucleic acid (BNA)
  source 1..16: mol_type = other DNA
gtaagttctgtccaag

SEQ ID NO: 8094 - DNA, 15 bp, synthetic construct
  misc_feature 1..15: note = Description of Artificial Sequence: Synthetic Antisense oligonucleotide
  modified_base 1..2: mod_base = OTHER; note = bicyclic nucleic acid (BNA)
  modified_base 14..15: mod_base = OTHER; note = bicyclic nucleic acid (BNA)
  source 1..15: mol_type = other DNA
gtaagttctgtccaa

SEQ ID NO: 8095 - DNA, 14 bp, synthetic construct
  misc_feature 1..14: note = Description of Artificial Sequence: Synthetic Antisense oligonucleotide
  modified_base 1..2: mod_base = OTHER; note = bicyclic nucleic acid (BNA)
  modified_base 13..14: mod_base = OTHER; note = bicyclic nucleic acid (BNA)
  source 1..14: mol_type = other DNA
gtaagttctgtcca

SEQ ID NO: 8096 - DNA, 13 bp, synthetic construct
  misc_feature 1..13: note = Description of Artificial Sequence: Synthetic Antisense oligonucleotide
  modified_base 1..2: mod_base = OTHER; note = bicyclic nucleic acid (BNA)
  modified_base 12..13: mod_base = OTHER; note = bicyclic nucleic acid (BNA)
  source 1..13: mol_type = other DNA
gtaagttctgtcc

SEQ ID NO: 8097 - DNA, 12 bp, synthetic construct
  misc_feature 1..12: note = Description of Artificial Sequence: Synthetic Antisense oligonucleotide
  modified_base 1..2: mod_base = OTHER; note = bicyclic nucleic acid (BNA)
  modified_base 11..12: mod_base = OTHER; note = bicyclic nucleic acid (BNA)
  source 1..12: mol_type = other DNA
gtaagttctgtc

SEQ ID NO: 8098 - DNA, 11 bp, synthetic construct
  misc_feature 1..11: note = Description of Artificial Sequence: Synthetic Antisense oligonucleotide
  modified_base 1..2: mod_base = OTHER; note = bicyclic nucleic acid (BNA)
  modified_base 10..11: mod_base = OTHER; note = bicyclic nucleic acid (BNA)
  source 1..11: mol_type = other DNA
gtaagttctgt

SEQ ID NO: 8099 - DNA, 10 bp, synthetic construct
  misc_feature 1..10: note = Description of Artificial Sequence: Synthetic Antisense oligonucleotide
  modified_base 1..2: mod_base = OTHER; note = bicyclic nucleic acid (BNA)
  modified_base 9..10: mod_base = OTHER; note = bicyclic nucleic acid (BNA)
  source 1..10: mol_type = other DNA
gtaagttctg

SEQ ID NO: 8100-8101 - skipped (2 entries)

SEQ ID NO: 8102 - DNA, 20 bp, synthetic construct
  misc_feature 1..20: note = Description of Artificial Sequence: Synthetic Antisense oligonucleotide
  modified_base 1..2: mod_base = OTHER; note = bicyclic nucleic acid (BNA)
  modified_base 19..20: mod_base = OTHER; note = bicyclic nucleic acid (BNA)
  source 1..20: mol_type = other DNA
ggtaagttctgtccaagccc

SEQ ID NO: 8103 - DNA, 19 bp, synthetic construct
  misc_feature 1..19: note = Description of Artificial Sequence: Synthetic Antisense oligonucleotide
  modified_base 1..2: mod_base = OTHER; note = bicyclic nucleic acid (BNA)
  modified_base 18..19: mod_base = OTHER; note = bicyclic nucleic acid (BNA)
  source 1..19: mol_type = other DNA
ggtaagttctgtccaagcc

SEQ ID NO: 8104 - DNA, 17 bp, synthetic construct
  misc_feature 1..17: note = Description of Artificial Sequence: Synthetic Antisense oligonucleotide
  modified_base 1..2: mod_base = OTHER; note = bicyclic nucleic acid (BNA)
  modified_base 16..17: mod_base = OTHER; note = bicyclic nucleic acid (BNA)
  source 1..17: mol_type = other DNA
ggtaagttctgtccaag

SEQ ID NO: 8105 - DNA, 16 bp, synthetic construct
  misc_feature 1..16: note = Description of Artificial Sequence: Synthetic Antisense oligonucleotide
  modified_base 1..2: mod_base = OTHER; note = bicyclic nucleic acid (BNA)
  modified_base 15..16: mod_base = OTHER; note = bicyclic nucleic acid (BNA)
  source 1..16: mol_type = other DNA
ggtaagttctgtccaa

SEQ ID NO: 8106 - DNA, 15 bp, synthetic construct
  misc_feature 1..15: note = Description of Artificial Sequence: Synthetic Antisense oligonucleotide
  modified_base 1..2: mod_base = OTHER; note = bicyclic nucleic acid (BNA)
  modified_base 14..15: mod_base = OTHER; note = bicyclic nucleic acid (BNA)
  source 1..15: mol_type = other DNA
ggtaagttctgtcca

SEQ ID NO: 8107 - DNA, 14 bp, synthetic construct
  misc_feature 1..14: note = Description of Artificial Sequence: Synthetic Antisense oligonucleotide
  modified_base 1..2: mod_base = OTHER; note = bicyclic nucleic acid (BNA)
  modified_base 13..14: mod_base = OTHER; note = bicyclic nucleic acid (BNA)
  source 1..14: mol_type = other DNA
ggtaagttctgtcc

SEQ ID NO: 8108 - DNA, 13 bp, synthetic construct
  misc_feature 1..13: note = Description of Artificial Sequence: Synthetic Antisense oligonucleotide
  modified_base 1..2: mod_base = OTHER; note = bicyclic nucleic acid (BNA)
  modified_base 12..13: mod_base = OTHER; note = bicyclic nucleic acid (BNA)
  source 1..13: mol_type = other DNA
ggtaagttctgtc

SEQ ID NO: 8109 - DNA, 12 bp, synthetic construct
  misc_feature 1..12: note = Description of Artificial Sequence: Synthetic Antisense oligonucleotide
  modified_base 1..2: mod_base = OTHER; note = bicyclic nucleic acid (BNA)
  modified_base 11..12: mod_base = OTHER; note = bicyclic nucleic acid (BNA)
  source 1..12: mol_type = other DNA
ggtaagttctgt

SEQ ID NO: 8110 - DNA, 11 bp, synthetic construct
  misc_feature 1..11: note = Description of Artificial Sequence: Synthetic Antisense oligonucleotide
  modified_base 1..2: mod_base = OTHER; note = bicyclic nucleic acid (BNA)
  modified_base 10..11: mod_base = OTHER; note = bicyclic nucleic acid (BNA)
  source 1..11: mol_type = other DNA
ggtaagttctg

SEQ ID NO: 8111 - DNA, 10 bp, synthetic construct
  misc_feature 1..10: note = Description of Artificial Sequence: Synthetic Antisense oligonucleotide
  modified_base 1..2: mod_base = OTHER; note = bicyclic nucleic acid (BNA)
  modified_base 9..10: mod_base = OTHER; note = bicyclic nucleic acid (BNA)
  source 1..10: mol_type = other DNA
ggtaagttct

SEQ ID NO: 8112-8113 - skipped (2 entries)

SEQ ID NO: 8114 - DNA, 20 bp, synthetic construct
  misc_feature 1..20: note = Description of Artificial Sequence: Synthetic Antisense oligonucleotide
  modified_base 1..2: mod_base = OTHER; note = bicyclic nucleic acid (BNA)
  modified_base 19..20: mod_base = OTHER; note = bicyclic nucleic acid (BNA)
  source 1..20: mol_type = other DNA
cggtaagttctgtccaagcc

SEQ ID NO: 8115 - DNA, 19 bp, synthetic construct
  misc_feature 1..19: note = Description of Artificial Sequence: Synthetic Antisense oligonucleotide
  modified_base 1..2: mod_base = OTHER; note = bicyclic nucleic acid (BNA)
  modified_base 18..19: mod_base = OTHER; note = bicyclic nucleic acid (BNA)
  source 1..19: mol_type = other DNA
cggtaagttctgtccaagc

SEQ ID NO: 8116 - DNA, 18 bp, synthetic construct
  misc_feature 1..18: note = Description of Artificial Sequence: Synthetic Antisense oligonucleotide
  modified_base 1..2: mod_base = OTHER; note = bicyclic nucleic acid (BNA)
  modified_base 17..18: mod_base = OTHER; note = bicyclic nucleic acid (BNA)
  source 1..18: mol_type = other DNA
cggtaagttctgtccaag

SEQ ID NO: 8117 - DNA, 17 bp, synthetic construct
  misc_feature 1..17: note = Description of Artificial Sequence: Synthetic Antisense oligonucleotide
  modified_base 1..2: mod_base = OTHER; note = bicyclic nucleic acid (BNA)
  modified_base 16..17: mod_base = OTHER; note = bicyclic nucleic acid (BNA)
  source 1..17: mol_type = other DNA
cggtaagttctgtccaa

SEQ ID NO: 8118 - DNA, 16 bp, synthetic construct
  misc_feature 1..16: note = Description of Artificial Sequence: Synthetic Antisense oligonucleotide
  modified_base 1..2: mod_base = OTHER; note = bicyclic nucleic acid (BNA)
  modified_base 15..16: mod_base = OTHER; note = bicyclic nucleic acid (BNA)
  source 1..16: mol_type = other DNA
cggtaagttctgtcca

SEQ ID NO: 8119 - DNA, 15 bp, synthetic construct
  misc_feature 1..15: note = Description of Artificial Sequence: Synthetic Antisense oligonucleotide
  modified_base 1..2: mod_base = OTHER; note = bicyclic nucleic acid (BNA)
  modified_base 14..15: mod_base = OTHER; note = bicyclic nucleic acid (BNA)
  source 1..15: mol_type = other DNA
cggtaagttctgtcc

SEQ ID NO: 8120 - DNA, 14 bp, synthetic construct
  misc_feature 1..14: note = Description of Artificial Sequence: Synthetic Antisense oligonucleotide
  modified_base 1..2: mod_base = OTHER; note = bicyclic nucleic acid (BNA)
  modified_base 13..14: mod_base = OTHER; note = bicyclic nucleic acid (BNA)
  source 1..14: mol_type = other DNA
cggtaagttctgtc

SEQ ID NO: 8121 - DNA, 13 bp, synthetic construct
  misc_feature 1..13: note = Description of Artificial Sequence: Synthetic Antisense oligonucleotide
  modified_base 1..2: mod_base = OTHER; note = bicyclic nucleic acid (BNA)
  modified_base 12..13: mod_base = OTHER; note = bicyclic nucleic acid (BNA)
  source 1..13: mol_type = other DNA
cggtaagttctgt

SEQ ID NO: 8122 - DNA, 12 bp, synthetic construct
  misc_feature 1..12: note = Description of Artificial Sequence: Synthetic Antisense oligonucleotide
  modified_base 1..2: mod_base = OTHER; note = bicyclic nucleic acid (BNA)
  modified_base 11..12: mod_base = OTHER; note = bicyclic nucleic acid (BNA)
  source 1..12: mol_type = other DNA
cggtaagttctg

SEQ ID NO: 8123 - DNA, 11 bp, synthetic construct
  misc_feature 1..11: note = Description of Artificial Sequence: Synthetic Antisense oligonucleotide
  modified_base 1..2: mod_base = OTHER; note = bicyclic nucleic acid (BNA)
  modified_base 10..11: mod_base = OTHER; note = bicyclic nucleic acid (BNA)
  source 1..11: mol_type = other DNA
cggtaagttct

SEQ ID NO: 8124 - DNA, 10 bp, synthetic construct
  misc_feature 1..10: note = Description of Artificial Sequence: Synthetic Antisense oligonucleotide
  modified_base 1..2: mod_base = OTHER; note = bicyclic nucleic acid (BNA)
  modified_base 9..10: mod_base = OTHER; note = bicyclic nucleic acid (BNA)
  source 1..10: mol_type = other DNA
cggtaagttc

SEQ ID NO: 8125-8126 - skipped (2 entries)

SEQ ID NO: 8127 - DNA, 20 bp, synthetic construct
  misc_feature 1..20: note = Description of Artificial Sequence: Synthetic Antisense oligonucleotide
  modified_base 1..2: mod_base = OTHER; note = bicyclic nucleic acid (BNA)
  modified_base 19..20: mod_base = OTHER; note = bicyclic nucleic acid (BNA)
  source 1..20: mol_type = other DNA
tcggtaagttctgtccaagc

SEQ ID NO: 8128 - DNA, 19 bp, synthetic construct
  misc_feature 1..19: note = Description of Artificial Sequence: Synthetic Antisense oligonucleotide
  modified_base 1..2: mod_base = OTHER; note = bicyclic nucleic acid (BNA)
  modified_base 18..19: mod_base = OTHER; note = bicyclic nucleic acid (BNA)
  source 1..19: mol_type = other DNA
tcggtaagttctgtccaag

SEQ ID NO: 8129 - DNA, 18 bp, synthetic construct
  misc_feature 1..18: note = Description of Artificial Sequence: Synthetic Antisense oligonucleotide
  modified_base 1..2: mod_base = OTHER; note = bicyclic nucleic acid (BNA)
  modified_base 17..18: mod_base = OTHER; note = bicyclic nucleic acid (BNA)
  source 1..18: mol_type = other DNA
tcggtaagttctgtccaa

SEQ ID NO: 8130 - DNA, 17 bp, synthetic construct
  misc_feature 1..17: note = Description of Artificial Sequence: Synthetic Antisense oligonucleotide
  modified_base 1..2: mod_base = OTHER; note = bicyclic nucleic acid (BNA)
  modified_base 16..17: mod_base = OTHER; note = bicyclic nucleic acid (BNA)
  source 1..17: mol_type = other DNA
tcggtaagttctgtcca

SEQ ID NO: 8131 - DNA, 16 bp, synthetic construct
  misc_feature 1..16: note = Description of Artificial Sequence: Synthetic Antisense oligonucleotide
  modified_base 1..2: mod_base = OTHER; note = bicyclic nucleic acid (BNA)
  modified_base 15..16: mod_base = OTHER; note = bicyclic nucleic acid (BNA)
  source 1..16: mol_type = other DNA
tcggtaagttctgtcc

SEQ ID NO: 8132 - DNA, 15 bp, synthetic construct
  misc_feature 1..15: note = Description of Artificial Sequence: Synthetic Antisense oligonucleotide
  modified_base 1..2: mod_base = OTHER; note = bicyclic nucleic acid (BNA)
  modified_base 14..15: mod_base = OTHER; note = bicyclic nucleic acid (BNA)
  source 1..15: mol_type = other DNA
tcggtaagttctgtc

SEQ ID NO: 8133 - DNA, 14 bp, synthetic construct
  misc_feature 1..14: note = Description of Artificial Sequence: Synthetic Antisense oligonucleotide
  modified_base 1..2: mod_base = OTHER; note = bicyclic nucleic acid (BNA)
  modified_base 13..14: mod_base = OTHER; note = bicyclic nucleic acid (BNA)
  source 1..14: mol_type = other DNA
tcggtaagttctgt

SEQ ID NO: 8134 - DNA, 13 bp, synthetic construct
  misc_feature 1..13: note = Description of Artificial Sequence: Synthetic Antisense oligonucleotide
  modified_base 1..2: mod_base = OTHER; note = bicyclic nucleic acid (BNA)
  modified_base 12..13: mod_base = OTHER; note = bicyclic nucleic acid (BNA)
  source 1..13: mol_type = other DNA
tcggtaagttctg

SEQ ID NO: 8135 - DNA, 12 bp, synthetic construct
  misc_feature 1..12: note = Description of Artificial Sequence: Synthetic Antisense oligonucleotide
  modified_base 1..2: mod_base = OTHER; note = bicyclic nucleic acid (BNA)
  modified_base 11..12: mod_base = OTHER; note = bicyclic nucleic acid (BNA)
  source 1..12: mol_type = other DNA
tcggtaagttct

SEQ ID NO: 8136 - DNA, 11 bp, synthetic construct
  misc_feature 1..11: note = Description of Artificial Sequence: Synthetic Antisense oligonucleotide
  modified_base 1..2: mod_base = OTHER; note = bicyclic nucleic acid (BNA)
  modified_base 10..11: mod_base = OTHER; note = bicyclic nucleic acid (BNA)
  source 1..11: mol_type = other DNA
tcggtaagttc

SEQ ID NO: 8137 - DNA, 10 bp, synthetic construct
  misc_feature 1..10: note = Description of Artificial Sequence: Synthetic Antisense oligonucleotide
  modified_base 1..2: mod_base = OTHER; note = bicyclic nucleic acid (BNA)
  modified_base 9..10: mod_base = OTHER; note = bicyclic nucleic acid (BNA)
  source 1..10: mol_type = other DNA
tcggtaagtt

SEQ ID NO: 8138 - skipped

SEQ ID NO: 8139 - DNA, 20 bp, synthetic construct
  misc_feature 1..20: note = Description of Artificial Sequence: Synthetic Antisense oligonucleotide
  modified_base 1..2: mod_base = OTHER; note = bicyclic nucleic acid (BNA)
  modified_base 19..20: mod_base = OTHER; note = bicyclic nucleic acid (BNA)
  source 1..20: mol_type = other DNA
gtcggtaagttctgtccaag

SEQ ID NO: 8140 - DNA, 19 bp, synthetic construct
  misc_feature 1..19: note = Description of Artificial Sequence: Synthetic Antisense oligonucleotide
  modified_base 1..2: mod_base = OTHER; note = bicyclic nucleic acid (BNA)
  modified_base 18..19: mod_base = OTHER; note = bicyclic nucleic acid (BNA)
  source 1..19: mol_type = other DNA
gtcggtaagttctgtccaa

SEQ ID NO: 8141 - DNA, 18 bp, synthetic construct
  misc_feature 1..18: note = Description of Artificial Sequence: Synthetic Antisense oligonucleotide
  modified_base 1..2: mod_base = OTHER; note = bicyclic nucleic acid (BNA)
  modified_base 17..18: mod_base = OTHER; note = bicyclic nucleic acid (BNA)
  source 1..18: mol_type = other DNA
gtcggtaagttctgtcca

SEQ ID NO: 8142 - DNA, 17 bp, synthetic construct
  misc_feature 1..17: note = Description of Artificial Sequence: Synthetic Antisense oligonucleotide
  modified_base 1..2: mod_base = OTHER; note = bicyclic nucleic acid (BNA)
  modified_base 16..17: mod_base = OTHER; note = bicyclic nucleic acid (BNA)
  source 1..17: mol_type = other DNA
gtcggtaagttctgtcc

SEQ ID NO: 8143 - DNA, 16 bp, synthetic construct
  misc_feature 1..16: note = Description of Artificial Sequence: Synthetic Antisense oligonucleotide
  modified_base 1..2: mod_base = OTHER; note = bicyclic nucleic acid (BNA)
  modified_base 15..16: mod_base = OTHER; note = bicyclic nucleic acid (BNA)
  source 1..16: mol_type = other DNA
gtcggtaagttctgtc

SEQ ID NO: 8144 - DNA, 15 bp, synthetic construct
  misc_feature 1..15: note = Description of Artificial Sequence: Synthetic Antisense oligonucleotide
  modified_base 1..2: mod_base = OTHER; note = bicyclic nucleic acid (BNA)
  modified_base 14..15: mod_base = OTHER; note = bicyclic nucleic acid (BNA)
  source 1..15: mol_type = other DNA
gtcggtaagttctgt

SEQ ID NO: 8145 - DNA, 14 bp, synthetic construct
  misc_feature 1..14: note = Description of Artificial Sequence: Synthetic Antisense oligonucleotide
  modified_base 1..2: mod_base = OTHER; note = bicyclic nucleic acid (BNA)
  modified_base 13..14: mod_base = OTHER; note = bicyclic nucleic acid (BNA)
  source 1..14: mol_type = other DNA
gtcggtaagttctg

SEQ ID NO: 8146 - DNA, 13 bp, synthetic construct
  misc_feature 1..13: note = Description of Artificial Sequence: Synthetic Antisense oligonucleotide
  modified_base 1..2: mod_base = OTHER; note = bicyclic nucleic acid (BNA)
  modified_base 12..13: mod_base = OTHER; note = bicyclic nucleic acid (BNA)
  source 1..13: mol_type = other DNA
gtcggtaagttct

SEQ ID NO: 8147 - DNA, 12 bp, synthetic construct
  misc_feature 1..12: note = Description of Artificial Sequence: Synthetic Antisense oligonucleotide
  modified_base 1..2: mod_base = OTHER; note = bicyclic nucleic acid (BNA)
  modified_base 11..12: mod_base = OTHER; note = bicyclic nucleic acid (BNA)
  source 1..12: mol_type = other DNA
gtcggtaagttc

SEQ ID NO: 8148 - DNA, 11 bp, synthetic construct
  misc_feature 1..11: note = Description of Artificial Sequence: Synthetic Antisense oligonucleotide
  modified_base 1..2: mod_base = OTHER; note = bicyclic nucleic acid (BNA)
  modified_base 10..11: mod_base = OTHER; note = bicyclic nucleic acid (BNA)
  source 1..11: mol_type = other DNA
gtcggtaagtt

SEQ ID NO: 8149 - DNA, 10 bp, synthetic construct
  misc_feature 1..10: note = Description of Artificial Sequence: Synthetic Antisense oligonucleotide
  modified_base 1..2: mod_base = OTHER; note = bicyclic nucleic acid (BNA)
  modified_base 9..10: mod_base = OTHER; note = bicyclic nucleic acid (BNA)
  source 1..10: mol_type = other DNA
gtcggtaagt

SEQ ID NO: 8150 - DNA, 20 bp, synthetic construct
  misc_feature 1..20: note = Description of Artificial Sequence: Synthetic Antisense oligonucleotide
  modified_base 1..2: mod_base = OTHER; note = bicyclic nucleic acid (BNA)
  modified_base 19..20: mod_base = OTHER; note = bicyclic nucleic acid (BNA)
  source 1..20: mol_type = other DNA
agtcggtaagttctgtccaa

SEQ ID NO: 8151 - DNA, 19 bp, synthetic construct
  misc_feature 1..19: note = Description of Artificial Sequence: Synthetic Antisense oligonucleotide
  modified_base 1..2: mod_base = OTHER; note = bicyclic nucleic acid (BNA)
  modified_base 18..19: mod_base = OTHER; note = bicyclic nucleic acid (BNA)
  source 1..19: mol_type = other DNA
agtcggtaagttctgtcca

SEQ ID NO: 8152 - DNA, 17 bp, synthetic construct
  misc_feature 1..17: note = Description of Artificial Sequence: Synthetic Antisense oligonucleotide
  modified_base 1..2: mod_base = OTHER; note = bicyclic nucleic acid (BNA)
  modified_base 16..17: mod_base = OTHER; note = bicyclic nucleic acid (BNA)
  source 1..17: mol_type = other DNA
agtcggtaagttctgtc

SEQ ID NO: 8153 - DNA, 16 bp, synthetic construct
  misc_feature 1..16: note = Description of Artificial Sequence: Synthetic Antisense oligonucleotide
  modified_base 1..2: mod_base = OTHER; note = bicyclic nucleic acid (BNA)
  modified_base 15..16: mod_base = OTHER; note = bicyclic nucleic acid (BNA)
  source 1..16: mol_type = other DNA
agtcggtaagttctgt

SEQ ID NO: 8154 - DNA, 15 bp, synthetic construct
  misc_feature 1..15: note = Description of Artificial Sequence: Synthetic Antisense oligonucleotide
  modified_base 1..2: mod_base = OTHER; note = bicyclic nucleic acid (BNA)
  modified_base 14..15: mod_base = OTHER; note = bicyclic nucleic acid (BNA)
  source 1..15: mol_type = other DNA
agtcggtaagttctg

SEQ ID NO: 8155 - DNA, 14 bp, synthetic construct
  misc_feature 1..14: note = Description of Artificial Sequence: Synthetic Antisense oligonucleotide
  modified_base 1..2: mod_base = OTHER; note = bicyclic nucleic acid (BNA)
  modified_base 13..14: mod_base = OTHER; note = bicyclic nucleic acid (BNA)
  source 1..14: mol_type = other DNA
agtcggtaagttct

SEQ ID NO: 8156 - DNA, 13 bp, synthetic construct
  misc_feature 1..13: note = Description of Artificial Sequence: Synthetic Antisense oligonucleotide
  modified_base 1..2: mod_base = OTHER; note = bicyclic nucleic acid (BNA)
  modified_base 12..13: mod_base = OTHER; note = bicyclic nucleic acid (BNA)
  source 1..13: mol_type = other DNA
agtcggtaagttc

SEQ ID NO: 8157 - DNA, 12 bp, synthetic construct
  misc_feature 1..12: note = Description of Artificial Sequence: Synthetic Antisense oligonucleotide
  modified_base 1..2: mod_base = OTHER; note = bicyclic nucleic acid (BNA)
  modified_base 11..12: mod_base = OTHER; note = bicyclic nucleic acid (BNA)
  source 1..12: mol_type = other DNA
agtcggtaagtt

SEQ ID NO: 8158 - DNA, 11 bp, synthetic construct
  misc_feature 1..11: note = Description of Artificial Sequence: Synthetic Antisense oligonucleotide
  modified_base 1..2: mod_base = OTHER; note = bicyclic nucleic acid (BNA)
  modified_base 10..11: mod_base = OTHER; note = bicyclic nucleic acid (BNA)
  source 1..11: mol_type = other DNA
agtcggtaagt

SEQ ID NO: 8159 - DNA, 20 bp, synthetic construct
  misc_feature 1..20: note = Description of Artificial Sequence: Synthetic Antisense oligonucleotide
  modified_base 1..2: mod_base = OTHER; note = bicyclic nucleic acid (BNA)
  modified_base 19..20: mod_base = OTHER; note = bicyclic nucleic acid (BNA)
  source 1..20: mol_type = other DNA
cagtcggtaagttctgtcca

SEQ ID NO: 8160 - DNA, 19 bp, synthetic construct
  misc_feature 1..19: note = Description of Artificial Sequence: Synthetic Antisense oligonucleotide
  modified_base 1..2: mod_base = OTHER; note = bicyclic nucleic acid (BNA)
  modified_base 18..19: mod_base = OTHER; note = bicyclic nucleic acid (BNA)
  source 1..19: mol_type = other DNA
cagtcggtaagttctgtcc

SEQ ID NO: 8161 - DNA, 18 bp, synthetic construct
  misc_feature 1..18: note = Description of Artificial Sequence: Synthetic Antisense oligonucleotide
  modified_base 1..2: mod_base = OTHER; note = bicyclic nucleic acid (BNA)
  modified_base 17..18: mod_base = OTHER; note = bicyclic nucleic acid (BNA)
  source 1..18: mol_type = other DNA
cagtcggtaagttctgtc

SEQ ID NO: 8162 - DNA, 17 bp, synthetic construct
  misc_feature 1..17: note = Description of Artificial Sequence: Synthetic Antisense oligonucleotide
  modified_base 1..2: mod_base = OTHER; note = bicyclic nucleic acid (BNA)
  modified_base 16..17: mod_base = OTHER; note = bicyclic nucleic acid (BNA)
  source 1..17: mol_type = other DNA
cagtcggtaagttctgt

SEQ ID NO: 8163 - DNA, 16 bp, synthetic construct
  misc_feature 1..16: note = Description of Artificial Sequence: Synthetic Antisense oligonucleotide
  modified_base 1..2: mod_base = OTHER; note = bicyclic nucleic acid (BNA)
  modified_base 15..16: mod_base = OTHER; note = bicyclic nucleic acid (BNA)
  source 1..16: mol_type = other DNA
cagtcggtaagttctg

SEQ ID NO: 8164 - DNA, 15 bp, synthetic construct
  misc_feature 1..15: note = Description of Artificial Sequence: Synthetic Antisense oligonucleotide
  modified_base 1..2: mod_base = OTHER; note = bicyclic nucleic acid (BNA)
  modified_base 14..15: mod_base = OTHER; note = bicyclic nucleic acid (BNA)
  source 1..15: mol_type = other DNA
cagtcggtaagttct

SEQ ID NO: 8165 - DNA, 14 bp, synthetic construct
  misc_feature 1..14: note = Description of Artificial Sequence: Synthetic Antisense oligonucleotide
  modified_base 1..2: mod_base = OTHER; note = bicyclic nucleic acid (BNA)
  modified_base 13..14: mod_base = OTHER; note = bicyclic nucleic acid (BNA)
  source 1..14: mol_type = other DNA
cagtcggtaagttc

SEQ ID NO: 8166 - DNA, 13 bp, synthetic construct
  misc_feature 1..13: note = Description of Artificial Sequence: Synthetic Antisense oligonucleotide
  modified_base 1..2: mod_base = OTHER; note = bicyclic nucleic acid (BNA)
  modified_base 12..13: mod_base = OTHER; note = bicyclic nucleic acid (BNA)
  source 1..13: mol_type = other DNA
cagtcggtaagtt

SEQ ID NO: 8167 - DNA, 12 bp, synthetic construct
  misc_feature 1..12: note = Description of Artificial Sequence: Synthetic Antisense oligonucleotide
  modified_base 1..2: mod_base = OTHER; note = bicyclic nucleic acid (BNA)
  modified_base 11..12: mod_base = OTHER; note = bicyclic nucleic acid (BNA)
  source 1..12: mol_type = other DNA
cagtcggtaagt

SEQ ID NO: 8168 - DNA, 20 bp, synthetic construct
  misc_feature 1..20: note = Description of Artificial Sequence: Synthetic Antisense oligonucleotide
  modified_base 1..2: mod_base = OTHER; note = bicyclic nucleic acid (BNA)
  modified_base 19..20: mod_base = OTHER; note = bicyclic nucleic acid (BNA)
  source 1..20: mol_type = other DNA
ccagtcggtaagttctgtcc

SEQ ID NO: 8169 - DNA, 19 bp, synthetic construct
  misc_feature 1..19: note = Description of Artificial Sequence: Synthetic Antisense oligonucleotide
  modified_base 1..2: mod_base = OTHER; note = bicyclic nucleic acid (BNA)
  modified_base 18..19: mod_base = OTHER; note = bicyclic nucleic acid (BNA)
  source 1..19: mol_type = other DNA
ccagtcggtaagttctgtc

SEQ ID NO: 8170 - DNA, 18 bp, synthetic construct
  misc_feature 1..18: note = Description of Artificial Sequence: Synthetic Antisense oligonucleotide
  modified_base 1..2: mod_base = OTHER; note = bicyclic nucleic acid (BNA)
  modified_base 17..18: mod_base = OTHER; note = bicyclic nucleic acid (BNA)
  source 1..18: mol_type = other DNA
ccagtcggtaagttctgt

SEQ ID NO: 8171 - DNA, 17 bp, synthetic construct
  misc_feature 1..17: note = Description of Artificial Sequence: Synthetic Antisense oligonucleotide
  modified_base 1..2: mod_base = OTHER; note = bicyclic nucleic acid (BNA)
  modified_base 16..17: mod_base = OTHER; note = bicyclic nucleic acid (BNA)
  source 1..17: mol_type = other DNA
ccagtcggtaagttctg

SEQ ID NO: 8172 - DNA, 16 bp, synthetic construct
  misc_feature 1..16: note = Description of Artificial Sequence: Synthetic Antisense oligonucleotide
  modified_base 1..2: mod_base = OTHER; note = bicyclic nucleic acid (BNA)
  modified_base 15..16: mod_base = OTHER; note = bicyclic nucleic acid (BNA)
  source 1..16: mol_type = other DNA
ccagtcggtaagttct

SEQ ID NO: 8173 - DNA, 15 bp, synthetic construct
  misc_feature 1..15: note = Description of Artificial Sequence: Synthetic Antisense oligonucleotide
  modified_base 1..2: mod_base = OTHER; note = bicyclic nucleic acid (BNA)
  modified_base 14..15: mod_base = OTHER; note = bicyclic nucleic acid (BNA)
  source 1..15: mol_type = other DNA
ccagtcggtaagttc

SEQ ID NO: 8174 - DNA, 14 bp, synthetic construct
  misc_feature 1..14: note = Description of Artificial Sequence: Synthetic Antisense oligonucleotide
  modified_base 1..2: mod_base = OTHER; note = bicyclic nucleic acid (BNA)
  modified_base 13..14: mod_base = OTHER; note = bicyclic nucleic acid (BNA)
  source 1..14: mol_type = other DNA
ccagtcggtaagtt

SEQ ID NO: 8175 - DNA, 13 bp, synthetic construct
  misc_feature 1..13: note = Description of Artificial Sequence: Synthetic Antisense oligonucleotide
  modified_base 1..2: mod_base = OTHER; note = bicyclic nucleic acid (BNA)
  modified_base 12..13: mod_base = OTHER; note = bicyclic nucleic acid (BNA)
  source 1..13: mol_type = other DNA
ccagtcggtaagt

SEQ ID NO: 8176 - DNA, 20 bp, synthetic construct
  misc_feature 1..20: note = Description of Artificial Sequence: Synthetic Antisense oligonucleotide
  modified_base 1..2: mod_base = OTHER; note = bicyclic nucleic acid (BNA)
  modified_base 19..20: mod_base = OTHER; note = bicyclic nucleic acid (BNA)
  source 1..20: mol_type = other DNA
gccagtcggtaagttctgtc

SEQ ID NO: 8177 - DNA, 19 bp, synthetic construct
  misc_feature 1..19: note = Description of Artificial Sequence: Synthetic Antisense oligonucleotide
  modified_base 1..2: mod_base = OTHER; note = bicyclic nucleic acid (BNA)
  modified_base 18..19: mod_base = OTHER; note = bicyclic nucleic acid (BNA)
  source 1..19: mol_type = other DNA
gccagtcggtaagttctgt

SEQ ID NO: 8178 - DNA, 18 bp, synthetic construct
  misc_feature 1..18: note = Description of Artificial Sequence: Synthetic Antisense oligonucleotide
  modified_base 1..2: mod_base = OTHER; note = bicyclic nucleic acid (BNA)
  modified_base 17..18: mod_base = OTHER; note = bicyclic nucleic acid (BNA)
  source 1..18: mol_type = other DNA
gccagtcggtaagttctg

SEQ ID NO: 8179 - DNA, 17 bp, synthetic construct
  misc_feature 1..17: note = Description of Artificial Sequence: Synthetic Antisense oligonucleotide
  modified_base 1..2: mod_base = OTHER; note = bicyclic nucleic acid (BNA)
  modified_base 16..17: mod_base = OTHER; note = bicyclic nucleic acid (BNA)
  source 1..17: mol_type = other DNA
gccagtcggtaagttct

SEQ ID NO: 8180 - DNA, 16 bp, synthetic construct
  misc_feature 1..16: note = Description of Artificial Sequence: Synthetic Antisense oligonucleotide
  modified_base 1..2: mod_base = OTHER; note = bicyclic nucleic acid (BNA)
  modified_base 15..16: mod_base = OTHER; note = bicyclic nucleic acid (BNA)
  source 1..16: mol_type = other DNA
gccagtcggtaagttc

SEQ ID NO: 8181 - DNA, 15 bp, synthetic construct
  misc_feature 1..15: note = Description of Artificial Sequence: Synthetic Antisense oligonucleotide
  modified_base 1..2: mod_base = OTHER; note = bicyclic nucleic acid (BNA)
  modified_base 14..15: mod_base = OTHER; note = bicyclic nucleic acid (BNA)
  source 1..15: mol_type = other DNA
gccagtcggtaagtt

SEQ ID NO: 8182 - DNA, 14 bp, synthetic construct
  misc_feature 1..14: note = Description of Artificial Sequence: Synthetic Antisense oligonucleotide
  modified_base 1..2: mod_base = OTHER; note = bicyclic nucleic acid (BNA)
  modified_base 13..14: mod_base = OTHER; note = bicyclic nucleic acid (BNA)
  source 1..14: mol_type = other DNA
gccagtcggtaagt

SEQ ID NO: 8183 - DNA, 20 bp, synthetic construct
  misc_feature 1..20: note = Description of Artificial Sequence: Synthetic Antisense oligonucleotide
  modified_base 1..2: mod_base = OTHER; note = bicyclic nucleic acid (BNA)
  modified_base 19..20: mod_base = OTHER; note = bicyclic nucleic acid (BNA)
  source 1..20: mol_type = other DNA
tcaaggaagatggcatttct

SEQ ID NO: 8184 - DNA, 22 bp, synthetic construct
  misc_feature 1..22: note = Description of Artificial Sequence: Synthetic Antisense oligonucleotide
  modified_base 1..2: mod_base = OTHER; note = bicyclic nucleic acid (BNA)
  modified_base 21..22: mod_base = OTHER; note = bicyclic nucleic acid (BNA)
  source 1..22: mol_type = other DNA
tcaaggaagatggcatttctag

SEQ ID NO: 8185 - DNA, 16 bp, synthetic construct
  misc_feature 1..16: note = Description of Artificial Sequence: Synthetic Antisense oligonucleotide
  modified_base 1..2: mod_base = OTHER; note = bicyclic nucleic acid (BNA)
  modified_base 15..16: mod_base = OTHER; note = bicyclic nucleic acid (BNA)
  source 1..16: mol_type = other DNA
tcaaggaagatggcat

SEQ ID NO: 8186 - DNA, 15 bp, synthetic construct
  misc_feature 1..15: note = Description of Artificial Sequence: Synthetic Antisense oligonucleotide
  modified_base 1..2: mod_base = OTHER; note = bicyclic nucleic acid (BNA)
  modified_base 14..15: mod_base = OTHER; note = bicyclic nucleic acid (BNA)
  source 1..15: mol_type = other DNA
gaagatggcatttct

SEQ ID NO: 8187 - DNA, 21 bp, synthetic construct
  misc_feature 1..21: note = Description of Artificial Sequence: Synthetic Antisense oligonucleotide
  modified_base 1..2: mod_base = OTHER; note = bicyclic nucleic acid (BNA)
  modified_base 20..21: mod_base = OTHER; note = bicyclic nucleic acid (BNA)
  source 1..21: mol_type = other DNA
tcaaggaagatggcatttcta

SEQ ID NO: 8188 - DNA, 19 bp, synthetic construct
  misc_feature 1..19: note = Description of Artificial Sequence: Synthetic Antisense oligonucleotide
  modified_base 1..2: mod_base = OTHER; note = bicyclic nucleic acid (BNA)
  modified_base 18..19: mod_base = OTHER; note = bicyclic nucleic acid (BNA)
  source 1..19: mol_type = other DNA
tcaaggaagatggcatttc

SEQ ID NO: 8189 - DNA, 18 bp, synthetic construct
  misc_feature 1..18: note = Description of Artificial Sequence: Synthetic Antisense oligonucleotide
  modified_base 1..2: mod_base = OTHER; note = bicyclic nucleic acid (BNA)
  modified_base 17..18: mod_base = OTHER; note = bicyclic nucleic acid (BNA)
  source 1..18: mol_type = other DNA
tcaaggaagatggcattt

SEQ ID NO: 8190 - DNA, 17 bp, synthetic construct
  misc_feature 1..17: note = Description of Artificial Sequence: Synthetic Antisense oligonucleotide
  modified_base 1..2: mod_base = OTHER; note = bicyclic nucleic acid (BNA)
  modified_base 16..17: mod_base = OTHER; note = bicyclic nucleic acid (BNA)
  source 1..17: mol_type = other DNA
tcaaggaagatggcatt

SEQ ID NO: 8191 - DNA, 15 bp, synthetic construct
  misc_feature 1..15: note = Description of Artificial Sequence: Synthetic Antisense oligonucleotide
  modified_base 1..2: mod_base = OTHER; note = bicyclic nucleic acid (BNA)
  modified_base 14..15: mod_base = OTHER; note = bicyclic nucleic acid (BNA)
  source 1..15: mol_type = other DNA
tcaaggaagatggca

SEQ ID NO: 8192 - DNA, 14 bp, synthetic construct
  misc_feature 1..14: note = Description of Artificial Sequence: Synthetic Antisense oligonucleotide
  modified_base 1..2: mod_base = OTHER; note = bicyclic nucleic acid (BNA)
  modified_base 13..14: mod_base = OTHER; note = bicyclic nucleic acid (BNA)
  source 1..14: mol_type = other DNA
tcaaggaagatggc

SEQ ID NO: 8193 - DNA, 13 bp, synthetic construct
  misc_feature 1..13: note = Description of Artificial Sequence: Synthetic Antisense oligonucleotide
  modified_base 1..2: mod_base = OTHER; note = bicyclic nucleic acid (BNA)
  modified_base 12..13: mod_base = OTHER; note = bicyclic nucleic acid (BNA)
  source 1..13: mol_type = other DNA
tcaaggaagatgg

SEQ ID NO: 8194 - DNA, 12 bp, synthetic construct
  misc_feature 1..12: note = Description of Artificial Sequence: Synthetic Antisense oligonucleotide
  modified_base 1..2: mod_base = OTHER; note = bicyclic nucleic acid (BNA)
  modified_base 11..12: mod_base = OTHER; note = bicyclic nucleic acid (BNA)
  source 1..12: mol_type = other DNA
tcaaggaagatg

SEQ ID NO: 8195 - DNA, 11 bp, synthetic construct
  misc_feature 1..11: note = Description of Artificial Sequence: Synthetic Antisense oligonucleotide
  modified_base 1..2: mod_base = OTHER; note = bicyclic nucleic acid (BNA)
  modified_base 10..11: mod_base = OTHER; note = bicyclic nucleic acid (BNA)
  source 1..11: mol_type = other DNA
tcaaggaagat

SEQ ID NO: 8196 - DNA, 10 bp, synthetic construct
  misc_feature 1..10: note = Description of Artificial Sequence: Synthetic Antisense oligonucleotide
  modified_base 1..2: mod_base = OTHER; note = bicyclic nucleic acid (BNA)
  modified_base 9..10: mod_base = OTHER; note = bicyclic nucleic acid (BNA)
  source 1..10: mol_type = other DNA
tcaaggaaga

SEQ ID NO: 8197 - skipped

SEQ ID NO: 8198 - DNA, 21 bp, synthetic construct
  misc_feature 1..21: note = Description of Artificial Sequence: Synthetic Antisense oligonucleotide
  modified_base 1..2: mod_base = OTHER; note = bicyclic nucleic acid (BNA)
  modified_base 20..21: mod_base = OTHER; note = bicyclic nucleic acid (BNA)
  source 1..21: mol_type = other DNA
caaggaagatggcatttctag

SEQ ID NO: 8199 - DNA, 20 bp, synthetic construct
  misc_feature 1..20: note = Description of Artificial Sequence: Synthetic Antisense oligonucleotide
  modified_base 1..2: mod_base = OTHER; note = bicyclic nucleic acid (BNA)
  modified_base 19..20: mod_base = OTHER; note = bicyclic nucleic acid (BNA)
  source 1..20: mol_type = other DNA
caaggaagatggcatttcta

SEQ ID NO: 8200 - DNA, 19 bp, synthetic construct
  misc_feature 1..19: note = Description of Artificial Sequence: Synthetic Antisense oligonucleotide
  modified_base 1..2: mod_base = OTHER; note = bicyclic nucleic acid (BNA)
  modified_base 18..19: mod_base = OTHER; note = bicyclic nucleic acid (BNA)
  source 1..19: mol_type = other DNA
caaggaagatggcatttct

SEQ ID NO: 8201 - DNA, 18 bp, synthetic construct
  misc_feature 1..18: note = Description of Artificial Sequence: Synthetic Antisense oligonucleotide
  modified_base 1..2: mod_base = OTHER; note = bicyclic nucleic acid (BNA)
  modified_base 17..18: mod_base = OTHER; note = bicyclic nucleic acid (BNA)
  source 1..18: mol_type = other DNA
caaggaagatggcatttc

SEQ ID NO: 8202 - DNA, 17 bp, synthetic construct
  misc_feature 1..17: note = Description of Artificial Sequence: Synthetic Antisense oligonucleotide
  modified_base 1..2: mod_base = OTHER; note = bicyclic nucleic acid (BNA)
  modified_base 16..17: mod_base = OTHER; note = bicyclic nucleic acid (BNA)
  source 1..17: mol_type = other DNA
caaggaagatggcattt

SEQ ID NO: 8203 - DNA, 16 bp, synthetic construct
  misc_feature 1..16: note = Description of Artificial Sequence: Synthetic Antisense oligonucleotide
  modified_base 1..2: mod_base = OTHER; note = bicyclic nucleic acid (BNA)
  modified_base 15..16: mod_base = OTHER; note = bicyclic nucleic acid (BNA)
  source 1..16: mol_type = other DNA
caaggaagatggcatt

SEQ ID NO: 8204 - DNA, 15 bp, synthetic construct
  misc_feature 1..15: note = Description of Artificial Sequence: Synthetic Antisense oligonucleotide
  modified_base 1..2: mod_base = OTHER; note = bicyclic nucleic acid (BNA)
  modified_base 14..15: mod_base = OTHER; note = bicyclic nucleic acid (BNA)
  source 1..15: mol_type = other DNA
caaggaagatggcat

SEQ ID NO: 8205 - DNA, 14 bp, synthetic construct
  misc_feature 1..14: note = Description of Artificial Sequence: Synthetic Antisense oligonucleotide
  modified_base 1..2: mod_base = OTHER; note = bicyclic nucleic acid (BNA)
  modified_base 13..14: mod_base = OTHER; note = bicyclic nucleic acid (BNA)
  source 1..14: mol_type = other DNA
caaggaagatggca

SEQ ID NO: 8206 - DNA, 13 bp, synthetic construct
  misc_feature 1..13: note = Description of Artificial Sequence: Synthetic Antisense oligonucleotide
  modified_base 1..2: mod_base = OTHER; note = bicyclic nucleic acid (BNA)
  modified_base 12..13: mod_base = OTHER; note = bicyclic nucleic acid (BNA)
  source 1..13: mol_type = other DNA
caaggaagatggc

SEQ ID NO: 8207 - DNA, 12 bp, synthetic construct
  misc_feature 1..12: note = Description of Artificial Sequence: Synthetic Antisense oligonucleotide
  modified_base 1..2: mod_base = OTHER; note = bicyclic nucleic acid (BNA)
  modified_base 11..12: mod_base = OTHER; note = bicyclic nucleic acid (BNA)
  source 1..12: mol_type = other DNA
caaggaagatgg

SEQ ID NO: 8208 - DNA, 11 bp, synthetic construct
  misc_feature 1..11: note = Description of Artificial Sequence: Synthetic Antisense oligonucleotide
  modified_base 1..2: mod_base = OTHER; note = bicyclic nucleic acid (BNA)
  modified_base 10..11: mod_base = OTHER; note = bicyclic nucleic acid (BNA)
  source 1..11: mol_type = other DNA
caaggaagatg

SEQ ID NO: 8209 - DNA, 10 bp, synthetic construct
  misc_feature 1..10: note = Description of Artificial Sequence: Synthetic Antisense oligonucleotide
  modified_base 1..2: mod_base = OTHER; note = bicyclic nucleic acid (BNA)
  modified_base 9..10: mod_base = OTHER; note = bicyclic nucleic acid (BNA)
  source 1..10: mol_type = other DNA
caaggaagat

SEQ ID NO: 8210 - DNA, 20 bp, synthetic construct
  misc_feature 1..20: note = Description of Artificial Sequence: Synthetic Antisense oligonucleotide
  modified_base 1..2: mod_base = OTHER; note = bicyclic nucleic acid (BNA)
  modified_base 19..20: mod_base = OTHER; note = bicyclic nucleic acid (BNA)
  source 1..20: mol_type = other DNA
aaggaagatggcatttctag

SEQ ID NO: 8211 - DNA, 19 bp, synthetic construct
  misc_feature 1..19: note = Description of Artificial Sequence: Synthetic Antisense oligonucleotide
  modified_base 1..2: mod_base = OTHER; note = bicyclic nucleic acid (BNA)
  modified_base 18..19: mod_base = OTHER; note = bicyclic nucleic acid (BNA)
  source 1..19: mol_type = other DNA
aaggaagatggcatttcta

SEQ ID NO: 8212 - DNA, 18 bp, synthetic construct
  misc_feature 1..18: note = Description of Artificial Sequence: Synthetic Antisense oligonucleotide
  modified_base 1..2: mod_base = OTHER; note = bicyclic nucleic acid (BNA)
  modified_base 17..18: mod_base = OTHER; note = bicyclic nucleic acid (BNA)
  source 1..18: mol_type = other DNA
aaggaagatggcatttct

SEQ ID NO: 8213 - DNA, 17 bp, synthetic construct
  misc_feature 1..17: note = Description of Artificial Sequence: Synthetic Antisense oligonucleotide
  modified_base 1..2: mod_base = OTHER; note = bicyclic nucleic acid (BNA)
  modified_base 16..17: mod_base = OTHER; note = bicyclic nucleic acid (BNA)
  source 1..17: mol_type = other DNA
aaggaagatggcatttc

SEQ ID NO: 8214 - DNA, 16 bp, synthetic construct
  misc_feature 1..16: note = Description of Artificial Sequence: Synthetic Antisense oligonucleotide
  modified_base 1..2: mod_base = OTHER; note = bicyclic nucleic acid (BNA)
  modified_base 15..16: mod_base = OTHER; note = bicyclic nucleic acid (BNA)
  source 1..16: mol_type = other DNA
aaggaagatggcattt

SEQ ID NO: 8215 - DNA, 15 bp, synthetic construct
  misc_feature 1..15: note = Description of Artificial Sequence: Synthetic Antisense oligonucleotide
  modified_base 1..2: mod_base = OTHER; note = bicyclic nucleic acid (BNA)
  modified_base 14..15: mod_base = OTHER; note = bicyclic nucleic acid (BNA)
  source 1..15: mol_type = other DNA
aaggaagatggcatt

SEQ ID NO: 8216 - DNA, 14 bp, synthetic construct
  misc_feature 1..14: note = Description of Artificial Sequence: Synthetic Antisense oligonucleotide
  modified_base 1..2: mod_base = OTHER; note = bicyclic nucleic acid (BNA)
  modified_base 13..14: mod_base = OTHER; note = bicyclic nucleic acid (BNA)
  source 1..14: mol_type = other DNA
aaggaagatggcat

SEQ ID NO: 8217 - DNA, 13 bp, synthetic construct
  misc_feature 1..13: note = Description of Artificial Sequence: Synthetic Antisense oligonucleotide
  modified_base 1..2: mod_base = OTHER; note = bicyclic nucleic acid (BNA)
  modified_base 12..13: mod_base = OTHER; note = bicyclic nucleic acid (BNA)
  source 1..13: mol_type = other DNA
aaggaagatggca

SEQ ID NO: 8218 - DNA, 12 bp, synthetic construct
  misc_feature 1..12: note = Description of Artificial Sequence: Synthetic Antisense oligonucleotide
  modified_base 1..2: mod_base = OTHER; note = bicyclic nucleic acid (BNA)
  modified_base 11..12: mod_base = OTHER; note = bicyclic nucleic acid (BNA)
  source 1..12: mol_type = other DNA
aaggaagatggc

SEQ ID NO: 8219 - DNA, 11 bp, synthetic construct
  misc_feature 1..11: note = Description of Artificial Sequence: Synthetic Antisense oligonucleotide
  modified_base 1..2: mod_base = OTHER; note = bicyclic nucleic acid (BNA)
  modified_base 10..11: mod_base = OTHER; note = bicyclic nucleic acid (BNA)
  source 1..11: mol_type = other DNA
aaggaagatgg

SEQ ID NO: 8220 - DNA, 10 bp, synthetic construct
  misc_feature 1..10: note = Description of Artificial Sequence: Synthetic Antisense oligonucleotide
  modified_base 1..2: mod_base = OTHER; note = bicyclic nucleic acid (BNA)
  modified_base 9..10: mod_base = OTHER; note = bicyclic nucleic acid (BNA)
  source 1..10: mol_type = other DNA
aaggaagatg

SEQ ID NO: 8221 - skipped

SEQ ID NO: 8222 - DNA, 19 bp, synthetic construct
  misc_feature 1..19: note = Description of Artificial Sequence: Synthetic Antisense oligonucleotide
  modified_base 1..2: mod_base = OTHER; note = bicyclic nucleic acid (BNA)
  modified_base 18..19: mod_base = OTHER; note = bicyclic nucleic acid (BNA)
  source 1..19: mol_type = other DNA
aggaagatggcatttctag

SEQ ID NO: 8223 - DNA, 18 bp, synthetic construct
  misc_feature 1..18: note = Description of Artificial Sequence: Synthetic Antisense oligonucleotide
  modified_base 1..2: mod_base = OTHER; note = bicyclic nucleic acid (BNA)
  modified_base 17..18: mod_base = OTHER; note = bicyclic nucleic acid (BNA)
  source 1..18: mol_type = other DNA
aggaagatggcatttcta

SEQ ID NO: 8224 - DNA, 17 bp, synthetic construct
  misc_feature 1..17: note = Description of Artificial Sequence: Synthetic Antisense oligonucleotide
  modified_base 1..2: mod_base = OTHER; note = bicyclic nucleic acid (BNA)
  modified_base 16..17: mod_base = OTHER; note = bicyclic nucleic acid (BNA)
  source 1..17: mol_type = other DNA
aggaagatggcatttct

SEQ ID NO: 8225 - DNA, 16 bp, synthetic construct
  misc_feature 1..16: note = Description of Artificial Sequence: Synthetic Antisense oligonucleotide
  modified_base 1..2: mod_base = OTHER; note = bicyclic nucleic acid (BNA)
  modified_base 15..16: mod_base = OTHER; note = bicyclic nucleic acid (BNA)
  source 1..16: mol_type = other DNA
aggaagatggcatttc

SEQ ID NO: 8226 - DNA, 15 bp, synthetic construct
  misc_feature 1..15: note = Description of Artificial Sequence: Synthetic Antisense oligonucleotide
  modified_base 1..2: mod_base = OTHER; note = bicyclic nucleic acid (BNA)
  modified_base 14..15: mod_base = OTHER; note = bicyclic nucleic acid (BNA)
  source 1..15: mol_type = other DNA
aggaagatggcattt

SEQ ID NO: 8227 - DNA, 14 bp, synthetic construct
  misc_feature 1..14: note = Description of Artificial Sequence: Synthetic Antisense oligonucleotide
  modified_base 1..2: mod_base = OTHER; note = bicyclic nucleic acid (BNA)
  modified_base 13..14: mod_base = OTHER; note = bicyclic nucleic acid (BNA)
  source 1..14: mol_type = other DNA
aggaagatggcatt

SEQ ID NO: 8228 - DNA, 13 bp, synthetic construct
  misc_feature 1..13: note = Description of Artificial Sequence: Synthetic Antisense oligonucleotide
  modified_base 1..2: mod_base = OTHER; note = bicyclic nucleic acid (BNA)
  modified_base 12..13: mod_base = OTHER; note = bicyclic nucleic acid (BNA)
  source 1..13: mol_type = other DNA
aggaagatggcat

SEQ ID NO: 8229 - DNA, 12 bp, synthetic construct
  misc_feature 1..12: note = Description of Artificial Sequence: Synthetic Antisense oligonucleotide
  modified_base 1..2: mod_base = OTHER; note = bicyclic nucleic acid (BNA)
  modified_base 11..12: mod_base = OTHER; note = bicyclic nucleic acid (BNA)
  source 1..12: mol_type = other DNA
aggaagatggca

SEQ ID NO: 8230 - DNA, 10 bp, synthetic construct
  misc_feature 1..10: note = Description of Artificial Sequence: Synthetic Antisense oligonucleotide
  modified_base 1..2: mod_base = OTHER; note = bicyclic nucleic acid (BNA)
  modified_base 9..10: mod_base = OTHER; note = bicyclic nucleic acid (BNA)
  source 1..10: mol_type = other DNA
aggaagatgg

SEQ ID NO: 8231-8232 - skipped (2 entries)

SEQ ID NO: 8233 - DNA, 18 bp, synthetic construct
  misc_feature 1..18: note = Description of Artificial Sequence: Synthetic Antisense oligonucleotide
  modified_base 1..2: mod_base = OTHER; note = bicyclic nucleic acid (BNA)
  modified_base 17..18: mod_base = OTHER; note = bicyclic nucleic acid (BNA)
  source 1..18: mol_type = other DNA
ggaagatggcatttctag

SEQ ID NO: 8234 - DNA, 17 bp, synthetic construct
  misc_feature 1..17: note = Description of Artificial Sequence: Synthetic Antisense oligonucleotide
  modified_base 1..2: mod_base = OTHER; note = bicyclic nucleic acid (BNA)
  modified_base 16..17: mod_base = OTHER; note = bicyclic nucleic acid (BNA)
  source 1..17: mol_type = other DNA
ggaagatggcatttcta

SEQ ID NO: 8235 - DNA, 16 bp, synthetic construct
  misc_feature 1..16: note = Description of Artificial Sequence: Synthetic Antisense oligonucleotide
  modified_base 1..2: mod_base = OTHER; note = bicyclic nucleic acid (BNA)
  modified_base 15..16: mod_base = OTHER; note = bicyclic nucleic acid (BNA)
  source 1..16: mol_type = other DNA
ggaagatggcatttct

SEQ ID NO: 8236 - DNA, 15 bp, synthetic construct
  misc_feature 1..15: note = Description of Artificial Sequence: Synthetic Antisense oligonucleotide
  modified_base 1..2: mod_base = OTHER; note = bicyclic nucleic acid (BNA)
  modified_base 14..15: mod_base = OTHER; note = bicyclic nucleic acid (BNA)
  source 1..15: mol_type = other DNA
ggaagatggcatttc

SEQ ID NO: 8237 - DNA, 14 bp, synthetic construct
  misc_feature 1..14: note = Description of Artificial Sequence: Synthetic Antisense oligonucleotide
  modified_base 1..2: mod_base = OTHER; note = bicyclic nucleic acid (BNA)
  modified_base 13..14: mod_base = OTHER; note = bicyclic nucleic acid (BNA)
  source 1..14: mol_type = other DNA
ggaagatggcattt

SEQ ID NO: 8238 - DNA, 13 bp, synthetic construct
  misc_feature 1..13: note = Description of Artificial Sequence: Synthetic Antisense oligonucleotide
  modified_base 1..2: mod_base = OTHER; note = bicyclic nucleic acid (BNA)
  modified_base 12..13: mod_base = OTHER; note = bicyclic nucleic acid (BNA)
  source 1..13: mol_type = other DNA
ggaagatggcatt

SEQ ID NO: 8239 - DNA, 12 bp, synthetic construct
  misc_feature 1..12: note = Description of Artificial Sequence: Synthetic Antisense oligonucleotide
  modified_base 1..2: mod_base = OTHER; note = bicyclic nucleic acid (BNA)
  modified_base 11..12: mod_base = OTHER; note = bicyclic nucleic acid (BNA)
  source 1..12: mol_type = other DNA
ggaagatggcat

SEQ ID NO: 8240 - DNA, 11 bp, synthetic construct
  misc_feature 1..11: note = Description of Artificial Sequence: Synthetic Antisense oligonucleotide
  modified_base 1..2: mod_base = OTHER; note = bicyclic nucleic acid (BNA)
  modified_base 10..11: mod_base = OTHER; note = bicyclic nucleic acid (BNA)
  source 1..11: mol_type = other DNA
ggaagatggca

SEQ ID NO: 8241 - DNA, 10 bp, synthetic construct
  misc_feature 1..10: note = Description of Artificial Sequence: Synthetic Antisense oligonucleotide
  modified_base 1..2: mod_base = OTHER; note = bicyclic nucleic acid (BNA)
  modified_base 9..10: mod_base = OTHER; note = bicyclic nucleic acid (BNA)
  source 1..10: mol_type = other DNA
ggaagatggc

SEQ ID NO: 8242 - skipped

SEQ ID NO: 8243 - DNA, 17 bp, synthetic construct
  misc_feature 1..17: note = Description of Artificial Sequence: Synthetic Antisense oligonucleotide
  modified_base 1..2: mod_base = OTHER; note = bicyclic nucleic acid (BNA)
  modified_base 16..17: mod_base = OTHER; note = bicyclic nucleic acid (BNA)
  source 1..17: mol_type = other DNA
gaagatggcatttctag

SEQ ID NO: 8244 - DNA, 16 bp, synthetic construct
  misc_feature 1..16: note = Description of Artificial Sequence: Synthetic Antisense oligonucleotide
  modified_base 1..2: mod_base = OTHER; note = bicyclic nucleic acid (BNA)
  modified_base 15..16: mod_base = OTHER; note = bicyclic nucleic acid (BNA)
  source 1..16: mol_type = other DNA
gaagatggcatttcta

SEQ ID NO: 8245 - DNA, 14 bp, synthetic construct
  misc_feature 1..14: note = Description of Artificial Sequence: Synthetic Antisense oligonucleotide
  modified_base 1..2: mod_base = OTHER; note = bicyclic nucleic acid (BNA)
  modified_base 13..14: mod_base = OTHER; note = bicyclic nucleic acid (BNA)
  source 1..14: mol_type = other DNA
gaagatggcatttc

SEQ ID NO: 8246 - DNA, 13 bp, synthetic construct
  misc_feature 1..13: note = Description of Artificial Sequence: Synthetic Antisense oligonucleotide
  modified_base 1..2: mod_base = OTHER; note = bicyclic nucleic acid (BNA)
  modified_base 12..13: mod_base = OTHER; note = bicyclic nucleic acid (BNA)
  source 1..13: mol_type = other DNA
gaagatggcattt

SEQ ID NO: 8247 - DNA, 12 bp, synthetic construct
  misc_feature 1..12: note = Description of Artificial Sequence: Synthetic Antisense oligonucleotide
  modified_base 1..2: mod_base = OTHER; note = bicyclic nucleic acid (BNA)
  modified_base 11..12: mod_base = OTHER; note = bicyclic nucleic acid (BNA)
  source 1..12: mol_type = other DNA
gaagatggcatt

SEQ ID NO: 8248 - DNA, 11 bp, synthetic construct
  misc_feature 1..11: note = Description of Artificial Sequence: Synthetic Antisense oligonucleotide
  modified_base 1..2: mod_base = OTHER; note = bicyclic nucleic acid (BNA)
  modified_base 10..11: mod_base = OTHER; note = bicyclic nucleic acid (BNA)
  source 1..11: mol_type = other DNA
gaagatggcat

SEQ ID NO: 8249 - DNA, 10 bp, synthetic construct
  misc_feature 1..10: note = Description of Artificial Sequence: Synthetic Antisense oligonucleotide
  modified_base 1..2: mod_base = OTHER; note = bicyclic nucleic acid (BNA)
  modified_base 9..10: mod_base = OTHER; note = bicyclic nucleic acid (BNA)
  source 1..10: mol_type = other DNA
gaagatggca

SEQ ID NO: 8250-8251 - skipped (2 entries)

SEQ ID NO: 8252 - DNA, 16 bp, synthetic construct
  misc_feature 1..16: note = Description of Artificial Sequence: Synthetic Antisense oligonucleotide
  modified_base 1..2: mod_base = OTHER; note = bicyclic nucleic acid (BNA)
  modified_base 15..16: mod_base = OTHER; note = bicyclic nucleic acid (BNA)
  source 1..16: mol_type = other DNA
aagatggcatttctag

SEQ ID NO: 8253 - DNA, 15 bp, synthetic construct
  misc_feature 1..15: note = Description of Artificial Sequence: Synthetic Antisense oligonucleotide
  modified_base 1..2: mod_base = OTHER; note = bicyclic nucleic acid (BNA)
  modified_base 14..15: mod_base = OTHER; note = bicyclic nucleic acid (BNA)
  source 1..15: mol_type = other DNA
aagatggcatttcta

SEQ ID NO: 8254 - DNA, 14 bp, synthetic construct
  misc_feature 1..14: note = Description of Artificial Sequence: Synthetic Antisense oligonucleotide
  modified_base 1..2: mod_base = OTHER; note = bicyclic nucleic acid (BNA)
  modified_base 13..14: mod_base = OTHER; note = bicyclic nucleic acid (BNA)
  source 1..14: mol_type = other DNA
aagatggcatttct

SEQ ID NO: 8255 - DNA, 13 bp, synthetic construct
  misc_feature 1..13: note = Description of Artificial Sequence: Synthetic Antisense oligonucleotide
  modified_base 1..2: mod_base = OTHER; note = bicyclic nucleic acid (BNA)
  modified_base 12..13: mod_base = OTHER; note = bicyclic nucleic acid (BNA)
  source 1..13: mol_type = other DNA
aagatggcatttc

SEQ ID NO: 8256 - DNA, 12 bp, synthetic construct
  misc_feature 1..12: note = Description of Artificial Sequence: Synthetic Antisense oligonucleotide
  modified_base 1..2: mod_base = OTHER; note = bicyclic nucleic acid (BNA)
  modified_base 11..12: mod_base = OTHER; note = bicyclic nucleic acid (BNA)
  source 1..12: mol_type = other DNA
aagatggcattt

SEQ ID NO: 8257 - DNA, 11 bp, synthetic construct
  misc_feature 1..11: note = Description of Artificial Sequence: Synthetic Antisense oligonucleotide
  modified_base 1..2: mod_base = OTHER; note = bicyclic nucleic acid (BNA)
  modified_base 10..11: mod_base = OTHER; note = bicyclic nucleic acid (BNA)
  source 1..11: mol_type = other DNA
aagatggcatt

SEQ ID NO: 8258 - DNA, 10 bp, synthetic construct
  misc_feature 1..10: note = Description of Artificial Sequence: Synthetic Antisense oligonucleotide
  modified_base 1..2: mod_base = OTHER; note = bicyclic nucleic acid (BNA)
  modified_base 9..10: mod_base = OTHER; note = bicyclic nucleic acid (BNA)
  source 1..10: mol_type = other DNA
aagatggcat

SEQ ID NO: 8259-8260 - skipped (2 entries)

SEQ ID NO: 8261 - DNA, 15 bp, synthetic construct
  misc_feature 1..15: note = Description of Artificial Sequence: Synthetic Antisense oligonucleotide
  modified_base 1..2: mod_base = OTHER; note = bicyclic nucleic acid (BNA)
  modified_base 14..15: mod_base = OTHER; note = bicyclic nucleic acid (BNA)
  source 1..15: mol_type = other DNA
agatggcatttctag

SEQ ID NO: 8262 - DNA, 14 bp, synthetic construct
  misc_feature 1..14: note = Description of Artificial Sequence: Synthetic Antisense oligonucleotide
  modified_base 1..2: mod_base = OTHER; note = bicyclic nucleic acid (BNA)
  modified_base 13..14: mod_base = OTHER; note = bicyclic nucleic acid (BNA)
  source 1..14: mol_type = other DNA
agatggcatttcta

SEQ ID NO: 8263 - DNA, 13 bp, synthetic construct
  misc_feature 1..13: note = Description of Artificial Sequence: Synthetic Antisense oligonucleotide
  modified_base 1..2: mod_base = OTHER; note = bicyclic nucleic acid (BNA)
  modified_base 12..13: mod_base = OTHER; note = bicyclic nucleic acid (BNA)
  source 1..13: mol_type = other DNA
agatggcatttct

SEQ ID NO: 8264 - DNA, 12 bp, synthetic construct
  misc_feature 1..12: note = Description of Artificial Sequence: Synthetic Antisense oligonucleotide
  modified_base 1..2: mod_base = OTHER; note = bicyclic nucleic acid (BNA)
  modified_base 11..12: mod_base = OTHER; note = bicyclic nucleic acid (BNA)
  source 1..12: mol_type = other DNA
agatggcatttc

SEQ ID NO: 8265 - DNA, 11 bp, synthetic construct
  misc_feature 1..11: note = Description of Artificial Sequence: Synthetic Antisense oligonucleotide
  modified_base 1..2: mod_base = OTHER; note = bicyclic nucleic acid (BNA)
  modified_base 10..11: mod_base = OTHER; note = bicyclic nucleic acid (BNA)
  source 1..11: mol_type = other DNA
agatggcattt

SEQ ID NO: 8266 - DNA, 10 bp, synthetic construct
  misc_feature 1..10: note = Description of Artificial Sequence: Synthetic Antisense oligonucleotide
  modified_base 1..2: mod_base = OTHER; note = bicyclic nucleic acid (BNA)
  modified_base 9..10: mod_base = OTHER; note = bicyclic nucleic acid (BNA)
  source 1..10: mol_type = other DNA
agatggcatt

SEQ ID NO: 8267-8268 - skipped (2 entries)

SEQ ID NO: 8269 - DNA, 30 bp, synthetic construct; identical to SEQ ID NO: 8
  misc_feature 1..30: note = Description of Artificial Sequence: Synthetic Antisense oligonucleotide
  modified_base 1..2: mod_base = OTHER; note = bicyclic nucleic acid (BNA)
  modified_base 29..30: mod_base = OTHER; note = bicyclic nucleic acid (BNA)
  source 1..30: mol_type = other DNA

SEQ ID NO: 8270 - DNA, 29 bp, synthetic construct
  misc_feature 1..29: note = Description of Artificial Sequence: Synthetic Antisense oligonucleotide
  modified_base 1..2: mod_base = OTHER; note = bicyclic nucleic acid (BNA)
  modified_base 28..29: mod_base = OTHER; note = bicyclic nucleic acid (BNA)
  source 1..29: mol_type = other DNA
ctccaacatcaaggaagatggcatttcta

SEQ ID NO: 8271 - DNA, 28 bp, synthetic construct
  misc_feature 1..28: note = Description of Artificial Sequence: Synthetic Antisense oligonucleotide
  modified_base 1..2: mod_base = OTHER; note = bicyclic nucleic acid (BNA)
  modified_base 27..28: mod_base = OTHER; note = bicyclic nucleic acid (BNA)
  source 1..28: mol_type = other DNA
ctccaacatcaaggaagatggcatttct

SEQ ID NO: 8272 - DNA, 27 bp, synthetic construct
  misc_feature 1..27: note = Description of Artificial Sequence: Synthetic Antisense oligonucleotide
  modified_base 1..2: mod_base = OTHER; note = bicyclic nucleic acid (BNA)
  modified_base 26..27: mod_base = OTHER; note = bicyclic nucleic acid (BNA)
  source 1..27: mol_type = other DNA
ctccaacatcaaggaagatggcatttc

SEQ ID NO: 8273 - DNA, 26 bp, synthetic construct
  misc_feature 1..26: note = Description of Artificial Sequence: Synthetic Antisense oligonucleotide
  modified_base 1..2: mod_base = OTHER; note = bicyclic nucleic acid (BNA)
  modified_base 25..26: mod_base = OTHER; note = bicyclic nucleic acid (BNA)
  source 1..26: mol_type = other DNA
ctccaacatcaaggaagatggcattt

SEQ ID NO: 8274 - DNA, 25 bp, synthetic construct
  misc_feature 1..25: note = Description of Artificial Sequence: Synthetic Antisense oligonucleotide
  modified_base 1..2: mod_base = OTHER; note = bicyclic nucleic acid (BNA)
  modified_base 24..25: mod_base = OTHER; note = bicyclic nucleic acid (BNA)
  source 1..25: mol_type = other DNA
ctccaacatcaaggaagatggcatt

SEQ ID NO: 8275 - DNA, 24 bp, synthetic construct
  misc_feature 1..24: note = Description of Artificial Sequence: Synthetic Antisense oligonucleotide
  modified_base 1..2: mod_base = OTHER; note = bicyclic nucleic acid (BNA)
  modified_base 23..24: mod_base = OTHER; note = bicyclic nucleic acid (BNA)
  source 1..24: mol_type = other DNA
ctccaacatcaaggaagatggcat

SEQ ID NO: 8276 - DNA, 23 bp, synthetic construct
  misc_feature 1..23: note = Description of Artificial Sequence: Synthetic Antisense oligonucleotide
  modified_base 1..2: mod_base = OTHER; note = bicyclic nucleic acid (BNA)
  modified_base 22..23: mod_base = OTHER; note = bicyclic nucleic acid (BNA)
  source 1..23: mol_type = other DNA
ctccaacatcaaggaagatggca

SEQ ID NO: 8277 - DNA, 22 bp, synthetic construct
  misc_feature 1..22: note = Description of Artificial Sequence: Synthetic Antisense oligonucleotide
  modified_base 1..2: mod_base = OTHER; note = bicyclic nucleic acid (BNA)
  modified_base 21..22: mod_base = OTHER; note = bicyclic nucleic acid (BNA)
  source 1..22: mol_type = other DNA
ctccaacatcaaggaagatggc

SEQ ID NO: 8278 - DNA, 21 bp, synthetic construct
  misc_feature 1..21: note = Description of Artificial Sequence: Synthetic Antisense oligonucleotide
  modified_base 1..2: mod_base = OTHER; note = bicyclic nucleic acid (BNA)
  modified_base 20..21: mod_base = OTHER; note = bicyclic nucleic acid (BNA)
  source 1..21: mol_type = other DNA
ctccaacatcaaggaagatgg

SEQ ID NO: 8279 - DNA, 20 bp, synthetic construct
  misc_feature 1..20: note = Description of Artificial Sequence: Synthetic Antisense oligonucleotide
  modified_base 1..2: mod_base = OTHER; note = bicyclic nucleic acid (BNA)
  modified_base 19..20: mod_base = OTHER; note = bicyclic nucleic acid (BNA)
  source 1..20: mol_type = other DNA
ctccaacatcaaggaagatg

SEQ ID NO: 8280 - DNA, 19 bp, synthetic construct
  misc_feature 1..19: note = Description of Artificial Sequence: Synthetic Antisense oligonucleotide
  modified_base 1..2: mod_base = OTHER; note = bicyclic nucleic acid (BNA)
  modified_base 18..19: mod_base = OTHER; note = bicyclic nucleic acid (BNA)
  source 1..19: mol_type = other DNA
ctccaacatcaaggaagat

SEQ ID NO: 8281 - DNA, 18 bp, synthetic construct
  misc_feature 1..18: note = Description of Artificial Sequence: Synthetic Antisense oligonucleotide
  modified_base 1..2: mod_base = OTHER; note = bicyclic nucleic acid (BNA)
  modified_base 17..18: mod_base = OTHER; note = bicyclic nucleic acid (BNA)
  source 1..18: mol_type = other DNA
ctccaacatcaaggaaga

SEQ ID NO: 8282 - DNA, 17 bp, synthetic construct
  misc_feature 1..17: note = Description of Artificial Sequence: Synthetic Antisense oligonucleotide
  modified_base 1..2: mod_base = OTHER; note = bicyclic nucleic acid (BNA)
  modified_base 16..17: mod_base = OTHER; note = bicyclic nucleic acid (BNA)
  source 1..17: mol_type = other DNA
ctccaacatcaaggaag

SEQ ID NO: 8283 - DNA, 29 bp, synthetic construct
  misc_feature 1..29: note = Description of Artificial Sequence: Synthetic Antisense oligonucleotide
  modified_base 1..2: mod_base = OTHER; note = bicyclic nucleic acid (BNA)
  modified_base 28..29: mod_base = OTHER; note = bicyclic nucleic acid (BNA)
  source 1..29: mol_type = other DNA
tccaacatcaaggaagatggcatttctag

SEQ ID NO: 8284 - DNA, 28 bp, synthetic construct
  misc_feature 1..28: note = Description of Artificial Sequence: Synthetic Antisense oligonucleotide
  modified_base 1..2: mod_base = OTHER; note = bicyclic nucleic acid (BNA)
  modified_base 27..28: mod_base = OTHER; note = bicyclic nucleic acid (BNA)
  source 1..28: mol_type = other DNA
tccaacatcaaggaagatggcatttcta

SEQ ID NO: 8285 - DNA, 27 bp, synthetic construct
  misc_feature 1..27: note = Description of Artificial Sequence: Synthetic Antisense oligonucleotide
  modified_base 1..2: mod_base = OTHER; note = bicyclic nucleic acid (BNA)
  modified_base 26..27: mod_base = OTHER; note = bicyclic nucleic acid (BNA)
  source 1..27: mol_type = other DNA
tccaacatcaaggaagatggcatttct

SEQ ID NO: 8286 - DNA, 26 bp, synthetic construct
  misc_feature 1..26: note = Description of Artificial Sequence: Synthetic Antisense oligonucleotide
  modified_base 1..2: mod_base = OTHER; note = bicyclic nucleic acid (BNA)
  modified_base 25..26: mod_base = OTHER; note = bicyclic nucleic acid (BNA)
  source 1..26: mol_type = other DNA
tccaacatcaaggaagatggcatttc

SEQ ID NO: 8287 - DNA, 25 bp, synthetic construct
  misc_feature 1..25: note = Description of Artificial Sequence: Synthetic Antisense oligonucleotide
  modified_base 1..2: mod_base = OTHER; note = bicyclic nucleic acid (BNA)
  modified_base 24..25: mod_base = OTHER; note = bicyclic nucleic acid (BNA)
  source 1..25: mol_type = other DNA
tccaacatcaaggaagatggcattt

SEQ ID NO: 8288 - DNA, 24 bp, synthetic construct
  misc_feature 1..24: note = Description of Artificial Sequence: Synthetic Antisense oligonucleotide
  modified_base 1..2: mod_base = OTHER; note = bicyclic nucleic acid (BNA)
  modified_base 23..24: mod_base = OTHER; note = bicyclic nucleic acid (BNA)
  source 1..24: mol_type = other DNA
tccaacatcaaggaagatggcatt

SEQ ID NO: 8289 - DNA, 23 bp, synthetic construct
  misc_feature 1..23: note = Description of Artificial Sequence: Synthetic Antisense oligonucleotide
  modified_base 1..2: mod_base = OTHER; note = bicyclic nucleic acid (BNA)
  modified_base 22..23: mod_base = OTHER; note = bicyclic nucleic acid (BNA)
  source 1..23: mol_type = other DNA
tccaacatcaaggaagatggcat

SEQ ID NO: 8290 - DNA, 22 bp, synthetic construct
  misc_feature 1..22: note = Description of Artificial Sequence: Synthetic Antisense oligonucleotide
  modified_base 1..2: mod_base = OTHER; note = bicyclic nucleic acid (BNA)
  modified_base 21..22: mod_base = OTHER; note = bicyclic nucleic acid (BNA)
  source 1..22: mol_type = other DNA
tccaacatcaaggaagatggca

SEQ ID NO: 8291 - DNA, 21 bp, synthetic construct
  misc_feature 1..21: note = Description of Artificial Sequence: Synthetic Antisense oligonucleotide
  modified_base 1..2: mod_base = OTHER; note = bicyclic nucleic acid (BNA)
  modified_base 20..21: mod_base = OTHER; note = bicyclic nucleic acid (BNA)
  source 1..21: mol_type = other DNA
tccaacatcaaggaagatggc

SEQ ID NO: 8292 - DNA, 20 bp, synthetic construct
  misc_feature 1..20: note = Description of Artificial Sequence: Synthetic Antisense oligonucleotide
  modified_base 1..2: mod_base = OTHER; note = bicyclic nucleic acid (BNA)
  modified_base 19..20: mod_base = OTHER; note = bicyclic nucleic acid (BNA)
  source 1..20: mol_type = other DNA
tccaacatcaaggaagatgg

SEQ ID NO: 8293 - DNA, 19 bp, synthetic construct
  misc_feature 1..19: note = Description of Artificial Sequence: Synthetic Antisense oligonucleotide
  modified_base 1..2: mod_base = OTHER; note = bicyclic nucleic acid (BNA)
  modified_base 18..19: mod_base = OTHER; note = bicyclic nucleic acid (BNA)
  source 1..19: mol_type = other DNA
tccaacatcaaggaagatg

SEQ ID NO: 8294 - DNA, 18 bp, synthetic construct
  misc_feature 1..18: note = Description of Artificial Sequence: Synthetic Antisense oligonucleotide
  modified_base 1..2: mod_base = OTHER; note = bicyclic nucleic acid (BNA)
  modified_base 17..18: mod_base = OTHER; note = bicyclic nucleic acid (BNA)
  source 1..18: mol_type = other DNA
tccaacatcaaggaagat

SEQ ID NO: 8295 - DNA, 17 bp, synthetic construct
  misc_feature 1..17: note = Description of Artificial Sequence: Synthetic Antisense oligonucleotide
  modified_base 1..2: mod_base = OTHER; note = bicyclic nucleic acid (BNA)
  modified_base 16..17: mod_base = OTHER; note = bicyclic nucleic acid (BNA)
  source 1..17: mol_type = other DNA
tccaacatcaaggaaga

SEQ ID NO: 8296 - DNA, 16 bp, synthetic construct
  misc_feature 1..16: note = Description of Artificial Sequence: Synthetic Antisense oligonucleotide
  modified_base 1..2: mod_base = OTHER; note = bicyclic nucleic acid (BNA)
  modified_base 15..16: mod_base = OTHER; note = bicyclic nucleic acid (BNA)
  source 1..16: mol_type = other DNA
tccaacatcaaggaag

SEQ ID NO: 8297 - DNA, 28 bp, synthetic construct
  misc_feature 1..28: note = Description of Artificial Sequence: Synthetic Antisense oligonucleotide
  modified_base 1..2: mod_base = OTHER; note = bicyclic nucleic acid (BNA)
  modified_base 27..28: mod_base = OTHER; note = bicyclic nucleic acid (BNA)
  source 1..28: mol_type = other DNA
ccaacatcaaggaagatggcatttctag

SEQ ID NO: 8298 - DNA, 27 bp, synthetic construct
  misc_feature 1..27: note = Description of Artificial Sequence: Synthetic Antisense oligonucleotide
  modified_base 1..2: mod_base = OTHER; note = bicyclic nucleic acid (BNA)
  modified_base 26..27: mod_base = OTHER; note = bicyclic nucleic acid (BNA)
  source 1..27: mol_type = other DNA
ccaacatcaaggaagatggcatttcta

SEQ ID NO: 8299 - DNA, 26 bp, synthetic construct
  misc_feature 1..26: note = Description of Artificial Sequence: Synthetic Antisense oligonucleotide
  modified_base 1..2: mod_base = OTHER; note = bicyclic nucleic acid (BNA)
  modified_base 25..26: mod_base = OTHER; note = bicyclic nucleic acid (BNA)
  source 1..26: mol_type = other DNA
ccaacatcaaggaagatggcatttct

SEQ ID NO: 8300 - DNA, 25 bp, synthetic construct
  misc_feature 1..25: note = Description of Artificial Sequence: Synthetic Antisense oligonucleotide
  modified_base 1..2: mod_base = OTHER; note = bicyclic nucleic acid (BNA)
  modified_base 24..25: mod_base = OTHER; note = bicyclic nucleic acid (BNA)
  source 1..25: mol_type = other DNA
ccaacatcaaggaagatggcatttc

SEQ ID NO: 8301 - DNA, 24 bp, synthetic construct
  misc_feature 1..24: note = Description of Artificial Sequence: Synthetic Antisense oligonucleotide
  modified_base 1..2: mod_base = OTHER; note = bicyclic nucleic acid (BNA)
  modified_base 23..24: mod_base = OTHER; note = bicyclic nucleic acid (BNA)
  source 1..24: mol_type = other DNA
ccaacatcaaggaagatggcattt

SEQ ID NO: 8302 - DNA, 23 bp, synthetic construct
  misc_feature 1..23: note = Description of Artificial Sequence: Synthetic Antisense oligonucleotide
  modified_base 1..2: mod_base = OTHER; note = bicyclic nucleic acid (BNA)
  modified_base 22..23: mod_base = OTHER; note = bicyclic nucleic acid (BNA)
  source 1..23: mol_type = other DNA
ccaacatcaaggaagatggcatt

SEQ ID NO: 8303 - DNA, 22 bp, synthetic construct
  misc_feature 1..22: note = Description of Artificial Sequence: Synthetic Antisense oligonucleotide
  modified_base 1..2: mod_base = OTHER; note = bicyclic nucleic acid (BNA)
  modified_base 21..22: mod_base = OTHER; note = bicyclic nucleic acid (BNA)
  source 1..22: mol_type = other DNA
ccaacatcaaggaagatggcat

SEQ ID NO: 8304 - DNA, 21 bp, synthetic construct
  misc_feature 1..21: note = Description of Artificial Sequence: Synthetic Antisense oligonucleotide
  modified_base 1..2: mod_base = OTHER; note = bicyclic nucleic acid (BNA)
  modified_base 20..21: mod_base = OTHER; note = bicyclic nucleic acid (BNA)
  source 1..21: mol_type = other DNA
ccaacatcaaggaagatggca

SEQ ID NO: 8305 - DNA, 20 bp, synthetic construct
  misc_feature 1..20: note = Description of Artificial Sequence: Synthetic Antisense oligonucleotide
  modified_base 1..2: mod_base = OTHER; note = bicyclic nucleic acid (BNA)
  modified_base 19..20: mod_base = OTHER; note = bicyclic nucleic acid (BNA)
  source 1..20: mol_type = other DNA
ccaacatcaaggaagatggc

SEQ ID NO: 8306 - DNA, 19 bp, synthetic construct
  misc_feature 1..19: note = Description of Artificial Sequence: Synthetic Antisense oligonucleotide
  modified_base 1..2: mod_base = OTHER; note = bicyclic nucleic acid (BNA)
  modified_base 18..19: mod_base = OTHER; note = bicyclic nucleic acid (BNA)
  source 1..19: mol_type = other DNA
ccaacatcaaggaagatgg

SEQ ID NO: 8307 - DNA, 18 bp, synthetic construct
  misc_feature 1..18: note = Description of Artificial Sequence: Synthetic Antisense oligonucleotide
  modified_base 1..2: mod_base = OTHER; note = bicyclic nucleic acid (BNA)
  modified_base 17..18: mod_base = OTHER; note = bicyclic nucleic acid (BNA)
  source 1..18: mol_type = other DNA
ccaacatcaaggaagatg

SEQ ID NO: 8308 - DNA, 17 bp, synthetic construct
  misc_feature 1..17: note = Description of Artificial Sequence: Synthetic Antisense oligonucleotide
  modified_base 1..2: mod_base = OTHER; note = bicyclic nucleic acid (BNA)
  modified_base 16..17: mod_base = OTHER; note = bicyclic nucleic acid (BNA)
  source 1..17: mol_type = other DNA
ccaacatcaaggaagat

SEQ ID NO: 8309 - DNA, 16 bp, synthetic construct
  misc_feature 1..16: note = Description of Artificial Sequence: Synthetic Antisense oligonucleotide
  modified_base 1..2: mod_base = OTHER; note = bicyclic nucleic acid (BNA)
  modified_base 15..16: mod_base = OTHER; note = bicyclic nucleic acid (BNA)
  source 1..16: mol_type = other DNA
ccaacatcaaggaaga

SEQ ID NO: 8310 - DNA, 15 bp, synthetic construct
  misc_feature 1..15: note = Description of Artificial Sequence: Synthetic Antisense oligonucleotide
  modified_base 1..2: mod_base = OTHER; note = bicyclic nucleic acid (BNA)
  modified_base 14..15: mod_base = OTHER; note = bicyclic nucleic acid (BNA)
  source 1..15: mol_type = other DNA
ccaacatcaaggaag

SEQ ID NO: 8311 - DNA, 27 bp, synthetic construct
  misc_feature 1..27: note = Description of Artificial Sequence: Synthetic Antisense oligonucleotide
  modified_base 1..2: mod_base = OTHER; note = bicyclic nucleic acid (BNA)
  modified_base 26..27: mod_base = OTHER; note = bicyclic nucleic acid (BNA)
  source 1..27: mol_type = other DNA
caacatcaaggaagatggcatttctag

SEQ ID NO: 8312 - DNA, 26 bp, synthetic construct
  misc_feature 1..26: note = Description of Artificial Sequence: Synthetic Antisense oligonucleotide
  modified_base 1..2: mod_base = OTHER; note = bicyclic nucleic acid (BNA)
  modified_base 25..26: mod_base = OTHER; note = bicyclic nucleic acid (BNA)
  source 1..26: mol_type = other DNA
caacatcaaggaagatggcatttcta

SEQ ID NO: 8313 - DNA, 25 bp, synthetic construct
  misc_feature 1..25: note = Description of Artificial Sequence: Synthetic Antisense oligonucleotide
  modified_base 1..2: mod_base = OTHER; note = bicyclic nucleic acid (BNA)
  modified_base 24..25: mod_base = OTHER; note = bicyclic nucleic acid (BNA)
  source 1..25: mol_type = other DNA
caacatcaaggaagatggcatttct

SEQ ID NO: 8314 - DNA, 24 bp, synthetic construct
  misc_feature 1..24: note = Description of Artificial Sequence: Synthetic Antisense oligonucleotide
  modified_base 1..2: mod_base = OTHER; note = bicyclic nucleic acid (BNA)
  modified_base 23..24: mod_base = OTHER; note = bicyclic nucleic acid (BNA)
  source 1..24: mol_type = other DNA
caacatcaaggaagatggcatttc

SEQ ID NO: 8315 - DNA, 23 bp, synthetic construct
  misc_feature 1..23: note = Description of Artificial Sequence: Synthetic Antisense oligonucleotide
  modified_base 1..2: mod_base = OTHER; note = bicyclic nucleic acid (BNA)
  modified_base 22..23: mod_base = OTHER; note = bicyclic nucleic acid (BNA)
  source 1..23: mol_type = other DNA
caacatcaaggaagatggcattt

SEQ ID NO: 8316 - DNA, 22 bp, synthetic construct
  misc_feature 1..22: note = Description of Artificial Sequence: Synthetic Antisense oligonucleotide
  modified_base 1..2: mod_base = OTHER; note = bicyclic nucleic acid (BNA)
  modified_base 21..22: mod_base = OTHER; note = bicyclic nucleic acid (BNA)
  source 1..22: mol_type = other DNA
caacatcaaggaagatggcatt

SEQ ID NO: 8317 - DNA, 21 bp, synthetic construct
  misc_feature 1..21: note = Description of Artificial Sequence: Synthetic Antisense oligonucleotide
  modified_base 1..2: mod_base = OTHER; note = bicyclic nucleic acid (BNA)
  modified_base 20..21: mod_base = OTHER; note = bicyclic nucleic acid (BNA)
  source 1..21: mol_type = other DNA
caacatcaaggaagatggcat

SEQ ID NO: 8318 - DNA, 20 bp, synthetic construct
  misc_feature 1..20: note = Description of Artificial Sequence: Synthetic Antisense oligonucleotide
  modified_base 1..2: mod_base = OTHER; note = bicyclic nucleic acid (BNA)
  modified_base 19..20: mod_base = OTHER; note = bicyclic nucleic acid (BNA)
  source 1..20: mol_type = other DNA
caacatcaaggaagatggca

SEQ ID NO: 8319 - DNA, 19 bp, synthetic construct
  misc_feature 1..19: note = Description of Artificial Sequence: Synthetic Antisense oligonucleotide
  modified_base 1..2: mod_base = OTHER; note = bicyclic nucleic acid (BNA)
  modified_base 18..19: mod_base = OTHER; note = bicyclic nucleic acid (BNA)
  source 1..19: mol_type = other DNA
caacatcaaggaagatggc

SEQ ID NO: 8320 - DNA, 18 bp, synthetic construct
  misc_feature 1..18: note = Description of Artificial Sequence: Synthetic Antisense oligonucleotide
  modified_base 1..2: mod_base = OTHER; note = bicyclic nucleic acid (BNA)
  modified_base 17..18: mod_base = OTHER; note = bicyclic nucleic acid (BNA)
  source 1..18: mol_type = other DNA
caacatcaaggaagatgg

SEQ ID NO: 8321 - DNA, 17 bp, synthetic construct
  misc_feature 1..17: note = Description of Artificial Sequence: Synthetic Antisense oligonucleotide
  modified_base 1..2: mod_base = OTHER; note = bicyclic nucleic acid (BNA)
  modified_base 16..17: mod_base = OTHER; note = bicyclic nucleic acid (BNA)
  source 1..17: mol_type = other DNA
caacatcaaggaagatg

SEQ ID NO: 8322 - DNA, 16 bp, synthetic construct
  misc_feature 1..16: note = Description of Artificial Sequence: Synthetic Antisense oligonucleotide
  modified_base 1..2: mod_base = OTHER; note = bicyclic nucleic acid (BNA)
  modified_base 15..16: mod_base = OTHER; note = bicyclic nucleic acid (BNA)
  source 1..16: mol_type = other DNA
caacatcaaggaagat

SEQ ID NO: 8323 - DNA, 15 bp, synthetic construct
  misc_feature 1..15: note = Description of Artificial Sequence: Synthetic Antisense oligonucleotide
  modified_base 1..2: mod_base = OTHER; note = bicyclic nucleic acid (BNA)
  modified_base 14..15: mod_base = OTHER; note = bicyclic nucleic acid (BNA)
  source 1..15: mol_type = other DNA
caacatcaaggaaga

SEQ ID NO: 8324 - DNA, 14 bp, synthetic construct
  misc_feature 1..14: note = Description of Artificial Sequence: Synthetic Antisense oligonucleotide
  modified_base 1..2: mod_base = OTHER; note = bicyclic nucleic acid (BNA)
  modified_base 13..14: mod_base = OTHER; note = bicyclic nucleic acid (BNA)
  source 1..14: mol_type = other DNA
caacatcaaggaag

SEQ ID NO: 8325 - DNA, 26 bp, synthetic construct
  misc_feature 1..26: note = Description of Artificial Sequence: Synthetic Antisense oligonucleotide
  modified_base 1..2: mod_base = OTHER; note = bicyclic nucleic acid (BNA)
  modified_base 25..26: mod_base = OTHER; note = bicyclic nucleic acid (BNA)
  source 1..26: mol_type = other DNA
aacatcaaggaagatggcatttctag

SEQ ID NO: 8326 - DNA, 25 bp, synthetic construct
  misc_feature 1..25: note = Description of Artificial Sequence: Synthetic Antisense oligonucleotide
  modified_base 1..2: mod_base = OTHER; note = bicyclic nucleic acid (BNA)
  modified_base 24..25: mod_base = OTHER; note = bicyclic nucleic acid (BNA)
  source 1..25: mol_type = other DNA
aacatcaaggaagatggcatttcta

SEQ ID NO: 8327 - DNA, 24 bp, synthetic construct
  misc_feature 1..24: note = Description of Artificial Sequence: Synthetic Antisense oligonucleotide
  modified_base 1..2: mod_base = OTHER; note = bicyclic nucleic acid (BNA)
  modified_base 23..24: mod_base = OTHER; note = bicyclic nucleic acid (BNA)
  source 1..24: mol_type = other DNA
aacatcaaggaagatggcatttct

SEQ ID NO: 8328 - DNA, 23 bp, synthetic construct
  misc_feature 1..23: note = Description of Artificial Sequence: Synthetic Antisense oligonucleotide
  modified_base 1..2: mod_base = OTHER; note = bicyclic nucleic acid (BNA)
  modified_base 22..23: mod_base = OTHER; note = bicyclic nucleic acid (BNA)
  source 1..23: mol_type = other DNA
aacatcaaggaagatggcatttc

SEQ ID NO: 8329 - DNA, 22 bp, synthetic construct
  misc_feature 1..22: note = Description of Artificial Sequence: Synthetic Antisense oligonucleotide
  modified_base 1..2: mod_base = OTHER; note = bicyclic nucleic acid (BNA)
  modified_base 21..22: mod_base = OTHER; note = bicyclic nucleic acid (BNA)
  source 1..22: mol_type = other DNA
aacatcaaggaagatggcattt

SEQ ID NO: 8330 - DNA, 21 bp, synthetic construct
  misc_feature 1..21: note = Description of Artificial Sequence: Synthetic Antisense oligonucleotide
  modified_base 1..2: mod_base = OTHER; note = bicyclic nucleic acid (BNA)
  modified_base 20..21: mod_base = OTHER; note = bicyclic nucleic acid (BNA)
  source 1..21: mol_type = other DNA
aacatcaaggaagatggcatt

SEQ ID NO: 8331 - DNA, 20 bp, synthetic construct
  misc_feature 1..20: note = Description of Artificial Sequence: Synthetic Antisense oligonucleotide
  modified_base 1..2: mod_base = OTHER; note = bicyclic nucleic acid (BNA)
  modified_base 19..20: mod_base = OTHER; note = bicyclic nucleic acid (BNA)
  source 1..20: mol_type = other DNA
aacatcaaggaagatggcat

SEQ ID NO: 8332 - DNA, 19 bp, synthetic construct
  misc_feature 1..19: note = Description of Artificial Sequence: Synthetic Antisense oligonucleotide
  modified_base 1..2: mod_base = OTHER; note = bicyclic nucleic acid (BNA)
  modified_base 18..19: mod_base = OTHER; note = bicyclic nucleic acid (BNA)
  source 1..19: mol_type = other DNA
aacatcaaggaagatggca

SEQ ID NO: 8333 - DNA, 18 bp, synthetic construct
  misc_feature 1..18: note = Description of Artificial Sequence: Synthetic Antisense oligonucleotide
  modified_base 1..2: mod_base = OTHER; note = bicyclic nucleic acid (BNA)
  modified_base 17..18: mod_base = OTHER; note = bicyclic nucleic acid (BNA)
  source 1..18: mol_type = other DNA
aacatcaaggaagatggc

SEQ ID NO: 8334 - DNA, 17 bp, synthetic construct
  misc_feature 1..17: note = Description of Artificial Sequence: Synthetic Antisense oligonucleotide
  modified_base 1..2: mod_base = OTHER; note = bicyclic nucleic acid (BNA)
  modified_base 16..17: mod_base = OTHER; note = bicyclic nucleic acid (BNA)
  source 1..17: mol_type = other DNA
aacatcaaggaagatgg

SEQ ID NO: 8335 - DNA, 16 bp, synthetic construct
  misc_feature 1..16: note = Description of Artificial Sequence: Synthetic Antisense oligonucleotide
  modified_base 1..2: mod_base = OTHER; note = bicyclic nucleic acid (BNA)
  modified_base 15..16: mod_base = OTHER; note = bicyclic nucleic acid (BNA)
  source 1..16: mol_type = other DNA
aacatcaaggaagatg

SEQ ID NO: 8336 - DNA, 15 bp, synthetic construct
  misc_feature 1..15: note = Description of Artificial Sequence: Synthetic Antisense oligonucleotide
  modified_base 1..2: mod_base = OTHER; note = bicyclic nucleic acid (BNA)
  modified_base 14..15: mod_base = OTHER; note = bicyclic nucleic acid (BNA)
  source 1..15: mol_type = other DNA
aacatcaaggaagat

SEQ ID NO: 8337 - DNA, 14 bp, synthetic construct
  misc_feature 1..14: note = Description of Artificial Sequence: Synthetic Antisense oligonucleotide
  modified_base 1..2: mod_base = OTHER; note = bicyclic nucleic acid (BNA)
  modified_base 13..14: mod_base = OTHER; note = bicyclic nucleic acid (BNA)
  source 1..14: mol_type = other DNA
aacatcaaggaaga

SEQ ID NO: 8338 - DNA, 13 bp, synthetic construct
  misc_feature 1..13: note = Description of Artificial Sequence: Synthetic Antisense oligonucleotide
  modified_base 1..2: mod_base = OTHER; note = bicyclic nucleic acid (BNA)
  modified_base 12..13: mod_base = OTHER; note = bicyclic nucleic acid (BNA)
  source 1..13: mol_type = other DNA
aacatcaaggaag

SEQ ID NO: 8339 - DNA, 25 bp, synthetic construct
  misc_feature 1..25: note = Description of Artificial Sequence: Synthetic Antisense oligonucleotide
  modified_base 1..2: mod_base = OTHER; note = bicyclic nucleic acid (BNA)
  modified_base 24..25: mod_base = OTHER; note = bicyclic nucleic acid (BNA)
  source 1..25: mol_type = other DNA
acatcaaggaagatggcatttctag

SEQ ID NO: 8340 - DNA, 24 bp, synthetic construct
  misc_feature 1..24: note = Description of Artificial Sequence: Synthetic Antisense oligonucleotide
  modified_base 1..2: mod_base = OTHER; note = bicyclic nucleic acid (BNA)
  modified_base 23..24: mod_base = OTHER; note = bicyclic nucleic acid (BNA)
  source 1..24: mol_type = other DNA
acatcaaggaagatggcatttcta

SEQ ID NO: 8341 - DNA, 23 bp, synthetic construct
  misc_feature 1..23: note = Description of Artificial Sequence: Synthetic Antisense oligonucleotide
  modified_base 1..2: mod_base = OTHER; note = bicyclic nucleic acid (BNA)
  modified_base 22..23: mod_base = OTHER; note = bicyclic nucleic acid (BNA)
  source 1..23: mol_type = other DNA
acatcaaggaagatggcatttct

SEQ ID NO: 8342 - DNA, 22 bp, synthetic construct
  misc_feature 1..22: note = Description of Artificial Sequence: Synthetic Antisense oligonucleotide
  modified_base 1..2: mod_base = OTHER; note = bicyclic nucleic acid (BNA)
  modified_base 21..22: mod_base = OTHER; note = bicyclic nucleic acid (BNA)
  source 1..22: mol_type = other DNA
acatcaaggaagatggcatttc

SEQ ID NO: 8343 - DNA, 21 bp, synthetic construct
  misc_feature 1..21: note = Description of Artificial Sequence: Synthetic Antisense oligonucleotide
  modified_base 1..2: mod_base = OTHER; note = bicyclic nucleic acid (BNA)
  modified_base 20..21: mod_base = OTHER; note = bicyclic nucleic acid (BNA)
  source 1..21: mol_type = other DNA
acatcaaggaagatggcattt

SEQ ID NO: 8344 - DNA, 20 bp, synthetic construct
  misc_feature 1..20: note = Description of Artificial Sequence: Synthetic Antisense oligonucleotide
  modified_base 1..2: mod_base = OTHER; note = bicyclic nucleic acid (BNA)
  modified_base 19..20: mod_base = OTHER; note = bicyclic nucleic acid (BNA)
  source 1..20: mol_type = other DNA
acatcaaggaagatggcatt

SEQ ID NO: 8345 - DNA, 19 bp, synthetic construct
  misc_feature 1..19: note = Description of Artificial Sequence: Synthetic Antisense oligonucleotide
  modified_base 1..2: mod_base = OTHER; note = bicyclic nucleic acid (BNA)
  modified_base 18..19: mod_base = OTHER; note = bicyclic nucleic acid (BNA)
  source 1..19: mol_type = other DNA
acatcaaggaagatggcat

SEQ ID NO: 8346 - DNA, 18 bp, synthetic construct
  misc_feature 1..18: note = Description of Artificial Sequence: Synthetic Antisense oligonucleotide
  modified_base 1..2: mod_base = OTHER; note = bicyclic nucleic acid (BNA)
  modified_base 17..18: mod_base = OTHER; note = bicyclic nucleic acid (BNA)
  source 1..18: mol_type = other DNA
acatcaaggaagatggca

SEQ ID NO: 8347 - DNA, 17 bp, synthetic construct
  misc_feature 1..17: note = Description of Artificial Sequence: Synthetic Antisense oligonucleotide
  modified_base 1..2: mod_base = OTHER; note = bicyclic nucleic acid (BNA)
  modified_base 16..17: mod_base = OTHER; note = bicyclic nucleic acid (BNA)
  source 1..17: mol_type = other DNA
acatcaaggaagatggc

SEQ ID NO: 8348 - DNA, 16 bp, synthetic construct
  misc_feature 1..16: note = Description of Artificial Sequence: Synthetic Antisense oligonucleotide
  modified_base 1..2: mod_base = OTHER; note = bicyclic nucleic acid (BNA)
  modified_base 15..16: mod_base = OTHER; note = bicyclic nucleic acid (BNA)
  source 1..16: mol_type = other DNA
acatcaaggaagatgg

SEQ ID NO: 8349 - DNA, 15 bp, synthetic construct
  misc_feature 1..15: note = Description of Artificial Sequence: Synthetic Antisense oligonucleotide
  modified_base 1..2: mod_base = OTHER; note = bicyclic nucleic acid (BNA)
  modified_base 14..15: mod_base = OTHER; note = bicyclic nucleic acid (BNA)
  source 1..15: mol_type = other DNA
acatcaaggaagatg

SEQ ID NO: 8350 - DNA, 14 bp, synthetic construct
  misc_feature 1..14: note = Description of Artificial Sequence: Synthetic Antisense oligonucleotide
  modified_base 1..2: mod_base = OTHER; note = bicyclic nucleic acid (BNA)
  modified_base 13..14: mod_base = OTHER; note = bicyclic nucleic acid (BNA)
  source 1..14: mol_type = other DNA
acatcaaggaagat

SEQ ID NO: 8351 - DNA, 13 bp, synthetic construct
  misc_feature 1..13: note = Description of Artificial Sequence: Synthetic Antisense oligonucleotide
  modified_base 1..2: mod_base = OTHER; note = bicyclic nucleic acid (BNA)
  modified_base 12..13: mod_base = OTHER; note = bicyclic nucleic acid (BNA)
  source 1..13: mol_type = other DNA
acatcaaggaaga

SEQ ID NO: 8352 - DNA, 12 bp, synthetic construct
  misc_feature 1..12: note = Description of Artificial Sequence: Synthetic Antisense oligonucleotide
  modified_base 1..2: mod_base = OTHER; note = bicyclic nucleic acid (BNA)
  modified_base 11..12: mod_base = OTHER; note = bicyclic nucleic acid (BNA)
  source 1..12: mol_type = other DNA
acatcaaggaag

SEQ ID NO: 8353 - DNA, 24 bp, synthetic construct
  misc_feature 1..24: note = Description of Artificial Sequence: Synthetic Antisense oligonucleotide
  modified_base 1..2: mod_base = OTHER; note = bicyclic nucleic acid (BNA)
  modified_base 23..24: mod_base = OTHER; note = bicyclic nucleic acid (BNA)
  source 1..24: mol_type = other DNA
catcaaggaagatggcatttctag

SEQ ID NO: 8354 - DNA, 23 bp, synthetic construct
  misc_feature 1..23: note = Description of Artificial Sequence: Synthetic Antisense oligonucleotide
  modified_base 1..2: mod_base = OTHER; note = bicyclic nucleic acid (BNA)
  modified_base 22..23: mod_base = OTHER; note = bicyclic nucleic acid (BNA)
  source 1..23: mol_type = other DNA
catcaaggaagatggcatttcta

SEQ ID NO: 8355 - DNA, 22 bp, synthetic construct
  misc_feature 1..22: note = Description of Artificial Sequence: Synthetic Antisense oligonucleotide
  modified_base 1..2: mod_base = OTHER; note = bicyclic nucleic acid (BNA)
  modified_base 21..22: mod_base = OTHER; note = bicyclic nucleic acid (BNA)
  source 1..22: mol_type = other DNA
catcaaggaagatggcatttct

SEQ ID NO: 8356 - DNA, 21 bp, synthetic construct
  misc_feature 1..21: note = Description of Artificial Sequence: Synthetic Antisense oligonucleotide
  modified_base 1..2: mod_base = OTHER; note = bicyclic nucleic acid (BNA)
  modified_base 20..21: mod_base = OTHER; note = bicyclic nucleic acid (BNA)
  source 1..21: mol_type = other DNA
catcaaggaagatggcatttc

SEQ ID NO: 8357 - DNA, 20 bp, synthetic construct
  misc_feature 1..20: note = Description of Artificial Sequence: Synthetic Antisense oligonucleotide
  modified_base 1..2: mod_base = OTHER; note = bicyclic nucleic acid (BNA)
  modified_base 19..20: mod_base = OTHER; note = bicyclic nucleic acid (BNA)
  source 1..20: mol_type = other DNA
catcaaggaagatggcattt

SEQ ID NO: 8358 - DNA, 19 bp, synthetic construct
  misc_feature 1..19: note = Description of Artificial Sequence: Synthetic Antisense oligonucleotide
  modified_base 1..2: mod_base = OTHER; note = bicyclic nucleic acid (BNA)
  modified_base 18..19: mod_base = OTHER; note = bicyclic nucleic acid (BNA)
  source 1..19: mol_type = other DNA
catcaaggaagatggcatt

SEQ ID NO: 8359 - DNA, 18 bp, synthetic construct
  misc_feature 1..18: note = Description of Artificial Sequence: Synthetic Antisense oligonucleotide
  modified_base 1..2: mod_base = OTHER; note = bicyclic nucleic acid (BNA)
  modified_base 17..18: mod_base = OTHER; note = bicyclic nucleic acid (BNA)
  source 1..18: mol_type = other DNA
catcaaggaagatggcat

SEQ ID NO: 8360 - DNA, 17 bp, synthetic construct
  misc_feature 1..17: note = Description of Artificial Sequence: Synthetic Antisense oligonucleotide
  modified_base 1..2: mod_base = OTHER; note = bicyclic nucleic acid (BNA)
  modified_base 16..17: mod_base = OTHER; note = bicyclic nucleic acid (BNA)
  source 1..17: mol_type = other DNA
catcaaggaagatggca

SEQ ID NO: 8361 - DNA, 16 bp, synthetic construct
  misc_feature 1..16: note = Description of Artificial Sequence: Synthetic Antisense oligonucleotide
  modified_base 1..2: mod_base = OTHER; note = bicyclic nucleic acid (BNA)
  modified_base 15..16: mod_base = OTHER; note = bicyclic nucleic acid (BNA)
  source 1..16: mol_type = other DNA
catcaaggaagatggc

SEQ ID NO: 8362 - DNA, 15 bp, synthetic construct
  misc_feature 1..15: note = Description of Artificial Sequence: Synthetic Antisense oligonucleotide
  modified_base 1..2: mod_base = OTHER; note = bicyclic nucleic acid (BNA)
  modified_base 14..15: mod_base = OTHER; note = bicyclic nucleic acid (BNA)
  source 1..15: mol_type = other DNA
catcaaggaagatgg

SEQ ID NO: 8363 - DNA, 14 bp, synthetic construct
  misc_feature 1..14: note = Description of Artificial Sequence: Synthetic Antisense oligonucleotide
  modified_base 1..2: mod_base = OTHER; note = bicyclic nucleic acid (BNA)
  modified_base 13..14: mod_base = OTHER; note = bicyclic nucleic acid (BNA)
  source 1..14: mol_type = other DNA
catcaaggaagatg

SEQ ID NO: 8364 - DNA, 13 bp, synthetic construct
  misc_feature 1..13: note = Description of Artificial Sequence: Synthetic Antisense oligonucleotide
  modified_base 1..2: mod_base = OTHER; note = bicyclic nucleic acid (BNA)
  modified_base 12..13: mod_base = OTHER; note = bicyclic nucleic acid (BNA)
  source 1..13: mol_type = other DNA
catcaaggaagat

SEQ ID NO: 8365 - DNA, 12 bp, synthetic construct
  misc_feature 1..12: note = Description of Artificial Sequence: Synthetic Antisense oligonucleotide
  modified_base 1..2: mod_base = OTHER; note = bicyclic nucleic acid (BNA)
  modified_base 11..12: mod_base = OTHER; note = bicyclic nucleic acid (BNA)
  source 1..12: mol_type = other DNA
catcaaggaaga

SEQ ID NO: 8366 - DNA, 11 bp, synthetic construct
  misc_feature 1..11: note = Description of Artificial Sequence: Synthetic Antisense oligonucleotide
  modified_base 1..2: mod_base = OTHER; note = bicyclic nucleic acid (BNA)
  modified_base 10..11: mod_base = OTHER; note = bicyclic nucleic acid (BNA)
  source 1..11: mol_type = other DNA
catcaaggaag

SEQ ID NO: 8367 - DNA, 23 bp, synthetic construct
  misc_feature 1..23: note = Description of Artificial Sequence: Synthetic Antisense oligonucleotide
  modified_base 1..2: mod_base = OTHER; note = bicyclic nucleic acid (BNA)
  modified_base 22..23: mod_base = OTHER; note = bicyclic nucleic acid (BNA)
  source 1..23: mol_type = other DNA
atcaaggaagatggcatttctag

SEQ ID NO: 8368 - DNA, 22 bp, synthetic construct
  misc_feature 1..22: note = Description of Artificial Sequence: Synthetic Antisense oligonucleotide
  modified_base 1..2: mod_base = OTHER; note = bicyclic nucleic acid (BNA)
  modified_base 21..22: mod_base = OTHER; note = bicyclic nucleic acid (BNA)
  source 1..22: mol_type = other DNA
atcaaggaagatggcatttcta

SEQ ID NO: 8369 - DNA, 21 bp, synthetic construct
  misc_feature 1..21: note = Description of Artificial Sequence: Synthetic Antisense oligonucleotide
  modified_base 1..2: mod_base = OTHER; note = bicyclic nucleic acid (BNA)
  modified_base 20..21: mod_base = OTHER; note = bicyclic nucleic acid (BNA)
  source 1..21: mol_type = other DNA
atcaaggaagatggcatttct

SEQ ID NO: 8370 - DNA, 20 bp, synthetic construct
  misc_feature 1..20: note = Description of Artificial Sequence: Synthetic Antisense oligonucleotide
  modified_base 1..2: mod_base = OTHER; note = bicyclic nucleic acid (BNA)
  modified_base 19..20: mod_base = OTHER; note = bicyclic nucleic acid (BNA)
  source 1..20: mol_type = other DNA
atcaaggaagatggcatttc

SEQ ID NO: 8371 - DNA, 19 bp, synthetic construct
  misc_feature 1..19: note = Description of Artificial Sequence: Synthetic Antisense oligonucleotide
  modified_base 1..2: mod_base = OTHER; note = bicyclic nucleic acid (BNA)
  modified_base 18..19: mod_base = OTHER; note = bicyclic nucleic acid (BNA)
  source 1..19: mol_type = other DNA
atcaaggaagatggcattt

SEQ ID NO: 8372 - DNA, 18 bp, synthetic construct
  misc_feature 1..18: note = Description of Artificial Sequence: Synthetic Antisense oligonucleotide
  modified_base 1..2: mod_base = OTHER; note = bicyclic nucleic acid (BNA)
  modified_base 17..18: mod_base = OTHER; note = bicyclic nucleic acid (BNA)
  source 1..18: mol_type = other DNA
atcaaggaagatggcatt

SEQ ID NO: 8373 - DNA, 17 bp, synthetic construct
  misc_feature 1..17: note = Description of Artificial Sequence: Synthetic Antisense oligonucleotide
  modified_base 1..2: mod_base = OTHER; note = bicyclic nucleic acid (BNA)
  modified_base 16..17: mod_base = OTHER; note = bicyclic nucleic acid (BNA)
  source 1..17: mol_type = other DNA
atcaaggaagatggcat

SEQ ID NO: 8374 - DNA, 16 bp, synthetic construct
  misc_feature 1..16: note = Description of Artificial Sequence: Synthetic Antisense oligonucleotide
  modified_base 1..2: mod_base = OTHER; note = bicyclic nucleic acid (BNA)
  modified_base 15..16: mod_base = OTHER; note = bicyclic nucleic acid (BNA)
  source 1..16: mol_type = other DNA
atcaaggaagatggca

SEQ ID NO: 8375 - DNA, 15 bp, synthetic construct
  misc_feature 1..15: note = Description of Artificial Sequence: Synthetic Antisense oligonucleotide
  modified_base 1..2: mod_base = OTHER; note = bicyclic nucleic acid (BNA)
  modified_base 14..15: mod_base = OTHER; note = bicyclic nucleic acid (BNA)
  source 1..15: mol_type = other DNA
atcaaggaagatggc

SEQ ID NO: 8376 - DNA, 14 bp, synthetic construct
  misc_feature 1..14: note = Description of Artificial Sequence: Synthetic Antisense oligonucleotide
  modified_base 1..2: mod_base = OTHER; note = bicyclic nucleic acid (BNA)
  modified_base 13..14: mod_base = OTHER; note = bicyclic nucleic acid (BNA)
  source 1..14: mol_type = other DNA
atcaaggaagatgg

SEQ ID NO: 8377 - DNA, 13 bp, synthetic construct
  misc_feature 1..13: note = Description of Artificial Sequence: Synthetic Antisense oligonucleotide
  modified_base 1..2: mod_base = OTHER; note = bicyclic nucleic acid (BNA)
  modified_base 12..13: mod_base = OTHER; note = bicyclic nucleic acid (BNA)
  source 1..13: mol_type = other DNA
atcaaggaagatg

SEQ ID NO: 8378 - DNA, 12 bp, synthetic construct
  misc_feature 1..12: note = Description of Artificial Sequence: Synthetic Antisense oligonucleotide
  modified_base 1..2: mod_base = OTHER; note = bicyclic nucleic acid (BNA)
  modified_base 11..12: mod_base = OTHER; note = bicyclic nucleic acid (BNA)
  source 1..12: mol_type = other DNA
atcaaggaagat

SEQ ID NO: 8379 - DNA, 11 bp, synthetic construct
  misc_feature 1..11: note = Description of Artificial Sequence: Synthetic Antisense oligonucleotide
  modified_base 1..2: mod_base = OTHER; note = bicyclic nucleic acid (BNA)
  modified_base 10..11: mod_base = OTHER; note = bicyclic nucleic acid (BNA)
  source 1..11: mol_type = other DNA
atcaaggaaga

SEQ ID NO: 8380 - DNA, 10 bp, synthetic construct
  misc_feature 1..10: note = Description of Artificial Sequence: Synthetic Antisense oligonucleotide
  modified_base 1..2: mod_base = OTHER; note = bicyclic nucleic acid (BNA)
  modified_base 9..10: mod_base = OTHER; note = bicyclic nucleic acid (BNA)
  source 1..10: mol_type = other DNA
atcaaggaag

SEQ ID NO: 8381 - DNA, 18 bp, synthetic construct
  misc_feature 1..18: note = Description of Artificial Sequence: Synthetic Antisense oligonucleotide
  modified_base 1: mod_base = OTHER; note = bicyclic nucleic acid (BNA)
  modified_base 9: mod_base = OTHER; note = 5-methyl
  modified_base 13..14: mod_base = OTHER; note = 5-methyl
  modified_base 18: mod_base = OTHER; note = 5-methyl
  source 1..18: mol_type = other DNA
ggtaagttctgtccaagc

SEQ ID NO: 8382 - DNA, 18 bp, synthetic construct
  misc_feature 1..18: note = Description of Artificial Sequence: Synthetic Antisense oligonucleotide
  modified_base 1: mod_base = OTHER; note = bicyclic nucleic acid (BNA)
  modified_base 8: mod_base = OTHER; note = 5-methyl
  modified_base 12..13: mod_base = OTHER; note = 5-methyl
  modified_base 17..18: mod_base = OTHER; note = 5-methyl
  source 1..18: mol_type = other DNA
gtaagttctgtccaagcc

SEQ ID NO: 8383 - DNA, 18 bp, synthetic construct
  misc_feature 1..18: note = Description of Artificial Sequence: Synthetic Antisense oligonucleotide
  modified_base 1: mod_base = OTHER; note = bicyclic nucleic acid (BNA)
  modified_base 4: mod_base = OTHER; note = 5-methyl
  modified_base 13: mod_base = OTHER; note = 5-methyl
  modified_base 17..18: mod_base = OTHER; note = 5-methyl
  source 1..18: mol_type = other DNA
agtcggtaagttctgtcc

SEQ ID NO: 8384 - DNA, 18 bp, synthetic construct
  misc_feature 1..18: note = Description of Artificial Sequence: Synthetic Antisense oligonucleotide
  modified_base 1: mod_base = OTHER; note = 5-methyl
  modified_base 5..6: mod_base = OTHER; note = 5-methyl
  modified_base 10..12: mod_base = OTHER; note = 5-methyl
  modified_base 1: mod_base = OTHER; note = bicyclic nucleic acid (BNA)
  source 1..18: mol_type = other DNA
ctgtccaagcccggttga

SEQ ID NO: 8385 - DNA, 15 bp, synthetic construct
  misc_feature 1..15: note = Description of Artificial Sequence: Synthetic Antisense oligonucleotide
  modified_base 1: mod_base = OTHER; note = bicyclic nucleic acid (BNA)
  modified_base 7: mod_base = OTHER; note = 5-methyl
  modified_base 11..12: mod_base = OTHER; note = 5-methyl
  source 1..15: mol_type = other DNA
taagttctgtccaag

SEQ ID NO: 8386 - DNA, 20 bp, synthetic construct
  misc_feature 1..20: note = Description of Artificial Sequence: Synthetic Antisense oligonucleotide
  modified_base 1: mod_base = OTHER; note = bicyclic nucleic acid (BNA)
  modified_base 3: mod_base = OTHER; note = 5-methyl
  modified_base 7..8: mod_base = OTHER; note = 5-methyl
  modified_base 12..14: mod_base = OTHER; note = 5-methyl
  source 1..20: mol_type = other DNA
ttctgtccaagcccggttga

SEQ ID NO: 8387 - DNA, 19 bp, synthetic construct
  misc_feature 1..19: note = Description of Artificial Sequence: Synthetic Antisense oligonucleotide
  modified_base 1: mod_base = OTHER; note = bicyclic nucleic acid (BNA)
  modified_base 3: mod_base = OTHER; note = 5-methyl
  modified_base 7..8: mod_base = OTHER; note = 5-methyl
  modified_base 12..14: mod_base = OTHER; note = 5-methyl
  source 1..19: mol_type = other DNA
ttctgtccaagcccggttg

SEQ ID NO: 8388 - DNA, 18 bp, synthetic construct
  misc_feature 1..18: note = Description of Artificial Sequence: Synthetic Antisense oligonucleotide
  modified_base 1: mod_base = OTHER; note = bicyclic nucleic acid (BNA)
  modified_base 3: mod_base = OTHER; note = 5-methyl
  modified_base 7..8: mod_base = OTHER; note = 5-methyl
  modified_base 12..14: mod_base = OTHER; note = 5-methyl
  source 1..18: mol_type = other DNA
ttctgtccaagcccggtt

SEQ ID NO: 8389 - DNA, 17 bp, synthetic construct
  misc_feature 1..17: note = Description of Artificial Sequence: Synthetic Antisense oligonucleotide
  modified_base 1: mod_base = OTHER; note = bicyclic nucleic acid (BNA)
  modified_base 3: mod_base = OTHER; note = 5-methyl
  modified_base 7..8: mod_base = OTHER; note = 5-methyl
  modified_base 12..14: mod_base = OTHER; note = 5-methyl
  source 1..17: mol_type = other DNA
ttctgtccaagcccggt

SEQ ID NO: 8390 - DNA, 16 bp, synthetic construct
  misc_feature 1..16: note = Description of Artificial Sequence: Synthetic Antisense oligonucleotide
  modified_base 1: mod_base = OTHER; note = bicyclic nucleic acid (BNA)
  modified_base 3: mod_base = OTHER; note = 5-methyl
  modified_base 7..8: mod_base = OTHER; note = 5-methyl
  modified_base 12..14: mod_base = OTHER; note = 5-methyl
  source 1..16: mol_type = other DNA
ttctgtccaagcccgg

SEQ ID NO: 8391 - DNA, 15 bp, synthetic construct
  misc_feature 1..15: note = Description of Artificial Sequence: Synthetic Antisense oligonucleotide
  modified_base 1: mod_base = OTHER; note = bicyclic nucleic acid (BNA)
  modified_base 3: mod_base = OTHER; note = 5-methyl
  modified_base 7..8: mod_base = OTHER; note = 5-methyl
  modified_base 12..14: mod_base = OTHER; note = 5-methyl
  source 1..15: mol_type = other DNA
ttctgtccaagcccg

SEQ ID NO: 8392 - DNA, 14 bp, synthetic construct
  misc_feature 1..14: note = Description of Artificial Sequence: Synthetic Antisense oligonucleotide
  modified_base 1: mod_base = OTHER; note = bicyclic nucleic acid (BNA)
  modified_base 3: mod_base = OTHER; note = 5-methyl
  modified_base 7..8: mod_base = OTHER; note = 5-methyl
  modified_base 12..14: mod_base = OTHER; note = 5-methyl
  source 1..14: mol_type = other DNA
ttctgtccaagccc

SEQ ID NO: 8393 - DNA, 13 bp, synthetic construct
  misc_feature 1..13: note = Description of Artificial Sequence: Synthetic Antisense oligonucleotide
  modified_base 1: mod_base = OTHER; note = bicyclic nucleic acid (BNA)
  modified_base 3: mod_base = OTHER; note = 5-methyl
  modified_base 7..8: mod_base = OTHER; note = 5-methyl
  modified_base 12..13: mod_base = OTHER; note = 5-methyl
  source 1..13: mol_type = other DNA
ttctgtccaagcc

SEQ ID NO: 8394 - DNA, 12 bp, synthetic construct
  misc_feature 1..12: note = Description of Artificial Sequence: Synthetic Antisense oligonucleotide
  modified_base 1: mod_base = OTHER; note = bicyclic nucleic acid (BNA)
  modified_base 3: mod_base = OTHER; note = 5-methyl
  modified_base 7..8: mod_base = OTHER; note = 5-methyl
  modified_base 12: mod_base = OTHER; note = 5-methyl
  source 1..12: mol_type = other DNA
ttctgtccaagc

SEQ ID NO: 8395 - DNA, 11 bp, synthetic construct
  misc_feature 1..11: note = Description of Artificial Sequence: Synthetic Antisense oligonucleotide
  modified_base 1: mod_base = OTHER; note = bicyclic nucleic acid (BNA)
  modified_base 3: mod_base = OTHER; note = 5-methyl
  modified_base 7..8: mod_base = OTHER; note = 5-methyl
  source 1..11: mol_type = other DNA
ttctgtccaag

SEQ ID NO: 8396 - DNA, 10 bp, synthetic construct
  misc_feature 1..10: note = Description of Artificial Sequence: Synthetic Antisense oligonucleotide
  modified_base 1: mod_base = OTHER; note = bicyclic nucleic acid (BNA)
  modified_base 3: mod_base = OTHER; note = 5-methyl
  modified_base 7..8: mod_base = OTHER; note = 5-methyl
  source 1..10: mol_type = other DNA
ttctgtccaa

SEQ ID NO: 8397-8398 - skipped (2 entries)

SEQ ID NO: 8399 - DNA, 19 bp, synthetic construct
  misc_feature 1..19: note = Description of Artificial Sequence: Synthetic Antisense oligonucleotide
  modified_base 1: mod_base = OTHER; note = bicyclic nucleic acid (BNA)
  modified_base 2: mod_base = OTHER; note = 5-methyl
  modified_base 6..7: mod_base = OTHER; note = 5-methyl
  modified_base 11..13: mod_base = OTHER; note = 5-methyl
  source 1..19: mol_type = other DNA
tctgtccaagcccggttga

SEQ ID NO: 8400 - DNA, 18 bp, synthetic construct
  misc_feature 1..18: note = Description of Artificial Sequence: Synthetic Antisense oligonucleotide
  modified_base 1: mod_base = OTHER; note = bicyclic nucleic acid (BNA)
  modified_base 2: mod_base = OTHER; note = 5-methyl
  modified_base 6..7: mod_base = OTHER; note = 5-methyl
  modified_base 11..13: mod_base = OTHER; note = 5-methyl
  source 1..18: mol_type = other DNA
tctgtccaagcccggttg

SEQ ID NO: 8401 - DNA, 17 bp, synthetic construct
  misc_feature 1..17: note = Description of Artificial Sequence: Synthetic Antisense oligonucleotide
  modified_base 1: mod_base = OTHER; note = bicyclic nucleic acid (BNA)
  modified_base 2: mod_base = OTHER; note = 5-methyl
  modified_base 6..7: mod_base = OTHER; note = 5-methyl
  modified_base 11..13: mod_base = OTHER; note = 5-methyl
  source 1..17: mol_type = other DNA
tctgtccaagcccggtt

SEQ ID NO: 8402 - DNA, 16 bp, synthetic construct
  misc_feature 1..16: note = Description of Artificial Sequence: Synthetic Antisense oligonucleotide
  modified_base 1: mod_base = OTHER; note = bicyclic nucleic acid (BNA)
  modified_base 2: mod_base = OTHER; note = 5-methyl
  modified_base 6..7: mod_base = OTHER; note = 5-methyl
  modified_base 11..13: mod_base = OTHER; note = 5-methyl
  source 1..16: mol_type = other DNA
tctgtccaagcccggt

SEQ ID NO: 8403 - DNA, 15 bp, synthetic construct
  misc_feature 1..15: note = Description of Artificial Sequence: Synthetic Antisense oligonucleotide
  modified_base 1: mod_base = OTHER; note = bicyclic nucleic acid (BNA)
  modified_base 2: mod_base = OTHER; note = 5-methyl
  modified_base 6..7: mod_base = OTHER; note = 5-methyl
  modified_base 11..13: mod_base = OTHER; note = 5-methyl
  source 1..15: mol_type = other DNA
tctgtccaagcccgg

SEQ ID NO: 8404 - DNA, 14 bp, synthetic construct
  misc_feature 1..14: note = Description of Artificial Sequence: Synthetic Antisense oligonucleotide
  modified_base 1: mod_base = OTHER; note = bicyclic nucleic acid (BNA)
  modified_base 2: mod_base = OTHER; note = 5-methyl
  modified_base 6..7: mod_base = OTHER; note = 5-methyl
  modified_base 11..13: mod_base = OTHER; note = 5-methyl
  source 1..14: mol_type = other DNA
tctgtccaagcccg

SEQ ID NO: 8405 - DNA, 13 bp, synthetic construct
  misc_feature 1..13: note = Description of Artificial Sequence: Synthetic Antisense oligonucleotide
  modified_base 1: mod_base = OTHER; note = bicyclic nucleic acid (BNA)
  modified_base 2: mod_base = OTHER; note = 5-methyl
  modified_base 6..7: mod_base = OTHER; note = 5-methyl
  modified_base 11..13: mod_base = OTHER; note = 5-methyl
  source 1..13: mol_type = other DNA
tctgtccaagccc

SEQ ID NO: 8406 - DNA, 12 bp, synthetic construct
  misc_feature 1..12: note = Description of Artificial Sequence: Synthetic Antisense oligonucleotide
  modified_base 1: mod_base = OTHER; note = bicyclic nucleic acid (BNA)
  modified_base 2: mod_base = OTHER; note = 5-methyl
  modified_base 6..7: mod_base = OTHER; note = 5-methyl
  modified_base 11..12: mod_base = OTHER; note = 5-methyl
  source 1..12: mol_type = other DNA
tctgtccaagcc

SEQ ID NO: 8407 - DNA, 11 bp, synthetic construct
  misc_feature 1..11: note = Description of Artificial Sequence: Synthetic Antisense oligonucleotide
  modified_base 1: mod_base = OTHER; note = bicyclic nucleic acid (BNA)
  modified_base 2: mod_base = OTHER; note = 5-methyl
  modified_base 6..7: mod_base = OTHER; note = 5-methyl
  modified_base 11: mod_base = OTHER; note = 5-methyl
  source 1..11: mol_type = other DNA
tctgtccaagc

SEQ ID NO: 8408 - DNA, 10 bp, synthetic construct
  misc_feature 1..10: note = Description of Artificial Sequence: Synthetic Antisense oligonucleotide
  modified_base 1: mod_base = OTHER; note = bicyclic nucleic acid (BNA)
  modified_base 2: mod_base = OTHER; note = 5-methyl
  modified_base 6..7: mod_base = OTHER; note = 5-methyl
  source 1..10: mol_type = other DNA
tctgtccaag

SEQ ID NO: 8409-8410 - skipped (2 entries)

SEQ ID NO: 8411 - DNA, 17 bp, synthetic construct
  misc_feature 1..17: note = Description of Artificial Sequence: Synthetic Antisense oligonucleotide
  modified_base 1: mod_base = OTHER; note = 5-methyl
  modified_base 5..6: mod_base = OTHER; note = 5-methyl
  modified_base 10..12: mod_base = OTHER; note = 5-methyl
  modified_base 1: mod_base = OTHER; note = bicyclic nucleic acid (BNA)
  source 1..17: mol_type = other DNA
ctgtccaagcccggttg

SEQ ID NO: 8412 - DNA, 16 bp, synthetic construct
  misc_feature 1..16: note = Description of Artificial Sequence: Synthetic Antisense oligonucleotide
  modified_base 1: mod_base = OTHER; note = 5-methyl
  modified_base 5..6: mod_base = OTHER; note = 5-methyl
  modified_base 10..12: mod_base = OTHER; note = 5-methyl
  modified_base 1: mod_base = OTHER; note = bicyclic nucleic acid (BNA)
  source 1..16: mol_type = other DNA
ctgtccaagcccggtt

SEQ ID NO: 8413 - DNA, 15 bp, synthetic construct
  misc_feature 1..15: note = Description of Artificial Sequence: Synthetic Antisense oligonucleotide
  modified_base 1: mod_base = OTHER; note = 5-methyl
  modified_base 5..6: mod_base = OTHER; note = 5-methyl
  modified_base 10..12: mod_base = OTHER; note = 5-methyl
  modified_base 1: mod_base = OTHER; note = bicyclic nucleic acid (BNA)
  source 1..15: mol_type = other DNA
ctgtccaagcccggt

SEQ ID NO: 8414 - DNA, 14 bp, synthetic construct
  misc_feature 1..14: note = Description of Artificial Sequence: Synthetic Antisense oligonucleotide
  modified_base 1: mod_base = OTHER; note = 5-methyl
  modified_base 5..6: mod_base = OTHER; note = 5-methyl
  modified_base 10..12: mod_base = OTHER; note = 5-methyl
  modified_base 1: mod_base = OTHER; note = bicyclic nucleic acid (BNA)
  source 1..14: mol_type = other DNA
ctgtccaagcccgg

SEQ ID NO: 8415 - DNA, 13 bp, synthetic construct
  misc_feature 1..13: note = Description of Artificial Sequence: Synthetic Antisense oligonucleotide
  modified_base 1: mod_base = OTHER; note = 5-methyl
  modified_base 5..6: mod_base = OTHER; note = 5-methyl
  modified_base 10..12: mod_base = OTHER; note = 5-methyl
  modified_base 1: mod_base = OTHER; note = bicyclic nucleic acid (BNA)
  source 1..13: mol_type = other DNA
ctgtccaagcccg

SEQ ID NO: 8416 - DNA, 12 bp, synthetic construct
  misc_feature 1..12: note = Description of Artificial Sequence: Synthetic Antisense oligonucleotide
  modified_base 1: mod_base = OTHER; note = 5-methyl
  modified_base 5..6: mod_base = OTHER; note = 5-methyl
  modified_base 10..12: mod_base = OTHER; note = 5-methyl
  modified_base 1: mod_base = OTHER; note = bicyclic nucleic acid (BNA)
  source 1..12: mol_type = other DNA
ctgtccaagccc

SEQ ID NO: 8417 - DNA, 11 bp, synthetic construct
  misc_feature 1..11: note = Description of Artificial Sequence: Synthetic Antisense oligonucleotide
  modified_base 1: mod_base = OTHER; note = 5-methyl
  modified_base 5..6: mod_base = OTHER; note = 5-methyl
  modified_base 10..11: mod_base = OTHER; note = 5-methyl
  modified_base 1: mod_base = OTHER; note = bicyclic nucleic acid (BNA)
  source 1..11: mol_type = other DNA
ctgtccaagcc

SEQ ID NO: 8418 - DNA, 10 bp, synthetic construct
  misc_feature 1..10: note = Description of Artificial Sequence: Synthetic Antisense oligonucleotide
  modified_base 1: mod_base = OTHER; note = 5-methyl
  modified_base 5..6: mod_base = OTHER; note = 5-methyl
  modified_base 10: mod_base = OTHER; note = 5-methyl
  modified_base 1: mod_base = OTHER; note = bicyclic nucleic acid (BNA)
  source 1..10: mol_type = other DNA
ctgtccaagc

SEQ ID NO: 8419-8420 - skipped (2 entries)

SEQ ID NO: 8421 - DNA, 20 bp, synthetic construct
  misc_feature 1..20: note = Description of Artificial Sequence: Synthetic Antisense oligonucleotide
  modified_base 1: mod_base = OTHER; note = bicyclic nucleic acid (BNA)
  modified_base 4: mod_base = OTHER; note = 5-methyl
  modified_base 8..9: mod_base = OTHER; note = 5-methyl
  modified_base 13..15: mod_base = OTHER; note = 5-methyl
  source 1..20: mol_type = other DNA
gttctgtccaagcccggttg

SEQ ID NO: 8422 - DNA, 19 bp, synthetic construct
  misc_feature 1..19: note = Description of Artificial Sequence: Synthetic Antisense oligonucleotide
  modified_base 1: mod_base = OTHER; note = bicyclic nucleic acid (BNA)
  modified_base 4: mod_base = OTHER; note = 5-methyl
  modified_base 8..9: mod_base = OTHER; note = 5-methyl
  modified_base 13..15: mod_base = OTHER; note = 5-methyl
  source 1..19: mol_type = other DNA
gttctgtccaagcccggtt

SEQ ID NO: 8423 - DNA, 18 bp, synthetic construct
  misc_feature 1..18: note = Description of Artificial Sequence: Synthetic Antisense oligonucleotide
  modified_base 1: mod_base = OTHER; note = bicyclic nucleic acid (BNA)
  modified_base 4: mod_base = OTHER; note = 5-methyl
  modified_base 8..9: mod_base = OTHER; note = 5-methyl
  modified_base 13..15: mod_base = OTHER; note = 5-methyl
  source 1..18: mol_type = other DNA
gttctgtccaagcccggt

SEQ ID NO: 8424 - DNA, 17 bp, synthetic construct
  misc_feature 1..17: note = Description of Artificial Sequence: Synthetic Antisense oligonucleotide
  modified_base 1: mod_base = OTHER; note = bicyclic nucleic acid (BNA)
  modified_base 4: mod_base = OTHER; note = 5-methyl
  modified_base 8..9: mod_base = OTHER; note = 5-methyl
  modified_base 13..15: mod_base = OTHER; note = 5-methyl
  source 1..17: mol_type = other DNA
gttctgtccaagcccgg

SEQ ID NO: 8425 - DNA, 16 bp, synthetic construct
  misc_feature 1..16: note = Description of Artificial Sequence: Synthetic Antisense oligonucleotide
  modified_base 1: mod_base = OTHER; note = bicyclic nucleic acid (BNA)
  modified_base 4: mod_base = OTHER; note = 5-methyl
  modified_base 8..9: mod_base = OTHER; note = 5-methyl
  modified_base 13..15: mod_base = OTHER; note = 5-methyl
  source 1..16: mol_type = other DNA
gttctgtccaagcccg

SEQ ID NO: 8426 - DNA, 15 bp, synthetic construct
  misc_feature 1..15: note = Description of Artificial Sequence: Synthetic Antisense oligonucleotide
  modified_base 1: mod_base = OTHER; note = bicyclic nucleic acid (BNA)
  modified_base 4: mod_base = OTHER; note = 5-methyl
  modified_base 8..9: mod_base = OTHER; note = 5-methyl
  modified_base 13..15: mod_base = OTHER; note = 5-methyl
  source 1..15: mol_type = other DNA
gttctgtccaagccc

SEQ ID NO: 8427 - DNA, 14 bp, synthetic construct
  misc_feature 1..14: note = Description of Artificial Sequence: Synthetic Antisense oligonucleotide
  modified_base 1: mod_base = OTHER; note = bicyclic nucleic acid (BNA)
  modified_base 4: mod_base = OTHER; note = 5-methyl
  modified_base 8..9: mod_base = OTHER; note = 5-methyl
  modified_base 13..14: mod_base = OTHER; note = 5-methyl
  source 1..14: mol_type = other DNA
gttctgtccaagcc

SEQ ID NO: 8428 - DNA, 13 bp, synthetic construct
  misc_feature 1..13: note = Description of Artificial Sequence: Synthetic Antisense oligonucleotide
  modified_base 1: mod_base = OTHER; note = bicyclic nucleic acid (BNA)
  modified_base 4: mod_base = OTHER; note = 5-methyl
  modified_base 8..9: mod_base = OTHER; note = 5-methyl
  modified_base 13: mod_base = OTHER; note = 5-methyl
  source 1..13: mol_type = other DNA
gttctgtccaagc

SEQ ID NO: 8429 - DNA, 12 bp, synthetic construct
  misc_feature 1..12: note = Description of Artificial Sequence: Synthetic Antisense oligonucleotide
  modified_base 1: mod_base = OTHER; note = bicyclic nucleic acid (BNA)
  modified_base 4: mod_base = OTHER; note = 5-methyl
  modified_base 8..9: mod_base = OTHER; note = 5-methyl
  source 1..12: mol_type = other DNA
gttctgtccaag

SEQ ID NO: 8430 - DNA, 11 bp, synthetic construct
  misc_feature 1..11: note = Description of Artificial Sequence: Synthetic Antisense oligonucleotide
  modified_base 1: mod_base = OTHER; note = bicyclic nucleic acid (BNA)
  modified_base 4: mod_base = OTHER; note = 5-methyl
  modified_base 8..9: mod_base = OTHER; note = 5-methyl
  source 1..11: mol_type = other DNA
gttctgtccaa

SEQ ID NO: 8431 - DNA, 10 bp, synthetic construct
  misc_feature 1..10: note = Description of Artificial Sequence: Synthetic Antisense oligonucleotide
  modified_base 1: mod_base = OTHER; note = bicyclic nucleic acid (BNA)
  modified_base 4: mod_base = OTHER; note = 5-methyl
  modified_base 8..9: mod_base = OTHER; note = 5-methyl
  source 1..10: mol_type = other DNA
gttctgtcca

SEQ ID NO: 8432-8433 - skipped (2 entries)

SEQ ID NO: 8434 - DNA, 20 bp, synthetic construct
  misc_feature 1..20: note = Description of Artificial Sequence: Synthetic Antisense oligonucleotide
  modified_base 1: mod_base = OTHER; note = bicyclic nucleic acid (BNA)
  modified_base 5: mod_base = OTHER; note = 5-methyl
  modified_base 9..10: mod_base = OTHER; note = 5-methyl
  modified_base 14..16: mod_base = OTHER; note = 5-methyl
  source 1..20: mol_type = other DNA
agttctgtccaagcccggtt

SEQ ID NO: 8435 - DNA, 19 bp, synthetic construct
  misc_feature 1..19: note = Description of Artificial Sequence: Synthetic Antisense oligonucleotide
  modified_base 1: mod_base = OTHER; note = bicyclic nucleic acid (BNA)
  modified_base 5: mod_base = OTHER; note = 5-methyl
  modified_base 9..10: mod_base = OTHER; note = 5-methyl
  modified_base 14..16: mod_base = OTHER; note = 5-methyl
  source 1..19: mol_type = other DNA
agttctgtccaagcccggt

SEQ ID NO: 8436 - DNA, 18 bp, synthetic construct
  misc_feature 1..18: note = Description of Artificial Sequence: Synthetic Antisense oligonucleotide
  modified_base 1: mod_base = OTHER; note = bicyclic nucleic acid (BNA)
  modified_base 5: mod_base = OTHER; note = 5-methyl
  modified_base 9..10: mod_base = OTHER; note = 5-methyl
  modified_base 14..16: mod_base = OTHER; note = 5-methyl
  source 1..18: mol_type = other DNA
agttctgtccaagcccgg

SEQ ID NO: 8437 - DNA, 17 bp, synthetic construct
  misc_feature 1..17: note = Description of Artificial Sequence: Synthetic Antisense oligonucleotide
  modified_base 1: mod_base = OTHER; note = bicyclic nucleic acid (BNA)
  modified_base 5: mod_base = OTHER; note = 5-methyl
  modified_base 9..10: mod_base = OTHER; note = 5-methyl
  modified_base 14..16: mod_base = OTHER; note = 5-methyl
  source 1..17: mol_type = other DNA
agttctgtccaagcccg

SEQ ID NO: 8438 - DNA, 16 bp, synthetic construct
  misc_feature 1..16: note = Description of Artificial Sequence: Synthetic Antisense oligonucleotide
  modified_base 1: mod_base = OTHER; note = bicyclic nucleic acid (BNA)
  modified_base 5: mod_base = OTHER; note = 5-methyl
  modified_base 9..10: mod_base = OTHER; note = 5-methyl
  modified_base 14..16: mod_base = OTHER; note = 5-methyl
  source 1..16: mol_type = other DNA
agttctgtccaagccc

SEQ ID NO: 8439 - DNA, 15 bp, synthetic construct
  misc_feature 1..15: note = Description of Artificial Sequence: Synthetic Antisense oligonucleotide
  modified_base 1: mod_base = OTHER; note = bicyclic nucleic acid (BNA)
  modified_base 5: mod_base = OTHER; note = 5-methyl
  modified_base 9..10: mod_base = OTHER; note = 5-methyl
  modified_base 14..15: mod_base = OTHER; note = 5-methyl
  source 1..15: mol_type = other DNA
agttctgtccaagcc

SEQ ID NO: 8440 - DNA, 14 bp, synthetic construct
  misc_feature 1..14: note = Description of Artificial Sequence: Synthetic Antisense oligonucleotide
  modified_base 1: mod_base = OTHER; note = bicyclic nucleic acid (BNA)
  modified_base 5: mod_base = OTHER; note = 5-methyl
  modified_base 9..10: mod_base = OTHER; note = 5-methyl
  modified_base 14: mod_base = OTHER; note = 5-methyl
  source 1..14: mol_type = other DNA
agttctgtccaagc

SEQ ID NO: 8441 - DNA, 13 bp, synthetic construct
  misc_feature 1..13: note = Description of Artificial Sequence: Synthetic Antisense oligonucleotide
  modified_base 1: mod_base = OTHER; note = bicyclic nucleic acid (BNA)
  modified_base 5: mod_base = OTHER; note = 5-methyl
  modified_base 9..10: mod_base = OTHER; note = 5-methyl
  source 1..13: mol_type = other DNA
agttctgtccaag

SEQ ID NO: 8442 - DNA, 12 bp, synthetic construct
  misc_feature 1..12: note = Description of Artificial Sequence: Synthetic Antisense oligonucleotide
  modified_base 1: mod_base = OTHER; note = bicyclic nucleic acid (BNA)
  modified_base 5: mod_base = OTHER; note = 5-methyl
  modified_base 9..10: mod_base = OTHER; note = 5-methyl
  source 1..12: mol_type = other DNA
agttctgtccaa

SEQ ID NO: 8443 - DNA, 11 bp, synthetic construct
  misc_feature 1..11: note = Description of Artificial Sequence: Synthetic Antisense oligonucleotide
  modified_base 1: mod_base = OTHER; note = bicyclic nucleic acid (BNA)
  modified_base 5: mod_base = OTHER; note = 5-methyl
  modified_base 9..10: mod_base = OTHER; note = 5-methyl
  source 1..11: mol_type = other DNA
agttctgtcca

SEQ ID NO: 8444 - DNA, 10 bp, synthetic construct
  misc_feature 1..10: note = Description of Artificial Sequence: Synthetic Antisense oligonucleotide
  modified_base 1: mod_base = OTHER; note = bicyclic nucleic acid (BNA)
  modified_base 5: mod_base = OTHER; note = 5-methyl
  modified_base 9..10: mod_base = OTHER; note = 5-methyl
  source 1..10: mol_type = other DNA
agttctgtcc

SEQ ID NO: 8445-8446 - skipped (2 entries)

SEQ ID NO: 8447 - DNA, 20 bp, synthetic construct
  misc_feature 1..20: note = Description of Artificial Sequence: Synthetic Antisense oligonucleotide
  modified_base 1: mod_base = OTHER; note = bicyclic nucleic acid (BNA)
  modified_base 6: mod_base = OTHER; note = 5-methyl
  modified_base 10..11: mod_base = OTHER; note = 5-methyl
  modified_base 15..17: mod_base = OTHER; note = 5-methyl
  source 1..20: mol_type = other DNA
aagttctgtccaagcccggt

SEQ ID NO: 8448 - DNA, 19 bp, synthetic construct
  misc_feature 1..19: note = Description of Artificial Sequence: Synthetic Antisense oligonucleotide
  modified_base 1: mod_base = OTHER; note = bicyclic nucleic acid (BNA)
  modified_base 6: mod_base = OTHER; note = 5-methyl
  modified_base 10..11: mod_base = OTHER; note = 5-methyl
  modified_base 15..17: mod_base = OTHER; note = 5-methyl
  source 1..19: mol_type = other DNA
aagttctgtccaagcccgg

SEQ ID NO: 8449 - DNA, 18 bp, synthetic construct
  misc_feature 1..18: note = Description of Artificial Sequence: Synthetic Antisense oligonucleotide
  modified_base 1: mod_base = OTHER; note = bicyclic nucleic acid (BNA)
  modified_base 6: mod_base = OTHER; note = 5-methyl
  modified_base 10..11: mod_base = OTHER; note = 5-methyl
  modified_base 15..17: mod_base = OTHER; note = 5-methyl
  source 1..18: mol_type = other DNA
aagttctgtccaagcccg

SEQ ID NO: 8450 - DNA, 17 bp, synthetic construct
  misc_feature 1..17: note = Description of Artificial Sequence: Synthetic Antisense oligonucleotide
  modified_base 1: mod_base = OTHER; note = bicyclic nucleic acid (BNA)
  modified_base 6: mod_base = OTHER; note = 5-methyl
  modified_base 10..11: mod_base = OTHER; note = 5-methyl
  modified_base 15..17: mod_base = OTHER; note = 5-methyl
  source 1..17: mol_type = other DNA
aagttctgtccaagccc

SEQ ID NO: 8451 - DNA, 16 bp, synthetic construct
  misc_feature 1..16: note = Description of Artificial Sequence: Synthetic Antisense oligonucleotide
  modified_base 1: mod_base = OTHER; note = bicyclic nucleic acid (BNA)
  modified_base 6: mod_base = OTHER; note = 5-methyl
  modified_base 10..11: mod_base = OTHER; note = 5-methyl
  modified_base 15..16: mod_base = OTHER; note = 5-methyl
  source 1..16: mol_type = other DNA
aagttctgtccaagcc

SEQ ID NO: 8452 - DNA, 15 bp, synthetic construct
  misc_feature 1..15: note = Description of Artificial Sequence: Synthetic Antisense oligonucleotide
  modified_base 1: mod_base = OTHER; note = bicyclic nucleic acid (BNA)
  modified_base 6: mod_base = OTHER; note = 5-methyl
  modified_base 10..11: mod_base = OTHER; note = 5-methyl
  modified_base 15: mod_base = OTHER; note = 5-methyl
  source 1..15: mol_type = other DNA
aagttctgtccaagc

SEQ ID NO: 8453 - DNA, 14 bp, synthetic construct
  misc_feature 1..14: note = Description of Artificial Sequence: Synthetic Antisense oligonucleotide
  modified_base 1: mod_base = OTHER; note = bicyclic nucleic acid (BNA)
  modified_base 6: mod_base = OTHER; note = 5-methyl
  modified_base 10..11: mod_base = OTHER; note = 5-methyl
  source 1..14: mol_type = other DNA
aagttctgtccaag

SEQ ID NO: 8454 - DNA, 13 bp, synthetic construct
  misc_feature 1..13: note = Description of Artificial Sequence: Synthetic Antisense oligonucleotide
  modified_base 1: mod_base = OTHER; note = bicyclic nucleic acid (BNA)
  modified_base 6: mod_base = OTHER; note = 5-methyl
  modified_base 10..11: mod_base = OTHER; note = 5-methyl
  source 1..13: mol_type = other DNA
aagttctgtccaa

SEQ ID NO: 8455 - DNA, 12 bp, synthetic construct
  misc_feature 1..12: note = Description of Artificial Sequence: Synthetic Antisense oligonucleotide
  modified_base 1: mod_base = OTHER; note = bicyclic nucleic acid (BNA)
  modified_base 6: mod_base = OTHER; note = 5-methyl
  modified_base 10..11: mod_base = OTHER; note = 5-methyl
  source 1..12: mol_type = other DNA
aagttctgtcca

SEQ ID NO: 8456 - DNA, 11 bp, synthetic construct
  misc_feature 1..11: note = Description of Artificial Sequence: Synthetic Antisense oligonucleotide
  modified_base 1: mod_base = OTHER; note = bicyclic nucleic acid (BNA)
  modified_base 6: mod_base = OTHER; note = 5-methyl
  modified_base 10..11: mod_base = OTHER; note = 5-methyl
  source 1..11: mol_type = other DNA
aagttctgtcc

SEQ ID NO: 8457 - DNA, 10 bp, synthetic construct
  misc_feature 1..10: note = Description of Artificial Sequence: Synthetic Antisense oligonucleotide
  modified_base 1: mod_base = OTHER; note = bicyclic nucleic acid (BNA)
  modified_base 6: mod_base = OTHER; note = 5-methyl
  modified_base 10: mod_base = OTHER; note = 5-methyl
  source 1..10: mol_type = other DNA
aagttctgtc

SEQ ID NO: 8458-8459 - skipped (2 entries)

SEQ ID NO: 8460 - DNA, 20 bp, synthetic construct
  misc_feature 1..20: note = Description of Artificial Sequence: Synthetic Antisense oligonucleotide
  modified_base 1: mod_base = OTHER; note = bicyclic nucleic acid (BNA)
  modified_base 7: mod_base = OTHER; note = 5-methyl
  modified_base 11..12: mod_base = OTHER; note = 5-methyl
  modified_base 16..18: mod_base = OTHER; note = 5-methyl
  source 1..20: mol_type = other DNA
taagttctgtccaagcccgg

SEQ ID NO: 8461 - DNA, 19 bp, synthetic construct
  misc_feature 1..19: note = Description of Artificial Sequence: Synthetic Antisense oligonucleotide
  modified_base 1: mod_base = OTHER; note = bicyclic nucleic acid (BNA)
  modified_base 7: mod_base = OTHER; note = 5-methyl
  modified_base 11..12: mod_base = OTHER; note = 5-methyl
  modified_base 16..18: mod_base = OTHER; note = 5-methyl
  source 1..19: mol_type = other DNA
taagttctgtccaagcccg

SEQ ID NO: 8462 - DNA, 18 bp, synthetic construct
  misc_feature 1..18: note = Description of Artificial Sequence: Synthetic Antisense oligonucleotide
  modified_base 1: mod_base = OTHER; note = bicyclic nucleic acid (BNA)
  modified_base 7: mod_base = OTHER; note = 5-methyl
  modified_base 11..12: mod_base = OTHER; note = 5-methyl
  modified_base 16..18: mod_base = OTHER; note = 5-methyl
  source 1..18: mol_type = other DNA
taagttctgtccaagccc

SEQ ID NO: 8463 - DNA, 17 bp, synthetic construct
  misc_feature 1..17: note = Description of Artificial Sequence: Synthetic Antisense oligonucleotide
  modified_base 1: mod_base = OTHER; note = bicyclic nucleic acid (BNA)
  modified_base 7: mod_base = OTHER; note = 5-methyl
  modified_base 11..12: mod_base = OTHER; note = 5-methyl
  modified_base 16..17: mod_base = OTHER; note = 5-methyl
  source 1..17: mol_type = other DNA
taagttctgtccaagcc

SEQ ID NO: 8464 - DNA, 16 bp, synthetic construct
  misc_feature 1..16: note = Description of Artificial Sequence: Synthetic Antisense oligonucleotide
  modified_base 1: mod_base = OTHER; note = bicyclic nucleic acid (BNA)
  modified_base 7: mod_base = OTHER; note = 5-methyl
  modified_base 11..12: mod_base = OTHER; note = 5-methyl
  modified_base 16: mod_base = OTHER; note = 5-methyl
  source 1..16: mol_type = other DNA
taagttctgtccaagc

SEQ ID NO: 8465 - DNA, 14 bp, synthetic construct
  misc_feature 1..14: note = Description of Artificial Sequence: Synthetic Antisense oligonucleotide
  modified_base 1: mod_base = OTHER; note = bicyclic nucleic acid (BNA)
  modified_base 7: mod_base = OTHER; note = 5-methyl
  modified_base 11..12: mod_base = OTHER; note = 5-methyl
  source 1..14: mol_type = other DNA
taagttctgtccaa

SEQ ID NO: 8466 - DNA, 13 bp, synthetic construct
  misc_feature 1..13: note = Description of Artificial Sequence: Synthetic Antisense oligonucleotide
  modified_base 1: mod_base = OTHER; note = bicyclic nucleic acid (BNA)
  modified_base 7: mod_base = OTHER; note = 5-methyl
  modified_base 11..12: mod_base = OTHER; note = 5-methyl
  source 1..13: mol_type = other DNA
taagttctgtcca

SEQ ID NO: 8467 - DNA, 12 bp, synthetic construct
  misc_feature 1..12: note = Description of Artificial Sequence: Synthetic Antisense oligonucleotide
  modified_base 1: mod_base = OTHER; note = bicyclic nucleic acid (BNA)
  modified_base 7: mod_base = OTHER; note = 5-methyl
  modified_base 11..12: mod_base = OTHER; note = 5-methyl
  source 1..12: mol_type = other DNA
taagttctgtcc

SEQ ID NO: 8468 - DNA, 11 bp, synthetic construct
  misc_feature 1..11: note = Description of Artificial Sequence: Synthetic Antisense oligonucleotide
  modified_base 1: mod_base = OTHER; note = bicyclic nucleic acid (BNA)
  modified_base 7: mod_base = OTHER; note = 5-methyl
  modified_base 11: mod_base = OTHER; note = 5-methyl
  source 1..11: mol_type = other DNA
taagttctgtc

SEQ ID NO: 8469 - DNA, 10 bp, synthetic construct
  misc_feature 1..10: note = Description of Artificial Sequence: Synthetic Antisense oligonucleotide
  modified_base 1: mod_base = OTHER; note = bicyclic nucleic acid (BNA)
  modified_base 7: mod_base = OTHER; note = 5-methyl
  source 1..10: mol_type = other DNA
taagttctgt

SEQ ID NO: 8470-8471 - skipped (2 entries)

SEQ ID NO: 8472 - DNA, 20 bp, synthetic construct
  misc_feature 1..20: note = Description of Artificial Sequence: Synthetic Antisense oligonucleotide
  modified_base 1: mod_base = OTHER; note = bicyclic nucleic acid (BNA)
  modified_base 8: mod_base = OTHER; note = 5-methyl
  modified_base 12..13: mod_base = OTHER; note = 5-methyl
  modified_base 17..19: mod_base = OTHER; note = 5-methyl
  source 1..20: mol_type = other DNA
gtaagttctgtccaagcccg

SEQ ID NO: 8473 - DNA, 19 bp, synthetic construct
  misc_feature 1..19: note = Description of Artificial Sequence: Synthetic Antisense oligonucleotide
  modified_base 1: mod_base = OTHER; note = bicyclic nucleic acid (BNA)
  modified_base 8: mod_base = OTHER; note = 5-methyl
  modified_base 12..13: mod_base = OTHER; note = 5-methyl
  modified_base 17..19: mod_base = OTHER; note = 5-methyl
  source 1..19: mol_type = other DNA
gtaagttctgtccaagccc

SEQ ID NO: 8474 - DNA, 17 bp, synthetic construct
  misc_feature 1..17: note = Description of Artificial Sequence: Synthetic Antisense oligonucleotide
  modified_base 1: mod_base = OTHER; note = bicyclic nucleic acid (BNA)
  modified_base 8: mod_base = OTHER; note = 5-methyl
  modified_base 12..13: mod_base = OTHER; note = 5-methyl
  modified_base 17: mod_base = OTHER; note = 5-methyl
  source 1..17: mol_type = other DNA
gtaagttctgtccaagc

SEQ ID NO: 8475 - DNA, 16 bp, synthetic construct
  misc_feature 1..16: note = Description of Artificial Sequence: Synthetic Antisense oligonucleotide
  modified_base 1: mod_base = OTHER; note = bicyclic nucleic acid (BNA)
  modified_base 8: mod_base = OTHER; note = 5-methyl
  modified_base 12..13: mod_base = OTHER; note = 5-methyl
  source 1..16: mol_type = other DNA
gtaagttctgtccaag

SEQ ID NO: 8476 - DNA, 15 bp, synthetic construct
  misc_feature 1..15: note = Description of Artificial Sequence: Synthetic Antisense oligonucleotide
  modified_base 1: mod_base = OTHER; note = bicyclic nucleic acid (BNA)
  modified_base 8: mod_base = OTHER; note = 5-methyl
  modified_base 12..13: mod_base = OTHER; note = 5-methyl
  source 1..15: mol_type = other DNA
gtaagttctgtccaa

SEQ ID NO: 8477 - DNA, 14 bp, synthetic construct
  misc_feature 1..14: note = Description of Artificial Sequence: Synthetic Antisense oligonucleotide
  modified_base 1: mod_base = OTHER; note = bicyclic nucleic acid (BNA)
  modified_base 8: mod_base = OTHER; note = 5-methyl
  modified_base 12..13: mod_base = OTHER; note = 5-methyl
  source 1..14: mol_type = other DNA
gtaagttctgtcca

SEQ ID NO: 8478 - DNA, 13 bp, synthetic construct
  misc_feature 1..13: note = Description of Artificial Sequence: Synthetic Antisense oligonucleotide
  modified_base 1: mod_base = OTHER; note = bicyclic nucleic acid (BNA)
  modified_base 8: mod_base = OTHER; note = 5-methyl
  modified_base 12..13: mod_base = OTHER; note = 5-methyl
  source 1..13: mol_type = other DNA
gtaagttctgtcc

SEQ ID NO: 8479 - DNA, 12 bp, synthetic construct
  misc_feature 1..12: note = Description of Artificial Sequence: Synthetic Antisense oligonucleotide
  modified_base 1: mod_base = OTHER; note = bicyclic nucleic acid (BNA)
  modified_base 8: mod_base = OTHER; note = 5-methyl
  modified_base 12: mod_base = OTHER; note = 5-methyl
  source 1..12: mol_type = other DNA
gtaagttctgtc

SEQ ID NO: 8480 - DNA, 11 bp, synthetic construct
  misc_feature 1..11: note = Description of Artificial Sequence: Synthetic Antisense oligonucleotide
  modified_base 1: mod_base = OTHER; note = bicyclic nucleic acid (BNA)
  modified_base 8: mod_base = OTHER; note = 5-methyl
  source 1..11: mol_type = other DNA
gtaagttctgt

SEQ ID NO: 8481 - DNA, 10 bp, synthetic construct
  misc_feature 1..10: note = Description of Artificial Sequence: Synthetic Antisense oligonucleotide
  modified_base 1: mod_base = OTHER; note = bicyclic nucleic acid (BNA)
  modified_base 8: mod_base = OTHER; note = 5-methyl
  source 1..10: mol_type = other DNA
gtaagttctg

SEQ ID NO: 8482-8483 - skipped (2 entries)

SEQ ID NO: 8484 - DNA, 20 bp, synthetic construct
  misc_feature 1..20: note = Description of Artificial Sequence: Synthetic Antisense oligonucleotide
  modified_base 1: mod_base = OTHER; note = bicyclic nucleic acid (BNA)
  modified_base 9: mod_base = OTHER; note = 5-methyl
  modified_base 13..14: mod_base = OTHER; note = 5-methyl
  modified_base 18..20: mod_base = OTHER; note = 5-methyl
  source 1..20: mol_type = other DNA
ggtaagttctgtccaagccc

SEQ ID NO: 8485 - DNA, 19 bp, synthetic construct
  misc_feature 1..19: note = Description of Artificial Sequence: Synthetic Antisense oligonucleotide
  modified_base 1: mod_base = OTHER; note = bicyclic nucleic acid (BNA)
  modified_base 9: mod_base = OTHER; note = 5-methyl
  modified_base 13..14: mod_base = OTHER; note = 5-methyl
  modified_base 18..19: mod_base = OTHER; note = 5-methyl
  source 1..19: mol_type = other DNA
ggtaagttctgtccaagcc

SEQ ID NO: 8486 - DNA, 17 bp, synthetic construct
  misc_feature 1..17: note = Description of Artificial Sequence: Synthetic Antisense oligonucleotide
  modified_base 1: mod_base = OTHER; note = bicyclic nucleic acid (BNA)
  modified_base 9: mod_base = OTHER; note = 5-methyl
  modified_base 13..14: mod_base = OTHER; note = 5-methyl
  source 1..17: mol_type = other DNA
ggtaagttctgtccaag

SEQ ID NO: 8487 - DNA, 16 bp, synthetic construct
  misc_feature 1..16: note = Description of Artificial Sequence: Synthetic Antisense oligonucleotide
  modified_base 1: mod_base = OTHER; note = bicyclic nucleic acid (BNA)
  modified_base 9: mod_base = OTHER; note = 5-methyl
  modified_base 13..14: mod_base = OTHER; note = 5-methyl
  source 1..16: mol_type = other DNA
ggtaagttctgtccaa

SEQ ID NO: 8488 - DNA, 15 bp, synthetic construct
  misc_feature 1..15: note = Description of Artificial Sequence: Synthetic Antisense oligonucleotide
  modified_base 1: mod_base = OTHER; note = bicyclic nucleic acid (BNA)
  modified_base 9: mod_base = OTHER; note = 5-methyl
  modified_base 13..14: mod_base = OTHER; note = 5-methyl
  source 1..15: mol_type = other DNA
ggtaagttctgtcca

SEQ ID NO: 8489 - DNA, 14 bp, synthetic construct
  misc_feature 1..14: note = Description of Artificial Sequence: Synthetic Antisense oligonucleotide
  modified_base 1: mod_base = OTHER; note = bicyclic nucleic acid (BNA)
  modified_base 9: mod_base = OTHER; note = 5-methyl
  modified_base 13..14: mod_base = OTHER; note = 5-methyl
  source 1..14: mol_type = other DNA
ggtaagttctgtcc

SEQ ID NO: 8490 - DNA, 13 bp, synthetic construct
  misc_feature 1..13: note = Description of Artificial Sequence: Synthetic Antisense oligonucleotide
  modified_base 1: mod_base = OTHER; note = bicyclic nucleic acid (BNA)
  modified_base 9: mod_base = OTHER; note = 5-methyl
  modified_base 13: mod_base = OTHER; note = 5-methyl
  source 1..13: mol_type = other DNA
ggtaagttctgtc

SEQ ID NO: 8491 - DNA, 12 bp, synthetic construct
  misc_feature 1..12: note = Description of Artificial Sequence: Synthetic Antisense oligonucleotide
  modified_base 1: mod_base = OTHER; note = bicyclic nucleic acid (BNA)
  modified_base 9: mod_base = OTHER; note = 5-methyl
  source 1..12: mol_type = other DNA
ggtaagttctgt

SEQ ID NO: 8492 - DNA, 11 bp, synthetic construct
  misc_feature 1..11: note = Description of Artificial Sequence: Synthetic Antisense oligonucleotide
  modified_base 1: mod_base = OTHER; note = bicyclic nucleic acid (BNA)
  modified_base 9: mod_base = OTHER; note = 5-methyl
  source 1..11: mol_type = other DNA
ggtaagttctg

SEQ ID NO: 8493 - DNA, 10 bp, synthetic construct
  misc_feature 1..10: note = Description of Artificial Sequence: Synthetic Antisense oligonucleotide
  modified_base 1: mod_base = OTHER; note = bicyclic nucleic acid (BNA)
  modified_base 9: mod_base = OTHER; note = 5-methyl
  source 1..10: mol_type = other DNA
ggtaagttct

SEQ ID NO: 8494 - skipped

SEQ ID NO: 8495 - DNA, 20 bp, synthetic construct
  misc_feature 1..20: note = Description of Artificial Sequence: Synthetic Antisense oligonucleotide
  modified_base 1: mod_base = OTHER; note = 5-methyl
  modified_base 10: mod_base = OTHER; note = 5-methyl
  modified_base 14..15: mod_base = OTHER; note = 5-methyl
  modified_base 19..20: mod_base = OTHER; note = 5-methyl
  modified_base 1: mod_base = OTHER; note = bicyclic nucleic acid (BNA)
  source 1..20: mol_type = other DNA
cggtaagttctgtccaagcc

SEQ ID NO: 8496 - DNA, 19 bp, synthetic construct
  misc_feature 1..19: note = Description of Artificial Sequence: Synthetic Antisense oligonucleotide
  modified_base 1: mod_base = OTHER; note = 5-methyl
  modified_base 10: mod_base = OTHER; note = 5-methyl
  modified_base 14..15: mod_base = OTHER; note = 5-methyl
  modified_base 19: mod_base = OTHER; note = 5-methyl
  modified_base 1: mod_base = OTHER; note = bicyclic nucleic acid (BNA)
  source 1..19: mol_type = other DNA
cggtaagttctgtccaagc

SEQ ID NO: 8497 - DNA, 18 bp, synthetic construct
  misc_feature 1..18: note = Description of Artificial Sequence: Synthetic Antisense oligonucleotide
  modified_base 1: mod_base = OTHER; note = 5-methyl
  modified_base 10: mod_base = OTHER; note = 5-methyl
  modified_base 14..15: mod_base = OTHER; note = 5-methyl
  modified_base 1: mod_base = OTHER; note = bicyclic nucleic acid (BNA)
  source 1..18: mol_type = other DNA
cggtaagttctgtccaag

SEQ ID NO: 8498 - DNA, 17 bp, synthetic construct
  misc_feature 1..17: note = Description of Artificial Sequence: Synthetic Antisense oligonucleotide
  modified_base 1: mod_base = OTHER; note = 5-methyl
  modified_base 10: mod_base = OTHER; note = 5-methyl
  modified_base 14..15: mod_base = OTHER; note = 5-methyl
  modified_base 1: mod_base = OTHER; note = bicyclic nucleic acid (BNA)
  source 1..17: mol_type = other DNA
cggtaagttctgtccaa

SEQ ID NO: 8499 - DNA, 16 bp, synthetic construct
  misc_feature 1..16: note = Description of Artificial Sequence: Synthetic Antisense oligonucleotide
  modified_base 1: mod_base = OTHER; note = 5-methyl
  modified_base 10: mod_base = OTHER; note = 5-methyl
  modified_base 14..15: mod_base = OTHER; note = 5-methyl
  modified_base 1: mod_base = OTHER; note = bicyclic nucleic acid (BNA)
  source 1..16: mol_type = other DNA
cggtaagttctgtcca

SEQ ID NO: 8500 - DNA, 15 bp, synthetic construct
  misc_feature 1..15: note = Description of Artificial Sequence: Synthetic Antisense oligonucleotide
  modified_base 1: mod_base = OTHER; note = 5-methyl
  modified_base 10: mod_base = OTHER; note = 5-methyl
  modified_base 14..15: mod_base = OTHER; note = 5-methyl
  modified_base 1: mod_base = OTHER; note = bicyclic nucleic acid (BNA)
  source 1..15: mol_type = other DNA
cggtaagttctgtcc

SEQ ID NO: 8501 - DNA, 14 bp, synthetic construct
  misc_feature 1..14: note = Description of Artificial Sequence: Synthetic Antisense oligonucleotide
  modified_base 1: mod_base = OTHER; note = 5-methyl
  modified_base 10: mod_base = OTHER; note = 5-methyl
  modified_base 14: mod_base = OTHER; note = 5-methyl
  modified_base 1: mod_base = OTHER; note = bicyclic nucleic acid (BNA)
  source 1..14: mol_type = other DNA
cggtaagttctgtc

SEQ ID NO: 8502 - DNA, 13 bp, synthetic construct
  misc_feature 1..13: note = Description of Artificial Sequence: Synthetic Antisense oligonucleotide
  modified_base 1: mod_base = OTHER; note = 5-methyl
  modified_base 10: mod_base = OTHER; note = 5-methyl
  modified_base 1: mod_base = OTHER; note = bicyclic nucleic acid (BNA)
  source 1..13: mol_type = other DNA
cggtaagttctgt

SEQ ID NO: 8503 - DNA, 12 bp, synthetic construct
  misc_feature 1..12: note = Description of Artificial Sequence: Synthetic Antisense oligonucleotide
  modified_base 1: mod_base = OTHER; note = 5-methyl
  modified_base 10: mod_base = OTHER; note = 5-methyl
  modified_base 1: mod_base = OTHER; note = bicyclic nucleic acid (BNA)
  source 1..12: mol_type = other DNA
cggtaagttctg

SEQ ID NO: 8504 - DNA, 11 bp, synthetic construct
  misc_feature 1..11: note = Description of Artificial Sequence: Synthetic Antisense oligonucleotide
  modified_base 1: mod_base = OTHER; note = 5-methyl
  modified_base 10: mod_base = OTHER; note = 5-methyl
  modified_base 1: mod_base = OTHER; note = bicyclic nucleic acid (BNA)
  source 1..11: mol_type = other DNA
cggtaagttct

SEQ ID NO: 8505 - DNA, 10 bp, synthetic construct
  misc_feature 1..10: note = Description of Artificial Sequence: Synthetic Antisense oligonucleotide
  modified_base 1: mod_base = OTHER; note = 5-methyl
  modified_base 10: mod_base = OTHER; note = 5-methyl
  modified_base 1: mod_base = OTHER; note = bicyclic nucleic acid (BNA)
  source 1..10: mol_type = other DNA
cggtaagttc

SEQ ID NO: 8506-8507 - skipped (2 entries)

SEQ ID NO: 8508 - DNA, 20 bp, synthetic construct
  misc_feature 1..20: note = Description of Artificial Sequence: Synthetic Antisense oligonucleotide
  modified_base 1: mod_base = OTHER; note = bicyclic nucleic acid (BNA)
  modified_base 2: mod_base = OTHER; note = 5-methyl
  modified_base 11: mod_base = OTHER; note = 5-methyl
  modified_base 15..16: mod_base = OTHER; note = 5-methyl
  modified_base 20: mod_base = OTHER; note = 5-methyl
  source 1..20: mol_type = other DNA
tcggtaagttctgtccaagc

SEQ ID NO: 8509 - DNA, 19 bp, synthetic construct
  misc_feature 1..19: note = Description of Artificial Sequence: Synthetic Antisense oligonucleotide
  modified_base 1: mod_base = OTHER; note = bicyclic nucleic acid (BNA)
  modified_base 2: mod_base = OTHER; note = 5-methyl
  modified_base 11: mod_base = OTHER; note = 5-methyl
  modified_base 15..16: mod_base = OTHER; note = 5-methyl
  source 1..19: mol_type = other DNA
tcggtaagttctgtccaag

SEQ ID NO: 8510 - DNA, 18 bp, synthetic construct
  misc_feature 1..18: note = Description of Artificial Sequence: Synthetic Antisense oligonucleotide
  modified_base 1: mod_base = OTHER; note = bicyclic nucleic acid (BNA)
  modified_base 2: mod_base = OTHER; note = 5-methyl
  modified_base 11: mod_base = OTHER; note = 5-methyl
  modified_base 15..16: mod_base = OTHER; note = 5-methyl
  source 1..18: mol_type = other DNA
tcggtaagttctgtccaa

SEQ ID NO: 8511 - DNA, 17 bp, synthetic construct
  misc_feature 1..17: note = Description of Artificial Sequence: Synthetic Antisense oligonucleotide
  modified_base 1: mod_base = OTHER; note = bicyclic nucleic acid (BNA)
  modified_base 2: mod_base = OTHER; note = 5-methyl
  modified_base 11: mod_base = OTHER; note = 5-methyl
  modified_base 15..16: mod_base = OTHER; note = 5-methyl
  source 1..17: mol_type = other DNA
tcggtaagttctgtcca

SEQ ID NO: 8512 - DNA, 16 bp, synthetic construct
  misc_feature 1..16: note = Description of Artificial Sequence: Synthetic Antisense oligonucleotide
  modified_base 1: mod_base = OTHER; note = bicyclic nucleic acid (BNA)
  modified_base 2: mod_base = OTHER; note = 5-methyl
  modified_base 11: mod_base = OTHER; note = 5-methyl
  modified_base 15..16: mod_base = OTHER; note = 5-methyl
  source 1..16: mol_type = other DNA
tcggtaagttctgtcc

SEQ ID NO: 8513 - DNA, 15 bp, synthetic construct
  misc_feature 1..15: note = Description of Artificial Sequence: Synthetic Antisense oligonucleotide
  modified_base 1: mod_base = OTHER; note = bicyclic nucleic acid (BNA)
  modified_base 2: mod_base = OTHER; note = 5-methyl
  modified_base 11: mod_base = OTHER; note = 5-methyl
  modified_base 15: mod_base = OTHER; note = 5-methyl
  source 1..15: mol_type = other DNA
tcggtaagttctgtc

SEQ ID NO: 8514 - DNA, 14 bp, synthetic construct
  misc_feature 1..14: note = Description of Artificial Sequence: Synthetic Antisense oligonucleotide
  modified_base 1: mod_base = OTHER; note = bicyclic nucleic acid (BNA)
  modified_base 2: mod_base = OTHER; note = 5-methyl
  modified_base 11: mod_base = OTHER; note = 5-methyl
  source 1..14: mol_type = other DNA
tcggtaagttctgt

SEQ ID NO: 8515 - DNA, 13 bp, synthetic construct
  misc_feature 1..13: note = Description of Artificial Sequence: Synthetic Antisense oligonucleotide
  modified_base 1: mod_base = OTHER; note = bicyclic nucleic acid (BNA)
  modified_base 2: mod_base = OTHER; note = 5-methyl
  modified_base 11: mod_base = OTHER; note = 5-methyl
  source 1..13: mol_type = other DNA
tcggtaagttctg

SEQ ID NO: 8516 - DNA, 12 bp, synthetic construct
  misc_feature 1..12: note = Description of Artificial Sequence: Synthetic Antisense oligonucleotide
  modified_base 1: mod_base = OTHER; note = bicyclic nucleic acid (BNA)
  modified_base 2: mod_base = OTHER; note = 5-methyl
  modified_base 11: mod_base = OTHER; note = 5-methyl
  source 1..12: mol_type = other DNA
tcggtaagttct

SEQ ID NO: 8517 - DNA, 11 bp, synthetic construct
  misc_feature 1..11: note = Description of Artificial Sequence: Synthetic Antisense oligonucleotide
  modified_base 1: mod_base = OTHER; note = bicyclic nucleic acid (BNA)
  modified_base 2: mod_base = OTHER; note = 5-methyl
  modified_base 11: mod_base = OTHER; note = 5-methyl
  source 1..11: mol_type = other DNA
tcggtaagttc

SEQ ID NO: 8518 - DNA, 10 bp, synthetic construct
  misc_feature 1..10: note = Description of Artificial Sequence: Synthetic Antisense oligonucleotide
  modified_base 1: mod_base = OTHER; note = bicyclic nucleic acid (BNA)
  modified_base 2: mod_base = OTHER; note = 5-methyl
  source 1..10: mol_type = other DNA
tcggtaagtt

SEQ ID NO: 8519 - skipped

SEQ ID NO: 8520 - DNA, 20 bp, synthetic construct
  misc_feature 1..20: note = Description of Artificial Sequence: Synthetic Antisense oligonucleotide
  modified_base 1: mod_base = OTHER; note = bicyclic nucleic acid (BNA)
  modified_base 3: mod_base = OTHER; note = 5-methyl
  modified_base 12: mod_base = OTHER; note = 5-methyl
  modified_base 16..17: mod_base = OTHER; note = 5-methyl
  source 1..20: mol_type = other DNA
gtcggtaagttctgtccaag

SEQ ID NO: 8521 - DNA, 19 bp, synthetic construct
  misc_feature 1..19: note = Description of Artificial Sequence: Synthetic Antisense oligonucleotide
  modified_base 1: mod_base = OTHER; note = bicyclic nucleic acid (BNA)
  modified_base 3: mod_base = OTHER; note = 5-methyl
  modified_base 12: mod_base = OTHER; note = 5-methyl
  modified_base 16..17: mod_base = OTHER; note = 5-methyl
  source 1..19: mol_type = other DNA
gtcggtaagttctgtccaa

SEQ ID NO: 8522 - DNA, 18 bp, synthetic construct
  misc_feature 1..18: note = Description of Artificial Sequence: Synthetic Antisense oligonucleotide
  modified_base 1: mod_base = OTHER; note = bicyclic nucleic acid (BNA)
  modified_base 3: mod_base = OTHER; note = 5-methyl
  modified_base 12: mod_base = OTHER; note = 5-methyl
  modified_base 16..17: mod_base = OTHER; note = 5-methyl
  source 1..18: mol_type = other DNA
gtcggtaagttctgtcca

SEQ ID NO: 8523 - DNA, 17 bp, synthetic construct
  misc_feature 1..17: note = Description of Artificial Sequence: Synthetic Antisense oligonucleotide
  modified_base 1: mod_base = OTHER; note = bicyclic nucleic acid (BNA)
  modified_base 3: mod_base = OTHER; note = 5-methyl
  modified_base 12: mod_base = OTHER; note = 5-methyl
  modified_base 16..17: mod_base = OTHER; note = 5-methyl
  source 1..17: mol_type = other DNA
gtcggtaagttctgtcc

SEQ ID NO: 8524 - DNA, 16 bp, synthetic construct
  misc_feature 1..16: note = Description of Artificial Sequence: Synthetic Antisense oligonucleotide
  modified_base 1: mod_base = OTHER; note = bicyclic nucleic acid (BNA)
  modified_base 3: mod_base = OTHER; note = 5-methyl
  modified_base 12: mod_base = OTHER; note = 5-methyl
  modified_base 16: mod_base = OTHER; note = 5-methyl
  source 1..16: mol_type = other DNA
gtcggtaagttctgtc

SEQ ID NO: 8525 - DNA, 15 bp, synthetic construct
  misc_feature 1..15: note = Description of Artificial Sequence: Synthetic Antisense oligonucleotide
  modified_base 1: mod_base = OTHER; note = bicyclic nucleic acid (BNA)
  modified_base 3: mod_base = OTHER; note = 5-methyl
  modified_base 12: mod_base = OTHER; note = 5-methyl
  source 1..15: mol_type = other DNA
gtcggtaagttctgt

SEQ ID NO: 8526 - DNA, 14 bp, synthetic construct
  misc_feature 1..14: note = Description of Artificial Sequence: Synthetic Antisense oligonucleotide
  modified_base 1: mod_base = OTHER; note = bicyclic nucleic acid (BNA)
  modified_base 3: mod_base = OTHER; note = 5-methyl
  modified_base 12: mod_base = OTHER; note = 5-methyl
  source 1..14: mol_type = other DNA
gtcggtaagttctg

SEQ ID NO: 8527 - DNA, 13 bp, synthetic construct
  misc_feature 1..13: note = Description of Artificial Sequence: Synthetic Antisense oligonucleotide
  modified_base 1: mod_base = OTHER; note = bicyclic nucleic acid (BNA)
  modified_base 3: mod_base = OTHER; note = 5-methyl
  modified_base 12: mod_base = OTHER; note = 5-methyl
  source 1..13: mol_type = other DNA
gtcggtaagttct

SEQ ID NO: 8528 - DNA, 12 bp, synthetic construct
  misc_feature 1..12: note = Description of Artificial Sequence: Synthetic Antisense oligonucleotide
  modified_base 1: mod_base = OTHER; note = bicyclic nucleic acid (BNA)
  modified_base 3: mod_base = OTHER; note = 5-methyl
  modified_base 12: mod_base = OTHER; note = 5-methyl
  source 1..12: mol_type = other DNA
gtcggtaagttc

SEQ ID NO: 8529 - DNA, 11 bp, synthetic construct
  misc_feature 1..11: note = Description of Artificial Sequence: Synthetic Antisense oligonucleotide
  modified_base 1: mod_base = OTHER; note = bicyclic nucleic acid (BNA)
  modified_base 3: mod_base = OTHER; note = 5-methyl
  source 1..11: mol_type = other DNA
gtcggtaagtt

SEQ ID NO: 8530 - DNA, 10 bp, synthetic construct
  misc_feature 1..10: note = Description of Artificial Sequence: Synthetic Antisense oligonucleotide
  modified_base 1: mod_base = OTHER; note = bicyclic nucleic acid (BNA)
  modified_base 3: mod_base = OTHER; note = 5-methyl
  source 1..10: mol_type = other DNA
gtcggtaagt

SEQ ID NO: 8531 - DNA, 20 bp, synthetic construct
  misc_feature 1..20: note = Description of Artificial Sequence: Synthetic Antisense oligonucleotide
  modified_base 1: mod_base = OTHER; note = bicyclic nucleic acid (BNA)
  modified_base 4: mod_base = OTHER; note = 5-methyl
  modified_base 13: mod_base = OTHER; note = 5-methyl
  modified_base 17..18: mod_base = OTHER; note = 5-methyl
  source 1..20: mol_type = other DNA
agtcggtaagttctgtccaa

SEQ ID NO: 8532 - DNA, 19 bp, synthetic construct
  misc_feature 1..19: note = Description of Artificial Sequence: Synthetic Antisense oligonucleotide
  modified_base 1: mod_base = OTHER; note = bicyclic nucleic acid (BNA)
  modified_base 4: mod_base = OTHER; note = 5-methyl
  modified_base 13: mod_base = OTHER; note = 5-methyl
  modified_base 17..18: mod_base = OTHER; note = 5-methyl
  source 1..19: mol_type = other DNA
agtcggtaagttctgtcca

SEQ ID NO: 8533 - DNA, 17 bp, synthetic construct
  misc_feature 1..17: note = Description of Artificial Sequence: Synthetic Antisense oligonucleotide
  modified_base 1: mod_base = OTHER; note = bicyclic nucleic acid (BNA)
  modified_base 4: mod_base = OTHER; note = 5-methyl
  modified_base 13: mod_base = OTHER; note = 5-methyl
  modified_base 17: mod_base = OTHER; note = 5-methyl
  source 1..17: mol_type = other DNA
agtcggtaagttctgtc

SEQ ID NO: 8534 - DNA, 16 bp, synthetic construct
  misc_feature 1..16: note = Description of Artificial Sequence: Synthetic Antisense oligonucleotide
  modified_base 1: mod_base = OTHER; note = bicyclic nucleic acid (BNA)
  modified_base 4: mod_base = OTHER; note = 5-methyl
  modified_base 13: mod_base = OTHER; note = 5-methyl
  source 1..16: mol_type = other DNA
agtcggtaagttctgt

SEQ ID NO: 8535 - DNA, 15 bp, synthetic construct
  misc_feature 1..15: note = Description of Artificial Sequence: Synthetic Antisense oligonucleotide
  modified_base 1: mod_base = OTHER; note = bicyclic nucleic acid (BNA)
  modified_base 4: mod_base = OTHER; note = 5-methyl
  modified_base 13: mod_base = OTHER; note = 5-methyl
  source 1..15: mol_type = other DNA
agtcggtaagttctg

SEQ ID NO: 8536 - DNA, 14 bp, synthetic construct
  misc_feature 1..14: note = Description of Artificial Sequence: Synthetic Antisense oligonucleotide
  modified_base 1: mod_base = OTHER; note = bicyclic nucleic acid (BNA)
  modified_base 4: mod_base = OTHER; note = 5-methyl
  modified_base 13: mod_base = OTHER; note = 5-methyl
  source 1..14: mol_type = other DNA
agtcggtaagttct

SEQ ID NO: 8537 - DNA, 13 bp, synthetic construct
  misc_feature 1..13: note = Description of Artificial Sequence: Synthetic Antisense oligonucleotide
  modified_base 1: mod_base = OTHER; note = bicyclic nucleic acid (BNA)
  modified_base 4: mod_base = OTHER; note = 5-methyl
  modified_base 13: mod_base = OTHER; note = 5-methyl
  source 1..13: mol_type = other DNA
agtcggtaagttc

SEQ ID NO: 8538 - DNA, 12 bp, synthetic construct
  misc_feature 1..12: note = Description of Artificial Sequence: Synthetic Antisense oligonucleotide
  modified_base 1: mod_base = OTHER; note = bicyclic nucleic acid (BNA)
  modified_base 4: mod_base = OTHER; note = 5-methyl
  source 1..12: mol_type = other DNA
agtcggtaagtt

SEQ ID NO: 8539 - DNA, 11 bp, synthetic construct
  misc_feature 1..11: note = Description of Artificial Sequence: Synthetic Antisense oligonucleotide
  modified_base 1: mod_base = OTHER; note = bicyclic nucleic acid (BNA)
  modified_base 4: mod_base = OTHER; note = 5-methyl
  source 1..11: mol_type = other DNA
agtcggtaagt

SEQ ID NO: 8540 - DNA, 20 bp, synthetic construct
  misc_feature 1..20: note = Description of Artificial Sequence: Synthetic Antisense oligonucleotide
  modified_base 1: mod_base = OTHER; note = 5-methyl
  modified_base 5: mod_base = OTHER; note = 5-methyl
  modified_base 14: mod_base = OTHER; note = 5-methyl
  modified_base 18..19: mod_base = OTHER; note = 5-methyl
  modified_base 1: mod_base = OTHER; note = bicyclic nucleic acid (BNA)
  source 1..20: mol_type = other DNA
cagtcggtaagttctgtcca

SEQ ID NO: 8541 - DNA, 19 bp, synthetic construct
  misc_feature 1..19: note = Description of Artificial Sequence: Synthetic Antisense oligonucleotide
  modified_base 1: mod_base = OTHER; note = 5-methyl
  modified_base 5: mod_base = OTHER; note = 5-methyl
  modified_base 14: mod_base = OTHER; note = 5-methyl
  modified_base 18..19: mod_base = OTHER; note = 5-methyl
  modified_base 1: mod_base = OTHER; note = bicyclic nucleic acid (BNA)
  source 1..19: mol_type = other DNA
cagtcggtaagttctgtcc

SEQ ID NO: 8542 - DNA, 18 bp, synthetic construct
  misc_feature 1..18: note = Description of Artificial Sequence: Synthetic Antisense oligonucleotide
  modified_base 1: mod_base = OTHER; note = 5-methyl
  modified_base 5: mod_base = OTHER; note = 5-methyl
  modified_base 14: mod_base = OTHER; note = 5-methyl
  modified_base 18: mod_base = OTHER; note = 5-methyl
  modified_base 1: mod_base = OTHER; note = bicyclic nucleic acid (BNA)
  source 1..18: mol_type = other DNA
cagtcggtaagttctgtc

SEQ ID NO: 8543 - DNA, 17 bp, synthetic construct
  misc_feature 1..17: note = Description of Artificial Sequence: Synthetic Antisense oligonucleotide
  modified_base 1: mod_base = OTHER; note = 5-methyl
  modified_base 5: mod_base = OTHER; note = 5-methyl
  modified_base 14: mod_base = OTHER; note = 5-methyl
  modified_base 1: mod_base = OTHER; note = bicyclic nucleic acid (BNA)
  source 1..17: mol_type = other DNA
cagtcggtaagttctgt

SEQ ID NO: 8544 - DNA, 16 bp, synthetic construct
  misc_feature 1..16: note = Description of Artificial Sequence: Synthetic Antisense oligonucleotide
  modified_base 1: mod_base = OTHER; note = 5-methyl
  modified_base 5: mod_base = OTHER; note = 5-methyl
  modified_base 14: mod_base = OTHER; note = 5-methyl
  modified_base 1: mod_base = OTHER; note = bicyclic nucleic acid (BNA)
  source 1..16: mol_type = other DNA
cagtcggtaagttctg

SEQ ID NO: 8545 - DNA, 15 bp, synthetic construct
  misc_feature 1..15: note = Description of Artificial Sequence: Synthetic Antisense oligonucleotide
  modified_base 1: mod_base = OTHER; note = 5-methyl
  modified_base 5: mod_base = OTHER; note = 5-methyl
  modified_base 14: mod_base = OTHER; note = 5-methyl
  modified_base 1: mod_base = OTHER; note = bicyclic nucleic acid (BNA)
  source 1..15: mol_type = other DNA
cagtcggtaagttct

SEQ ID NO: 8546 - DNA, 14 bp, synthetic construct
  misc_feature 1..14: note = Description of Artificial Sequence: Synthetic Antisense oligonucleotide
  modified_base 1: mod_base = OTHER; note = 5-methyl
  modified_base 5: mod_base = OTHER; note = 5-methyl
  modified_base 14: mod_base = OTHER; note = 5-methyl
  modified_base 1: mod_base = OTHER; note = bicyclic nucleic acid (BNA)
  source 1..14: mol_type = other DNA
cagtcggtaagttc

SEQ ID NO: 8547 - DNA, 13 bp, synthetic construct
  misc_feature 1..13: note = Description of Artificial Sequence: Synthetic Antisense oligonucleotide
  modified_base 1: mod_base = OTHER; note = 5-methyl
  modified_base 5: mod_base = OTHER; note = 5-methyl
  modified_base 1: mod_base = OTHER; note = bicyclic nucleic acid (BNA)
  source 1..13: mol_type = other DNA
cagtcggtaagtt

SEQ ID NO: 8548 - DNA, 12 bp, synthetic construct
  misc_feature 1..12: note = Description of Artificial Sequence: Synthetic Antisense oligonucleotide
  modified_base 1: mod_base = OTHER; note = 5-methyl
  modified_base 5: mod_base = OTHER; note = 5-methyl
  modified_base 1: mod_base = OTHER; note = bicyclic nucleic acid (BNA)
  source 1..12: mol_type = other DNA
cagtcggtaagt

SEQ ID NO: 8549 - DNA, 20 bp, synthetic construct
  misc_feature 1..20: note = Description of Artificial Sequence: Synthetic Antisense oligonucleotide
  modified_base 1..2: mod_base = OTHER; note = 5-methyl
  modified_base 6: mod_base = OTHER; note = 5-methyl
  modified_base 15: mod_base = OTHER; note = 5-methyl
  modified_base 19..20: mod_base = OTHER; note = 5-methyl
  modified_base 1: mod_base = OTHER; note = bicyclic nucleic acid (BNA)
  source 1..20: mol_type = other DNA
ccagtcggtaagttctgtcc

SEQ ID NO: 8550 - DNA, 19 bp, synthetic construct
  misc_feature 1..19: note = Description of Artificial Sequence: Synthetic Antisense oligonucleotide
  modified_base 1..2: mod_base = OTHER; note = 5-methyl
  modified_base 6: mod_base = OTHER; note = 5-methyl
  modified_base 15: mod_base = OTHER; note = 5-methyl
  modified_base 19: mod_base = OTHER; note = 5-methyl
  modified_base 1: mod_base = OTHER; note = bicyclic nucleic acid (BNA)
  source 1..19: mol_type = other DNA
ccagtcggtaagttctgtc

SEQ ID NO: 8551 - DNA, 18 bp, synthetic construct
  misc_feature 1..18: note = Description of Artificial Sequence: Synthetic Antisense oligonucleotide
  modified_base 1..2: mod_base = OTHER; note = 5-methyl
  modified_base 6: mod_base = OTHER; note = 5-methyl
  modified_base 15: mod_base = OTHER; note = 5-methyl
  modified_base 1: mod_base = OTHER; note = bicyclic nucleic acid (BNA)
  source 1..18: mol_type = other DNA
ccagtcggtaagttctgt

SEQ ID NO: 8552 - DNA, 17 bp, synthetic construct
  misc_feature 1..17: note = Description of Artificial Sequence: Synthetic Antisense oligonucleotide
  modified_base 1..2: mod_base = OTHER; note = 5-methyl
  modified_base 6: mod_base = OTHER; note = 5-methyl
  modified_base 15: mod_base = OTHER; note = 5-methyl
  modified_base 1: mod_base = OTHER; note = bicyclic nucleic acid (BNA)
  source 1..17: mol_type = other DNA
ccagtcggtaagttctg

SEQ ID NO: 8553 - DNA, 16 bp, synthetic construct
  misc_feature 1..16: note = Description of Artificial Sequence: Synthetic Antisense oligonucleotide
  modified_base 1..2: mod_base = OTHER; note = 5-methyl
  modified_base 6: mod_base = OTHER; note = 5-methyl
  modified_base 15: mod_base = OTHER; note = 5-methyl
  modified_base 1: mod_base = OTHER; note = bicyclic nucleic acid (BNA)
  source 1..16: mol_type = other DNA
ccagtcggtaagttct

SEQ ID NO: 8554 - DNA, 15 bp, synthetic construct
  misc_feature 1..15: note = Description of Artificial Sequence: Synthetic Antisense oligonucleotide
  modified_base 1..2: mod_base = OTHER; note = 5-methyl
  modified_base 6: mod_base = OTHER; note = 5-methyl
  modified_base 15: mod_base = OTHER; note = 5-methyl
  modified_base 1: mod_base = OTHER; note = bicyclic nucleic acid (BNA)
  source 1..15: mol_type = other DNA
ccagtcggtaagttc

SEQ ID NO: 8555 - DNA, 14 bp, synthetic construct
  misc_feature 1..14: note = Description of Artificial Sequence: Synthetic Antisense oligonucleotide
  modified_base 1..2: mod_base = OTHER; note = 5-methyl
  modified_base 6: mod_base = OTHER; note = 5-methyl
  modified_base 1: mod_base = OTHER; note = bicyclic nucleic acid (BNA)
  source 1..14: mol_type = other DNA
ccagtcggtaagtt

SEQ ID NO: 8556 - DNA, 13 bp, synthetic construct
  misc_feature 1..13: note = Description of Artificial Sequence: Synthetic Antisense oligonucleotide
  modified_base 1..2: mod_base = OTHER; note = 5-methyl
  modified_base 6: mod_base = OTHER; note = 5-methyl
  modified_base 1: mod_base = OTHER; note = bicyclic nucleic acid (BNA)
  source 1..13: mol_type = other DNA
ccagtcggtaagt

SEQ ID NO: 8557 - DNA, 20 bp, synthetic construct
  misc_feature 1..20: note = Description of Artificial Sequence: Synthetic Antisense oligonucleotide
  modified_base 1: mod_base = OTHER; note = bicyclic nucleic acid (BNA)
  modified_base 2..3: mod_base = OTHER; note = 5-methyl
  modified_base 7: mod_base = OTHER; note = 5-methyl
  modified_base 16: mod_base = OTHER; note = 5-methyl
  modified_base 20: mod_base = OTHER; note = 5-methyl
  source 1..20: mol_type = other DNA
gccagtcggtaagttctgtc

SEQ ID NO: 8558 - DNA, 19 bp, synthetic construct
  misc_feature 1..19: note = Description of Artificial Sequence: Synthetic Antisense oligonucleotide
  modified_base 1: mod_base = OTHER; note = bicyclic nucleic acid (BNA)
  modified_base 2..3: mod_base = OTHER; note = 5-methyl
  modified_base 7: mod_base = OTHER; note = 5-methyl
  modified_base 16: mod_base = OTHER; note = 5-methyl
  source 1..19: mol_type = other DNA
gccagtcggtaagttctgt

SEQ ID NO: 8559 - DNA, 18 bp, synthetic construct
  misc_feature 1..18: note = Description of Artificial Sequence: Synthetic Antisense oligonucleotide
  modified_base 1: mod_base = OTHER; note = bicyclic nucleic acid (BNA)
  modified_base 2..3: mod_base = OTHER; note = 5-methyl
  modified_base 7: mod_base = OTHER; note = 5-methyl
  modified_base 16: mod_base = OTHER; note = 5-methyl
  source 1..18: mol_type = other DNA
gccagtcggtaagttctg

SEQ ID NO: 8560 - DNA, 17 bp, synthetic construct
  misc_feature 1..17: note = Description of Artificial Sequence: Synthetic Antisense oligonucleotide
  modified_base 1: mod_base = OTHER; note = bicyclic nucleic acid (BNA)
  modified_base 2..3: mod_base = OTHER; note = 5-methyl
  modified_base 7: mod_base = OTHER; note = 5-methyl
  modified_base 16: mod_base = OTHER; note = 5-methyl
  source 1..17: mol_type = other DNA
gccagtcggtaagttct

SEQ ID NO: 8561 - DNA, 16 bp, synthetic construct
  misc_feature 1..16: note = Description of Artificial Sequence: Synthetic Antisense oligonucleotide
  modified_base 1: mod_base = OTHER; note = bicyclic nucleic acid (BNA)
  modified_base 2..3: mod_base = OTHER; note = 5-methyl
  modified_base 7: mod_base = OTHER; note = 5-methyl
  modified_base 16: mod_base = OTHER; note = 5-methyl
  source 1..16: mol_type = other DNA
gccagtcggtaagttc

SEQ ID NO: 8562 - DNA, 15 bp, synthetic construct
  misc_feature 1..15: note = Description of Artificial Sequence: Synthetic Antisense oligonucleotide
  modified_base 1: mod_base = OTHER; note = bicyclic nucleic acid (BNA)
  modified_base 2..3: mod_base = OTHER; note = 5-methyl
  modified_base 7: mod_base = OTHER; note = 5-methyl
  source 1..15: mol_type = other DNA
gccagtcggtaagtt

SEQ ID NO: 8563 - DNA, 14 bp, synthetic construct
  misc_feature 1..14: note = Description of Artificial Sequence: Synthetic Antisense oligonucleotide
  modified_base 1: mod_base = OTHER; note = bicyclic nucleic acid (BNA)
  modified_base 2..3: mod_base = OTHER; note = 5-methyl
  modified_base 7: mod_base = OTHER; note = 5-methyl
  source 1..14: mol_type = other DNA
gccagtcggtaagt

SEQ ID NO: 8564 - DNA, 20 bp, synthetic construct
  misc_feature 1..20: note = Description of Artificial Sequence: Synthetic Antisense oligonucleotide
  modified_base 1: mod_base = OTHER; note = bicyclic nucleic acid (BNA)
  modified_base 2: mod_base = OTHER; note = 5-methyl
  modified_base 14: mod_base = OTHER; note = 5-methyl
  modified_base 19: mod_base = OTHER; note = 5-methyl
  source 1..20: mol_type = other DNA
tcaaggaagatggcatttct

SEQ ID NO: 8565 - DNA, 22 bp, synthetic construct
  misc_feature 1..22: note = Description of Artificial Sequence: Synthetic Antisense oligonucleotide
  modified_base 1: mod_base = OTHER; note = bicyclic nucleic acid (BNA)
  modified_base 2: mod_base = OTHER; note = 5-methyl
  modified_base 14: mod_base = OTHER; note = 5-methyl
  modified_base 19: mod_base = OTHER; note = 5-methyl
  source 1..22: mol_type = other DNA
tcaaggaagatggcatttctag

SEQ ID NO: 8566 - DNA, 16 bp, synthetic construct
  misc_feature 1..16: note = Description of Artificial Sequence: Synthetic Antisense oligonucleotide
  modified_base 1: mod_base = OTHER; note = bicyclic nucleic acid (BNA)
  modified_base 2: mod_base = OTHER; note = 5-methyl
  modified_base 14: mod_base = OTHER; note = 5-methyl
  source 1..16: mol_type = other DNA
tcaaggaagatggcat

SEQ ID NO: 8567 - DNA, 15 bp, synthetic construct
  misc_feature 1..15: note = Description of Artificial Sequence: Synthetic Antisense oligonucleotide
  modified_base 1: mod_base = OTHER; note = bicyclic nucleic acid (BNA)
  modified_base 9: mod_base = OTHER; note = 5-methyl
  modified_base 14: mod_base = OTHER; note = 5-methyl
  source 1..15: mol_type = other DNA
gaagatggcatttct

SEQ ID NO: 8568 - DNA, 21 bp, synthetic construct
  misc_feature 1..21: note = Description of Artificial Sequence: Synthetic Antisense oligonucleotide
  modified_base 1: mod_base = OTHER; note = bicyclic nucleic acid (BNA)
  modified_base 2: mod_base = OTHER; note = 5-methyl
  modified_base 14: mod_base = OTHER; note = 5-methyl
  modified_base 19: mod_base = OTHER; note = 5-methyl
  source 1..21: mol_type = other DNA
tcaaggaagatggcatttcta

SEQ ID NO: 8569 - DNA, 19 bp, synthetic construct
  misc_feature 1..19: note = Description of Artificial Sequence: Synthetic Antisense oligonucleotide
  modified_base 1: mod_base = OTHER; note = bicyclic nucleic acid (BNA)
  modified_base 2: mod_base = OTHER; note = 5-methyl
  modified_base 14: mod_base = OTHER; note = 5-methyl
  modified_base 19: mod_base = OTHER; note = 5-methyl
  source 1..19: mol_type = other DNA
tcaaggaagatggcatttc

SEQ ID NO: 8570 - DNA, 18 bp, synthetic construct
  misc_feature 1..18: note = Description of Artificial Sequence: Synthetic Antisense oligonucleotide
  modified_base 1: mod_base = OTHER; note = bicyclic nucleic acid (BNA)
  modified_base 2: mod_base = OTHER; note = 5-methyl
  modified_base 14: mod_base = OTHER; note = 5-methyl
  source 1..18: mol_type = other DNA
tcaaggaagatggcattt

SEQ ID NO: 8571 - DNA, 17 bp, synthetic construct
  misc_feature 1..17: note = Description of Artificial Sequence: Synthetic Antisense oligonucleotide
  modified_base 1: mod_base = OTHER; note = bicyclic nucleic acid (BNA)
  modified_base 2: mod_base = OTHER; note = 5-methyl
  modified_base 14: mod_base = OTHER; note = 5-methyl
  source 1..17: mol_type = other DNA
tcaaggaagatggcatt

SEQ ID NO: 8572 - DNA, 15 bp, synthetic construct
  misc_feature 1..15: note = Description of Artificial Sequence: Synthetic Antisense oligonucleotide
  modified_base 1: mod_base = OTHER; note = bicyclic nucleic acid (BNA)
  modified_base 2: mod_base = OTHER; note = 5-methyl
  modified_base 14: mod_base = OTHER; note = 5-methyl
  source 1..15: mol_type = other DNA
tcaaggaagatggca

SEQ ID NO: 8573 - DNA, 14 bp, synthetic construct
  misc_feature 1..14: note = Description of Artificial Sequence: Synthetic Antisense oligonucleotide
  modified_base 1: mod_base = OTHER; note = bicyclic nucleic acid (BNA)
  modified_base 2: mod_base = OTHER; note = 5-methyl
  modified_base 14: mod_base = OTHER; note = 5-methyl
  source 1..14: mol_type = other DNA
tcaaggaagatggc

SEQ ID NO: 8574 - DNA, 13 bp, synthetic construct
  misc_feature 1..13: note = Description of Artificial Sequence: Synthetic Antisense oligonucleotide
  modified_base 1: mod_base = OTHER; note = bicyclic nucleic acid (BNA)
  modified_base 2: mod_base = OTHER; note = 5-methyl
  source 1..13: mol_type = other DNA
tcaaggaagatgg

SEQ ID NO: 8575 - DNA, 12 bp, synthetic construct
  misc_feature 1..12: note = Description of Artificial Sequence: Synthetic Antisense oligonucleotide
  modified_base 1: mod_base = OTHER; note = bicyclic nucleic acid (BNA)
  modified_base 2: mod_base = OTHER; note = 5-methyl
  source 1..12: mol_type = other DNA
tcaaggaagatg

SEQ ID NO: 8576 - DNA, 11 bp, synthetic construct
  misc_feature 1..11: note = Description of Artificial Sequence: Synthetic Antisense oligonucleotide
  modified_base 1: mod_base = OTHER; note = bicyclic nucleic acid (BNA)
  modified_base 2: mod_base = OTHER; note = 5-methyl
  source 1..11: mol_type = other DNA
tcaaggaagat

SEQ ID NO: 8577 - DNA, 10 bp, synthetic construct
  misc_feature 1..10: note = Description of Artificial Sequence: Synthetic Antisense oligonucleotide
  modified_base 1: mod_base = OTHER; note = bicyclic nucleic acid (BNA)
  modified_base 2: mod_base = OTHER; note = 5-methyl
  source 1..10: mol_type = other DNA
tcaaggaaga

SEQ ID NO: 8578 - skipped

SEQ ID NO: 8579 - DNA, 21 bp, synthetic construct
  misc_feature 1..21: note = Description of Artificial Sequence: Synthetic Antisense oligonucleotide
  modified_base 1: mod_base = OTHER; note = 5-methyl
  modified_base 13: mod_base = OTHER; note = 5-methyl
  modified_base 18: mod_base = OTHER; note = 5-methyl
  modified_base 1: mod_base = OTHER; note = bicyclic nucleic acid (BNA)
  source 1..21: mol_type = other DNA
caaggaagatggcatttctag

SEQ ID NO: 8580 - DNA, 20 bp, synthetic construct
  misc_feature 1..20: note = Description of Artificial Sequence: Synthetic Antisense oligonucleotide
  modified_base 1: mod_base = OTHER; note = 5-methyl
  modified_base 13: mod_base = OTHER; note = 5-methyl
  modified_base 18: mod_base = OTHER; note = 5-methyl
  modified_base 1: mod_base = OTHER; note = bicyclic nucleic acid (BNA)
  source 1..20: mol_type = other DNA
caaggaagatggcatttcta

SEQ ID NO: 8581 - DNA, 19 bp, synthetic construct
  misc_feature 1..19: note = Description of Artificial Sequence: Synthetic Antisense oligonucleotide
  modified_base 1: mod_base = OTHER; note = 5-methyl
  modified_base 13: mod_base = OTHER; note = 5-methyl
  modified_base 18: mod_base = OTHER; note = 5-methyl
  modified_base 1: mod_base = OTHER; note = bicyclic nucleic acid (BNA)
  source 1..19: mol_type = other DNA
caaggaagatggcatttct

SEQ ID NO: 8582 - DNA, 18 bp, synthetic construct
  misc_feature 1..18: note = Description of Artificial Sequence: Synthetic Antisense oligonucleotide
  modified_base 1: mod_base = OTHER; note = 5-methyl
  modified_base 13: mod_base = OTHER; note = 5-methyl
  modified_base 18: mod_base = OTHER; note = 5-methyl
  modified_base 1: mod_base = OTHER; note = bicyclic nucleic acid (BNA)
  source 1..18: mol_type = other DNA
caaggaagatggcatttc

SEQ ID NO: 8583 - DNA, 17 bp, synthetic construct
  misc_feature 1..17: note = Description of Artificial Sequence: Synthetic Antisense oligonucleotide
  modified_base 1: mod_base = OTHER; note = 5-methyl
  modified_base 13: mod_base = OTHER; note = 5-methyl
  modified_base 1: mod_base = OTHER; note = bicyclic nucleic acid (BNA)
  source 1..17: mol_type = other DNA
caaggaagatggcattt

SEQ ID NO: 8584 - DNA, 16 bp, synthetic construct
  misc_feature 1..16: note = Description of Artificial Sequence: Synthetic Antisense oligonucleotide
  modified_base 1: mod_base = OTHER; note = 5-methyl
  modified_base 13: mod_base = OTHER; note = 5-methyl
  modified_base 1: mod_base = OTHER; note = bicyclic nucleic acid (BNA)
  source 1..16: mol_type = other DNA
caaggaagatggcatt

SEQ ID NO: 8585 - DNA, 15 bp, synthetic construct
  misc_feature 1..15: note = Description of Artificial Sequence: Synthetic Antisense oligonucleotide
  modified_base 1: mod_base = OTHER; note = 5-methyl
  modified_base 13: mod_base = OTHER; note = 5-methyl
  modified_base 1: mod_base = OTHER; note = bicyclic nucleic acid (BNA)
  source 1..15: mol_type = other DNA
caaggaagatggcat

SEQ ID NO: 8586 - DNA, 14 bp, synthetic construct
  misc_feature 1..14: note = Description of Artificial Sequence: Synthetic Antisense oligonucleotide
  modified_base 1: mod_base = OTHER; note = 5-methyl
  modified_base 13: mod_base = OTHER; note = 5-methyl
  modified_base 1: mod_base = OTHER; note = bicyclic nucleic acid (BNA)
  source 1..14: mol_type = other DNA
caaggaagatggca

SEQ ID NO: 8587 - DNA, 13 bp, synthetic construct
  misc_feature 1..13: note = Description of Artificial Sequence: Synthetic Antisense oligonucleotide
  modified_base 1: mod_base = OTHER; note = 5-methyl
  modified_base 13: mod_base = OTHER; note = 5-methyl
  modified_base 1: mod_base = OTHER; note = bicyclic nucleic acid (BNA)
  source 1..13: mol_type = other DNA
caaggaagatggc

SEQ ID NO: 8588 - DNA, 12 bp, synthetic construct
  misc_feature 1..12: note = Description of Artificial Sequence: Synthetic Antisense oligonucleotide
  modified_base 1: mod_base = OTHER; note = 5-methyl
  modified_base 1: mod_base = OTHER; note = bicyclic nucleic acid (BNA)
  source 1..12: mol_type = other DNA
caaggaagatgg

SEQ ID NO: 8589 - DNA, 11 bp, synthetic construct
  misc_feature 1..11: note = Description of Artificial Sequence: Synthetic Antisense oligonucleotide
  modified_base 1: mod_base = OTHER; note = 5-methyl
  modified_base 1: mod_base = OTHER; note = bicyclic nucleic acid (BNA)
  source 1..11: mol_type = other DNA
caaggaagatg

SEQ ID NO: 8590 - DNA, 10 bp, synthetic construct
  misc_feature 1..10: note = Description of Artificial Sequence: Synthetic Antisense oligonucleotide
  modified_base 1: mod_base = OTHER; note = 5-methyl
  modified_base 1: mod_base = OTHER; note = bicyclic nucleic acid (BNA)
  source 1..10: mol_type = other DNA
caaggaagat

SEQ ID NO: 8591 - DNA, 20 bp, synthetic construct
  misc_feature 1..20: note = Description of Artificial Sequence: Synthetic Antisense oligonucleotide
  modified_base 1: mod_base = OTHER; note = bicyclic nucleic acid (BNA)
  modified_base 12: mod_base = OTHER; note = 5-methyl
  modified_base 17: mod_base = OTHER; note = 5-methyl
  source 1..20: mol_type = other DNA
aaggaagatggcatttctag

SEQ ID NO: 8592 - DNA, 19 bp, synthetic construct
  misc_feature 1..19: note = Description of Artificial Sequence: Synthetic Antisense oligonucleotide
  modified_base 1: mod_base = OTHER; note = bicyclic nucleic acid (BNA)
  modified_base 12: mod_base = OTHER; note = 5-methyl
  modified_base 17: mod_base = OTHER; note = 5-methyl
  source 1..19: mol_type = other DNA
aaggaagatggcatttcta

SEQ ID NO: 8593 - DNA, 18 bp, synthetic construct
  misc_feature 1..18: note = Description of Artificial Sequence: Synthetic Antisense oligonucleotide
  modified_base 1: mod_base = OTHER; note = bicyclic nucleic acid (BNA)
  modified_base 12: mod_base = OTHER; note = 5-methyl
  modified_base 17: mod_base = OTHER; note = 5-methyl
  source 1..18: mol_type = other DNA
aaggaagatggcatttct

SEQ ID NO: 8594 - DNA, 17 bp, synthetic construct
  misc_feature 1..17: note = Description of Artificial Sequence: Synthetic Antisense oligonucleotide
  modified_base 1: mod_base = OTHER; note = bicyclic nucleic acid (BNA)
  modified_base 12: mod_base = OTHER; note = 5-methyl
  modified_base 17: mod_base = OTHER; note = 5-methyl
  source 1..17: mol_type = other DNA
aaggaagatggcatttc

SEQ ID NO: 8595 - DNA, 16 bp, synthetic construct
  misc_feature 1..16: note = Description of Artificial Sequence: Synthetic Antisense oligonucleotide
  modified_base 1: mod_base = OTHER; note = bicyclic nucleic acid (BNA)
  modified_base 12: mod_base = OTHER; note = 5-methyl
  source 1..16: mol_type = other DNA
aaggaagatggcattt

SEQ ID NO: 8596 - DNA, 15 bp, synthetic construct
  misc_feature 1..15: note = Description of Artificial Sequence: Synthetic Antisense oligonucleotide
  modified_base 1: mod_base = OTHER; note = bicyclic nucleic acid (BNA)
  modified_base 12: mod_base = OTHER; note = 5-methyl
  source 1..15: mol_type = other DNA
aaggaagatggcatt

SEQ ID NO: 8597 - DNA, 14 bp, synthetic construct
  misc_feature 1..14: note = Description of Artificial Sequence: Synthetic Antisense oligonucleotide
  modified_base 1: mod_base = OTHER; note = bicyclic nucleic acid (BNA)
  modified_base 12: mod_base = OTHER; note = 5-methyl
  source 1..14: mol_type = other DNA
aaggaagatggcat

SEQ ID NO: 8598 - DNA, 13 bp, synthetic construct
  misc_feature 1..13: note = Description of Artificial Sequence: Synthetic Antisense oligonucleotide
  modified_base 1: mod_base = OTHER; note = bicyclic nucleic acid (BNA)
  modified_base 12: mod_base = OTHER; note = 5-methyl
  source 1..13: mol_type = other DNA
aaggaagatggca

SEQ ID NO: 8599 - DNA, 12 bp, synthetic construct
  misc_feature 1..12: note = Description of Artificial Sequence: Synthetic Antisense oligonucleotide
  modified_base 1: mod_base = OTHER; note = bicyclic nucleic acid (BNA)
  modified_base 12: mod_base = OTHER; note = 5-methyl
  source 1..12: mol_type = other DNA
aaggaagatggc

SEQ ID NO: 8600 - DNA, 19 bp, synthetic construct
  misc_feature 1..19: note = Description of Artificial Sequence: Synthetic Antisense oligonucleotide
  modified_base 1: mod_base = OTHER; note = bicyclic nucleic acid (BNA)
  modified_base 11: mod_base = OTHER; note = 5-methyl
  modified_base 16: mod_base = OTHER; note = 5-methyl
  source 1..19: mol_type = other DNA
aggaagatggcatttctag

SEQ ID NO: 8601 - DNA, 18 bp, synthetic construct
  misc_feature 1..18: note = Description of Artificial Sequence: Synthetic Antisense oligonucleotide
  modified_base 1: mod_base = OTHER; note = bicyclic nucleic acid (BNA)
  modified_base 11: mod_base = OTHER; note = 5-methyl
  modified_base 16: mod_base = OTHER; note = 5-methyl
  source 1..18: mol_type = other DNA
aggaagatggcatttcta

SEQ ID NO: 8602 - DNA, 17 bp, synthetic construct
  misc_feature 1..17: note = Description of Artificial Sequence: Synthetic Antisense oligonucleotide
  modified_base 1: mod_base = OTHER; note = bicyclic nucleic acid (BNA)
  modified_base 11: mod_base = OTHER; note = 5-methyl
  modified_base 16: mod_base = OTHER; note = 5-methyl
  source 1..17: mol_type = other DNA
aggaagatggcatttct

SEQ ID NO: 8603 - DNA, 16 bp, synthetic construct
  misc_feature 1..16: note = Description of Artificial Sequence: Synthetic Antisense oligonucleotide
  modified_base 1: mod_base = OTHER; note = bicyclic nucleic acid (BNA)
  modified_base 11: mod_base = OTHER; note = 5-methyl
  modified_base 16: mod_base = OTHER; note = 5-methyl
  source 1..16: mol_type = other DNA
aggaagatggcatttc

SEQ ID NO: 8604 - DNA, 15 bp, synthetic construct
  misc_feature 1..15: note = Description of Artificial Sequence: Synthetic Antisense oligonucleotide
  modified_base 1: mod_base = OTHER; note = bicyclic nucleic acid (BNA)
  modified_base 11: mod_base = OTHER; note = 5-methyl
  source 1..15: mol_type = other DNA
aggaagatggcattt

SEQ ID NO: 8605 - DNA, 14 bp, synthetic construct
  misc_feature 1..14: note = Description of Artificial Sequence: Synthetic Antisense oligonucleotide
  modified_base 1: mod_base = OTHER; note = bicyclic nucleic acid (BNA)
  modified_base 11: mod_base = OTHER; note = 5-methyl
  source 1..14: mol_type = other DNA
aggaagatggcatt

SEQ ID NO: 8606 - DNA, 13 bp, synthetic construct
  misc_feature 1..13: note = Description of Artificial Sequence: Synthetic Antisense oligonucleotide
  modified_base 1: mod_base = OTHER; note = bicyclic nucleic acid (BNA)
  modified_base 11: mod_base = OTHER; note = 5-methyl
  source 1..13: mol_type = other DNA
aggaagatggcat

SEQ ID NO: 8607 - DNA, 12 bp, synthetic construct
  misc_feature 1..12: note = Description of Artificial Sequence: Synthetic Antisense oligonucleotide
  modified_base 1: mod_base = OTHER; note = bicyclic nucleic acid (BNA)
  modified_base 11: mod_base = OTHER; note = 5-methyl
  source 1..12: mol_type = other DNA
aggaagatggca

SEQ ID NO: 8608 - DNA, 18 bp, synthetic construct
  misc_feature 1..18: note = Description of Artificial Sequence: Synthetic Antisense oligonucleotide
  modified_base 1: mod_base = OTHER; note = bicyclic nucleic acid (BNA)
  modified_base 10: mod_base = OTHER; note = 5-methyl
  modified_base 15: mod_base = OTHER; note = 5-methyl
  source 1..18: mol_type = other DNA
ggaagatggcatttctag

SEQ ID NO: 8609 - DNA, 17 bp, synthetic construct
  misc_feature 1..17: note = Description of Artificial Sequence: Synthetic Antisense oligonucleotide
  modified_base 1: mod_base = OTHER; note = bicyclic nucleic acid (BNA)
  modified_base 10: mod_base = OTHER; note = 5-methyl
  modified_base 15: mod_base = OTHER; note = 5-methyl
  source 1..17: mol_type = other DNA
ggaagatggcatttcta

SEQ ID NO: 8610 - DNA, 16 bp, synthetic construct
  misc_feature 1..16: note = Description of Artificial Sequence: Synthetic Antisense oligonucleotide
  modified_base 1: mod_base = OTHER; note = bicyclic nucleic acid (BNA)
  modified_base 10: mod_base = OTHER; note = 5-methyl
  modified_base 15: mod_base = OTHER; note = 5-methyl
  source 1..16: mol_type = other DNA
ggaagatggcatttct

SEQ ID NO: 8611 - DNA, 15 bp, synthetic construct
  misc_feature 1..15: note = Description of Artificial Sequence: Synthetic Antisense oligonucleotide
  modified_base 1: mod_base = OTHER; note = bicyclic nucleic acid (BNA)
  modified_base 10: mod_base = OTHER; note = 5-methyl
  modified_base 15: mod_base = OTHER; note = 5-methyl
  source 1..15: mol_type = other DNA
ggaagatggcatttc

SEQ ID NO: 8612 - DNA, 14 bp, synthetic construct
  misc_feature 1..14: note = Description of Artificial Sequence: Synthetic Antisense oligonucleotide
  modified_base 1: mod_base = OTHER; note = bicyclic nucleic acid (BNA)
  modified_base 10: mod_base = OTHER; note = 5-methyl
  source 1..14: mol_type = other DNA
ggaagatggcattt

SEQ ID NO: 8613 - DNA, 13 bp, synthetic construct
  misc_feature 1..13: note = Description of Artificial Sequence: Synthetic Antisense oligonucleotide
  modified_base 1: mod_base = OTHER; note = bicyclic nucleic acid (BNA)
  modified_base 10: mod_base = OTHER; note = 5-methyl
  source 1..13: mol_type = other DNA
ggaagatggcatt

SEQ ID NO: 8614 - DNA, 12 bp, synthetic construct
  misc_feature 1..12: note = Description of Artificial Sequence: Synthetic Antisense oligonucleotide
  modified_base 1: mod_base = OTHER; note = bicyclic nucleic acid (BNA)
  modified_base 10: mod_base = OTHER; note = 5-methyl
  source 1..12: mol_type = other DNA
ggaagatggcat

SEQ ID NO: 8615 - DNA, 11 bp, synthetic construct
  misc_feature 1..11: note = Description of Artificial Sequence: Synthetic Antisense oligonucleotide
  modified_base 1: mod_base = OTHER; note = bicyclic nucleic acid (BNA)
  modified_base 10: mod_base = OTHER; note = 5-methyl
  source 1..11: mol_type = other DNA
ggaagatggca

SEQ ID NO: 8616 - DNA, 10 bp, synthetic construct
  misc_feature 1..10: note = Description of Artificial Sequence: Synthetic Antisense oligonucleotide
  modified_base 1: mod_base = OTHER; note = bicyclic nucleic acid (BNA)
  modified_base 10: mod_base = OTHER; note = 5-methyl
  source 1..10: mol_type = other DNA
ggaagatggc

SEQ ID NO: 8617 - DNA, 17 bp, synthetic construct
  misc_feature 1..17: note = Description of Artificial Sequence: Synthetic Antisense oligonucleotide
  modified_base 1: mod_base = OTHER; note = bicyclic nucleic acid (BNA)
  modified_base 9: mod_base = OTHER; note = 5-methyl
  modified_base 14: mod_base = OTHER; note = 5-methyl
  source 1..17: mol_type = other DNA
gaagatggcatttctag

SEQ ID NO: 8618 - DNA, 16 bp, synthetic construct
  misc_feature 1..16: note = Description of Artificial Sequence: Synthetic Antisense oligonucleotide
  modified_base 1: mod_base = OTHER; note = bicyclic nucleic acid (BNA)
  modified_base 9: mod_base = OTHER; note = 5-methyl
  modified_base 14: mod_base = OTHER; note = 5-methyl
  source 1..16: mol_type = other DNA
gaagatggcatttcta

SEQ ID NO: 8619 - DNA, 14 bp, synthetic construct
  misc_feature 1..14: note = Description of Artificial Sequence: Synthetic Antisense oligonucleotide
  modified_base 1: mod_base = OTHER; note = bicyclic nucleic acid (BNA)
  modified_base 9: mod_base = OTHER; note = 5-methyl
  modified_base 14: mod_base = OTHER; note = 5-methyl
  source 1..14: mol_type = other DNA
gaagatggcatttc

SEQ ID NO: 8620 - DNA, 13 bp, synthetic construct
  misc_feature 1..13: note = Description of Artificial Sequence: Synthetic Antisense oligonucleotide
  modified_base 1: mod_base = OTHER; note = bicyclic nucleic acid (BNA)
  modified_base 9: mod_base = OTHER; note = 5-methyl
  source 1..13: mol_type = other DNA
gaagatggcattt

SEQ ID NO: 8621 - DNA, 12 bp, synthetic construct
  misc_feature 1..12: note = Description of Artificial Sequence: Synthetic Antisense oligonucleotide
  modified_base 1: mod_base = OTHER; note = bicyclic nucleic acid (BNA)
  modified_base 9: mod_base = OTHER; note = 5-methyl
  source 1..12: mol_type = other DNA
gaagatggcatt

SEQ ID NO: 8622 - DNA, 11 bp, synthetic construct
  misc_feature 1..11: note = Description of Artificial Sequence: Synthetic Antisense oligonucleotide
  modified_base 1: mod_base = OTHER; note = bicyclic nucleic acid (BNA)
  modified_base 9: mod_base = OTHER; note = 5-methyl
  source 1..11: mol_type = other DNA
gaagatggcat

SEQ ID NO: 8623 - DNA, 10 bp, synthetic construct
  misc_feature 1..10: note = Description of Artificial Sequence: Synthetic Antisense oligonucleotide
  modified_base 1: mod_base = OTHER; note = bicyclic nucleic acid (BNA)
  modified_base 9: mod_base = OTHER; note = 5-methyl
  source 1..10: mol_type = other DNA
gaagatggca

SEQ ID NO: 8624 - skipped

SEQ ID NO: 8625 - DNA, 16 bp, synthetic construct
  misc_feature 1..16: note = Description of Artificial Sequence: Synthetic Antisense oligonucleotide
  modified_base 1: mod_base = OTHER; note = bicyclic nucleic acid (BNA)
  modified_base 8: mod_base = OTHER; note = 5-methyl
  modified_base 13: mod_base = OTHER; note = 5-methyl
  source 1..16: mol_type = other DNA
aagatggcatttctag

SEQ ID NO: 8626 - DNA, 15 bp, synthetic construct
  misc_feature 1..15: note = Description of Artificial Sequence: Synthetic Antisense oligonucleotide
  modified_base 1: mod_base = OTHER; note = bicyclic nucleic acid (BNA)
  modified_base 8: mod_base = OTHER; note = 5-methyl
  modified_base 13: mod_base = OTHER; note = 5-methyl
  source 1..15: mol_type = other DNA
aagatggcatttcta

SEQ ID NO: 8627 - DNA, 14 bp, synthetic construct
  misc_feature 1..14: note = Description of Artificial Sequence: Synthetic Antisense oligonucleotide
  modified_base 1: mod_base = OTHER; note = bicyclic nucleic acid (BNA)
  modified_base 8: mod_base = OTHER; note = 5-methyl
  modified_base 13: mod_base = OTHER; note = 5-methyl
  source 1..14: mol_type = other DNA
aagatggcatttct

SEQ ID NO: 8628 - DNA, 13 bp, synthetic construct
  misc_feature 1..13: note = Description of Artificial Sequence: Synthetic Antisense oligonucleotide
  modified_base 1: mod_base = OTHER; note = bicyclic nucleic acid (BNA)
  modified_base 8: mod_base = OTHER; note = 5-methyl
  modified_base 13: mod_base = OTHER; note = 5-methyl
  source 1..13: mol_type = other DNA
aagatggcatttc

SEQ ID NO: 8629 - DNA, 12 bp, synthetic construct
  misc_feature 1..12: note = Description of Artificial Sequence: Synthetic Antisense oligonucleotide
  modified_base 1: mod_base = OTHER; note = bicyclic nucleic acid (BNA)
  modified_base 8: mod_base = OTHER; note = 5-methyl
  source 1..12: mol_type = other DNA
aagatggcattt

SEQ ID NO: 8630 - DNA, 11 bp, synthetic construct
  misc_feature 1..11: note = Description of Artificial Sequence: Synthetic Antisense oligonucleotide
  modified_base 1: mod_base = OTHER; note = bicyclic nucleic acid (BNA)
  modified_base 8: mod_base = OTHER; note = 5-methyl
  source 1..11: mol_type = other DNA
aagatggcatt

SEQ ID NO: 8631 - DNA, 10 bp, synthetic construct
  misc_feature 1..10: note = Description of Artificial Sequence: Synthetic Antisense oligonucleotide
  modified_base 1: mod_base = OTHER; note = bicyclic nucleic acid (BNA)
  modified_base 8: mod_base = OTHER; note = 5-methyl
  source 1..10: mol_type = other DNA
aagatggcat

SEQ ID NO: 8632-8633 - skipped (2 entries)

SEQ ID NO: 8634 - DNA, 15 bp, synthetic construct
  misc_feature 1..15: note = Description of Artificial Sequence: Synthetic Antisense oligonucleotide
  modified_base 1: mod_base = OTHER; note = bicyclic nucleic acid (BNA)
  modified_base 7: mod_base = OTHER; note = 5-methyl
  modified_base 12: mod_base = OTHER; note = 5-methyl
  source 1..15: mol_type = other DNA
agatggcatttctag

SEQ ID NO: 8635 - DNA, 14 bp, synthetic construct
  misc_feature 1..14: note = Description of Artificial Sequence: Synthetic Antisense oligonucleotide
  modified_base 1: mod_base = OTHER; note = bicyclic nucleic acid (BNA)
  modified_base 7: mod_base = OTHER; note = 5-methyl
  modified_base 12: mod_base = OTHER; note = 5-methyl
  source 1..14: mol_type = other DNA
agatggcatttcta

SEQ ID NO: 8636 - DNA, 13 bp, synthetic construct
  misc_feature 1..13: note = Description of Artificial Sequence: Synthetic Antisense oligonucleotide
  modified_base 1: mod_base = OTHER; note = bicyclic nucleic acid (BNA)
  modified_base 7: mod_base = OTHER; note = 5-methyl
  modified_base 12: mod_base = OTHER; note = 5-methyl
  source 1..13: mol_type = other DNA
agatggcatttct

SEQ ID NO: 8637 - DNA, 12 bp, synthetic construct
  misc_feature 1..12: note = Description of Artificial Sequence: Synthetic Antisense oligonucleotide
  modified_base 1: mod_base = OTHER; note = bicyclic nucleic acid (BNA)
  modified_base 7: mod_base = OTHER; note = 5-methyl
  modified_base 12: mod_base = OTHER; note = 5-methyl
  source 1..12: mol_type = other DNA
agatggcatttc

SEQ ID NO: 8638 - DNA, 11 bp, synthetic construct
  misc_feature 1..11: note = Description of Artificial Sequence: Synthetic Antisense oligonucleotide
  modified_base 1: mod_base = OTHER; note = bicyclic nucleic acid (BNA)
  modified_base 7: mod_base = OTHER; note = 5-methyl
  source 1..11: mol_type = other DNA
agatggcattt

SEQ ID NO: 8639 - DNA, 10 bp, synthetic construct
  misc_feature 1..10: note = Description of Artificial Sequence: Synthetic Antisense oligonucleotide
  modified_base 1: mod_base = OTHER; note = bicyclic nucleic acid (BNA)
  modified_base 7: mod_base = OTHER; note = 5-methyl
  source 1..10: mol_type = other DNA
agatggcatt

SEQ ID NO: 8640-8641 - skipped (2 entries)

SEQ ID NO: 8642 - DNA, 30 bp, synthetic construct; identical to SEQ ID NO: 8
  misc_feature 1..30: note = Description of Artificial Sequence: Synthetic Antisense oligonucleotide
  modified_base 1: mod_base = OTHER; note = 5-methyl
  modified_base 3..4: mod_base = OTHER; note = 5-methyl
  modified_base 7: mod_base = OTHER; note = 5-methyl
  modified_base 10: mod_base = OTHER; note = 5-methyl
  modified_base 22: mod_base = OTHER; note = 5-methyl
  modified_base 27: mod_base = OTHER; note = 5-methyl
  modified_base 1: mod_base = OTHER; note = bicyclic nucleic acid (BNA)
  source 1..30: mol_type = other DNA

SEQ ID NO: 8643 - DNA, 29 bp, synthetic construct
  misc_feature 1..29: note = Description of Artificial Sequence: Synthetic Antisense oligonucleotide
  modified_base 1: mod_base = OTHER; note = 5-methyl
  modified_base 3..4: mod_base = OTHER; note = 5-methyl
  modified_base 7: mod_base = OTHER; note = 5-methyl
  modified_base 10: mod_base = OTHER; note = 5-methyl
  modified_base 22: mod_base = OTHER; note = 5-methyl
  modified_base 27: mod_base = OTHER; note = 5-methyl
  modified_base 1: mod_base = OTHER; note = bicyclic nucleic acid (BNA)
  source 1..29: mol_type = other DNA
ctccaacatcaaggaagatggcatttcta

SEQ ID NO: 8644 - DNA, 28 bp, synthetic construct
  misc_feature 1..28: note = Description of Artificial Sequence: Synthetic Antisense oligonucleotide
  modified_base 1: mod_base = OTHER; note = 5-methyl
  modified_base 3..4: mod_base = OTHER; note = 5-methyl
  modified_base 7: mod_base = OTHER; note = 5-methyl
  modified_base 10: mod_base = OTHER; note = 5-methyl
  modified_base 22: mod_base = OTHER; note = 5-methyl
  modified_base 27: mod_base = OTHER; note = 5-methyl
  modified_base 1: mod_base = OTHER; note = bicyclic nucleic acid (BNA)
  source 1..28: mol_type = other DNA
ctccaacatcaaggaagatggcatttct

SEQ ID NO: 8645 - DNA, 27 bp, synthetic construct
  misc_feature 1..27: note = Description of Artificial Sequence: Synthetic Antisense oligonucleotide
  modified_base 1: mod_base = OTHER; note = 5-methyl
  modified_base 3..4: mod_base = OTHER; note = 5-methyl
  modified_base 7: mod_base = OTHER; note = 5-methyl
  modified_base 10: mod_base = OTHER; note = 5-methyl
  modified_base 22: mod_base = OTHER; note = 5-methyl
  modified_base 27: mod_base = OTHER; note = 5-methyl
  modified_base 1: mod_base = OTHER; note = bicyclic nucleic acid (BNA)
  source 1..27: mol_type = other DNA
ctccaacatcaaggaagatggcatttc

SEQ ID NO: 8646 - DNA, 26 bp, synthetic construct
  misc_feature 1..26: note = Description of Artificial Sequence: Synthetic Antisense oligonucleotide
  modified_base 1: mod_base = OTHER; note = 5-methyl
  modified_base 3..4: mod_base = OTHER; note = 5-methyl
  modified_base 7: mod_base = OTHER; note = 5-methyl
  modified_base 10: mod_base = OTHER; note = 5-methyl
  modified_base 22: mod_base = OTHER; note = 5-methyl
  modified_base 1: mod_base = OTHER; note = bicyclic nucleic acid (BNA)
  source 1..26: mol_type = other DNA
ctccaacatcaaggaagatggcattt

SEQ ID NO: 8647 - DNA, 25 bp, synthetic construct
  misc_feature 1..25: note = Description of Artificial Sequence: Synthetic Antisense oligonucleotide
  modified_base 1: mod_base = OTHER; note = 5-methyl
  modified_base 3..4: mod_base = OTHER; note = 5-methyl
  modified_base 7: mod_base = OTHER; note = 5-methyl
  modified_base 10: mod_base = OTHER; note = 5-methyl
  modified_base 22: mod_base = OTHER; note = 5-methyl
  modified_base 1: mod_base = OTHER; note = bicyclic nucleic acid (BNA)
  source 1..25: mol_type = other DNA
ctccaacatcaaggaagatggcatt

SEQ ID NO: 8648 - DNA, 24 bp, synthetic construct
  misc_feature 1..24: note = Description of Artificial Sequence: Synthetic Antisense oligonucleotide
  modified_base 1: mod_base = OTHER; note = 5-methyl
  modified_base 3..4: mod_base = OTHER; note = 5-methyl
  modified_base 7: mod_base = OTHER; note = 5-methyl
  modified_base 10: mod_base = OTHER; note = 5-methyl
  modified_base 22: mod_base = OTHER; note = 5-methyl
  modified_base 1: mod_base = OTHER; note = bicyclic nucleic acid (BNA)
  source 1..24: mol_type = other DNA
ctccaacatcaaggaagatggcat

SEQ ID NO: 8649 - DNA, 23 bp, synthetic construct
  misc_feature 1..23: note = Description of Artificial Sequence: Synthetic Antisense oligonucleotide
  modified_base 1: mod_base = OTHER; note = 5-methyl
  modified_base 3..4: mod_base = OTHER; note = 5-methyl
  modified_base 7: mod_base = OTHER; note = 5-methyl
  modified_base 10: mod_base = OTHER; note = 5-methyl
  modified_base 22: mod_base = OTHER; note = 5-methyl
  modified_base 1: mod_base = OTHER; note = bicyclic nucleic acid (BNA)
  source 1..23: mol_type = other DNA
ctccaacatcaaggaagatggca

SEQ ID NO: 8650 - DNA, 22 bp, synthetic construct
  misc_feature 1..22: note = Description of Artificial Sequence: Synthetic Antisense oligonucleotide
  modified_base 1: mod_base = OTHER; note = 5-methyl
  modified_base 3..4: mod_base = OTHER; note = 5-methyl
  modified_base 7: mod_base = OTHER; note = 5-methyl
  modified_base 10: mod_base = OTHER; note = 5-methyl
  modified_base 22: mod_base = OTHER; note = 5-methyl
  modified_base 1: mod_base = OTHER; note = bicyclic nucleic acid (BNA)
  source 1..22: mol_type = other DNA
ctccaacatcaaggaagatggc

SEQ ID NO: 8651 - DNA, 21 bp, synthetic construct
  misc_feature 1..21: note = Description of Artificial Sequence: Synthetic Antisense oligonucleotide
  modified_base 1: mod_base = OTHER; note = 5-methyl
  modified_base 3..4: mod_base = OTHER; note = 5-methyl
  modified_base 7: mod_base = OTHER; note = 5-methyl
  modified_base 10: mod_base = OTHER; note = 5-methyl
  modified_base 1: mod_base = OTHER; note = bicyclic nucleic acid (BNA)
  source 1..21: mol_type = other DNA
ctccaacatcaaggaagatgg

SEQ ID NO: 8652 - DNA, 20 bp, synthetic construct
  misc_feature 1..20: note = Description of Artificial Sequence: Synthetic Antisense oligonucleotide
  modified_base 1: mod_base = OTHER; note = 5-methyl
  modified_base 3..4: mod_base = OTHER; note = 5-methyl
  modified_base 7: mod_base = OTHER; note = 5-methyl
  modified_base 10: mod_base = OTHER; note = 5-methyl
  modified_base 1: mod_base = OTHER; note = bicyclic nucleic acid (BNA)
  source 1..20: mol_type = other DNA
ctccaacatcaaggaagatg

SEQ ID NO: 8653 - DNA, 19 bp, synthetic construct
  misc_feature 1..19: note = Description of Artificial Sequence: Synthetic Antisense oligonucleotide
  modified_base 1: mod_base = OTHER; note = 5-methyl
  modified_base 3..4: mod_base = OTHER; note = 5-methyl
  modified_base 7: mod_base = OTHER; note = 5-methyl
  modified_base 10: mod_base = OTHER; note = 5-methyl
  modified_base 1: mod_base = OTHER; note = bicyclic nucleic acid (BNA)
  source 1..19: mol_type = other DNA
ctccaacatcaaggaagat

SEQ ID NO: 8654 - DNA, 18 bp, synthetic construct
  misc_feature 1..18: note = Description of Artificial Sequence: Synthetic Antisense oligonucleotide
  modified_base 1: mod_base = OTHER; note = 5-methyl
  modified_base 3..4: mod_base = OTHER; note = 5-methyl
  modified_base 7: mod_base = OTHER; note = 5-methyl
  modified_base 10: mod_base = OTHER; note = 5-methyl
  modified_base 1: mod_base = OTHER; note = bicyclic nucleic acid (BNA)
  source 1..18: mol_type = other DNA
ctccaacatcaaggaaga

SEQ ID NO: 8655 - DNA, 17 bp, synthetic construct
  misc_feature 1..17: note = Description of Artificial Sequence: Synthetic Antisense oligonucleotide
  modified_base 1: mod_base = OTHER; note = 5-methyl
  modified_base 3..4: mod_base = OTHER; note = 5-methyl
  modified_base 7: mod_base = OTHER; note = 5-methyl
  modified_base 10: mod_base = OTHER; note = 5-methyl
  modified_base 1: mod_base = OTHER; note = bicyclic nucleic acid (BNA)
  source 1..17: mol_type = other DNA
ctccaacatcaaggaag

SEQ ID NO: 8656 - DNA, 29 bp, synthetic construct
  misc_feature 1..29: note = Description of Artificial Sequence: Synthetic Antisense oligonucleotide
  modified_base 1: mod_base = OTHER; note = bicyclic nucleic acid (BNA)
  modified_base 2..3: mod_base = OTHER; note = 5-methyl
  modified_base 6: mod_base = OTHER; note = 5-methyl
  modified_base 9: mod_base = OTHER; note = 5-methyl
  modified_base 21: mod_base = OTHER; note = 5-methyl
  modified_base 26: mod_base = OTHER; note = 5-methyl
  source 1..29: mol_type = other DNA
tccaacatcaaggaagatggcatttctag

SEQ ID NO: 8657 - DNA, 28 bp, synthetic construct
  misc_feature 1..28: note = Description of Artificial Sequence: Synthetic Antisense oligonucleotide
  modified_base 1: mod_base = OTHER; note = bicyclic nucleic acid (BNA)
  modified_base 2..3: mod_base = OTHER; note = 5-methyl
  modified_base 6: mod_base = OTHER; note = 5-methyl
  modified_base 9: mod_base = OTHER; note = 5-methyl
  modified_base 21: mod_base = OTHER; note = 5-methyl
  modified_base 26: mod_base = OTHER; note = 5-methyl
  source 1..28: mol_type = other DNA
tccaacatcaaggaagatggcatttcta

SEQ ID NO: 8658 - DNA, 27 bp, synthetic construct
  misc_feature 1..27: note = Description of Artificial Sequence: Synthetic Antisense oligonucleotide
  modified_base 1: mod_base = OTHER; note = bicyclic nucleic acid (BNA)
  modified_base 2..3: mod_base = OTHER; note = 5-methyl
  modified_base 6: mod_base = OTHER; note = 5-methyl
  modified_base 9: mod_base = OTHER; note = 5-methyl
  modified_base 21: mod_base = OTHER; note = 5-methyl
  modified_base 26: mod_base = OTHER; note = 5-methyl
  source 1..27: mol_type = other DNA
tccaacatcaaggaagatggcatttct

SEQ ID NO: 8659 - DNA, 26 bp, synthetic construct
  misc_feature 1..26: note = Description of Artificial Sequence: Synthetic Antisense oligonucleotide
  modified_base 1: mod_base = OTHER; note = bicyclic nucleic acid (BNA)
  modified_base 2..3: mod_base = OTHER; note = 5-methyl
  modified_base 6: mod_base = OTHER; note = 5-methyl
  modified_base 9: mod_base = OTHER; note = 5-methyl
  modified_base 21: mod_base = OTHER; note = 5-methyl
  modified_base 26: mod_base = OTHER; note = 5-methyl
  source 1..26: mol_type = other DNA
tccaacatcaaggaagatggcatttc

SEQ ID NO: 8660 - DNA, 25 bp, synthetic construct
  misc_feature 1..25: note = Description of Artificial Sequence: Synthetic Antisense oligonucleotide
  modified_base 1: mod_base = OTHER; note = bicyclic nucleic acid (BNA)
  modified_base 2..3: mod_base = OTHER; note = 5-methyl
  modified_base 6: mod_base = OTHER; note = 5-methyl
  modified_base 9: mod_base = OTHER; note = 5-methyl
  modified_base 21: mod_base = OTHER; note = 5-methyl
  source 1..25: mol_type = other DNA
tccaacatcaaggaagatggcattt

SEQ ID NO: 8661 - DNA, 24 bp, synthetic construct
  misc_feature 1..24: note = Description of Artificial Sequence: Synthetic Antisense oligonucleotide
  modified_base 1: mod_base = OTHER; note = bicyclic nucleic acid (BNA)
  modified_base 2..3: mod_base = OTHER; note = 5-methyl
  modified_base 6: mod_base = OTHER; note = 5-methyl
  modified_base 9: mod_base = OTHER; note = 5-methyl
  modified_base 21: mod_base = OTHER; note = 5-methyl
  source 1..24: mol_type = other DNA
tccaacatcaaggaagatggcatt

SEQ ID NO: 8662 - DNA, 23 bp, synthetic construct
  misc_feature 1..23: note = Description of Artificial Sequence: Synthetic Antisense oligonucleotide
  modified_base 1: mod_base = OTHER; note = bicyclic nucleic acid (BNA)
  modified_base 2..3: mod_base = OTHER; note = 5-methyl
  modified_base 6: mod_base = OTHER; note = 5-methyl
  modified_base 9: mod_base = OTHER; note = 5-methyl
  modified_base 21: mod_base = OTHER; note = 5-methyl
  source 1..23: mol_type = other DNA
tccaacatcaaggaagatggcat

SEQ ID NO: 8663 - DNA, 22 bp, synthetic construct
  misc_feature 1..22: note = Description of Artificial Sequence: Synthetic Antisense oligonucleotide
  modified_base 1: mod_base = OTHER; note = bicyclic nucleic acid (BNA)
  modified_base 2..3: mod_base = OTHER; note = 5-methyl
  modified_base 6: mod_base = OTHER; note = 5-methyl
  modified_base 9: mod_base = OTHER; note = 5-methyl
  modified_base 21: mod_base = OTHER; note = 5-methyl
  source 1..22: mol_type = other DNA
tccaacatcaaggaagatggca

SEQ ID NO: 8664 - DNA, 21 bp, synthetic construct
  misc_feature 1..21: note = Description of Artificial Sequence: Synthetic Antisense oligonucleotide
  modified_base 1: mod_base = OTHER; note = bicyclic nucleic acid (BNA)
  modified_base 2..3: mod_base = OTHER; note = 5-methyl
  modified_base 6: mod_base = OTHER; note = 5-methyl
  modified_base 9: mod_base = OTHER; note = 5-methyl
  modified_base 21: mod_base = OTHER; note = 5-methyl
  source 1..21: mol_type = other DNA
tccaacatcaaggaagatggc

SEQ ID NO: 8665 - DNA, 20 bp, synthetic construct
  misc_feature 1..20: note = Description of Artificial Sequence: Synthetic Antisense oligonucleotide
  modified_base 1: mod_base = OTHER; note = bicyclic nucleic acid (BNA)
  modified_base 2..3: mod_base = OTHER; note = 5-methyl
  modified_base 6: mod_base = OTHER; note = 5-methyl
  modified_base 9: mod_base = OTHER; note = 5-methyl
  source 1..20: mol_type = other DNA
tccaacatcaaggaagatgg

SEQ ID NO: 8666 - DNA, 19 bp, synthetic construct
  misc_feature 1..19: note = Description of Artificial Sequence: Synthetic Antisense oligonucleotide
  modified_base 1: mod_base = OTHER; note = bicyclic nucleic acid (BNA)
  modified_base 2..3: mod_base = OTHER; note = 5-methyl
  modified_base 6: mod_base = OTHER; note = 5-methyl
  modified_base 9: mod_base = OTHER; note = 5-methyl
  source 1..19: mol_type = other DNA
tccaacatcaaggaagatg

SEQ ID NO: 8667 - DNA, 18 bp, synthetic construct
  misc_feature 1..18: note = Description of Artificial Sequence: Synthetic Antisense oligonucleotide
  modified_base 1: mod_base = OTHER; note = bicyclic nucleic acid (BNA)
  modified_base 2..3: mod_base = OTHER; note = 5-methyl
  modified_base 6: mod_base = OTHER; note = 5-methyl
  modified_base 9: mod_base = OTHER; note = 5-methyl
  source 1..18: mol_type = other DNA
tccaacatcaaggaagat

SEQ ID NO: 8668 - DNA, 17 bp, synthetic construct
  misc_feature 1..17: note = Description of Artificial Sequence: Synthetic Antisense oligonucleotide
  modified_base 1: mod_base = OTHER; note = bicyclic nucleic acid (BNA)
  modified_base 2..3: mod_base = OTHER; note = 5-methyl
  modified_base 6: mod_base = OTHER; note = 5-methyl
  modified_base 9: mod_base = OTHER; note = 5-methyl
  source 1..17: mol_type = other DNA
tccaacatcaaggaaga

SEQ ID NO: 8669 - DNA, 16 bp, synthetic construct
  misc_feature 1..16: note = Description of Artificial Sequence: Synthetic Antisense oligonucleotide
  modified_base 1: mod_base = OTHER; note = bicyclic nucleic acid (BNA)
  modified_base 2..3: mod_base = OTHER; note = 5-methyl
  modified_base 6: mod_base = OTHER; note = 5-methyl
  modified_base 9: mod_base = OTHER; note = 5-methyl
  source 1..16: mol_type = other DNA
tccaacatcaaggaag

SEQ ID NO: 8670 - DNA, 28 bp, synthetic construct
  misc_feature 1..28: note = Description of Artificial Sequence: Synthetic Antisense oligonucleotide
  modified_base 1..2: mod_base = OTHER; note = 5-methyl
  modified_base 5: mod_base = OTHER; note = 5-methyl
  modified_base 8: mod_base = OTHER; note = 5-methyl
  modified_base 20: mod_base = OTHER; note = 5-methyl
  modified_base 25: mod_base = OTHER; note = 5-methyl
  modified_base 1: mod_base = OTHER; note = bicyclic nucleic acid (BNA)
  source 1..28: mol_type = other DNA
ccaacatcaaggaagatggcatttctag

SEQ ID NO: 8671 - DNA, 27 bp, synthetic construct
  misc_feature 1..27: note = Description of Artificial Sequence: Synthetic Antisense oligonucleotide
  modified_base 1..2: mod_base = OTHER; note = 5-methyl
  modified_base 5: mod_base = OTHER; note = 5-methyl
  modified_base 8: mod_base = OTHER; note = 5-methyl
  modified_base 20: mod_base = OTHER; note = 5-methyl
  modified_base 25: mod_base = OTHER; note = 5-methyl
  modified_base 1: mod_base = OTHER; note = bicyclic nucleic acid (BNA)
  source 1..27: mol_type = other DNA
ccaacatcaaggaagatggcatttcta

SEQ ID NO: 8672 - DNA, 26 bp, synthetic construct
  misc_feature 1..26: note = Description of Artificial Sequence: Synthetic Antisense oligonucleotide
  modified_base 1..2: mod_base = OTHER; note = 5-methyl
  modified_base 5: mod_base = OTHER; note = 5-methyl
  modified_base 8: mod_base = OTHER; note = 5-methyl
  modified_base 20: mod_base = OTHER; note = 5-methyl
  modified_base 25: mod_base = OTHER; note = 5-methyl
  modified_base 1: mod_base = OTHER; note = bicyclic nucleic acid (BNA)
  source 1..26: mol_type = other DNA
ccaacatcaaggaagatggcatttct

SEQ ID NO: 8673 - DNA, 25 bp, synthetic construct
  misc_feature 1..25: note = Description of Artificial Sequence: Synthetic Antisense oligonucleotide
  modified_base 1..2: mod_base = OTHER; note = 5-methyl
  modified_base 5: mod_base = OTHER; note = 5-methyl
  modified_base 8: mod_base = OTHER; note = 5-methyl
  modified_base 20: mod_base = OTHER; note = 5-methyl
  modified_base 25: mod_base = OTHER; note = 5-methyl
  modified_base 1: mod_base = OTHER; note = bicyclic nucleic acid (BNA)
  source 1..25: mol_type = other DNA
ccaacatcaaggaagatggcatttc

SEQ ID NO: 8674 - DNA, 24 bp, synthetic construct
  misc_feature 1..24: note = Description of Artificial Sequence: Synthetic Antisense oligonucleotide
  modified_base 1..2: mod_base = OTHER; note = 5-methyl
  modified_base 5: mod_base = OTHER; note = 5-methyl
  modified_base 8: mod_base = OTHER; note = 5-methyl
  modified_base 20: mod_base = OTHER; note = 5-methyl
  modified_base 1: mod_base = OTHER; note = bicyclic nucleic acid (BNA)
  source 1..24: mol_type = other DNA
ccaacatcaaggaagatggcattt

SEQ ID NO: 8675 - DNA, 23 bp, synthetic construct
  misc_feature 1..23: note = Description of Artificial Sequence: Synthetic Antisense oligonucleotide
  modified_base 1..2: mod_base = OTHER; note = 5-methyl
  modified_base 5: mod_base = OTHER; note = 5-methyl
  modified_base 8: mod_base = OTHER; note = 5-methyl
  modified_base 20: mod_base = OTHER; note = 5-methyl
  modified_base 1: mod_base = OTHER; note = bicyclic nucleic acid (BNA)
  source 1..23: mol_type = other DNA
ccaacatcaaggaagatggcatt

SEQ ID NO: 8676 - DNA, 22 bp, synthetic construct
  misc_feature 1..22: note = Description of Artificial Sequence: Synthetic Antisense oligonucleotide
  modified_base 1..2: mod_base = OTHER; note = 5-methyl
  modified_base 5: mod_base = OTHER; note = 5-methyl
  modified_base 8: mod_base = OTHER; note = 5-methyl
  modified_base 20: mod_base = OTHER; note = 5-methyl
  modified_base 1: mod_base = OTHER; note = bicyclic nucleic acid (BNA)
  source 1..22: mol_type = other DNA
ccaacatcaaggaagatggcat

SEQ ID NO: 8677 - DNA, 21 bp, synthetic construct
  misc_feature 1..21: note = Description of Artificial Sequence: Synthetic Antisense oligonucleotide
  modified_base 1..2: mod_base = OTHER; note = 5-methyl
  modified_base 5: mod_base = OTHER; note = 5-methyl
  modified_base 8: mod_base = OTHER; note = 5-methyl
  modified_base 20: mod_base = OTHER; note = 5-methyl
  modified_base 1: mod_base = OTHER; note = bicyclic nucleic acid (BNA)
  source 1..21: mol_type = other DNA
ccaacatcaaggaagatggca

SEQ ID NO: 8678 - DNA, 20 bp, synthetic construct
  misc_feature 1..20: note = Description of Artificial Sequence: Synthetic Antisense oligonucleotide
  modified_base 1..2: mod_base = OTHER; note = 5-methyl
  modified_base 5: mod_base = OTHER; note = 5-methyl
  modified_base 8: mod_base = OTHER; note = 5-methyl
  modified_base 20: mod_base = OTHER; note = 5-methyl
  modified_base 1: mod_base = OTHER; note = bicyclic nucleic acid (BNA)
  source 1..20: mol_type = other DNA
ccaacatcaaggaagatggc

SEQ ID NO: 8679 - DNA, 19 bp, synthetic construct
  misc_feature 1..19: note = Description of Artificial Sequence: Synthetic Antisense oligonucleotide
  modified_base 1..2: mod_base = OTHER; note = 5-methyl
  modified_base 5: mod_base = OTHER; note = 5-methyl
  modified_base 8: mod_base = OTHER; note = 5-methyl
  modified_base 1: mod_base = OTHER; note = bicyclic nucleic acid (BNA)
  source 1..19: mol_type = other DNA
ccaacatcaaggaagatgg

SEQ ID NO: 8680 - DNA, 18 bp, synthetic construct
  misc_feature 1..18: note = Description of Artificial Sequence: Synthetic Antisense oligonucleotide
  modified_base 1..2: mod_base = OTHER; note = 5-methyl
  modified_base 5: mod_base = OTHER; note = 5-methyl
  modified_base 8: mod_base = OTHER; note = 5-methyl
  modified_base 1: mod_base = OTHER; note = bicyclic nucleic acid (BNA)
  source 1..18: mol_type = other DNA
ccaacatcaaggaagatg

SEQ ID NO: 8681 - DNA, 17 bp, synthetic construct
  misc_feature 1..17: note = Description of Artificial Sequence: Synthetic Antisense oligonucleotide
  modified_base 1..2: mod_base = OTHER; note = 5-methyl
  modified_base 5: mod_base = OTHER; note = 5-methyl
  modified_base 8: mod_base = OTHER; note = 5-methyl
  modified_base 1: mod_base = OTHER; note = bicyclic nucleic acid (BNA)
  source 1..17: mol_type = other DNA
ccaacatcaaggaagat

SEQ ID NO: 8682 - DNA, 16 bp, synthetic construct
  misc_feature 1..16: note = Description of Artificial Sequence: Synthetic Antisense oligonucleotide
  modified_base 1..2: mod_base = OTHER; note = 5-methyl
  modified_base 5: mod_base = OTHER; note = 5-methyl
  modified_base 8: mod_base = OTHER; note = 5-methyl
  modified_base 1: mod_base = OTHER; note = bicyclic nucleic acid (BNA)
  source 1..16: mol_type = other DNA
ccaacatcaaggaaga

SEQ ID NO: 8683 - DNA, 15 bp, synthetic construct
  misc_feature 1..15: note = Description of Artificial Sequence: Synthetic Antisense oligonucleotide
  modified_base 1..2: mod_base = OTHER; note = 5-methyl
  modified_base 5: mod_base = OTHER; note = 5-methyl
  modified_base 8: mod_base = OTHER; note = 5-methyl
  modified_base 1: mod_base = OTHER; note = bicyclic nucleic acid (BNA)
  source 1..15: mol_type = other DNA
ccaacatcaaggaag

SEQ ID NO: 8684 - DNA, 27 bp, synthetic construct
  misc_feature 1..27: note = Description of Artificial Sequence: Synthetic Antisense oligonucleotide
  modified_base 1: mod_base = OTHER; note = 5-methyl
  modified_base 4: mod_base = OTHER; note = 5-methyl
  modified_base 7: mod_base = OTHER; note = 5-methyl
  modified_base 19: mod_base = OTHER; note = 5-methyl
  modified_base 24: mod_base = OTHER; note = 5-methyl
  modified_base 1: mod_base = OTHER; note = bicyclic nucleic acid (BNA)
  source 1..27: mol_type = other DNA
caacatcaaggaagatggcatttctag

SEQ ID NO: 8685 - DNA, 26 bp, synthetic construct
  misc_feature 1..26: note = Description of Artificial Sequence: Synthetic Antisense oligonucleotide
  modified_base 1: mod_base = OTHER; note = 5-methyl
  modified_base 4: mod_base = OTHER; note = 5-methyl
  modified_base 7: mod_base = OTHER; note = 5-methyl
  modified_base 19: mod_base = OTHER; note = 5-methyl
  modified_base 24: mod_base = OTHER; note = 5-methyl
  modified_base 1: mod_base = OTHER; note = bicyclic nucleic acid (BNA)
  source 1..26: mol_type = other DNA
caacatcaaggaagatggcatttcta

SEQ ID NO: 8686 - DNA, 25 bp, synthetic construct
  misc_feature 1..25: note = Description of Artificial Sequence: Synthetic Antisense oligonucleotide
  modified_base 1: mod_base = OTHER; note = 5-methyl
  modified_base 4: mod_base = OTHER; note = 5-methyl
  modified_base 7: mod_base = OTHER; note = 5-methyl
  modified_base 19: mod_base = OTHER; note = 5-methyl
  modified_base 24: mod_base = OTHER; note = 5-methyl
  modified_base 1: mod_base = OTHER; note = bicyclic nucleic acid (BNA)
  source 1..25: mol_type = other DNA
caacatcaaggaagatggcatttct

SEQ ID NO: 8687 - DNA, 24 bp, synthetic construct
  misc_feature 1..24: note = Description of Artificial Sequence: Synthetic Antisense oligonucleotide
  modified_base 1: mod_base = OTHER; note = 5-methyl
  modified_base 4: mod_base = OTHER; note = 5-methyl
  modified_base 7: mod_base = OTHER; note = 5-methyl
  modified_base 19: mod_base = OTHER; note = 5-methyl
  modified_base 24: mod_base = OTHER; note = 5-methyl
  modified_base 1: mod_base = OTHER; note = bicyclic nucleic acid (BNA)
  source 1..24: mol_type = other DNA
caacatcaaggaagatggcatttc

SEQ ID NO: 8688 - DNA, 23 bp, synthetic construct
  misc_feature 1..23: note = Description of Artificial Sequence: Synthetic Antisense oligonucleotide
  modified_base 1: mod_base = OTHER; note = 5-methyl
  modified_base 4: mod_base = OTHER; note = 5-methyl
  modified_base 7: mod_base = OTHER; note = 5-methyl
  modified_base 19: mod_base = OTHER; note = 5-methyl
  modified_base 1: mod_base = OTHER; note = bicyclic nucleic acid (BNA)
  source 1..23: mol_type = other DNA
caacatcaaggaagatggcattt

SEQ ID NO: 8689 - DNA, 22 bp, synthetic construct
  misc_feature 1..22: note = Description of Artificial Sequence: Synthetic Antisense oligonucleotide
  modified_base 1: mod_base = OTHER; note = 5-methyl
  modified_base 4: mod_base = OTHER; note = 5-methyl
  modified_base 7: mod_base = OTHER; note = 5-methyl
  modified_base 19: mod_base = OTHER; note = 5-methyl
  modified_base 1: mod_base = OTHER; note = bicyclic nucleic acid (BNA)
  source 1..22: mol_type = other DNA
caacatcaaggaagatggcatt

SEQ ID NO: 8690 - DNA, 21 bp, synthetic construct
  misc_feature 1..21: note = Description of Artificial Sequence: Synthetic Antisense oligonucleotide
  modified_base 1: mod_base = OTHER; note = 5-methyl
  modified_base 4: mod_base = OTHER; note = 5-methyl
  modified_base 7: mod_base = OTHER; note = 5-methyl
  modified_base 19: mod_base = OTHER; note = 5-methyl
  modified_base 1: mod_base = OTHER; note = bicyclic nucleic acid (BNA)
  source 1..21: mol_type = other DNA
caacatcaaggaagatggcat

SEQ ID NO: 8691 - DNA, 20 bp, synthetic construct
  misc_feature 1..20: note = Description of Artificial Sequence: Synthetic Antisense oligonucleotide
  modified_base 1: mod_base = OTHER; note = 5-methyl
  modified_base 4: mod_base = OTHER; note = 5-methyl
  modified_base 7: mod_base = OTHER; note = 5-methyl
  modified_base 19: mod_base = OTHER; note = 5-methyl
  modified_base 1: mod_base = OTHER; note = bicyclic nucleic acid (BNA)
  source 1..20: mol_type = other DNA
caacatcaaggaagatggca

SEQ ID NO: 8692 - DNA, 19 bp, synthetic construct
  misc_feature 1..19: note = Description of Artificial Sequence: Synthetic Antisense oligonucleotide
  modified_base 1: mod_base = OTHER; note = 5-methyl
  modified_base 4: mod_base = OTHER; note = 5-methyl
  modified_base 7: mod_base = OTHER; note = 5-methyl
  modified_base 19: mod_base = OTHER; note = 5-methyl
  modified_base 1: mod_base = OTHER; note = bicyclic nucleic acid (BNA)
  source 1..19: mol_type = other DNA
caacatcaaggaagatggc

SEQ ID NO: 8693 - DNA, 18 bp, synthetic construct
  misc_feature 1..18: note = Description of Artificial Sequence: Synthetic Antisense oligonucleotide
  modified_base 1: mod_base = OTHER; note = 5-methyl
  modified_base 4: mod_base = OTHER; note = 5-methyl
  modified_base 7: mod_base = OTHER; note = 5-methyl
  modified_base 1: mod_base = OTHER; note = bicyclic nucleic acid (BNA)
  source 1..18: mol_type = other DNA
caacatcaaggaagatgg

SEQ ID NO: 8694 - DNA, 17 bp, synthetic construct
  misc_feature 1..17: note = Description of Artificial Sequence: Synthetic Antisense oligonucleotide
  modified_base 1: mod_base = OTHER; note = 5-methyl
  modified_base 4: mod_base = OTHER; note = 5-methyl
  modified_base 7: mod_base = OTHER; note = 5-methyl
  modified_base 1: mod_base = OTHER; note = bicyclic nucleic acid (BNA)
  source 1..17: mol_type = other DNA
caacatcaaggaagatg

SEQ ID NO: 8695 - DNA, 16 bp, synthetic construct
  misc_feature 1..16: note = Description of Artificial Sequence: Synthetic Antisense oligonucleotide
  modified_base 1: mod_base = OTHER; note = 5-methyl
  modified_base 4: mod_base = OTHER; note = 5-methyl
  modified_base 7: mod_base = OTHER; note = 5-methyl
  modified_base 1: mod_base = OTHER; note = bicyclic nucleic acid (BNA)
  source 1..16: mol_type = other DNA
caacatcaaggaagat

SEQ ID NO: 8696 - DNA, 15 bp, synthetic construct
  misc_feature 1..15: note = Description of Artificial Sequence: Synthetic Antisense oligonucleotide
  modified_base 1: mod_base = OTHER; note = 5-methyl
  modified_base 4: mod_base = OTHER; note = 5-methyl
  modified_base 7: mod_base = OTHER; note = 5-methyl
  modified_base 1: mod_base = OTHER; note = bicyclic nucleic acid (BNA)
  source 1..15: mol_type = other DNA
caacatcaaggaaga

SEQ ID NO: 8697 - DNA, 14 bp, synthetic construct
  misc_feature 1..14: note = Description of Artificial Sequence: Synthetic Antisense oligonucleotide
  modified_base 1: mod_base = OTHER; note = 5-methyl
  modified_base 4: mod_base = OTHER; note = 5-methyl
  modified_base 7: mod_base = OTHER; note = 5-methyl
  modified_base 1: mod_base = OTHER; note = bicyclic nucleic acid (BNA)
  source 1..14: mol_type = other DNA
caacatcaaggaag

SEQ ID NO: 8698 - DNA, 26 bp, synthetic construct
  misc_feature 1..26: note = Description of Artificial Sequence: Synthetic Antisense oligonucleotide
  modified_base 1: mod_base = OTHER; note = bicyclic nucleic acid (BNA)
  modified_base 3: mod_base = OTHER; note = 5-methyl
  modified_base 6: mod_base = OTHER; note = 5-methyl
  modified_base 18: mod_base = OTHER; note = 5-methyl
  modified_base 23: mod_base = OTHER; note = 5-methyl
  source 1..26: mol_type = other DNA
aacatcaaggaagatggcatttctag

SEQ ID NO: 8699 - DNA, 25 bp, synthetic construct
  misc_feature 1..25: note = Description of Artificial Sequence: Synthetic Antisense oligonucleotide
  modified_base 1: mod_base = OTHER; note = bicyclic nucleic acid (BNA)
  modified_base 3: mod_base = OTHER; note = 5-methyl
  modified_base 6: mod_base = OTHER; note = 5-methyl
  modified_base 18: mod_base = OTHER; note = 5-methyl
  modified_base 23: mod_base = OTHER; note = 5-methyl
  source 1..25: mol_type = other DNA
aacatcaaggaagatggcatttcta

SEQ ID NO: 8700 - DNA, 24 bp, synthetic construct
  misc_feature 1..24: note = Description of Artificial Sequence: Synthetic Antisense oligonucleotide
  modified_base 1: mod_base = OTHER; note = bicyclic nucleic acid (BNA)
  modified_base 3: mod_base = OTHER; note = 5-methyl
  modified_base 6: mod_base = OTHER; note = 5-methyl
  modified_base 18: mod_base = OTHER; note = 5-methyl
  modified_base 23: mod_base = OTHER; note = 5-methyl
  source 1..24: mol_type = other DNA
aacatcaaggaagatggcatttct

SEQ ID NO: 8701 - DNA, 23 bp, synthetic construct
  misc_feature 1..23: note = Description of Artificial Sequence: Synthetic Antisense oligonucleotide
  modified_base 1: mod_base = OTHER; note = bicyclic nucleic acid (BNA)
  modified_base 3: mod_base = OTHER; note = 5-methyl
  modified_base 6: mod_base = OTHER; note = 5-methyl
  modified_base 18: mod_base = OTHER; note = 5-methyl
  modified_base 23: mod_base = OTHER; note = 5-methyl
  source 1..23: mol_type = other DNA
aacatcaaggaagatggcatttc

SEQ ID NO: 8702 - DNA, 22 bp, synthetic construct
  misc_feature 1..22: note = Description of Artificial Sequence: Synthetic Antisense oligonucleotide
  modified_base 1: mod_base = OTHER; note = bicyclic nucleic acid (BNA)
  modified_base 3: mod_base = OTHER; note = 5-methyl
  modified_base 6: mod_base = OTHER; note = 5-methyl
  modified_base 18: mod_base = OTHER; note = 5-methyl
  source 1..22: mol_type = other DNA
aacatcaaggaagatggcattt

SEQ ID NO: 8703 - DNA, 21 bp, synthetic construct
  misc_feature 1..21: note = Description of Artificial Sequence: Synthetic Antisense oligonucleotide
  modified_base 1: mod_base = OTHER; note = bicyclic nucleic acid (BNA)
  modified_base 3: mod_base = OTHER; note = 5-methyl
  modified_base 6: mod_base = OTHER; note = 5-methyl
  modified_base 18: mod_base = OTHER; note = 5-methyl
  source 1..21: mol_type = other DNA
aacatcaaggaagatggcatt

SEQ ID NO: 8704 - DNA, 20 bp, synthetic construct
  misc_feature 1..20: note = Description of Artificial Sequence: Synthetic Antisense oligonucleotide
  modified_base 1: mod_base = OTHER; note = bicyclic nucleic acid (BNA)
  modified_base 3: mod_base = OTHER; note = 5-methyl
  modified_base 6: mod_base = OTHER; note = 5-methyl
  modified_base 18: mod_base = OTHER; note = 5-methyl
  source 1..20: mol_type = other DNA
aacatcaaggaagatggcat

SEQ ID NO: 8705 - DNA, 19 bp, synthetic construct
  misc_feature 1..19: note = Description of Artificial Sequence: Synthetic Antisense oligonucleotide
  modified_base 1: mod_base = OTHER; note = bicyclic nucleic acid (BNA)
  modified_base 3: mod_base = OTHER; note = 5-methyl
  modified_base 6: mod_base = OTHER; note = 5-methyl
  modified_base 18: mod_base = OTHER; note = 5-methyl
  source 1..19: mol_type = other DNA
aacatcaaggaagatggca

SEQ ID NO: 8706 - DNA, 18 bp, synthetic construct
  misc_feature 1..18: note = Description of Artificial Sequence: Synthetic Antisense oligonucleotide
  modified_base 1: mod_base = OTHER; note = bicyclic nucleic acid (BNA)
  modified_base 3: mod_base = OTHER; note = 5-methyl
  modified_base 6: mod_base = OTHER; note = 5-methyl
  modified_base 18: mod_base = OTHER; note = 5-methyl
  source 1..18: mol_type = other DNA
aacatcaaggaagatggc

SEQ ID NO: 8707 - DNA, 17 bp, synthetic construct
  misc_feature 1..17: note = Description of Artificial Sequence: Synthetic Antisense oligonucleotide
  modified_base 1: mod_base = OTHER; note = bicyclic nucleic acid (BNA)
  modified_base 3: mod_base = OTHER; note = 5-methyl
  modified_base 6: mod_base = OTHER; note = 5-methyl
  source 1..17: mol_type = other DNA
aacatcaaggaagatgg

SEQ ID NO: 8708 - DNA, 16 bp, synthetic construct
  misc_feature 1..16: note = Description of Artificial Sequence: Synthetic Antisense oligonucleotide
  modified_base 1: mod_base = OTHER; note = bicyclic nucleic acid (BNA)
  modified_base 3: mod_base = OTHER; note = 5-methyl
  modified_base 6: mod_base = OTHER; note = 5-methyl
  source 1..16: mol_type = other DNA
aacatcaaggaagatg

SEQ ID NO: 8709 - DNA, 15 bp, synthetic construct
  misc_feature 1..15: note = Description of Artificial Sequence: Synthetic Antisense oligonucleotide
  modified_base 1: mod_base = OTHER; note = bicyclic nucleic acid (BNA)
  modified_base 3: mod_base = OTHER; note = 5-methyl
  modified_base 6: mod_base = OTHER; note = 5-methyl
  source 1..15: mol_type = other DNA
aacatcaaggaagat

SEQ ID NO: 8710 - DNA, 14 bp, synthetic construct
  misc_feature 1..14: note = Description of Artificial Sequence: Synthetic Antisense oligonucleotide
  modified_base 1: mod_base = OTHER; note = bicyclic nucleic acid (BNA)
  modified_base 3: mod_base = OTHER; note = 5-methyl
  modified_base 6: mod_base = OTHER; note = 5-methyl
  source 1..14: mol_type = other DNA
aacatcaaggaaga

SEQ ID NO: 8711 - DNA, 13 bp, synthetic construct
  misc_feature 1..13: note = Description of Artificial Sequence: Synthetic Antisense oligonucleotide
  modified_base 1: mod_base = OTHER; note = bicyclic nucleic acid (BNA)
  modified_base 3: mod_base = OTHER; note = 5-methyl
  modified_base 6: mod_base = OTHER; note = 5-methyl
  source 1..13: mol_type = other DNA
aacatcaaggaag

SEQ ID NO: 8712 - DNA, 25 bp, synthetic construct
  misc_feature 1..25: note = Description of Artificial Sequence: Synthetic Antisense oligonucleotide
  modified_base 1: mod_base = OTHER; note = bicyclic nucleic acid (BNA)
  modified_base 2: mod_base = OTHER; note = 5-methyl
  modified_base 5: mod_base = OTHER; note = 5-methyl
  modified_base 17: mod_base = OTHER; note = 5-methyl
  modified_base 22: mod_base = OTHER; note = 5-methyl
  source 1..25: mol_type = other DNA
acatcaaggaagatggcatttctag

SEQ ID NO: 8713 - DNA, 24 bp, synthetic construct
  misc_feature 1..24: note = Description of Artificial Sequence: Synthetic Antisense oligonucleotide
  modified_base 1: mod_base = OTHER; note = bicyclic nucleic acid (BNA)
  modified_base 2: mod_base = OTHER; note = 5-methyl
  modified_base 5: mod_base = OTHER; note = 5-methyl
  modified_base 17: mod_base = OTHER; note = 5-methyl
  modified_base 22: mod_base = OTHER; note = 5-methyl
  source 1..24: mol_type = other DNA
acatcaaggaagatggcatttcta

SEQ ID NO: 8714 - DNA, 23 bp, synthetic construct
  misc_feature 1..23: note = Description of Artificial Sequence: Synthetic Antisense oligonucleotide
  modified_base 1: mod_base = OTHER; note = bicyclic nucleic acid (BNA)
  modified_base 2: mod_base = OTHER; note = 5-methyl
  modified_base 5: mod_base = OTHER; note = 5-methyl
  modified_base 17: mod_base = OTHER; note = 5-methyl
  modified_base 22: mod_base = OTHER; note = 5-methyl
  source 1..23: mol_type = other DNA
acatcaaggaagatggcatttct

SEQ ID NO: 8715 - DNA, 22 bp, synthetic construct
  misc_feature 1..22: note = Description of Artificial Sequence: Synthetic Antisense oligonucleotide
  modified_base 1: mod_base = OTHER; note = bicyclic nucleic acid (BNA)
  modified_base 2: mod_base = OTHER; note = 5-methyl
  modified_base 5: mod_base = OTHER; note = 5-methyl
  modified_base 17: mod_base = OTHER; note = 5-methyl
  modified_base 22: mod_base = OTHER; note = 5-methyl
  source 1..22: mol_type = other DNA
acatcaaggaagatggcatttc

SEQ ID NO: 8716 - DNA, 21 bp, synthetic construct
  misc_feature 1..21: note = Description of Artificial Sequence: Synthetic Antisense oligonucleotide
  modified_base 1: mod_base = OTHER; note = bicyclic nucleic acid (BNA)
  modified_base 2: mod_base = OTHER; note = 5-methyl
  modified_base 5: mod_base = OTHER; note = 5-methyl
  modified_base 17: mod_base = OTHER; note = 5-methyl
  source 1..21: mol_type = other DNA
acatcaaggaagatggcattt

SEQ ID NO: 8717 - DNA, 20 bp, synthetic construct
  misc_feature 1..20: note = Description of Artificial Sequence: Synthetic Antisense oligonucleotide
  modified_base 1: mod_base = OTHER; note = bicyclic nucleic acid (BNA)
  modified_base 2: mod_base = OTHER; note = 5-methyl
  modified_base 5: mod_base = OTHER; note = 5-methyl
  modified_base 17: mod_base = OTHER; note = 5-methyl
  source 1..20: mol_type = other DNA
acatcaaggaagatggcatt

SEQ ID NO: 8718 - DNA, 19 bp, synthetic construct
  misc_feature 1..19: note = Description of Artificial Sequence: Synthetic Antisense oligonucleotide
  modified_base 1: mod_base = OTHER; note = bicyclic nucleic acid (BNA)
  modified_base 2: mod_base = OTHER; note = 5-methyl
  modified_base 5: mod_base = OTHER; note = 5-methyl
  modified_base 17: mod_base = OTHER; note = 5-methyl
  source 1..19: mol_type = other DNA
acatcaaggaagatggcat

SEQ ID NO: 8719 - DNA, 18 bp, synthetic construct
  misc_feature 1..18: note = Description of Artificial Sequence: Synthetic Antisense oligonucleotide
  modified_base 1: mod_base = OTHER; note = bicyclic nucleic acid (BNA)
  modified_base 2: mod_base = OTHER; note = 5-methyl
  modified_base 5: mod_base = OTHER; note = 5-methyl
  modified_base 17: mod_base = OTHER; note = 5-methyl
  source 1..18: mol_type = other DNA
acatcaaggaagatggca

SEQ ID NO: 8720 - DNA, 17 bp, synthetic construct
  misc_feature 1..17: note = Description of Artificial Sequence: Synthetic Antisense oligonucleotide
  modified_base 1: mod_base = OTHER; note = bicyclic nucleic acid (BNA)
  modified_base 2: mod_base = OTHER; note = 5-methyl
  modified_base 5: mod_base = OTHER; note = 5-methyl
  modified_base 17: mod_base = OTHER; note = 5-methyl
  source 1..17: mol_type = other DNA
acatcaaggaagatggc

SEQ ID NO: 8721 - DNA, 16 bp, synthetic construct
  misc_feature 1..16: note = Description of Artificial Sequence: Synthetic Antisense oligonucleotide
  modified_base 1: mod_base = OTHER; note = bicyclic nucleic acid (BNA)
  modified_base 2: mod_base = OTHER; note = 5-methyl
  modified_base 5: mod_base = OTHER; note = 5-methyl
  source 1..16: mol_type = other DNA
acatcaaggaagatgg

SEQ ID NO: 8722 - DNA, 15 bp, synthetic construct
  misc_feature 1..15: note = Description of Artificial Sequence: Synthetic Antisense oligonucleotide
  modified_base 1: mod_base = OTHER; note = bicyclic nucleic acid (BNA)
  modified_base 2: mod_base = OTHER; note = 5-methyl
  modified_base 5: mod_base = OTHER; note = 5-methyl
  source 1..15: mol_type = other DNA
acatcaaggaagatg

SEQ ID NO: 8723 - DNA, 14 bp, synthetic construct
  misc_feature 1..14: note = Description of Artificial Sequence: Synthetic Antisense oligonucleotide
  modified_base 1: mod_base = OTHER; note = bicyclic nucleic acid (BNA)
  modified_base 2: mod_base = OTHER; note = 5-methyl
  modified_base 5: mod_base = OTHER; note = 5-methyl
  source 1..14: mol_type = other DNA
acatcaaggaagat

SEQ ID NO: 8724 - DNA, 13 bp, synthetic construct
  misc_feature 1..13: note = Description of Artificial Sequence: Synthetic Antisense oligonucleotide
  modified_base 1: mod_base = OTHER; note = bicyclic nucleic acid (BNA)
  modified_base 2: mod_base = OTHER; note = 5-methyl
  modified_base 5: mod_base = OTHER; note = 5-methyl
  source 1..13: mol_type = other DNA
acatcaaggaaga

SEQ ID NO: 8725 - DNA, 12 bp, synthetic construct
  misc_feature 1..12: note = Description of Artificial Sequence: Synthetic Antisense oligonucleotide
  modified_base 1: mod_base = OTHER; note = bicyclic nucleic acid (BNA)
  modified_base 2: mod_base = OTHER; note = 5-methyl
  modified_base 5: mod_base = OTHER; note = 5-methyl
  source 1..12: mol_type = other DNA
acatcaaggaag

SEQ ID NO: 8726 - DNA, 24 bp, synthetic construct
  misc_feature 1..24: note = Description of Artificial Sequence: Synthetic Antisense oligonucleotide
  modified_base 1: mod_base = OTHER; note = 5-methyl
  modified_base 4: mod_base = OTHER; note = 5-methyl
  modified_base 16: mod_base = OTHER; note = 5-methyl
  modified_base 21: mod_base = OTHER; note = 5-methyl
  modified_base 1: mod_base = OTHER; note = bicyclic nucleic acid (BNA)
  source 1..24: mol_type = other DNA
catcaaggaagatggcatttctag

SEQ ID NO: 8727 - DNA, 23 bp, synthetic construct
  misc_feature 1..23: note = Description of Artificial Sequence: Synthetic Antisense oligonucleotide
  modified_base 1: mod_base = OTHER; note = 5-methyl
  modified_base 4: mod_base = OTHER; note = 5-methyl
  modified_base 16: mod_base = OTHER; note = 5-methyl
  modified_base 21: mod_base = OTHER; note = 5-methyl
  modified_base 1: mod_base = OTHER; note = bicyclic nucleic acid (BNA)
  source 1..23: mol_type = other DNA
catcaaggaagatggcatttcta

SEQ ID NO: 8728 - DNA, 22 bp, synthetic construct
  misc_feature 1..22: note = Description of Artificial Sequence: Synthetic Antisense oligonucleotide
  modified_base 1: mod_base = OTHER; note = 5-methyl
  modified_base 4: mod_base = OTHER; note = 5-methyl
  modified_base 16: mod_base = OTHER; note = 5-methyl
  modified_base 21: mod_base = OTHER; note = 5-methyl
  modified_base 1: mod_base = OTHER; note = bicyclic nucleic acid (BNA)
  source 1..22: mol_type = other DNA
catcaaggaagatggcatttct

SEQ ID NO: 8729 - DNA, 21 bp, synthetic construct
  misc_feature 1..21: note = Description of Artificial Sequence: Synthetic Antisense oligonucleotide
  modified_base 1: mod_base = OTHER; note = 5-methyl
  modified_base 4: mod_base = OTHER; note = 5-methyl
  modified_base 16: mod_base = OTHER; note = 5-methyl
  modified_base 21: mod_base = OTHER; note = 5-methyl
  modified_base 1: mod_base = OTHER; note = bicyclic nucleic acid (BNA)
  source 1..21: mol_type = other DNA
catcaaggaagatggcatttc

SEQ ID NO: 8730 - DNA, 20 bp, synthetic construct
  misc_feature 1..20: note = Description of Artificial Sequence: Synthetic Antisense oligonucleotide
  modified_base 1: mod_base = OTHER; note = 5-methyl
  modified_base 4: mod_base = OTHER; note = 5-methyl
  modified_base 16: mod_base = OTHER; note = 5-methyl
  modified_base 1: mod_base = OTHER; note = bicyclic nucleic acid (BNA)
  source 1..20: mol_type = other DNA
catcaaggaagatggcattt

SEQ ID NO: 8731 - DNA, 19 bp, synthetic construct
  misc_feature 1..19: note = Description of Artificial Sequence: Synthetic Antisense oligonucleotide
  modified_base 1: mod_base = OTHER; note = 5-methyl
  modified_base 4: mod_base = OTHER; note = 5-methyl
  modified_base 16: mod_base = OTHER; note = 5-methyl
  modified_base 1: mod_base = OTHER; note = bicyclic nucleic acid (BNA)
  source 1..19: mol_type = other DNA
catcaaggaagatggcatt

SEQ ID NO: 8732 - DNA, 18 bp, synthetic construct
  misc_feature 1..18: note = Description of Artificial Sequence: Synthetic Antisense oligonucleotide
  modified_base 1: mod_base = OTHER; note = 5-methyl
  modified_base 4: mod_base = OTHER; note = 5-methyl
  modified_base 16: mod_base = OTHER; note = 5-methyl
  modified_base 1: mod_base = OTHER; note = bicyclic nucleic acid (BNA)
  source 1..18: mol_type = other DNA
catcaaggaagatggcat

SEQ ID NO: 8733 - DNA, 17 bp, synthetic construct
  misc_feature 1..17: note = Description of Artificial Sequence: Synthetic Antisense oligonucleotide
  modified_base 1: mod_base = OTHER; note = 5-methyl
  modified_base 4: mod_base = OTHER; note = 5-methyl
  modified_base 16: mod_base = OTHER; note = 5-methyl
  modified_base 1: mod_base = OTHER; note = bicyclic nucleic acid (BNA)
  source 1..17: mol_type = other DNA
catcaaggaagatggca

SEQ ID NO: 8734 - DNA, 16 bp, synthetic construct
  misc_feature 1..16: note = Description of Artificial Sequence: Synthetic Antisense oligonucleotide
  modified_base 1: mod_base = OTHER; note = 5-methyl
  modified_base 4: mod_base = OTHER; note = 5-methyl
  modified_base 16: mod_base = OTHER; note = 5-methyl
  modified_base 1: mod_base = OTHER; note = bicyclic nucleic acid (BNA)
  source 1..16: mol_type = other DNA
catcaaggaagatggc

SEQ ID NO: 8735 - DNA, 15 bp, synthetic construct
  misc_feature 1..15: note = Description of Artificial Sequence: Synthetic Antisense oligonucleotide
  modified_base 1: mod_base = OTHER; note = 5-methyl
  modified_base 4: mod_base = OTHER; note = 5-methyl
  modified_base 1: mod_base = OTHER; note = bicyclic nucleic acid (BNA)
  source 1..15: mol_type = other DNA
catcaaggaagatgg

SEQ ID NO: 8736 - DNA, 14 bp, synthetic construct
  misc_feature 1..14: note = Description of Artificial Sequence: Synthetic Antisense oligonucleotide
  modified_base 1: mod_base = OTHER; note = 5-methyl
  modified_base 4: mod_base = OTHER; note = 5-methyl
  modified_base 1: mod_base = OTHER; note = bicyclic nucleic acid (BNA)
  source 1..14: mol_type = other DNA
catcaaggaagatg

SEQ ID NO: 8737 - DNA, 13 bp, synthetic construct
  misc_feature 1..13: note = Description of Artificial Sequence: Synthetic Antisense oligonucleotide
  modified_base 1: mod_base = OTHER; note = 5-methyl
  modified_base 4: mod_base = OTHER; note = 5-methyl
  modified_base 1: mod_base = OTHER; note = bicyclic nucleic acid (BNA)
  source 1..13: mol_type = other DNA
catcaaggaagat

SEQ ID NO: 8738 - DNA, 12 bp, synthetic construct
  misc_feature 1..12: note = Description of Artificial Sequence: Synthetic Antisense oligonucleotide
  modified_base 1: mod_base = OTHER; note = 5-methyl
  modified_base 4: mod_base = OTHER; note = 5-methyl
  modified_base 1: mod_base = OTHER; note = bicyclic nucleic acid (BNA)
  source 1..12: mol_type = other DNA
catcaaggaaga

SEQ ID NO: 8739 - DNA, 11 bp, synthetic construct
  misc_feature 1..11: note = Description of Artificial Sequence: Synthetic Antisense oligonucleotide
  modified_base 1: mod_base = OTHER; note = 5-methyl
  modified_base 4: mod_base = OTHER; note = 5-methyl
  modified_base 1: mod_base = OTHER; note = bicyclic nucleic acid (BNA)
  source 1..11: mol_type = other DNA
catcaaggaag

SEQ ID NO: 8740 - DNA, 23 bp, synthetic construct
  misc_feature 1..23: note = Description of Artificial Sequence: Synthetic Antisense oligonucleotide
  modified_base 1: mod_base = OTHER; note = bicyclic nucleic acid (BNA)
  modified_base 3: mod_base = OTHER; note = 5-methyl
  modified_base 15: mod_base = OTHER; note = 5-methyl
  modified_base 20: mod_base = OTHER; note = 5-methyl
  source 1..23: mol_type = other DNA
atcaaggaagatggcatttctag

SEQ ID NO: 8741 - DNA, 22 bp, synthetic construct
  misc_feature 1..22: note = Description of Artificial Sequence: Synthetic Antisense oligonucleotide
  modified_base 1: mod_base = OTHER; note = bicyclic nucleic acid (BNA)
  modified_base 3: mod_base = OTHER; note = 5-methyl
  modified_base 15: mod_base = OTHER; note = 5-methyl
  modified_base 20: mod_base = OTHER; note = 5-methyl
  source 1..22: mol_type = other DNA
atcaaggaagatggcatttcta

SEQ ID NO: 8742 - DNA, 21 bp, synthetic construct
  misc_feature 1..21: note = Description of Artificial Sequence: Synthetic Antisense oligonucleotide
  modified_base 1: mod_base = OTHER; note = bicyclic nucleic acid (BNA)
  modified_base 3: mod_base = OTHER; note = 5-methyl
  modified_base 15: mod_base = OTHER; note = 5-methyl
  modified_base 20: mod_base = OTHER; note = 5-methyl
  source 1..21: mol_type = other DNA
atcaaggaagatggcatttct

SEQ ID NO: 8743 - DNA, 20 bp, synthetic construct
  misc_feature 1..20: note = Description of Artificial Sequence: Synthetic Antisense oligonucleotide
  modified_base 1: mod_base = OTHER; note = bicyclic nucleic acid (BNA)
  modified_base 3: mod_base = OTHER; note = 5-methyl
  modified_base 15: mod_base = OTHER; note = 5-methyl
  modified_base 20: mod_base = OTHER; note = 5-methyl
  source 1..20: mol_type = other DNA
atcaaggaagatggcatttc

SEQ ID NO: 8744 - DNA, 19 bp, synthetic construct
  misc_feature 1..19: note = Description of Artificial Sequence: Synthetic Antisense oligonucleotide
  modified_base 1: mod_base = OTHER; note = bicyclic nucleic acid (BNA)
  modified_base 3: mod_base = OTHER; note = 5-methyl
  modified_base 15: mod_base = OTHER; note = 5-methyl
  source 1..19: mol_type = other DNA
atcaaggaagatggcattt

SEQ ID NO: 8745 - DNA, 18 bp, synthetic construct
  misc_feature 1..18: note = Description of Artificial Sequence: Synthetic Antisense oligonucleotide
  modified_base 1: mod_base = OTHER; note = bicyclic nucleic acid (BNA)
  modified_base 3: mod_base = OTHER; note = 5-methyl
  modified_base 15: mod_base = OTHER; note = 5-methyl
  source 1..18: mol_type = other DNA
atcaaggaagatggcatt

SEQ ID NO: 8746 - DNA, 17 bp, synthetic construct
  misc_feature 1..17: note = Description of Artificial Sequence: Synthetic Antisense oligonucleotide
  modified_base 1: mod_base = OTHER; note = bicyclic nucleic acid (BNA)
  modified_base 3: mod_base = OTHER; note = 5-methyl
  modified_base 15: mod_base = OTHER; note = 5-methyl
  source 1..17: mol_type = other DNA
atcaaggaagatggcat

SEQ ID NO: 8747 - DNA, 16 bp, synthetic construct
  misc_feature 1..16: note = Description of Artificial Sequence: Synthetic Antisense oligonucleotide
  modified_base 1: mod_base = OTHER; note = bicyclic nucleic acid (BNA)
  modified_base 3: mod_base = OTHER; note = 5-methyl
  modified_base 15: mod_base = OTHER; note = 5-methyl
  source 1..16: mol_type = other DNA
atcaaggaagatggca

SEQ ID NO: 8748 - DNA, 15 bp, synthetic construct
  misc_feature 1..15: note = Description of Artificial Sequence: Synthetic Antisense oligonucleotide
  modified_base 1: mod_base = OTHER; note = bicyclic nucleic acid (BNA)
  modified_base 3: mod_base = OTHER; note = 5-methyl
  modified_base 15: mod_base = OTHER; note = 5-methyl
  source 1..15: mol_type = other DNA
atcaaggaagatggc

SEQ ID NO: 8749 - DNA, 14 bp, synthetic construct
  misc_feature 1..14: note = Description of Artificial Sequence: Synthetic Antisense oligonucleotide
  modified_base 1: mod_base = OTHER; note = bicyclic nucleic acid (BNA)
  modified_base 3: mod_base = OTHER; note = 5-methyl
  source 1..14: mol_type = other DNA
atcaaggaagatgg

SEQ ID NO: 8750 - DNA, 13 bp, synthetic construct
  misc_feature 1..13: note = Description of Artificial Sequence: Synthetic Antisense oligonucleotide
  modified_base 1: mod_base = OTHER; note = bicyclic nucleic acid (BNA)
  modified_base 3: mod_base = OTHER; note = 5-methyl
  source 1..13: mol_type = other DNA
atcaaggaagatg

SEQ ID NO: 8751 - DNA, 12 bp, synthetic construct
  misc_feature 1..12: note = Description of Artificial Sequence: Synthetic Antisense oligonucleotide
  modified_base 1: mod_base = OTHER; note = bicyclic nucleic acid (BNA)
  modified_base 3: mod_base = OTHER; note = 5-methyl
  source 1..12: mol_type = other DNA
atcaaggaagat

SEQ ID NO: 8752 - DNA, 11 bp, synthetic construct
  misc_feature 1..11: note = Description of Artificial Sequence: Synthetic Antisense oligonucleotide
  modified_base 1: mod_base = OTHER; note = bicyclic nucleic acid (BNA)
  modified_base 3: mod_base = OTHER; note = 5-methyl
  source 1..11: mol_type = other DNA
atcaaggaaga

SEQ ID NO: 8753 - DNA, 10 bp, synthetic construct
  misc_feature 1..10: note = Description of Artificial Sequence: Synthetic Antisense oligonucleotide
  modified_base 1: mod_base = OTHER; note = bicyclic nucleic acid (BNA)
  modified_base 3: mod_base = OTHER; note = 5-methyl
  source 1..10: mol_type = other DNA
atcaaggaag

SEQ ID NO: 8754 - DNA, 18 bp, synthetic construct
  misc_feature 1..18: note = Description of Artificial Sequence: Synthetic Antisense oligonucleotide
  modified_base 9: mod_base = OTHER; note = 5-methyl
  modified_base 13..14: mod_base = OTHER; note = 5-methyl
  modified_base 18: mod_base = OTHER; note = 5-methyl
  modified_base 18: mod_base = OTHER; note = bicyclic nucleic acid (BNA)
  source 1..18: mol_type = other DNA
ggtaagttctgtccaagc

SEQ ID NO: 8755 - DNA, 18 bp, synthetic construct
  misc_feature 1..18: note = Description of Artificial Sequence: Synthetic Antisense oligonucleotide
  modified_base 8: mod_base = OTHER; note = 5-methyl
  modified_base 12..13: mod_base = OTHER; note = 5-methyl
  modified_base 17..18: mod_base = OTHER; note = 5-methyl
  modified_base 18: mod_base = OTHER; note = bicyclic nucleic acid (BNA)
  source 1..18: mol_type = other DNA
gtaagttctgtccaagcc

SEQ ID NO: 8756 - DNA, 18 bp, synthetic construct
  misc_feature 1..18: note = Description of Artificial Sequence: Synthetic Antisense oligonucleotide
  modified_base 4: mod_base = OTHER; note = 5-methyl
  modified_base 13: mod_base = OTHER; note = 5-methyl
  modified_base 17..18: mod_base = OTHER; note = 5-methyl
  modified_base 18: mod_base = OTHER; note = bicyclic nucleic acid (BNA)
  source 1..18: mol_type = other DNA
agtcggtaagttctgtcc

SEQ ID NO: 8757 - DNA, 18 bp, synthetic construct
  misc_feature 1..18: note = Description of Artificial Sequence: Synthetic Antisense oligonucleotide
  modified_base 1: mod_base = OTHER; note = 5-methyl
  modified_base 5..6: mod_base = OTHER; note = 5-methyl
  modified_base 10..12: mod_base = OTHER; note = 5-methyl
  modified_base 18: mod_base = OTHER; note = bicyclic nucleic acid (BNA)
  source 1..18: mol_type = other DNA
ctgtccaagcccggttga

SEQ ID NO: 8758 - DNA, 15 bp, synthetic construct
  misc_feature 1..15: note = Description of Artificial Sequence: Synthetic Antisense oligonucleotide
  modified_base 7: mod_base = OTHER; note = 5-methyl
  modified_base 11..12: mod_base = OTHER; note = 5-methyl
  modified_base 15: mod_base = OTHER; note = bicyclic nucleic acid (BNA)
  source 1..15: mol_type = other DNA
taagttctgtccaag

SEQ ID NO: 8759 - DNA, 20 bp, synthetic construct
  misc_feature 1..20: note = Description of Artificial Sequence: Synthetic Antisense oligonucleotide
  modified_base 3: mod_base = OTHER; note = 5-methyl
  modified_base 7..8: mod_base = OTHER; note = 5-methyl
  modified_base 12..14: mod_base = OTHER; note = 5-methyl
  modified_base 20: mod_base = OTHER; note = bicyclic nucleic acid (BNA)
  source 1..20: mol_type = other DNA
ttctgtccaagcccggttga

SEQ ID NO: 8760 - DNA, 19 bp, synthetic construct
  misc_feature 1..19: note = Description of Artificial Sequence: Synthetic Antisense oligonucleotide
  modified_base 3: mod_base = OTHER; note = 5-methyl
  modified_base 7..8: mod_base = OTHER; note = 5-methyl
  modified_base 12..14: mod_base = OTHER; note = 5-methyl
  modified_base 19: mod_base = OTHER; note = bicyclic nucleic acid (BNA)
  source 1..19: mol_type = other DNA
ttctgtccaagcccggttg

SEQ ID NO: 8761 - DNA, 18 bp, synthetic construct
  misc_feature 1..18: note = Description of Artificial Sequence: Synthetic Antisense oligonucleotide
  modified_base 3: mod_base = OTHER; note = 5-methyl
  modified_base 7..8: mod_base = OTHER; note = 5-methyl
  modified_base 12..14: mod_base = OTHER; note = 5-methyl
  modified_base 18: mod_base = OTHER; note = bicyclic nucleic acid (BNA)
  source 1..18: mol_type = other DNA
ttctgtccaagcccggtt

SEQ ID NO: 8762 - DNA, 17 bp, synthetic construct
  misc_feature 1..17: note = Description of Artificial Sequence: Synthetic Antisense oligonucleotide
  modified_base 3: mod_base = OTHER; note = 5-methyl
  modified_base 7..8: mod_base = OTHER; note = 5-methyl
  modified_base 12..14: mod_base = OTHER; note = 5-methyl
  modified_base 17: mod_base = OTHER; note = bicyclic nucleic acid (BNA)
  source 1..17: mol_type = other DNA
ttctgtccaagcccggt

SEQ ID NO: 8763 - DNA, 16 bp, synthetic construct
  misc_feature 1..16: note = Description of Artificial Sequence: Synthetic Antisense oligonucleotide
  modified_base 3: mod_base = OTHER; note = 5-methyl
  modified_base 7..8: mod_base = OTHER; note = 5-methyl
  modified_base 12..14: mod_base = OTHER; note = 5-methyl
  modified_base 16: mod_base = OTHER; note = bicyclic nucleic acid (BNA)
  source 1..16: mol_type = other DNA
ttctgtccaagcccgg

SEQ ID NO: 8764 - DNA, 15 bp, synthetic construct
  misc_feature 1..15: note = Description of Artificial Sequence: Synthetic Antisense oligonucleotide
  modified_base 3: mod_base = OTHER; note = 5-methyl
  modified_base 7..8: mod_base = OTHER; note = 5-methyl
  modified_base 12..14: mod_base = OTHER; note = 5-methyl
  modified_base 15: mod_base = OTHER; note = bicyclic nucleic acid (BNA)
  source 1..15: mol_type = other DNA
ttctgtccaagcccg

SEQ ID NO: 8765 - DNA, 14 bp, synthetic construct
  misc_feature 1..14: note = Description of Artificial Sequence: Synthetic Antisense oligonucleotide
  modified_base 3: mod_base = OTHER; note = 5-methyl
  modified_base 7..8: mod_base = OTHER; note = 5-methyl
  modified_base 12..14: mod_base = OTHER; note = 5-methyl
  modified_base 14: mod_base = OTHER; note = bicyclic nucleic acid (BNA)
  source 1..14: mol_type = other DNA
ttctgtccaagccc

SEQ ID NO: 8766 - DNA, 13 bp, synthetic construct
  misc_feature 1..13: note = Description of Artificial Sequence: Synthetic Antisense oligonucleotide
  modified_base 3: mod_base = OTHER; note = 5-methyl
  modified_base 7..8: mod_base = OTHER; note = 5-methyl
  modified_base 12..13: mod_base = OTHER; note = 5-methyl
  modified_base 13: mod_base = OTHER; note = bicyclic nucleic acid (BNA)
  source 1..13: mol_type = other DNA
ttctgtccaagcc

SEQ ID NO: 8767 - DNA, 12 bp, synthetic construct
  misc_feature 1..12: note = Description of Artificial Sequence: Synthetic Antisense oligonucleotide
  modified_base 3: mod_base = OTHER; note = 5-methyl
  modified_base 7..8: mod_base = OTHER; note = 5-methyl
  modified_base 12: mod_base = OTHER; note = 5-methyl
  modified_base 12: mod_base = OTHER; note = bicyclic nucleic acid (BNA)
  source 1..12: mol_type = other DNA
ttctgtccaagc

SEQ ID NO: 8768 - DNA, 11 bp, synthetic construct
  misc_feature 1..11: note = Description of Artificial Sequence: Synthetic Antisense oligonucleotide
  modified_base 3: mod_base = OTHER; note = 5-methyl
  modified_base 7..8: mod_base = OTHER; note = 5-methyl
  modified_base 11: mod_base = OTHER; note = bicyclic nucleic acid (BNA)
  source 1..11: mol_type = other DNA
ttctgtccaag

SEQ ID NO: 8769 - DNA, 10 bp, synthetic construct
  misc_feature 1..10: note = Description of Artificial Sequence: Synthetic Antisense oligonucleotide
  modified_base 3: mod_base = OTHER; note = 5-methyl
  modified_base 7..8: mod_base = OTHER; note = 5-methyl
  modified_base 10: mod_base = OTHER; note = bicyclic nucleic acid (BNA)
  source 1..10: mol_type = other DNA
ttctgtccaa

SEQ ID NO: 8770-8771 - skipped (2 entries)

SEQ ID NO: 8772 - DNA, 19 bp, synthetic construct
  misc_feature 1..19: note = Description of Artificial Sequence: Synthetic Antisense oligonucleotide
  modified_base 2: mod_base = OTHER; note = 5-methyl
  modified_base 6..7: mod_base = OTHER; note = 5-methyl
  modified_base 11..13: mod_base = OTHER; note = 5-methyl
  modified_base 19: mod_base = OTHER; note = bicyclic nucleic acid (BNA)
  source 1..19: mol_type = other DNA
tctgtccaagcccggttga

SEQ ID NO: 8773 - DNA, 18 bp, synthetic construct
  misc_feature 1..18: note = Description of Artificial Sequence: Synthetic Antisense oligonucleotide
  modified_base 2: mod_base = OTHER; note = 5-methyl
  modified_base 6..7: mod_base = OTHER; note = 5-methyl
  modified_base 11..13: mod_base = OTHER; note = 5-methyl
  modified_base 18: mod_base = OTHER; note = bicyclic nucleic acid (BNA)
  source 1..18: mol_type = other DNA
tctgtccaagcccggttg

SEQ ID NO: 8774 - DNA, 17 bp, synthetic construct
  misc_feature 1..17: note = Description of Artificial Sequence: Synthetic Antisense oligonucleotide
  modified_base 2: mod_base = OTHER; note = 5-methyl
  modified_base 6..7: mod_base = OTHER; note = 5-methyl
  modified_base 11..13: mod_base = OTHER; note = 5-methyl
  modified_base 17: mod_base = OTHER; note = bicyclic nucleic acid (BNA)
  source 1..17: mol_type = other DNA
tctgtccaagcccggtt

SEQ ID NO: 8775 - DNA, 16 bp, synthetic construct
  misc_feature 1..16: note = Description of Artificial Sequence: Synthetic Antisense oligonucleotide
  modified_base 2: mod_base = OTHER; note = 5-methyl
  modified_base 6..7: mod_base = OTHER; note = 5-methyl
  modified_base 11..13: mod_base = OTHER; note = 5-methyl
  modified_base 16: mod_base = OTHER; note = bicyclic nucleic acid (BNA)
  source 1..16: mol_type = other DNA
tctgtccaagcccggt

SEQ ID NO: 8776 - DNA, 15 bp, synthetic construct
  misc_feature 1..15: note = Description of Artificial Sequence: Synthetic Antisense oligonucleotide
  modified_base 2: mod_base = OTHER; note = 5-methyl
  modified_base 6..7: mod_base = OTHER; note = 5-methyl
  modified_base 11..13: mod_base = OTHER; note = 5-methyl
  modified_base 15: mod_base = OTHER; note = bicyclic nucleic acid (BNA)
  source 1..15: mol_type = other DNA
tctgtccaagcccgg

SEQ ID NO: 8777 - DNA, 14 bp, synthetic construct
  misc_feature 1..14: note = Description of Artificial Sequence: Synthetic Antisense oligonucleotide
  modified_base 2: mod_base = OTHER; note = 5-methyl
  modified_base 6..7: mod_base = OTHER; note = 5-methyl
  modified_base 11..13: mod_base = OTHER; note = 5-methyl
  modified_base 14: mod_base = OTHER; note = bicyclic nucleic acid (BNA)
  source 1..14: mol_type = other DNA
tctgtccaagcccg

SEQ ID NO: 8778 - DNA, 13 bp, synthetic construct
  misc_feature 1..13: note = Description of Artificial Sequence: Synthetic Antisense oligonucleotide
  modified_base 2: mod_base = OTHER; note = 5-methyl
  modified_base 6..7: mod_base = OTHER; note = 5-methyl
  modified_base 11..13: mod_base = OTHER; note = 5-methyl
  modified_base 13: mod_base = OTHER; note = bicyclic nucleic acid (BNA)
  source 1..13: mol_type = other DNA
tctgtccaagccc

SEQ ID NO: 8779 - DNA, 12 bp, synthetic construct
  misc_feature 1..12: note = Description of Artificial Sequence: Synthetic Antisense oligonucleotide
  modified_base 2: mod_base = OTHER; note = 5-methyl
  modified_base 6..7: mod_base = OTHER; note = 5-methyl
  modified_base 11..12: mod_base = OTHER; note = 5-methyl
  modified_base 12: mod_base = OTHER; note = bicyclic nucleic acid (BNA)
  source 1..12: mol_type = other DNA
tctgtccaagcc

SEQ ID NO: 8780 - DNA, 11 bp, synthetic construct
  misc_feature 1..11: note = Description of Artificial Sequence: Synthetic Antisense oligonucleotide
  modified_base 2: mod_base = OTHER; note = 5-methyl
  modified_base 6..7: mod_base = OTHER; note = 5-methyl
  modified_base 11: mod_base = OTHER; note = 5-methyl
  modified_base 11: mod_base = OTHER; note = bicyclic nucleic acid (BNA)
  source 1..11: mol_type = other DNA
tctgtccaagc

SEQ ID NO: 8781 - DNA, 10 bp, synthetic construct
  misc_feature 1..10: note = Description of Artificial Sequence: Synthetic Antisense oligonucleotide
  modified_base 2: mod_base = OTHER; note = 5-methyl
  modified_base 6..7: mod_base = OTHER; note = 5-methyl
  modified_base 10: mod_base = OTHER; note = bicyclic nucleic acid (BNA)
  source 1..10: mol_type = other DNA
tctgtccaag

SEQ ID NO: 8782-8783 - skipped (2 entries)

SEQ ID NO: 8784 - DNA, 17 bp, synthetic construct
  misc_feature 1..17: note = Description of Artificial Sequence: Synthetic Antisense oligonucleotide
  modified_base 1: mod_base = OTHER; note = 5-methyl
  modified_base 5..6: mod_base = OTHER; note = 5-methyl
  modified_base 10..12: mod_base = OTHER; note = 5-methyl
  modified_base 17: mod_base = OTHER; note = bicyclic nucleic acid (BNA)
  source 1..17: mol_type = other DNA
ctgtccaagcccggttg

SEQ ID NO: 8785 - DNA, 16 bp, synthetic construct
  misc_feature 1..16: note = Description of Artificial Sequence: Synthetic Antisense oligonucleotide
  modified_base 1: mod_base = OTHER; note = 5-methyl
  modified_base 5..6: mod_base = OTHER; note = 5-methyl
  modified_base 10..12: mod_base = OTHER; note = 5-methyl
  modified_base 16: mod_base = OTHER; note = bicyclic nucleic acid (BNA)
  source 1..16: mol_type = other DNA
ctgtccaagcccggtt

SEQ ID NO: 8786 - DNA, 15 bp, synthetic construct
  misc_feature 1..15: note = Description of Artificial Sequence: Synthetic Antisense oligonucleotide
  modified_base 1: mod_base = OTHER; note = 5-methyl
  modified_base 5..6: mod_base = OTHER; note = 5-methyl
  modified_base 10..12: mod_base = OTHER; note = 5-methyl
  modified_base 15: mod_base = OTHER; note = bicyclic nucleic acid (BNA)
  source 1..15: mol_type = other DNA
ctgtccaagcccggt

SEQ ID NO: 8787 - DNA, 14 bp, synthetic construct
  misc_feature 1..14: note = Description of Artificial Sequence: Synthetic Antisense oligonucleotide
  modified_base 1: mod_base = OTHER; note = 5-methyl
  modified_base 5..6: mod_base = OTHER; note = 5-methyl
  modified_base 10..12: mod_base = OTHER; note = 5-methyl
  modified_base 14: mod_base = OTHER; note = bicyclic nucleic acid (BNA)
  source 1..14: mol_type = other DNA
ctgtccaagcccgg

SEQ ID NO: 8788 - DNA, 13 bp, synthetic construct
  misc_feature 1..13: note = Description of Artificial Sequence: Synthetic Antisense oligonucleotide
  modified_base 1: mod_base = OTHER; note = 5-methyl
  modified_base 5..6: mod_base = OTHER; note = 5-methyl
  modified_base 10..12: mod_base = OTHER; note = 5-methyl
  modified_base 13: mod_base = OTHER; note = bicyclic nucleic acid (BNA)
  source 1..13: mol_type = other DNA
ctgtccaagcccg

SEQ ID NO: 8789 - DNA, 12 bp, synthetic construct
  misc_feature 1..12: note = Description of Artificial Sequence: Synthetic Antisense oligonucleotide
  modified_base 1: mod_base = OTHER; note = 5-methyl
  modified_base 5..6: mod_base = OTHER; note = 5-methyl
  modified_base 10..12: mod_base = OTHER; note = 5-methyl
  modified_base 12: mod_base = OTHER; note = bicyclic nucleic acid (BNA)
  source 1..12: mol_type = other DNA
ctgtccaagccc

SEQ ID NO: 8790 - DNA, 11 bp, synthetic construct
  misc_feature 1..11: note = Description of Artificial Sequence: Synthetic Antisense oligonucleotide
  modified_base 1: mod_base = OTHER; note = 5-methyl
  modified_base 5..6: mod_base = OTHER; note = 5-methyl
  modified_base 10..11: mod_base = OTHER; note = 5-methyl
  modified_base 11: mod_base = OTHER; note = bicyclic nucleic acid (BNA)
  source 1..11: mol_type = other DNA
ctgtccaagcc

SEQ ID NO: 8791 - DNA, 10 bp, synthetic construct
  misc_feature 1..10: note = Description of Artificial Sequence: Synthetic Antisense oligonucleotide
  modified_base 1: mod_base = OTHER; note = 5-methyl
  modified_base 5..6: mod_base = OTHER; note = 5-methyl
  modified_base 10: mod_base = OTHER; note = 5-methyl
  modified_base 10: mod_base = OTHER; note = bicyclic nucleic acid (BNA)
  source 1..10: mol_type = other DNA
ctgtccaagc

SEQ ID NO: 8792-8793 - skipped (2 entries)

SEQ ID NO: 8794 - DNA, 20 bp, synthetic construct
  misc_feature 1..20: note = Description of Artificial Sequence: Synthetic Antisense oligonucleotide
  modified_base 4: mod_base = OTHER; note = 5-methyl
  modified_base 8..9: mod_base = OTHER; note = 5-methyl
  modified_base 13..15: mod_base = OTHER; note = 5-methyl
  modified_base 20: mod_base = OTHER; note = bicyclic nucleic acid (BNA)
  source 1..20: mol_type = other DNA
gttctgtccaagcccggttg

SEQ ID NO: 8795 - DNA, 19 bp, synthetic construct
  misc_feature 1..19: note = Description of Artificial Sequence: Synthetic Antisense oligonucleotide
  modified_base 4: mod_base = OTHER; note = 5-methyl
  modified_base 8..9: mod_base = OTHER; note = 5-methyl
  modified_base 13..15: mod_base = OTHER; note = 5-methyl
  modified_base 19: mod_base = OTHER; note = bicyclic nucleic acid (BNA)
  source 1..19: mol_type = other DNA
gttctgtccaagcccggtt

SEQ ID NO: 8796 - DNA, 18 bp, synthetic construct
  misc_feature 1..18: note = Description of Artificial Sequence: Synthetic Antisense oligonucleotide
  modified_base 4: mod_base = OTHER; note = 5-methyl
  modified_base 8..9: mod_base = OTHER; note = 5-methyl
  modified_base 13..15: mod_base = OTHER; note = 5-methyl
  modified_base 18: mod_base = OTHER; note = bicyclic nucleic acid (BNA)
  source 1..18: mol_type = other DNA
gttctgtccaagcccggt

SEQ ID NO: 8797 - DNA, 17 bp, synthetic construct
  misc_feature 1..17: note = Description of Artificial Sequence: Synthetic Antisense oligonucleotide
  modified_base 4: mod_base = OTHER; note = 5-methyl
  modified_base 8..9: mod_base = OTHER; note = 5-methyl
  modified_base 13..15: mod_base = OTHER; note = 5-methyl
  modified_base 17: mod_base = OTHER; note = bicyclic nucleic acid (BNA)
  source 1..17: mol_type = other DNA
gttctgtccaagcccgg

SEQ ID NO: 8798 - DNA, 16 bp, synthetic construct
  misc_feature 1..16: note = Description of Artificial Sequence: Synthetic Antisense oligonucleotide
  modified_base 4: mod_base = OTHER; note = 5-methyl
  modified_base 8..9: mod_base = OTHER; note = 5-methyl
  modified_base 13..15: mod_base = OTHER; note = 5-methyl
  modified_base 16: mod_base = OTHER; note = bicyclic nucleic acid (BNA)
  source 1..16: mol_type = other DNA
gttctgtccaagcccg

SEQ ID NO: 8799 - DNA, 15 bp, synthetic construct
  misc_feature 1..15: note = Description of Artificial Sequence: Synthetic Antisense oligonucleotide
  modified_base 4: mod_base = OTHER; note = 5-methyl
  modified_base 8..9: mod_base = OTHER; note = 5-methyl
  modified_base 13..15: mod_base = OTHER; note = 5-methyl
  modified_base 15: mod_base = OTHER; note = bicyclic nucleic acid (BNA)
  source 1..15: mol_type = other DNA
gttctgtccaagccc

SEQ ID NO: 8800 - DNA, 14 bp, synthetic construct
  misc_feature 1..14: note = Description of Artificial Sequence: Synthetic Antisense oligonucleotide
  modified_base 4: mod_base = OTHER; note = 5-methyl
  modified_base 8..9: mod_base = OTHER; note = 5-methyl
  modified_base 13..14: mod_base = OTHER; note = 5-methyl
  modified_base 14: mod_base = OTHER; note = bicyclic nucleic acid (BNA)
  source 1..14: mol_type = other DNA
gttctgtccaagcc

SEQ ID NO: 8801 - DNA, 13 bp, synthetic construct
  misc_feature 1..13: note = Description of Artificial Sequence: Synthetic Antisense oligonucleotide
  modified_base 4: mod_base = OTHER; note = 5-methyl
  modified_base 8..9: mod_base = OTHER; note = 5-methyl
  modified_base 13: mod_base = OTHER; note = 5-methyl
  modified_base 13: mod_base = OTHER; note = bicyclic nucleic acid (BNA)
  source 1..13: mol_type = other DNA
gttctgtccaagc

SEQ ID NO: 8802 - DNA, 12 bp, synthetic construct
  misc_feature 1..12: note = Description of Artificial Sequence: Synthetic Antisense oligonucleotide
  modified_base 4: mod_base = OTHER; note = 5-methyl
  modified_base 8..9: mod_base = OTHER; note = 5-methyl
  modified_base 12: mod_base = OTHER; note = bicyclic nucleic acid (BNA)
  source 1..12: mol_type = other DNA
gttctgtccaag

SEQ ID NO: 8803 - DNA, 11 bp, synthetic construct
  misc_feature 1..11: note = Description of Artificial Sequence: Synthetic Antisense oligonucleotide
  modified_base 4: mod_base = OTHER; note = 5-methyl
  modified_base 8..9: mod_base = OTHER; note = 5-methyl
  modified_base 11: mod_base = OTHER; note = bicyclic nucleic acid (BNA)
  source 1..11: mol_type = other DNA
gttctgtccaa

SEQ ID NO: 8804 - DNA, 10 bp, synthetic construct
  misc_feature 1..10: note = Description of Artificial Sequence: Synthetic Antisense oligonucleotide
  modified_base 4: mod_base = OTHER; note = 5-methyl
  modified_base 8..9: mod_base = OTHER; note = 5-methyl
  modified_base 10: mod_base = OTHER; note = bicyclic nucleic acid (BNA)
  source 1..10: mol_type = other DNA
gttctgtcca

SEQ ID NO: 8805-8806 - skipped (2 entries)

SEQ ID NO: 8807 - DNA, 20 bp, synthetic construct
  misc_feature 1..20: note = Description of Artificial Sequence: Synthetic Antisense oligonucleotide
  modified_base 5: mod_base = OTHER; note = 5-methyl
  modified_base 9..10: mod_base = OTHER; note = 5-methyl
  modified_base 14..16: mod_base = OTHER; note = 5-methyl
  modified_base 20: mod_base = OTHER; note = bicyclic nucleic acid (BNA)
  source 1..20: mol_type = other DNA
agttctgtccaagcccggtt

SEQ ID NO: 8808 - DNA, 19 bp, synthetic construct
  misc_feature 1..19: note = Description of Artificial Sequence: Synthetic Antisense oligonucleotide
  modified_base 5: mod_base = OTHER; note = 5-methyl
  modified_base 9..10: mod_base = OTHER; note = 5-methyl
  modified_base 14..16: mod_base = OTHER; note = 5-methyl
  modified_base 19: mod_base = OTHER; note = bicyclic nucleic acid (BNA)
  source 1..19: mol_type = other DNA
agttctgtccaagcccggt

SEQ ID NO: 8809 - DNA, 18 bp, synthetic construct
  misc_feature 1..18: note = Description of Artificial Sequence: Synthetic Antisense oligonucleotide
  modified_base 5: mod_base = OTHER; note = 5-methyl
  modified_base 9..10: mod_base = OTHER; note = 5-methyl
  modified_base 14..16: mod_base = OTHER; note = 5-methyl
  modified_base 18: mod_base = OTHER; note = bicyclic nucleic acid (BNA)
  source 1..18: mol_type = other DNA
agttctgtccaagcccgg

SEQ ID NO: 8810 - DNA, 17 bp, synthetic construct
  misc_feature 1..17: note = Description of Artificial Sequence: Synthetic Antisense oligonucleotide
  modified_base 5: mod_base = OTHER; note = 5-methyl
  modified_base 9..10: mod_base = OTHER; note = 5-methyl
  modified_base 14..16: mod_base = OTHER; note = 5-methyl
  modified_base 17: mod_base = OTHER; note = bicyclic nucleic acid (BNA)
  source 1..17: mol_type = other DNA
agttctgtccaagcccg

SEQ ID NO: 8811 - DNA, 16 bp, synthetic construct
  misc_feature 1..16: note = Description of Artificial Sequence: Synthetic Antisense oligonucleotide
  modified_base 5: mod_base = OTHER; note = 5-methyl
  modified_base 9..10: mod_base = OTHER; note = 5-methyl
  modified_base 14..16: mod_base = OTHER; note = 5-methyl
  modified_base 16: mod_base = OTHER; note = bicyclic nucleic acid (BNA)
  source 1..16: mol_type = other DNA
agttctgtccaagccc

SEQ ID NO: 8812 - DNA, 15 bp, synthetic construct
  misc_feature 1..15: note = Description of Artificial Sequence: Synthetic Antisense oligonucleotide
  modified_base 5: mod_base = OTHER; note = 5-methyl
  modified_base 9..10: mod_base = OTHER; note = 5-methyl
  modified_base 14..15: mod_base = OTHER; note = 5-methyl
  modified_base 15: mod_base = OTHER; note = bicyclic nucleic acid (BNA)
  source 1..15: mol_type = other DNA
agttctgtccaagcc

SEQ ID NO: 8813 - DNA, 14 bp, synthetic construct
  misc_feature 1..14: note = Description of Artificial Sequence: Synthetic Antisense oligonucleotide
  modified_base 5: mod_base = OTHER; note = 5-methyl
  modified_base 9..10: mod_base = OTHER; note = 5-methyl
  modified_base 14: mod_base = OTHER; note = 5-methyl
  modified_base 14: mod_base = OTHER; note = bicyclic nucleic acid (BNA)
  source 1..14: mol_type = other DNA
agttctgtccaagc

SEQ ID NO: 8814 - DNA, 13 bp, synthetic construct
  misc_feature 1..13: note = Description of Artificial Sequence: Synthetic Antisense oligonucleotide
  modified_base 5: mod_base = OTHER; note = 5-methyl
  modified_base 9..10: mod_base = OTHER; note = 5-methyl
  modified_base 13: mod_base = OTHER; note = bicyclic nucleic acid (BNA)
  source 1..13: mol_type = other DNA
agttctgtccaag

SEQ ID NO: 8815 - DNA, 12 bp, synthetic construct
  misc_feature 1..12: note = Description of Artificial Sequence: Synthetic Antisense oligonucleotide
  modified_base 5: mod_base = OTHER; note = 5-methyl
  modified_base 9..10: mod_base = OTHER; note = 5-methyl
  modified_base 12: mod_base = OTHER; note = bicyclic nucleic acid (BNA)
  source 1..12: mol_type = other DNA
agttctgtccaa

SEQ ID NO: 8816 - DNA, 11 bp, synthetic construct
  misc_feature 1..11: note = Description of Artificial Sequence: Synthetic Antisense oligonucleotide
  modified_base 5: mod_base = OTHER; note = 5-methyl
  modified_base 9..10: mod_base = OTHER; note = 5-methyl
  modified_base 11: mod_base = OTHER; note = bicyclic nucleic acid (BNA)
  source 1..11: mol_type = other DNA
agttctgtcca

SEQ ID NO: 8817 - DNA, 10 bp, synthetic construct
  misc_feature 1..10: note = Description of Artificial Sequence: Synthetic Antisense oligonucleotide
  modified_base 5: mod_base = OTHER; note = 5-methyl
  modified_base 9..10: mod_base = OTHER; note = 5-methyl
  modified_base 10: mod_base = OTHER; note = bicyclic nucleic acid (BNA)
  source 1..10: mol_type = other DNA
agttctgtcc

SEQ ID NO: 8818-8819 - skipped (2 entries)

SEQ ID NO: 8820 - DNA, 20 bp, synthetic construct
  misc_feature 1..20: note = Description of Artificial Sequence: Synthetic Antisense oligonucleotide
  modified_base 6: mod_base = OTHER; note = 5-methyl
  modified_base 10..11: mod_base = OTHER; note = 5-methyl
  modified_base 15..17: mod_base = OTHER; note = 5-methyl
  modified_base 20: mod_base = OTHER; note = bicyclic nucleic acid (BNA)
  source 1..20: mol_type = other DNA
aagttctgtccaagcccggt

SEQ ID NO: 8821 - DNA, 19 bp, synthetic construct
  misc_feature 1..19: note = Description of Artificial Sequence: Synthetic Antisense oligonucleotide
  modified_base 6: mod_base = OTHER; note = 5-methyl
  modified_base 10..11: mod_base = OTHER; note = 5-methyl
  modified_base 15..17: mod_base = OTHER; note = 5-methyl
  modified_base 19: mod_base = OTHER; note = bicyclic nucleic acid (BNA)
  source 1..19: mol_type = other DNA
aagttctgtccaagcccgg

SEQ ID NO: 8822 - DNA, 18 bp, synthetic construct
  misc_feature 1..18: note = Description of Artificial Sequence: Synthetic Antisense oligonucleotide
  modified_base 6: mod_base = OTHER; note = 5-methyl
  modified_base 10..11: mod_base = OTHER; note = 5-methyl
  modified_base 15..17: mod_base = OTHER; note = 5-methyl
  modified_base 18: mod_base = OTHER; note = bicyclic nucleic acid (BNA)
  source 1..18: mol_type = other DNA
aagttctgtccaagcccg

SEQ ID NO: 8823 - DNA, 17 bp, synthetic construct
  misc_feature 1..17: note = Description of Artificial Sequence: Synthetic Antisense oligonucleotide
  modified_base 6: mod_base = OTHER; note = 5-methyl
  modified_base 10..11: mod_base = OTHER; note = 5-methyl
  modified_base 15..17: mod_base = OTHER; note = 5-methyl
  modified_base 17: mod_base = OTHER; note = bicyclic nucleic acid (BNA)
  source 1..17: mol_type = other DNA
aagttctgtccaagccc

SEQ ID NO: 8824 - DNA, 16 bp, synthetic construct
  misc_feature 1..16: note = Description of Artificial Sequence: Synthetic Antisense oligonucleotide
  modified_base 6: mod_base = OTHER; note = 5-methyl
  modified_base 10..11: mod_base = OTHER; note = 5-methyl
  modified_base 15..16: mod_base = OTHER; note = 5-methyl
  modified_base 16: mod_base = OTHER; note = bicyclic nucleic acid (BNA)
  source 1..16: mol_type = other DNA
aagttctgtccaagcc

SEQ ID NO: 8825 - DNA, 15 bp, synthetic construct
  misc_feature 1..15: note = Description of Artificial Sequence: Synthetic Antisense oligonucleotide
  modified_base 6: mod_base = OTHER; note = 5-methyl
  modified_base 10..11: mod_base = OTHER; note = 5-methyl
  modified_base 15: mod_base = OTHER; note = 5-methyl
  modified_base 15: mod_base = OTHER; note = bicyclic nucleic acid (BNA)
  source 1..15: mol_type = other DNA
aagttctgtccaagc

SEQ ID NO: 8826 - DNA, 14 bp, synthetic construct
  misc_feature 1..14: note = Description of Artificial Sequence: Synthetic Antisense oligonucleotide
  modified_base 6: mod_base = OTHER; note = 5-methyl
  modified_base 10..11: mod_base = OTHER; note = 5-methyl
  modified_base 14: mod_base = OTHER; note = bicyclic nucleic acid (BNA)
  source 1..14: mol_type = other DNA
aagttctgtccaag

SEQ ID NO: 8827 - DNA, 13 bp, synthetic construct
  misc_feature 1..13: note = Description of Artificial Sequence: Synthetic Antisense oligonucleotide
  modified_base 6: mod_base = OTHER; note = 5-methyl
  modified_base 10..11: mod_base = OTHER; note = 5-methyl
  modified_base 13: mod_base = OTHER; note = bicyclic nucleic acid (BNA)
  source 1..13: mol_type = other DNA
aagttctgtccaa

SEQ ID NO: 8828 - DNA, 12 bp, synthetic construct
  misc_feature 1..12: note = Description of Artificial Sequence: Synthetic Antisense oligonucleotide
  modified_base 6: mod_base = OTHER; note = 5-methyl
  modified_base 10..11: mod_base = OTHER; note = 5-methyl
  modified_base 12: mod_base = OTHER; note = bicyclic nucleic acid (BNA)
  source 1..12: mol_type = other DNA
aagttctgtcca

SEQ ID NO: 8829 - DNA, 11 bp, synthetic construct
  misc_feature 1..11: note = Description of Artificial Sequence: Synthetic Antisense oligonucleotide
  modified_base 6: mod_base = OTHER; note = 5-methyl
  modified_base 10..11: mod_base = OTHER; note = 5-methyl
  modified_base 11: mod_base = OTHER; note = bicyclic nucleic acid (BNA)
  source 1..11: mol_type = other DNA
aagttctgtcc

SEQ ID NO: 8830 - DNA, 10 bp, synthetic construct
  misc_feature 1..10: note = Description of Artificial Sequence: Synthetic Antisense oligonucleotide
  modified_base 6: mod_base = OTHER; note = 5-methyl
  modified_base 10: mod_base = OTHER; note = 5-methyl
  modified_base 10: mod_base = OTHER; note = bicyclic nucleic acid (BNA)
  source 1..10: mol_type = other DNA
aagttctgtc

SEQ ID NO: 8831-8832 - skipped (2 entries)

SEQ ID NO: 8833 - DNA, 20 bp, synthetic construct
  misc_feature 1..20: note = Description of Artificial Sequence: Synthetic Antisense oligonucleotide
  modified_base 7: mod_base = OTHER; note = 5-methyl
  modified_base 11..12: mod_base = OTHER; note = 5-methyl
  modified_base 16..18: mod_base = OTHER; note = 5-methyl
  modified_base 20: mod_base = OTHER; note = bicyclic nucleic acid (BNA)
  source 1..20: mol_type = other DNA
taagttctgtccaagcccgg

SEQ ID NO: 8834 - DNA, 19 bp, synthetic construct
  misc_feature 1..19: note = Description of Artificial Sequence: Synthetic Antisense oligonucleotide
  modified_base 7: mod_base = OTHER; note = 5-methyl
  modified_base 11..12: mod_base = OTHER; note = 5-methyl
  modified_base 16..18: mod_base = OTHER; note = 5-methyl
  modified_base 19: mod_base = OTHER; note = bicyclic nucleic acid (BNA)
  source 1..19: mol_type = other DNA
taagttctgtccaagcccg

SEQ ID NO: 8835 - DNA, 18 bp, synthetic construct
  misc_feature 1..18: note = Description of Artificial Sequence: Synthetic Antisense oligonucleotide
  modified_base 7: mod_base = OTHER; note = 5-methyl
  modified_base 11..12: mod_base = OTHER; note = 5-methyl
  modified_base 16..18: mod_base = OTHER; note = 5-methyl
  modified_base 18: mod_base = OTHER; note = bicyclic nucleic acid (BNA)
  source 1..18: mol_type = other DNA
taagttctgtccaagccc

SEQ ID NO: 8836 - DNA, 17 bp, synthetic construct
  misc_feature 1..17: note = Description of Artificial Sequence: Synthetic Antisense oligonucleotide
  modified_base 7: mod_base = OTHER; note = 5-methyl
  modified_base 11..12: mod_base = OTHER; note = 5-methyl
  modified_base 16..17: mod_base = OTHER; note = 5-methyl
  modified_base 17: mod_base = OTHER; note = bicyclic nucleic acid (BNA)
  source 1..17: mol_type = other DNA
taagttctgtccaagcc

SEQ ID NO: 8837 - DNA, 16 bp, synthetic construct
  misc_feature 1..16: note = Description of Artificial Sequence: Synthetic Antisense oligonucleotide
  modified_base 7: mod_base = OTHER; note = 5-methyl
  modified_base 11..12: mod_base = OTHER; note = 5-methyl
  modified_base 16: mod_base = OTHER; note = 5-methyl
  modified_base 16: mod_base = OTHER; note = bicyclic nucleic acid (BNA)
  source 1..16: mol_type = other DNA
taagttctgtccaagc

SEQ ID NO: 8838 - DNA, 14 bp, synthetic construct
  misc_feature 1..14: note = Description of Artificial Sequence: Synthetic Antisense oligonucleotide
  modified_base 7: mod_base = OTHER; note = 5-methyl
  modified_base 11..12: mod_base = OTHER; note = 5-methyl
  modified_base 14: mod_base = OTHER; note = bicyclic nucleic acid (BNA)
  source 1..14: mol_type = other DNA
taagttctgtccaa

SEQ ID NO: 8839 - DNA, 13 bp, synthetic construct
  misc_feature 1..13: note = Description of Artificial Sequence: Synthetic Antisense oligonucleotide
  modified_base 7: mod_base = OTHER; note = 5-methyl
  modified_base 11..12: mod_base = OTHER; note = 5-methyl
  modified_base 13: mod_base = OTHER; note = bicyclic nucleic acid (BNA)
  source 1..13: mol_type = other DNA
taagttctgtcca

SEQ ID NO: 8840 - DNA, 12 bp, synthetic construct
  misc_feature 1..12: note = Description of Artificial Sequence: Synthetic Antisense oligonucleotide
  modified_base 7: mod_base = OTHER; note = 5-methyl
  modified_base 11..12: mod_base = OTHER; note = 5-methyl
  modified_base 12: mod_base = OTHER; note = bicyclic nucleic acid (BNA)
  source 1..12: mol_type = other DNA
taagttctgtcc

SEQ ID NO: 8841 - DNA, 11 bp, synthetic construct
  misc_feature 1..11: note = Description of Artificial Sequence: Synthetic Antisense oligonucleotide
  modified_base 7: mod_base = OTHER; note = 5-methyl
  modified_base 11: mod_base = OTHER; note = 5-methyl
  modified_base 11: mod_base = OTHER; note = bicyclic nucleic acid (BNA)
  source 1..11: mol_type = other DNA
taagttctgtc

SEQ ID NO: 8842 - DNA, 10 bp, synthetic construct
  misc_feature 1..10: note = Description of Artificial Sequence: Synthetic Antisense oligonucleotide
  modified_base 7: mod_base = OTHER; note = 5-methyl
  modified_base 10: mod_base = OTHER; note = bicyclic nucleic acid (BNA)
  source 1..10: mol_type = other DNA
taagttctgt

SEQ ID NO: 8843-8844 - skipped (2 entries)

SEQ ID NO: 8845 - DNA, 20 bp, synthetic construct
  misc_feature 1..20: note = Description of Artificial Sequence: Synthetic Antisense oligonucleotide
  modified_base 8: mod_base = OTHER; note = 5-methyl
  modified_base 12..13: mod_base = OTHER; note = 5-methyl
  modified_base 17..19: mod_base = OTHER; note = 5-methyl
  modified_base 20: mod_base = OTHER; note = bicyclic nucleic acid (BNA)
  source 1..20: mol_type = other DNA
gtaagttctgtccaagcccg

SEQ ID NO: 8846 - DNA, 19 bp, synthetic construct
  misc_feature 1..19: note = Description of Artificial Sequence: Synthetic Antisense oligonucleotide
  modified_base 8: mod_base = OTHER; note = 5-methyl
  modified_base 12..13: mod_base = OTHER; note = 5-methyl
  modified_base 17..19: mod_base = OTHER; note = 5-methyl
  modified_base 19: mod_base = OTHER; note = bicyclic nucleic acid (BNA)
  source 1..19: mol_type = other DNA
gtaagttctgtccaagccc

SEQ ID NO: 8847 - DNA, 17 bp, synthetic construct
  misc_feature 1..17: note = Description of Artificial Sequence: Synthetic Antisense oligonucleotide
  modified_base 8: mod_base = OTHER; note = 5-methyl
  modified_base 12..13: mod_base = OTHER; note = 5-methyl
  modified_base 17: mod_base = OTHER; note = 5-methyl
  modified_base 17: mod_base = OTHER; note = bicyclic nucleic acid (BNA)
  source 1..17: mol_type = other DNA
gtaagttctgtccaagc

SEQ ID NO: 8848 - DNA, 16 bp, synthetic construct
  misc_feature 1..16: note = Description of Artificial Sequence: Synthetic Antisense oligonucleotide
  modified_base 8: mod_base = OTHER; note = 5-methyl
  modified_base 12..13: mod_base = OTHER; note = 5-methyl
  modified_base 16: mod_base = OTHER; note = bicyclic nucleic acid (BNA)
  source 1..16: mol_type = other DNA
gtaagttctgtccaag

SEQ ID NO: 8849 - DNA, 15 bp, synthetic construct
  misc_feature 1..15: note = Description of Artificial Sequence: Synthetic Antisense oligonucleotide
  modified_base 8: mod_base = OTHER; note = 5-methyl
  modified_base 12..13: mod_base = OTHER; note = 5-methyl
  modified_base 15: mod_base = OTHER; note = bicyclic nucleic acid (BNA)
  source 1..15: mol_type = other DNA
gtaagttctgtccaa

SEQ ID NO: 8850 - DNA, 14 bp, synthetic construct
  misc_feature 1..14: note = Description of Artificial Sequence: Synthetic Antisense oligonucleotide
  modified_base 8: mod_base = OTHER; note = 5-methyl
  modified_base 12..13: mod_base = OTHER; note = 5-methyl
  modified_base 14: mod_base = OTHER; note = bicyclic nucleic acid (BNA)
  source 1..14: mol_type = other DNA
gtaagttctgtcca

SEQ ID NO: 8851 - DNA, 13 bp, synthetic construct
  misc_feature 1..13: note = Description of Artificial Sequence: Synthetic Antisense oligonucleotide
  modified_base 8: mod_base = OTHER; note = 5-methyl
  modified_base 12..13: mod_base = OTHER; note = 5-methyl
  modified_base 13: mod_base = OTHER; note = bicyclic nucleic acid (BNA)
  source 1..13: mol_type = other DNA
gtaagttctgtcc

SEQ ID NO: 8852 - DNA, 12 bp, synthetic construct
  misc_feature 1..12: note = Description of Artificial Sequence: Synthetic Antisense oligonucleotide
  modified_base 8: mod_base = OTHER; note = 5-methyl
  modified_base 12: mod_base = OTHER; note = 5-methyl
  modified_base 12: mod_base = OTHER; note = bicyclic nucleic acid (BNA)
  source 1..12: mol_type = other DNA
gtaagttctgtc

SEQ ID NO: 8853 - DNA, 11 bp, synthetic construct
  misc_feature 1..11: note = Description of Artificial Sequence: Synthetic Antisense oligonucleotide
  modified_base 8: mod_base = OTHER; note = 5-methyl
  modified_base 11: mod_base = OTHER; note = bicyclic nucleic acid (BNA)
  source 1..11: mol_type = other DNA
gtaagttctgt

SEQ ID NO: 8854 - DNA, 10 bp, synthetic construct
  misc_feature 1..10: note = Description of Artificial Sequence: Synthetic Antisense oligonucleotide
  modified_base 8: mod_base = OTHER; note = 5-methyl
  modified_base 10: mod_base = OTHER; note = bicyclic nucleic acid (BNA)
  source 1..10: mol_type = other DNA
gtaagttctg

SEQ ID NO: 8855-8856 - skipped (2 entries)

SEQ ID NO: 8857 - DNA, 20 bp, synthetic construct
  misc_feature 1..20: note = Description of Artificial Sequence: Synthetic Antisense oligonucleotide
  modified_base 9: mod_base = OTHER; note = 5-methyl
  modified_base 13..14: mod_base = OTHER; note = 5-methyl
  modified_base 18..20: mod_base = OTHER; note = 5-methyl
  modified_base 20: mod_base = OTHER; note = bicyclic nucleic acid (BNA)
  source 1..20: mol_type = other DNA
ggtaagttctgtccaagccc

SEQ ID NO: 8858 - DNA, 19 bp, synthetic construct
  misc_feature 1..19: note = Description of Artificial Sequence: Synthetic Antisense oligonucleotide
  modified_base 9: mod_base = OTHER; note = 5-methyl
  modified_base 13..14: mod_base = OTHER; note = 5-methyl
  modified_base 18..19: mod_base = OTHER; note = 5-methyl
  modified_base 19: mod_base = OTHER; note = bicyclic nucleic acid (BNA)
  source 1..19: mol_type = other DNA
ggtaagttctgtccaagcc

SEQ ID NO: 8859 - DNA, 17 bp, synthetic construct
  misc_feature 1..17: note = Description of Artificial Sequence: Synthetic Antisense oligonucleotide
  modified_base 9: mod_base = OTHER; note = 5-methyl
  modified_base 13..14: mod_base = OTHER; note = 5-methyl
  modified_base 17: mod_base = OTHER; note = bicyclic nucleic acid (BNA)
  source 1..17: mol_type = other DNA
ggtaagttctgtccaag

SEQ ID NO: 8860 - DNA, 16 bp, synthetic construct
  misc_feature 1..16: note = Description of Artificial Sequence: Synthetic Antisense oligonucleotide
  modified_base 9: mod_base = OTHER; note = 5-methyl
  modified_base 13..14: mod_base = OTHER; note = 5-methyl
  modified_base 16: mod_base = OTHER; note = bicyclic nucleic acid (BNA)
  source 1..16: mol_type = other DNA
ggtaagttctgtccaa

SEQ ID NO: 8861 - DNA, 15 bp, synthetic construct
  misc_feature 1..15: note = Description of Artificial Sequence: Synthetic Antisense oligonucleotide
  modified_base 9: mod_base = OTHER; note = 5-methyl
  modified_base 13..14: mod_base = OTHER; note = 5-methyl
  modified_base 15: mod_base = OTHER; note = bicyclic nucleic acid (BNA)
  source 1..15: mol_type = other DNA
ggtaagttctgtcca

SEQ ID NO: 8862 - DNA, 14 bp, synthetic construct
  misc_feature 1..14: note = Description of Artificial Sequence: Synthetic Antisense oligonucleotide
  modified_base 9: mod_base = OTHER; note = 5-methyl
  modified_base 13..14: mod_base = OTHER; note = 5-methyl
  modified_base 14: mod_base = OTHER; note = bicyclic nucleic acid (BNA)
  source 1..14: mol_type = other DNA
ggtaagttctgtcc

SEQ ID NO: 8863 - DNA, 13 bp, synthetic construct
  misc_feature 1..13: note = Description of Artificial Sequence: Synthetic Antisense oligonucleotide
  modified_base 9: mod_base = OTHER; note = 5-methyl
  modified_base 13: mod_base = OTHER; note = 5-methyl
  modified_base 13: mod_base = OTHER; note = bicyclic nucleic acid (BNA)
  source 1..13: mol_type = other DNA
ggtaagttctgtc

SEQ ID NO: 8864 - DNA, 12 bp, synthetic construct
  misc_feature 1..12: note = Description of Artificial Sequence: Synthetic Antisense oligonucleotide
  modified_base 9: mod_base = OTHER; note = 5-methyl
  modified_base 12: mod_base = OTHER; note = bicyclic nucleic acid (BNA)
  source 1..12: mol_type = other DNA
ggtaagttctgt

SEQ ID NO: 8865 - DNA, 11 bp, synthetic construct
  misc_feature 1..11: note = Description of Artificial Sequence: Synthetic Antisense oligonucleotide
  modified_base 9: mod_base = OTHER; note = 5-methyl
  modified_base 11: mod_base = OTHER; note = bicyclic nucleic acid (BNA)
  source 1..11: mol_type = other DNA
ggtaagttctg

SEQ ID NO: 8866 - DNA, 10 bp, synthetic construct
  misc_feature 1..10: note = Description of Artificial Sequence: Synthetic Antisense oligonucleotide
  modified_base 9: mod_base = OTHER; note = 5-methyl
  modified_base 10: mod_base = OTHER; note = bicyclic nucleic acid (BNA)
  source 1..10: mol_type = other DNA
ggtaagttct

SEQ ID NO: 8867 - skipped

SEQ ID NO: 8868 - DNA, 20 bp, synthetic construct
  misc_feature 1..20: note = Description of Artificial Sequence: Synthetic Antisense oligonucleotide
  modified_base 1: mod_base = OTHER; note = 5-methyl
  modified_base 10: mod_base = OTHER; note = 5-methyl
  modified_base 14..15: mod_base = OTHER; note = 5-methyl
  modified_base 19..20: mod_base = OTHER; note = 5-methyl
  modified_base 20: mod_base = OTHER; note = bicyclic nucleic acid (BNA)
  source 1..20: mol_type = other DNA
cggtaagttctgtccaagcc

SEQ ID NO: 8869 - DNA, 19 bp, synthetic construct
  misc_feature 1..19: note = Description of Artificial Sequence: Synthetic Antisense oligonucleotide
  modified_base 1: mod_base = OTHER; note = 5-methyl
  modified_base 10: mod_base = OTHER; note = 5-methyl
  modified_base 14..15: mod_base = OTHER; note = 5-methyl
  modified_base 19: mod_base = OTHER; note = 5-methyl
  modified_base 19: mod_base = OTHER; note = bicyclic nucleic acid (BNA)
  source 1..19: mol_type = other DNA
cggtaagttctgtccaagc

SEQ ID NO: 8870 - DNA, 18 bp, synthetic construct
  misc_feature 1..18: note = Description of Artificial Sequence: Synthetic Antisense oligonucleotide
  modified_base 1: mod_base = OTHER; note = 5-methyl
  modified_base 10: mod_base = OTHER; note = 5-methyl
  modified_base 14..15: mod_base = OTHER; note = 5-methyl
  modified_base 18: mod_base = OTHER; note = bicyclic nucleic acid (BNA)
  source 1..18: mol_type = other DNA
cggtaagttctgtccaag

SEQ ID NO: 8871 - DNA, 17 bp, synthetic construct
  misc_feature 1..17: note = Description of Artificial Sequence: Synthetic Antisense oligonucleotide
  modified_base 1: mod_base = OTHER; note = 5-methyl
  modified_base 10: mod_base = OTHER; note = 5-methyl
  modified_base 14..15: mod_base = OTHER; note = 5-methyl
  modified_base 17: mod_base = OTHER; note = bicyclic nucleic acid (BNA)
  source 1..17: mol_type = other DNA
cggtaagttctgtccaa

SEQ ID NO: 8872 - DNA, 16 bp, synthetic construct
  misc_feature 1..16: note = Description of Artificial Sequence: Synthetic Antisense oligonucleotide
  modified_base 1: mod_base = OTHER; note = 5-methyl
  modified_base 10: mod_base = OTHER; note = 5-methyl
  modified_base 14..15: mod_base = OTHER; note = 5-methyl
  modified_base 16: mod_base = OTHER; note = bicyclic nucleic acid (BNA)
  source 1..16: mol_type = other DNA
cggtaagttctgtcca

SEQ ID NO: 8873 - DNA, 15 bp, synthetic construct
  misc_feature 1..15: note = Description of Artificial Sequence: Synthetic Antisense oligonucleotide
  modified_base 1: mod_base = OTHER; note = 5-methyl
  modified_base 10: mod_base = OTHER; note = 5-methyl
  modified_base 14..15: mod_base = OTHER; note = 5-methyl
  modified_base 15: mod_base = OTHER; note = bicyclic nucleic acid (BNA)
  source 1..15: mol_type = other DNA
cggtaagttctgtcc

SEQ ID NO: 8874 - DNA, 14 bp, synthetic construct
  misc_feature 1..14: note = Description of Artificial Sequence: Synthetic Antisense oligonucleotide
  modified_base 1: mod_base = OTHER; note = 5-methyl
  modified_base 10: mod_base = OTHER; note = 5-methyl
  modified_base 14: mod_base = OTHER; note = 5-methyl
  modified_base 14: mod_base = OTHER; note = bicyclic nucleic acid (BNA)
  source 1..14: mol_type = other DNA
cggtaagttctgtc

SEQ ID NO: 8875 - DNA, 13 bp, synthetic construct
  misc_feature 1..13: note = Description of Artificial Sequence: Synthetic Antisense oligonucleotide
  modified_base 1: mod_base = OTHER; note = 5-methyl
  modified_base 10: mod_base = OTHER; note = 5-methyl
  modified_base 13: mod_base = OTHER; note = bicyclic nucleic acid (BNA)
  source 1..13: mol_type = other DNA
cggtaagttctgt

SEQ ID NO: 8876 - DNA, 12 bp, synthetic construct
  misc_feature 1..12: note = Description of Artificial Sequence: Synthetic Antisense oligonucleotide
  modified_base 1: mod_base = OTHER; note = 5-methyl
  modified_base 10: mod_base = OTHER; note = 5-methyl
  modified_base 12: mod_base = OTHER; note = bicyclic nucleic acid (BNA)
  source 1..12: mol_type = other DNA
cggtaagttctg

SEQ ID NO: 8877 - DNA, 11 bp, synthetic construct
  misc_feature 1..11: note = Description of Artificial Sequence: Synthetic Antisense oligonucleotide
  modified_base 1: mod_base = OTHER; note = 5-methyl
  modified_base 10: mod_base = OTHER; note = 5-methyl
  modified_base 11: mod_base = OTHER; note = bicyclic nucleic acid (BNA)
  source 1..11: mol_type = other DNA
cggtaagttct

SEQ ID NO: 8878 - DNA, 10 bp, synthetic construct
  misc_feature 1..10: note = Description of Artificial Sequence: Synthetic Antisense oligonucleotide
  modified_base 1: mod_base = OTHER; note = 5-methyl
  modified_base 10: mod_base = OTHER; note = 5-methyl
  modified_base 10: mod_base = OTHER; note = bicyclic nucleic acid (BNA)
  source 1..10: mol_type = other DNA
cggtaagttc

SEQ ID NO: 8879-8880 - skipped (2 entries)

SEQ ID NO: 8881 - DNA, 20 bp, synthetic construct
  misc_feature 1..20: note = Description of Artificial Sequence: Synthetic Antisense oligonucleotide
  modified_base 2: mod_base = OTHER; note = 5-methyl
  modified_base 11: mod_base = OTHER; note = 5-methyl
  modified_base 15..16: mod_base = OTHER; note = 5-methyl
  modified_base 20: mod_base = OTHER; note = 5-methyl
  modified_base 20: mod_base = OTHER; note = bicyclic nucleic acid (BNA)
  source 1..20: mol_type = other DNA
tcggtaagttctgtccaagc

SEQ ID NO: 8882 - DNA, 19 bp, synthetic construct
  misc_feature 1..19: note = Description of Artificial Sequence: Synthetic Antisense oligonucleotide
  modified_base 2: mod_base = OTHER; note = 5-methyl
  modified_base 11: mod_base = OTHER; note = 5-methyl
  modified_base 15..16: mod_base = OTHER; note = 5-methyl
  modified_base 19: mod_base = OTHER; note = bicyclic nucleic acid (BNA)
  source 1..19: mol_type = other DNA
tcggtaagttctgtccaag

SEQ ID NO: 8883 - DNA, 18 bp, synthetic construct
  misc_feature 1..18: note = Description of Artificial Sequence: Synthetic Antisense oligonucleotide
  modified_base 2: mod_base = OTHER; note = 5-methyl
  modified_base 11: mod_base = OTHER; note = 5-methyl
  modified_base 15..16: mod_base = OTHER; note = 5-methyl
  modified_base 18: mod_base = OTHER; note = bicyclic nucleic acid (BNA)
  source 1..18: mol_type = other DNA
tcggtaagttctgtccaa

SEQ ID NO: 8884 - DNA, 17 bp, synthetic construct
  misc_feature 1..17: note = Description of Artificial Sequence: Synthetic Antisense oligonucleotide
  modified_base 2: mod_base = OTHER; note = 5-methyl
  modified_base 11: mod_base = OTHER; note = 5-methyl
  modified_base 15..16: mod_base = OTHER; note = 5-methyl
  modified_base 17: mod_base = OTHER; note = bicyclic nucleic acid (BNA)
  source 1..17: mol_type = other DNA
tcggtaagttctgtcca

SEQ ID NO: 8885 - DNA, 16 bp, synthetic construct
  misc_feature 1..16: note = Description of Artificial Sequence: Synthetic Antisense oligonucleotide
  modified_base 2: mod_base = OTHER; note = 5-methyl
  modified_base 11: mod_base = OTHER; note = 5-methyl
  modified_base 15..16: mod_base = OTHER; note = 5-methyl
  modified_base 16: mod_base = OTHER; note = bicyclic nucleic acid (BNA)
  source 1..16: mol_type = other DNA
tcggtaagttctgtcc

SEQ ID NO: 8886 - DNA, 15 bp, synthetic construct
  misc_feature 1..15: note = Description of Artificial Sequence: Synthetic Antisense oligonucleotide
  modified_base 2: mod_base = OTHER; note = 5-methyl
  modified_base 11: mod_base = OTHER; note = 5-methyl
  modified_base 15: mod_base = OTHER; note = 5-methyl
  modified_base 15: mod_base = OTHER; note = bicyclic nucleic acid (BNA)
  source 1..15: mol_type = other DNA
tcggtaagttctgtc

SEQ ID NO: 8887 - DNA, 14 bp, synthetic construct
  misc_feature 1..14: note = Description of Artificial Sequence: Synthetic Antisense oligonucleotide
  modified_base 2: mod_base = OTHER; note = 5-methyl
  modified_base 11: mod_base = OTHER; note = 5-methyl
  modified_base 14: mod_base = OTHER; note = bicyclic nucleic acid (BNA)
  source 1..14: mol_type = other DNA
tcggtaagttctgt

SEQ ID NO: 8888 - DNA, 13 bp, synthetic construct
  misc_feature 1..13: note = Description of Artificial Sequence: Synthetic Antisense oligonucleotide
  modified_base 2: mod_base = OTHER; note = 5-methyl
  modified_base 11: mod_base = OTHER; note = 5-methyl
  modified_base 13: mod_base = OTHER; note = bicyclic nucleic acid (BNA)
  source 1..13: mol_type = other DNA
tcggtaagttctg

SEQ ID NO: 8889 - DNA, 12 bp, synthetic construct
  misc_feature 1..12: note = Description of Artificial Sequence: Synthetic Antisense oligonucleotide
  modified_base 2: mod_base = OTHER; note = 5-methyl
  modified_base 11: mod_base = OTHER; note = 5-methyl
  modified_base 12: mod_base = OTHER; note = bicyclic nucleic acid (BNA)
  source 1..12: mol_type = other DNA
tcggtaagttct

SEQ ID NO: 8890 - DNA, 11 bp, synthetic construct
  misc_feature 1..11: note = Description of Artificial Sequence: Synthetic Antisense oligonucleotide
  modified_base 2: mod_base = OTHER; note = 5-methyl
  modified_base 11: mod_base = OTHER; note = 5-methyl
  modified_base 11: mod_base = OTHER; note = bicyclic nucleic acid (BNA)
  source 1..11: mol_type = other DNA
tcggtaagttc

SEQ ID NO: 8891 - DNA, 10 bp, synthetic construct
  misc_feature 1..10: note = Description of Artificial Sequence: Synthetic Antisense oligonucleotide
  modified_base 2: mod_base = OTHER; note = 5-methyl
  modified_base 10: mod_base = OTHER; note = bicyclic nucleic acid (BNA)
  source 1..10: mol_type = other DNA
tcggtaagtt

SEQ ID NO: 8892 - skipped

SEQ ID NO: 8893 - DNA, 20 bp, synthetic construct
  misc_feature 1..20: note = Description of Artificial Sequence: Synthetic Antisense oligonucleotide
  modified_base 3: mod_base = OTHER; note = 5-methyl
  modified_base 12: mod_base = OTHER; note = 5-methyl
  modified_base 16..17: mod_base = OTHER; note = 5-methyl
  modified_base 20: mod_base = OTHER; note = bicyclic nucleic acid (BNA)
  source 1..20: mol_type = other DNA
gtcggtaagttctgtccaag

SEQ ID NO: 8894 - DNA, 19 bp, synthetic construct
  misc_feature 1..19: note = Description of Artificial Sequence: Synthetic Antisense oligonucleotide
  modified_base 3: mod_base = OTHER; note = 5-methyl
  modified_base 12: mod_base = OTHER; note = 5-methyl
  modified_base 16..17: mod_base = OTHER; note = 5-methyl
  modified_base 19: mod_base = OTHER; note = bicyclic nucleic acid (BNA)
  source 1..19: mol_type = other DNA
gtcggtaagttctgtccaa

SEQ ID NO: 8895 - DNA, 18 bp, synthetic construct
  misc_feature 1..18: note = Description of Artificial Sequence: Synthetic Antisense oligonucleotide
  modified_base 3: mod_base = OTHER; note = 5-methyl
  modified_base 12: mod_base = OTHER; note = 5-methyl
  modified_base 16..17: mod_base = OTHER; note = 5-methyl
  modified_base 18: mod_base = OTHER; note = bicyclic nucleic acid (BNA)
  source 1..18: mol_type = other DNA
gtcggtaagttctgtcca

SEQ ID NO: 8896 - DNA, 17 bp, synthetic construct
  misc_feature 1..17: note = Description of Artificial Sequence: Synthetic Antisense oligonucleotide
  modified_base 3: mod_base = OTHER; note = 5-methyl
  modified_base 12: mod_base = OTHER; note = 5-methyl
  modified_base 16..17: mod_base = OTHER; note = 5-methyl
  modified_base 17: mod_base = OTHER; note = bicyclic nucleic acid (BNA)
  source 1..17: mol_type = other DNA
gtcggtaagttctgtcc

SEQ ID NO: 8897 - DNA, 16 bp, synthetic construct
  misc_feature 1..16: note = Description of Artificial Sequence: Synthetic Antisense oligonucleotide
  modified_base 3: mod_base = OTHER; note = 5-methyl
  modified_base 12: mod_base = OTHER; note = 5-methyl
  modified_base 16: mod_base = OTHER; note = 5-methyl
  modified_base 16: mod_base = OTHER; note = bicyclic nucleic acid (BNA)
  source 1..16: mol_type = other DNA
gtcggtaagttctgtc

SEQ ID NO: 8898 - DNA, 15 bp, synthetic construct
  misc_feature 1..15: note = Description of Artificial Sequence: Synthetic Antisense oligonucleotide
  modified_base 3: mod_base = OTHER; note = 5-methyl
  modified_base 12: mod_base = OTHER; note = 5-methyl
  modified_base 15: mod_base = OTHER; note = bicyclic nucleic acid (BNA)
  source 1..15: mol_type = other DNA
gtcggtaagttctgt

SEQ ID NO: 8899 - DNA, 14 bp, synthetic construct
  misc_feature 1..14: note = Description of Artificial Sequence: Synthetic Antisense oligonucleotide
  modified_base 3: mod_base = OTHER; note = 5-methyl
  modified_base 12: mod_base = OTHER; note = 5-methyl
  modified_base 14: mod_base = OTHER; note = bicyclic nucleic acid (BNA)
  source 1..14: mol_type = other DNA
gtcggtaagttctg

SEQ ID NO: 8900 - DNA, 13 bp, synthetic construct
  misc_feature 1..13: note = Description of Artificial Sequence: Synthetic Antisense oligonucleotide
  modified_base 3: mod_base = OTHER; note = 5-methyl
  modified_base 12: mod_base = OTHER; note = 5-methyl
  modified_base 13: mod_base = OTHER; note = bicyclic nucleic acid (BNA)
  source 1..13: mol_type = other DNA
gtcggtaagttct

SEQ ID NO: 8901 - DNA, 12 bp, synthetic construct
  misc_feature 1..12: note = Description of Artificial Sequence: Synthetic Antisense oligonucleotide
  modified_base 3: mod_base = OTHER; note = 5-methyl
  modified_base 12: mod_base = OTHER; note = 5-methyl
  modified_base 12: mod_base = OTHER; note = bicyclic nucleic acid (BNA)
  source 1..12: mol_type = other DNA
gtcggtaagttc

SEQ ID NO: 8902 - DNA, 11 bp, synthetic construct
  misc_feature 1..11: note = Description of Artificial Sequence: Synthetic Antisense oligonucleotide
  modified_base 3: mod_base = OTHER; note = 5-methyl
  modified_base 11: mod_base = OTHER; note = bicyclic nucleic acid (BNA)
  source 1..11: mol_type = other DNA
gtcggtaagtt

SEQ ID NO: 8903 - DNA, 10 bp, synthetic construct
  misc_feature 1..10: note = Description of Artificial Sequence: Synthetic Antisense oligonucleotide
  modified_base 3: mod_base = OTHER; note = 5-methyl
  modified_base 10: mod_base = OTHER; note = bicyclic nucleic acid (BNA)
  source 1..10: mol_type = other DNA
gtcggtaagt

SEQ ID NO: 8904 - DNA, 20 bp, synthetic construct
  misc_feature 1..20: note = Description of Artificial Sequence: Synthetic Antisense oligonucleotide
  modified_base 4: mod_base = OTHER; note = 5-methyl
  modified_base 13: mod_base = OTHER; note = 5-methyl
  modified_base 17..18: mod_base = OTHER; note = 5-methyl
  modified_base 20: mod_base = OTHER; note = bicyclic nucleic acid (BNA)
  source 1..20: mol_type = other DNA
agtcggtaagttctgtccaa

SEQ ID NO: 8905 - DNA, 19 bp, synthetic construct
  misc_feature 1..19: note = Description of Artificial Sequence: Synthetic Antisense oligonucleotide
  modified_base 4: mod_base = OTHER; note = 5-methyl
  modified_base 13: mod_base = OTHER; note = 5-methyl
  modified_base 17..18: mod_base = OTHER; note = 5-methyl
  modified_base 19: mod_base = OTHER; note = bicyclic nucleic acid (BNA)
  source 1..19: mol_type = other DNA
agtcggtaagttctgtcca

SEQ ID NO: 8906 - DNA, 17 bp, synthetic construct
  misc_feature 1..17: note = Description of Artificial Sequence: Synthetic Antisense oligonucleotide
  modified_base 4: mod_base = OTHER; note = 5-methyl
  modified_base 13: mod_base = OTHER; note = 5-methyl
  modified_base 17: mod_base = OTHER; note = 5-methyl
  modified_base 17: mod_base = OTHER; note = bicyclic nucleic acid (BNA)
  source 1..17: mol_type = other DNA
agtcggtaagttctgtc

SEQ ID NO: 8907 - DNA, 16 bp, synthetic construct
  misc_feature 1..16: note = Description of Artificial Sequence: Synthetic Antisense oligonucleotide
  modified_base 4: mod_base = OTHER; note = 5-methyl
  modified_base 13: mod_base = OTHER; note = 5-methyl
  modified_base 16: mod_base = OTHER; note = bicyclic nucleic acid (BNA)
  source 1..16: mol_type = other DNA
agtcggtaagttctgt

SEQ ID NO: 8908 - DNA, 15 bp, synthetic construct
  misc_feature 1..15: note = Description of Artificial Sequence: Synthetic Antisense oligonucleotide
  modified_base 4: mod_base = OTHER; note = 5-methyl
  modified_base 13: mod_base = OTHER; note = 5-methyl
  modified_base 15: mod_base = OTHER; note = bicyclic nucleic acid (BNA)
  source 1..15: mol_type = other DNA
agtcggtaagttctg

SEQ ID NO: 8909 - DNA, 14 bp, synthetic construct
  misc_feature 1..14: note = Description of Artificial Sequence: Synthetic Antisense oligonucleotide
  modified_base 4: mod_base = OTHER; note = 5-methyl
  modified_base 13: mod_base = OTHER; note = 5-methyl
  modified_base 14: mod_base = OTHER; note = bicyclic nucleic acid (BNA)
  source 1..14: mol_type = other DNA
agtcggtaagttct

SEQ ID NO: 8910 - DNA, 13 bp, synthetic construct
  misc_feature 1..13: note = Description of Artificial Sequence: Synthetic Antisense oligonucleotide
  modified_base 4: mod_base = OTHER; note = 5-methyl
  modified_base 13: mod_base = OTHER; note = 5-methyl
  modified_base 13: mod_base = OTHER; note = bicyclic nucleic acid (BNA)
  source 1..13: mol_type = other DNA
agtcggtaagttc

SEQ ID NO: 8911 - DNA, 12 bp, synthetic construct
  misc_feature 1..12: note = Description of Artificial Sequence: Synthetic Antisense oligonucleotide
  modified_base 4: mod_base = OTHER; note = 5-methyl
  modified_base 12: mod_base = OTHER; note = bicyclic nucleic acid (BNA)
  source 1..12: mol_type = other DNA
agtcggtaagtt

SEQ ID NO: 8912 - DNA, 11 bp, synthetic construct
  misc_feature 1..11: note = Description of Artificial Sequence: Synthetic Antisense oligonucleotide
  modified_base 4: mod_base = OTHER; note = 5-methyl
  modified_base 11: mod_base = OTHER; note = bicyclic nucleic acid (BNA)
  source 1..11: mol_type = other DNA
agtcggtaagt

SEQ ID NO: 8913 - DNA, 20 bp, synthetic construct
  misc_feature 1..20: note = Description of Artificial Sequence: Synthetic Antisense oligonucleotide
  modified_base 1: mod_base = OTHER; note = 5-methyl
  modified_base 5: mod_base = OTHER; note = 5-methyl
  modified_base 14: mod_base = OTHER; note = 5-methyl
  modified_base 18..19: mod_base = OTHER; note = 5-methyl
  modified_base 20: mod_base = OTHER; note = bicyclic nucleic acid (BNA)
  source 1..20: mol_type = other DNA
cagtcggtaagttctgtcca

SEQ ID NO: 8914 - DNA, 19 bp, synthetic construct
  misc_feature 1..19: note = Description of Artificial Sequence: Synthetic Antisense oligonucleotide
  modified_base 1: mod_base = OTHER; note = 5-methyl
  modified_base 5: mod_base = OTHER; note = 5-methyl
  modified_base 14: mod_base = OTHER; note = 5-methyl
  modified_base 18..19: mod_base = OTHER; note = 5-methyl
  modified_base 19: mod_base = OTHER; note = bicyclic nucleic acid (BNA)
  source 1..19: mol_type = other DNA
cagtcggtaagttctgtcc

SEQ ID NO: 8915 - DNA, 18 bp, synthetic construct
  misc_feature 1..18: note = Description of Artificial Sequence: Synthetic Antisense oligonucleotide
  modified_base 1: mod_base = OTHER; note = 5-methyl
  modified_base 5: mod_base = OTHER; note = 5-methyl
  modified_base 14: mod_base = OTHER; note = 5-methyl
  modified_base 18: mod_base = OTHER; note = 5-methyl
  modified_base 18: mod_base = OTHER; note = bicyclic nucleic acid (BNA)
  source 1..18: mol_type = other DNA
cagtcggtaagttctgtc

SEQ ID NO: 8916 - DNA, 17 bp, synthetic construct
  misc_feature 1..17: note = Description of Artificial Sequence: Synthetic Antisense oligonucleotide
  modified_base 1: mod_base = OTHER; note = 5-methyl
  modified_base 5: mod_base = OTHER; note = 5-methyl
  modified_base 14: mod_base = OTHER; note = 5-methyl
  modified_base 17: mod_base = OTHER; note = bicyclic nucleic acid (BNA)
  source 1..17: mol_type = other DNA
cagtcggtaagttctgt

SEQ ID NO: 8917 - DNA, 16 bp, synthetic construct
  misc_feature 1..16: note = Description of Artificial Sequence: Synthetic Antisense oligonucleotide
  modified_base 1: mod_base = OTHER; note = 5-methyl
  modified_base 5: mod_base = OTHER; note = 5-methyl
  modified_base 14: mod_base = OTHER; note = 5-methyl
  modified_base 16: mod_base = OTHER; note = bicyclic nucleic acid (BNA)
  source 1..16: mol_type = other DNA
cagtcggtaagttctg

SEQ ID NO: 8918 - DNA, 15 bp, synthetic construct
  misc_feature 1..15: note = Description of Artificial Sequence: Synthetic Antisense oligonucleotide
  modified_base 1: mod_base = OTHER; note = 5-methyl
  modified_base 5: mod_base = OTHER; note = 5-methyl
  modified_base 14: mod_base = OTHER; note = 5-methyl
  modified_base 15: mod_base = OTHER; note = bicyclic nucleic acid (BNA)
  source 1..15: mol_type = other DNA
cagtcggtaagttct

SEQ ID NO: 8919 - DNA, 14 bp, synthetic construct
  misc_feature 1..14: note = Description of Artificial Sequence: Synthetic Antisense oligonucleotide
  modified_base 1: mod_base = OTHER; note = 5-methyl
  modified_base 5: mod_base = OTHER; note = 5-methyl
  modified_base 14: mod_base = OTHER; note = 5-methyl
  modified_base 14: mod_base = OTHER; note = bicyclic nucleic acid (BNA)
  source 1..14: mol_type = other DNA
cagtcggtaagttc

SEQ ID NO: 8920 - DNA, 13 bp, synthetic construct
  misc_feature 1..13: note = Description of Artificial Sequence: Synthetic Antisense oligonucleotide
  modified_base 1: mod_base = OTHER; note = 5-methyl
  modified_base 5: mod_base = OTHER; note = 5-methyl
  modified_base 13: mod_base = OTHER; note = bicyclic nucleic acid (BNA)
  source 1..13: mol_type = other DNA
cagtcggtaagtt

SEQ ID NO: 8921 - DNA, 12 bp, synthetic construct
  misc_feature 1..12: note = Description of Artificial Sequence: Synthetic Antisense oligonucleotide
  modified_base 1: mod_base = OTHER; note = 5-methyl
  modified_base 5: mod_base = OTHER; note = 5-methyl
  modified_base 12: mod_base = OTHER; note = bicyclic nucleic acid (BNA)
  source 1..12: mol_type = other DNA
cagtcggtaagt

SEQ ID NO: 8922 - DNA, 20 bp, synthetic construct
  misc_feature 1..20: note = Description of Artificial Sequence: Synthetic Antisense oligonucleotide
  modified_base 1..2: mod_base = OTHER; note = 5-methyl
  modified_base 6: mod_base = OTHER; note = 5-methyl
  modified_base 15: mod_base = OTHER; note = 5-methyl
  modified_base 19..20: mod_base = OTHER; note = 5-methyl
  modified_base 20: mod_base = OTHER; note = bicyclic nucleic acid (BNA)
  source 1..20: mol_type = other DNA
ccagtcggtaagttctgtcc

SEQ ID NO: 8923 - DNA, 19 bp, synthetic construct
  misc_feature 1..19: note = Description of Artificial Sequence: Synthetic Antisense oligonucleotide
  modified_base 1..2: mod_base = OTHER; note = 5-methyl
  modified_base 6: mod_base = OTHER; note = 5-methyl
  modified_base 15: mod_base = OTHER; note = 5-methyl
  modified_base 19: mod_base = OTHER; note = 5-methyl
  modified_base 19: mod_base = OTHER; note = bicyclic nucleic acid (BNA)
  source 1..19: mol_type = other DNA
ccagtcggtaagttctgtc

SEQ ID NO: 8924 - DNA, 18 bp, synthetic construct
  misc_feature 1..18: note = Description of Artificial Sequence: Synthetic Antisense oligonucleotide
  modified_base 1..2: mod_base = OTHER; note = 5-methyl
  modified_base 6: mod_base = OTHER; note = 5-methyl
  modified_base 15: mod_base = OTHER; note = 5-methyl
  modified_base 18: mod_base = OTHER; note = bicyclic nucleic acid (BNA)
  source 1..18: mol_type = other DNA
ccagtcggtaagttctgt

SEQ ID NO: 8925 - DNA, 17 bp, synthetic construct
  misc_feature 1..17: note = Description of Artificial Sequence: Synthetic Antisense oligonucleotide
  modified_base 1..2: mod_base = OTHER; note = 5-methyl
  modified_base 6: mod_base = OTHER; note = 5-methyl
  modified_base 15: mod_base = OTHER; note = 5-methyl
  modified_base 17: mod_base = OTHER; note = bicyclic nucleic acid (BNA)
  source 1..17: mol_type = other DNA
ccagtcggtaagttctg

SEQ ID NO: 8926 - DNA, 16 bp, synthetic construct
  misc_feature 1..16: note = Description of Artificial Sequence: Synthetic Antisense oligonucleotide
  modified_base 1..2: mod_base = OTHER; note = 5-methyl
  modified_base 6: mod_base = OTHER; note = 5-methyl
  modified_base 15: mod_base = OTHER; note = 5-methyl
  modified_base 16: mod_base = OTHER; note = bicyclic nucleic acid (BNA)
  source 1..16: mol_type = other DNA
ccagtcggtaagttct

SEQ ID NO: 8927 - DNA, 15 bp, synthetic construct
  misc_feature 1..15: note = Description of Artificial Sequence: Synthetic Antisense oligonucleotide
  modified_base 1..2: mod_base = OTHER; note = 5-methyl
  modified_base 6: mod_base = OTHER; note = 5-methyl
  modified_base 15: mod_base = OTHER; note = 5-methyl
  modified_base 15: mod_base = OTHER; note = bicyclic nucleic acid (BNA)
  source 1..15: mol_type = other DNA
ccagtcggtaagttc

SEQ ID NO: 8928 - DNA, 14 bp, synthetic construct
  misc_feature 1..14: note = Description of Artificial Sequence: Synthetic Antisense oligonucleotide
  modified_base 1..2: mod_base = OTHER; note = 5-methyl
  modified_base 6: mod_base = OTHER; note = 5-methyl
  modified_base 14: mod_base = OTHER; note = bicyclic nucleic acid (BNA)
  source 1..14: mol_type = other DNA
ccagtcggtaagtt

SEQ ID NO: 8929 - DNA, 13 bp, synthetic construct
  misc_feature 1..13: note = Description of Artificial Sequence: Synthetic Antisense oligonucleotide
  modified_base 1..2: mod_base = OTHER; note = 5-methyl
  modified_base 6: mod_base = OTHER; note = 5-methyl
  modified_base 13: mod_base = OTHER; note = bicyclic nucleic acid (BNA)
  source 1..13: mol_type = other DNA
ccagtcggtaagt

SEQ ID NO: 8930 - DNA, 20 bp, synthetic construct
  misc_feature 1..20: note = Description of Artificial Sequence: Synthetic Antisense oligonucleotide
  modified_base 2..3: mod_base = OTHER; note = 5-methyl
  modified_base 7: mod_base = OTHER; note = 5-methyl
  modified_base 16: mod_base = OTHER; note = 5-methyl
  modified_base 20: mod_base = OTHER; note = 5-methyl
  modified_base 20: mod_base = OTHER; note = bicyclic nucleic acid (BNA)
  source 1..20: mol_type = other DNA
gccagtcggtaagttctgtc

SEQ ID NO: 8931 - DNA, 19 bp, synthetic construct
  misc_feature 1..19: note = Description of Artificial Sequence: Synthetic Antisense oligonucleotide
  modified_base 2..3: mod_base = OTHER; note = 5-methyl
  modified_base 7: mod_base = OTHER; note = 5-methyl
  modified_base 16: mod_base = OTHER; note = 5-methyl
  modified_base 19: mod_base = OTHER; note = bicyclic nucleic acid (BNA)
  source 1..19: mol_type = other DNA
gccagtcggtaagttctgt

SEQ ID NO: 8932 - DNA, 18 bp, synthetic construct
  misc_feature 1..18: note = Description of Artificial Sequence: Synthetic Antisense oligonucleotide
  modified_base 2..3: mod_base = OTHER; note = 5-methyl
  modified_base 7: mod_base = OTHER; note = 5-methyl
  modified_base 16: mod_base = OTHER; note = 5-methyl
  modified_base 18: mod_base = OTHER; note = bicyclic nucleic acid (BNA)
  source 1..18: mol_type = other DNA
gccagtcggtaagttctg

SEQ ID NO: 8933 - DNA, 17 bp, synthetic construct
  misc_feature 1..17: note = Description of Artificial Sequence: Synthetic Antisense oligonucleotide
  modified_base 2..3: mod_base = OTHER; note = 5-methyl
  modified_base 7: mod_base = OTHER; note = 5-methyl
  modified_base 16: mod_base = OTHER; note = 5-methyl
  modified_base 17: mod_base = OTHER; note = bicyclic nucleic acid (BNA)
  source 1..17: mol_type = other DNA
gccagtcggtaagttct

SEQ ID NO: 8934 - DNA, 16 bp, synthetic construct
  misc_feature 1..16: note = Description of Artificial Sequence: Synthetic Antisense oligonucleotide
  modified_base 2..3: mod_base = OTHER; note = 5-methyl
  modified_base 7: mod_base = OTHER; note = 5-methyl
  modified_base 16: mod_base = OTHER; note = 5-methyl
  modified_base 16: mod_base = OTHER; note = bicyclic nucleic acid (BNA)
  source 1..16: mol_type = other DNA
gccagtcggtaagttc

SEQ ID NO: 8935 - DNA, 15 bp, synthetic construct
  misc_feature 1..15: note = Description of Artificial Sequence: Synthetic Antisense oligonucleotide
  modified_base 2..3: mod_base = OTHER; note = 5-methyl
  modified_base 7: mod_base = OTHER; note = 5-methyl
  modified_base 15: mod_base = OTHER; note = bicyclic nucleic acid (BNA)
  source 1..15: mol_type = other DNA
gccagtcggtaagtt

SEQ ID NO: 8936 - DNA, 14 bp, synthetic construct
  misc_feature 1..14: note = Description of Artificial Sequence: Synthetic Antisense oligonucleotide
  modified_base 2..3: mod_base = OTHER; note = 5-methyl
  modified_base 7: mod_base = OTHER; note = 5-methyl
  modified_base 14: mod_base = OTHER; note = bicyclic nucleic acid (BNA)
  source 1..14: mol_type = other DNA
gccagtcggtaagt

SEQ ID NO: 8937 - DNA, 20 bp, synthetic construct
  misc_feature 1..20: note = Description of Artificial Sequence: Synthetic Antisense oligonucleotide
  modified_base 2: mod_base = OTHER; note = 5-methyl
  modified_base 14: mod_base = OTHER; note = 5-methyl
  modified_base 19: mod_base = OTHER; note = 5-methyl
  modified_base 20: mod_base = OTHER; note = bicyclic nucleic acid (BNA)
  source 1..20: mol_type = other DNA
tcaaggaagatggcatttct

SEQ ID NO: 8938 - DNA, 22 bp, synthetic construct
  misc_feature 1..22: note = Description of Artificial Sequence: Synthetic Antisense oligonucleotide
  modified_base 2: mod_base = OTHER; note = 5-methyl
  modified_base 14: mod_base = OTHER; note = 5-methyl
  modified_base 19: mod_base = OTHER; note = 5-methyl
  modified_base 22: mod_base = OTHER; note = bicyclic nucleic acid (BNA)
  source 1..22: mol_type = other DNA
tcaaggaagatggcatttctag

SEQ ID NO: 8939 - DNA, 16 bp, synthetic construct
  misc_feature 1..16: note = Description of Artificial Sequence: Synthetic Antisense oligonucleotide
  modified_base 2: mod_base = OTHER; note = 5-methyl
  modified_base 14: mod_base = OTHER; note = 5-methyl
  modified_base 16: mod_base = OTHER; note = bicyclic nucleic acid (BNA)
  source 1..16: mol_type = other DNA
tcaaggaagatggcat

SEQ ID NO: 8940 - DNA, 15 bp, synthetic construct
  misc_feature 1..15: note = Description of Artificial Sequence: Synthetic Antisense oligonucleotide
  modified_base 9: mod_base = OTHER; note = 5-methyl
  modified_base 14: mod_base = OTHER; note = 5-methyl
  modified_base 15: mod_base = OTHER; note = bicyclic nucleic acid (BNA)
  source 1..15: mol_type = other DNA
gaagatggcatttct

SEQ ID NO: 8941 - DNA, 21 bp, synthetic construct
  misc_feature 1..21: note = Description of Artificial Sequence: Synthetic Antisense oligonucleotide
  modified_base 2: mod_base = OTHER; note = 5-methyl
  modified_base 14: mod_base = OTHER; note = 5-methyl
  modified_base 19: mod_base = OTHER; note = 5-methyl
  modified_base 21: mod_base = OTHER; note = bicyclic nucleic acid (BNA)
  source 1..21: mol_type = other DNA
tcaaggaagatggcatttcta

SEQ ID NO: 8942 - DNA, 19 bp, synthetic construct
  misc_feature 1..19: note = Description of Artificial Sequence: Synthetic Antisense oligonucleotide
  modified_base 2: mod_base = OTHER; note = 5-methyl
  modified_base 14: mod_base = OTHER; note = 5-methyl
  modified_base 19: mod_base = OTHER; note = 5-methyl
  modified_base 19: mod_base = OTHER; note = bicyclic nucleic acid (BNA)
  source 1..19: mol_type = other DNA
tcaaggaagatggcatttc

SEQ ID NO: 8943 - DNA, 18 bp, synthetic construct
  misc_feature 1..18: note = Description of Artificial Sequence: Synthetic Antisense oligonucleotide
  modified_base 2: mod_base = OTHER; note = 5-methyl
  modified_base 14: mod_base = OTHER; note = 5-methyl
  modified_base 18: mod_base = OTHER; note = bicyclic nucleic acid (BNA)
  source 1..18: mol_type = other DNA
tcaaggaagatggcattt

SEQ ID NO: 8944 - DNA, 17 bp, synthetic construct
  misc_feature 1..17: note = Description of Artificial Sequence: Synthetic Antisense oligonucleotide
  modified_base 2: mod_base = OTHER; note = 5-methyl
  modified_base 14: mod_base = OTHER; note = 5-methyl
  modified_base 17: mod_base = OTHER; note = bicyclic nucleic acid (BNA)
  source 1..17: mol_type = other DNA
tcaaggaagatggcatt

SEQ ID NO: 8945 - DNA, 15 bp, synthetic construct
  misc_feature 1..15: note = Description of Artificial Sequence: Synthetic Antisense oligonucleotide
  modified_base 2: mod_base = OTHER; note = 5-methyl
  modified_base 14: mod_base = OTHER; note = 5-methyl
  modified_base 15: mod_base = OTHER; note = bicyclic nucleic acid (BNA)
  source 1..15: mol_type = other DNA
tcaaggaagatggca

SEQ ID NO: 8946 - DNA, 14 bp, synthetic construct
  misc_feature 1..14: note = Description of Artificial Sequence: Synthetic Antisense oligonucleotide
  modified_base 2: mod_base = OTHER; note = 5-methyl
  modified_base 14: mod_base = OTHER; note = 5-methyl
  modified_base 14: mod_base = OTHER; note = bicyclic nucleic acid (BNA)
  source 1..14: mol_type = other DNA
tcaaggaagatggc

SEQ ID NO: 8947 - DNA, 13 bp, synthetic construct
  misc_feature 1..13: note = Description of Artificial Sequence: Synthetic Antisense oligonucleotide
  modified_base 2: mod_base = OTHER; note = 5-methyl
  modified_base 13: mod_base = OTHER; note = bicyclic nucleic acid (BNA)
  source 1..13: mol_type = other DNA
tcaaggaagatgg

SEQ ID NO: 8948 - DNA, 12 bp, synthetic construct
  misc_feature 1..12: note = Description of Artificial Sequence: Synthetic Antisense oligonucleotide
  modified_base 2: mod_base = OTHER; note = 5-methyl
  modified_base 12: mod_base = OTHER; note = bicyclic nucleic acid (BNA)
  source 1..12: mol_type = other DNA
tcaaggaagatg

SEQ ID NO: 8949 - DNA, 11 bp, synthetic construct
  misc_feature 1..11: note = Description of Artificial Sequence: Synthetic Antisense oligonucleotide
  modified_base 2: mod_base = OTHER; note = 5-methyl
  modified_base 11: mod_base = OTHER; note = bicyclic nucleic acid (BNA)
  source 1..11: mol_type = other DNA
tcaaggaagat

SEQ ID NO: 8950 - DNA, 10 bp, synthetic construct
  misc_feature 1..10: note = Description of Artificial Sequence: Synthetic Antisense oligonucleotide
  modified_base 2: mod_base = OTHER; note = 5-methyl
  modified_base 10: mod_base = OTHER; note = bicyclic nucleic acid (BNA)
  source 1..10: mol_type = other DNA
tcaaggaaga

SEQ ID NO: 8951 - skipped

SEQ ID NO: 8952 - DNA, 21 bp, synthetic construct
  misc_feature 1..21: note = Description of Artificial Sequence: Synthetic Antisense oligonucleotide
  modified_base 1: mod_base = OTHER; note = 5-methyl
  modified_base 13: mod_base = OTHER; note = 5-methyl
  modified_base 18: mod_base = OTHER; note = 5-methyl
  modified_base 21: mod_base = OTHER; note = bicyclic nucleic acid (BNA)
  source 1..21: mol_type = other DNA
caaggaagatggcatttctag

SEQ ID NO: 8953 - DNA, 20 bp, synthetic construct
  misc_feature 1..20: note = Description of Artificial Sequence: Synthetic Antisense oligonucleotide
  modified_base 1: mod_base = OTHER; note = 5-methyl
  modified_base 13: mod_base = OTHER; note = 5-methyl
  modified_base 18: mod_base = OTHER; note = 5-methyl
  modified_base 20: mod_base = OTHER; note = bicyclic nucleic acid (BNA)
  source 1..20: mol_type = other DNA
caaggaagatggcatttcta

SEQ ID NO: 8954 - DNA, 19 bp, synthetic construct
  misc_feature 1..19: note = Description of Artificial Sequence: Synthetic Antisense oligonucleotide
  modified_base 1: mod_base = OTHER; note = 5-methyl
  modified_base 13: mod_base = OTHER; note = 5-methyl
  modified_base 18: mod_base = OTHER; note = 5-methyl
  modified_base 19: mod_base = OTHER; note = bicyclic nucleic acid (BNA)
  source 1..19: mol_type = other DNA
caaggaagatggcatttct

SEQ ID NO: 8955 - DNA, 18 bp, synthetic construct
  misc_feature 1..18: note = Description of Artificial Sequence: Synthetic Antisense oligonucleotide
  modified_base 1: mod_base = OTHER; note = 5-methyl
  modified_base 13: mod_base = OTHER; note = 5-methyl
  modified_base 18: mod_base = OTHER; note = 5-methyl
  modified_base 18: mod_base = OTHER; note = bicyclic nucleic acid (BNA)
  source 1..18: mol_type = other DNA
caaggaagatggcatttc

SEQ ID NO: 8956 - DNA, 17 bp, synthetic construct
  misc_feature 1..17: note = Description of Artificial Sequence: Synthetic Antisense oligonucleotide
  modified_base 1: mod_base = OTHER; note = 5-methyl
  modified_base 13: mod_base = OTHER; note = 5-methyl
  modified_base 17: mod_base = OTHER; note = bicyclic nucleic acid (BNA)
  source 1..17: mol_type = other DNA
caaggaagatggcattt

SEQ ID NO: 8957 - DNA, 16 bp, synthetic construct
  misc_feature 1..16: note = Description of Artificial Sequence: Synthetic Antisense oligonucleotide
  modified_base 1: mod_base = OTHER; note = 5-methyl
  modified_base 13: mod_base = OTHER; note = 5-methyl
  modified_base 16: mod_base = OTHER; note = bicyclic nucleic acid (BNA)
  source 1..16: mol_type = other DNA
caaggaagatggcatt

SEQ ID NO: 8958 - DNA, 15 bp, synthetic construct
  misc_feature 1..15: note = Description of Artificial Sequence: Synthetic Antisense oligonucleotide
  modified_base 1: mod_base = OTHER; note = 5-methyl
  modified_base 13: mod_base = OTHER; note = 5-methyl
  modified_base 15: mod_base = OTHER; note = bicyclic nucleic acid (BNA)
  source 1..15: mol_type = other DNA
caaggaagatggcat

SEQ ID NO: 8959 - DNA, 14 bp, synthetic construct
  misc_feature 1..14: note = Description of Artificial Sequence: Synthetic Antisense oligonucleotide
  modified_base 1: mod_base = OTHER; note = 5-methyl
  modified_base 13: mod_base = OTHER; note = 5-methyl
  modified_base 14: mod_base = OTHER; note = bicyclic nucleic acid (BNA)
  source 1..14: mol_type = other DNA
caaggaagatggca

SEQ ID NO: 8960 - DNA, 13 bp, synthetic construct
  misc_feature 1..13: note = Description of Artificial Sequence: Synthetic Antisense oligonucleotide
  modified_base 1: mod_base = OTHER; note = 5-methyl
  modified_base 13: mod_base = OTHER; note = 5-methyl
  modified_base 13: mod_base = OTHER; note = bicyclic nucleic acid (BNA)
  source 1..13: mol_type = other DNA
caaggaagatggc

SEQ ID NO: 8961 - DNA, 12 bp, synthetic construct
  misc_feature 1..12: note = Description of Artificial Sequence: Synthetic Antisense oligonucleotide
  modified_base 1: mod_base = OTHER; note = 5-methyl
  modified_base 12: mod_base = OTHER; note = bicyclic nucleic acid (BNA)
  source 1..12: mol_type = other DNA
caaggaagatgg

SEQ ID NO: 8962 - DNA, 11 bp, synthetic construct
  misc_feature 1..11: note = Description of Artificial Sequence: Synthetic Antisense oligonucleotide
  modified_base 1: mod_base = OTHER; note = 5-methyl
  modified_base 11: mod_base = OTHER; note = bicyclic nucleic acid (BNA)
  source 1..11: mol_type = other DNA
caaggaagatg

SEQ ID NO: 8963 - DNA, 10 bp, synthetic construct
  misc_feature 1..10: note = Description of Artificial Sequence: Synthetic Antisense oligonucleotide
  modified_base 1: mod_base = OTHER; note = 5-methyl
  modified_base 10: mod_base = OTHER; note = bicyclic nucleic acid (BNA)
  source 1..10: mol_type = other DNA
caaggaagat

SEQ ID NO: 8964 - DNA, 20 bp, synthetic construct
  misc_feature 1..20: note = Description of Artificial Sequence: Synthetic Antisense oligonucleotide
  modified_base 12: mod_base = OTHER; note = 5-methyl
  modified_base 17: mod_base = OTHER; note = 5-methyl
  modified_base 20: mod_base = OTHER; note = bicyclic nucleic acid (BNA)
  source 1..20: mol_type = other DNA
aaggaagatggcatttctag

SEQ ID NO: 8965 - DNA, 19 bp, synthetic construct
  misc_feature 1..19: note = Description of Artificial Sequence: Synthetic Antisense oligonucleotide
  modified_base 12: mod_base = OTHER; note = 5-methyl
  modified_base 17: mod_base = OTHER; note = 5-methyl
  modified_base 19: mod_base = OTHER; note = bicyclic nucleic acid (BNA)
  source 1..19: mol_type = other DNA
aaggaagatggcatttcta

SEQ ID NO: 8966 - DNA, 18 bp, synthetic construct
  misc_feature 1..18: note = Description of Artificial Sequence: Synthetic Antisense oligonucleotide
  modified_base 12: mod_base = OTHER; note = 5-methyl
  modified_base 17: mod_base = OTHER; note = 5-methyl
  modified_base 18: mod_base = OTHER; note = bicyclic nucleic acid (BNA)
  source 1..18: mol_type = other DNA
aaggaagatggcatttct

SEQ ID NO: 8967 - DNA, 17 bp, synthetic construct
  misc_feature 1..17: note = Description of Artificial Sequence: Synthetic Antisense oligonucleotide
  modified_base 12: mod_base = OTHER; note = 5-methyl
  modified_base 17: mod_base = OTHER; note = 5-methyl
  modified_base 17: mod_base = OTHER; note = bicyclic nucleic acid (BNA)
  source 1..17: mol_type = other DNA
aaggaagatggcatttc

SEQ ID NO: 8968 - DNA, 16 bp, synthetic construct
  misc_feature 1..16: note = Description of Artificial Sequence: Synthetic Antisense oligonucleotide
  modified_base 12: mod_base = OTHER; note = 5-methyl
  modified_base 16: mod_base = OTHER; note = bicyclic nucleic acid (BNA)
  source 1..16: mol_type = other DNA
aaggaagatggcattt

SEQ ID NO: 8969 - DNA, 15 bp, synthetic construct
  misc_feature 1..15: note = Description of Artificial Sequence: Synthetic Antisense oligonucleotide
  modified_base 12: mod_base = OTHER; note = 5-methyl
  modified_base 15: mod_base = OTHER; note = bicyclic nucleic acid (BNA)
  source 1..15: mol_type = other DNA
aaggaagatggcatt

SEQ ID NO: 8970 - DNA, 14 bp, synthetic construct
  misc_feature 1..14: note = Description of Artificial Sequence: Synthetic Antisense oligonucleotide
  modified_base 12: mod_base = OTHER; note = 5-methyl
  modified_base 14: mod_base = OTHER; note = bicyclic nucleic acid (BNA)
  source 1..14: mol_type = other DNA
aaggaagatggcat

SEQ ID NO: 8971 - DNA, 13 bp, synthetic construct
  misc_feature 1..13: note = Description of Artificial Sequence: Synthetic Antisense oligonucleotide
  modified_base 12: mod_base = OTHER; note = 5-methyl
  modified_base 13: mod_base = OTHER; note = bicyclic nucleic acid (BNA)
  source 1..13: mol_type = other DNA
aaggaagatggca

SEQ ID NO: 8972 - DNA, 12 bp, synthetic construct
  misc_feature 1..12: note = Description of Artificial Sequence: Synthetic Antisense oligonucleotide
  modified_base 12: mod_base = OTHER; note = 5-methyl
  modified_base 12: mod_base = OTHER; note = bicyclic nucleic acid (BNA)
  source 1..12: mol_type = other DNA
aaggaagatggc

SEQ ID NO: 8973 - DNA, 19 bp, synthetic construct
  misc_feature 1..19: note = Description of Artificial Sequence: Synthetic Antisense oligonucleotide
  modified_base 11: mod_base = OTHER; note = 5-methyl
  modified_base 16: mod_base = OTHER; note = 5-methyl
  modified_base 19: mod_base = OTHER; note = bicyclic nucleic acid (BNA)
  source 1..19: mol_type = other DNA
aggaagatggcatttctag

SEQ ID NO: 8974 - DNA, 18 bp, synthetic construct
  misc_feature 1..18: note = Description of Artificial Sequence: Synthetic Antisense oligonucleotide
  modified_base 11: mod_base = OTHER; note = 5-methyl
  modified_base 16: mod_base = OTHER; note = 5-methyl
  modified_base 18: mod_base = OTHER; note = bicyclic nucleic acid (BNA)
  source 1..18: mol_type = other DNA
aggaagatggcatttcta

SEQ ID NO: 8975 - DNA, 17 bp, synthetic construct
  misc_feature 1..17: note = Description of Artificial Sequence: Synthetic Antisense oligonucleotide
  modified_base 11: mod_base = OTHER; note = 5-methyl
  modified_base 16: mod_base = OTHER; note = 5-methyl
  modified_base 17: mod_base = OTHER; note = bicyclic nucleic acid (BNA)
  source 1..17: mol_type = other DNA
aggaagatggcatttct

SEQ ID NO: 8976 - DNA, 16 bp, synthetic construct
  misc_feature 1..16: note = Description of Artificial Sequence: Synthetic Antisense oligonucleotide
  modified_base 11: mod_base = OTHER; note = 5-methyl
  modified_base 16: mod_base = OTHER; note = 5-methyl
  modified_base 16: mod_base = OTHER; note = bicyclic nucleic acid (BNA)
  source 1..16: mol_type = other DNA
aggaagatggcatttc

SEQ ID NO: 8977 - DNA, 15 bp, synthetic construct
  misc_feature 1..15: note = Description of Artificial Sequence: Synthetic Antisense oligonucleotide
  modified_base 11: mod_base = OTHER; note = 5-methyl
  modified_base 15: mod_base = OTHER; note = bicyclic nucleic acid (BNA)
  source 1..15: mol_type = other DNA
aggaagatggcattt

SEQ ID NO: 8978 - DNA, 14 bp, synthetic construct
  misc_feature 1..14: note = Description of Artificial Sequence: Synthetic Antisense oligonucleotide
  modified_base 11: mod_base = OTHER; note = 5-methyl
  modified_base 14: mod_base = OTHER; note = bicyclic nucleic acid (BNA)
  source 1..14: mol_type = other DNA
aggaagatggcatt

SEQ ID NO: 8979 - DNA, 13 bp, synthetic construct
  misc_feature 1..13: note = Description of Artificial Sequence: Synthetic Antisense oligonucleotide
  modified_base 11: mod_base = OTHER; note = 5-methyl
  modified_base 13: mod_base = OTHER; note = bicyclic nucleic acid (BNA)
  source 1..13: mol_type = other DNA
aggaagatggcat

SEQ ID NO: 8980 - DNA, 12 bp, synthetic construct
  misc_feature 1..12: note = Description of Artificial Sequence: Synthetic Antisense oligonucleotide
  modified_base 11: mod_base = OTHER; note = 5-methyl
  modified_base 12: mod_base = OTHER; note = bicyclic nucleic acid (BNA)
  source 1..12: mol_type = other DNA
aggaagatggca

SEQ ID NO: 8981 - DNA, 18 bp, synthetic construct
  misc_feature 1..18: note = Description of Artificial Sequence: Synthetic Antisense oligonucleotide
  modified_base 10: mod_base = OTHER; note = 5-methyl
  modified_base 15: mod_base = OTHER; note = 5-methyl
  modified_base 18: mod_base = OTHER; note = bicyclic nucleic acid (BNA)
  source 1..18: mol_type = other DNA
ggaagatggcatttctag

SEQ ID NO: 8982 - DNA, 17 bp, synthetic construct
  misc_feature 1..17: note = Description of Artificial Sequence: Synthetic Antisense oligonucleotide
  modified_base 10: mod_base = OTHER; note = 5-methyl
  modified_base 15: mod_base = OTHER; note = 5-methyl
  modified_base 17: mod_base = OTHER; note = bicyclic nucleic acid (BNA)
  source 1..17: mol_type = other DNA
ggaagatggcatttcta

SEQ ID NO: 8983 - DNA, 16 bp, synthetic construct
  misc_feature 1..16: note = Description of Artificial Sequence: Synthetic Antisense oligonucleotide
  modified_base 10: mod_base = OTHER; note = 5-methyl
  modified_base 15: mod_base = OTHER; note = 5-methyl
  modified_base 16: mod_base = OTHER; note = bicyclic nucleic acid (BNA)
  source 1..16: mol_type = other DNA
ggaagatggcatttct

SEQ ID NO: 8984 - DNA, 15 bp, synthetic construct
  misc_feature 1..15: note = Description of Artificial Sequence: Synthetic Antisense oligonucleotide
  modified_base 10: mod_base = OTHER; note = 5-methyl
  modified_base 15: mod_base = OTHER; note = 5-methyl
  modified_base 15: mod_base = OTHER; note = bicyclic nucleic acid (BNA)
  source 1..15: mol_type = other DNA
ggaagatggcatttc

SEQ ID NO: 8985 - DNA, 14 bp, synthetic construct
  misc_feature 1..14: note = Description of Artificial Sequence: Synthetic Antisense oligonucleotide
  modified_base 10: mod_base = OTHER; note = 5-methyl
  modified_base 14: mod_base = OTHER; note = bicyclic nucleic acid (BNA)
  source 1..14: mol_type = other DNA
ggaagatggcattt

SEQ ID NO: 8986 - DNA, 13 bp, synthetic construct
  misc_feature 1..13: note = Description of Artificial Sequence: Synthetic Antisense oligonucleotide
  modified_base 10: mod_base = OTHER; note = 5-methyl
  modified_base 13: mod_base = OTHER; note = bicyclic nucleic acid (BNA)
  source 1..13: mol_type = other DNA
ggaagatggcatt

SEQ ID NO: 8987 - DNA, 12 bp, synthetic construct
  misc_feature 1..12: note = Description of Artificial Sequence: Synthetic Antisense oligonucleotide
  modified_base 10: mod_base = OTHER; note = 5-methyl
  modified_base 12: mod_base = OTHER; note = bicyclic nucleic acid (BNA)
  source 1..12: mol_type = other DNA
ggaagatggcat

SEQ ID NO: 8988 - DNA, 11 bp, synthetic construct
  misc_feature 1..11: note = Description of Artificial Sequence: Synthetic Antisense oligonucleotide
  modified_base 10: mod_base = OTHER; note = 5-methyl
  modified_base 11: mod_base = OTHER; note = bicyclic nucleic acid (BNA)
  source 1..11: mol_type = other DNA
ggaagatggca

SEQ ID NO: 8989 - DNA, 10 bp, synthetic construct
  misc_feature 1..10: note = Description of Artificial Sequence: Synthetic Antisense oligonucleotide
  modified_base 10: mod_base = OTHER; note = 5-methyl
  modified_base 10: mod_base = OTHER; note = bicyclic nucleic acid (BNA)
  source 1..10: mol_type = other DNA
ggaagatggc

SEQ ID NO: 8990 - DNA, 17 bp, synthetic construct
  misc_feature 1..17: note = Description of Artificial Sequence: Synthetic Antisense oligonucleotide
  modified_base 9: mod_base = OTHER; note = 5-methyl
  modified_base 14: mod_base = OTHER; note = 5-methyl
  modified_base 17: mod_base = OTHER; note = bicyclic nucleic acid (BNA)
  source 1..17: mol_type = other DNA
gaagatggcatttctag

SEQ ID NO: 8991 - DNA, 16 bp, synthetic construct
  misc_feature 1..16: note = Description of Artificial Sequence: Synthetic Antisense oligonucleotide
  modified_base 9: mod_base = OTHER; note = 5-methyl
  modified_base 14: mod_base = OTHER; note = 5-methyl
  modified_base 16: mod_base = OTHER; note = bicyclic nucleic acid (BNA)
  source 1..16: mol_type = other DNA
gaagatggcatttcta

SEQ ID NO: 8992 - DNA, 14 bp, synthetic construct
  misc_feature 1..14: note = Description of Artificial Sequence: Synthetic Antisense oligonucleotide
  modified_base 9: mod_base = OTHER; note = 5-methyl
  modified_base 14: mod_base = OTHER; note = 5-methyl
  modified_base 14: mod_base = OTHER; note = bicyclic nucleic acid (BNA)
  source 1..14: mol_type = other DNA
gaagatggcatttc

SEQ ID NO: 8993 - DNA, 13 bp, synthetic construct
  misc_feature 1..13: note = Description of Artificial Sequence: Synthetic Antisense oligonucleotide
  modified_base 9: mod_base = OTHER; note = 5-methyl
  modified_base 13: mod_base = OTHER; note = bicyclic nucleic acid (BNA)
  source 1..13: mol_type = other DNA
gaagatggcattt

SEQ ID NO: 8994 - DNA, 12 bp, synthetic construct
  misc_feature 1..12: note = Description of Artificial Sequence: Synthetic Antisense oligonucleotide
  modified_base 9: mod_base = OTHER; note = 5-methyl
  modified_base 12: mod_base = OTHER; note = bicyclic nucleic acid (BNA)
  source 1..12: mol_type = other DNA
gaagatggcatt

SEQ ID NO: 8995 - DNA, 11 bp, synthetic construct
  misc_feature 1..11: note = Description of Artificial Sequence: Synthetic Antisense oligonucleotide
  modified_base 9: mod_base = OTHER; note = 5-methyl
  modified_base 11: mod_base = OTHER; note = bicyclic nucleic acid (BNA)
  source 1..11: mol_type = other DNA
gaagatggcat

SEQ ID NO: 8996 - DNA, 10 bp, synthetic construct
  misc_feature 1..10: note = Description of Artificial Sequence: Synthetic Antisense oligonucleotide
  modified_base 9: mod_base = OTHER; note = 5-methyl
  modified_base 10: mod_base = OTHER; note = bicyclic nucleic acid (BNA)
  source 1..10: mol_type = other DNA
gaagatggca

SEQ ID NO: 8997 - skipped

SEQ ID NO: 8998 - DNA, 16 bp, synthetic construct
  misc_feature 1..16: note = Description of Artificial Sequence: Synthetic Antisense oligonucleotide
  modified_base 8: mod_base = OTHER; note = 5-methyl
  modified_base 13: mod_base = OTHER; note = 5-methyl
  modified_base 16: mod_base = OTHER; note = bicyclic nucleic acid (BNA)
  source 1..16: mol_type = other DNA
aagatggcatttctag

SEQ ID NO: 8999 - DNA, 15 bp, synthetic construct
  misc_feature 1..15: note = Description of Artificial Sequence: Synthetic Antisense oligonucleotide
  modified_base 8: mod_base = OTHER; note = 5-methyl
  modified_base 13: mod_base = OTHER; note = 5-methyl
  modified_base 15: mod_base = OTHER; note = bicyclic nucleic acid (BNA)
  source 1..15: mol_type = other DNA
aagatggcatttcta

SEQ ID NO: 9000 - DNA, 14 bp, synthetic construct
  misc_feature 1..14: note = Description of Artificial Sequence: Synthetic Antisense oligonucleotide
  modified_base 8: mod_base = OTHER; note = 5-methyl
  modified_base 13: mod_base = OTHER; note = 5-methyl
  modified_base 14: mod_base = OTHER; note = bicyclic nucleic acid (BNA)
  source 1..14: mol_type = other DNA
aagatggcatttct

SEQ ID NO: 9001 - DNA, 13 bp, synthetic construct
  misc_feature 1..13: note = Description of Artificial Sequence: Synthetic Antisense oligonucleotide
  modified_base 8: mod_base = OTHER; note = 5-methyl
  modified_base 13: mod_base = OTHER; note = 5-methyl
  modified_base 13: mod_base = OTHER; note = bicyclic nucleic acid (BNA)
  source 1..13: mol_type = other DNA
aagatggcatttc

SEQ ID NO: 9002 - DNA, 12 bp, synthetic construct
  misc_feature 1..12: note = Description of Artificial Sequence: Synthetic Antisense oligonucleotide
  modified_base 8: mod_base = OTHER; note = 5-methyl
  modified_base 12: mod_base = OTHER; note = bicyclic nucleic acid (BNA)
  source 1..12: mol_type = other DNA
aagatggcattt

SEQ ID NO: 9003 - DNA, 11 bp, synthetic construct
  misc_feature 1..11: note = Description of Artificial Sequence: Synthetic Antisense oligonucleotide
  modified_base 8: mod_base = OTHER; note = 5-methyl
  modified_base 11: mod_base = OTHER; note = bicyclic nucleic acid (BNA)
  source 1..11: mol_type = other DNA
aagatggcatt

SEQ ID NO: 9004 - DNA, 10 bp, synthetic construct
  misc_feature 1..10: note = Description of Artificial Sequence: Synthetic Antisense oligonucleotide
  modified_base 8: mod_base = OTHER; note = 5-methyl
  modified_base 10: mod_base = OTHER; note = bicyclic nucleic acid (BNA)
  source 1..10: mol_type = other DNA
aagatggcat

SEQ ID NO: 9005-9006 - skipped (2 entries)

SEQ ID NO: 9007 - DNA, 15 bp, synthetic construct
  misc_feature 1..15: note = Description of Artificial Sequence: Synthetic Antisense oligonucleotide
  modified_base 7: mod_base = OTHER; note = 5-methyl
  modified_base 12: mod_base = OTHER; note = 5-methyl
  modified_base 15: mod_base = OTHER; note = bicyclic nucleic acid (BNA)
  source 1..15: mol_type = other DNA
agatggcatttctag

SEQ ID NO: 9008 - DNA, 14 bp, synthetic construct
  misc_feature 1..14: note = Description of Artificial Sequence: Synthetic Antisense oligonucleotide
  modified_base 7: mod_base = OTHER; note = 5-methyl
  modified_base 12: mod_base = OTHER; note = 5-methyl
  modified_base 14: mod_base = OTHER; note = bicyclic nucleic acid (BNA)
  source 1..14: mol_type = other DNA
agatggcatttcta

SEQ ID NO: 9009 - DNA, 13 bp, synthetic construct
  misc_feature 1..13: note = Description of Artificial Sequence: Synthetic Antisense oligonucleotide
  modified_base 7: mod_base = OTHER; note = 5-methyl
  modified_base 12: mod_base = OTHER; note = 5-methyl
  modified_base 13: mod_base = OTHER; note = bicyclic nucleic acid (BNA)
  source 1..13: mol_type = other DNA
agatggcatttct

SEQ ID NO: 9010 - DNA, 12 bp, synthetic construct
  misc_feature 1..12: note = Description of Artificial Sequence: Synthetic Antisense oligonucleotide
  modified_base 7: mod_base = OTHER; note = 5-methyl
  modified_base 12: mod_base = OTHER; note = 5-methyl
  modified_base 12: mod_base = OTHER; note = bicyclic nucleic acid (BNA)
  source 1..12: mol_type = other DNA
agatggcatttc

SEQ ID NO: 9011 - DNA, 11 bp, synthetic construct
  misc_feature 1..11: note = Description of Artificial Sequence: Synthetic Antisense oligonucleotide
  modified_base 7: mod_base = OTHER; note = 5-methyl
  modified_base 11: mod_base = OTHER; note = bicyclic nucleic acid (BNA)
  source 1..11: mol_type = other DNA
agatggcattt

SEQ ID NO: 9012 - DNA, 10 bp, synthetic construct
  misc_feature 1..10: note = Description of Artificial Sequence: Synthetic Antisense oligonucleotide
  modified_base 7: mod_base = OTHER; note = 5-methyl
  modified_base 10: mod_base = OTHER; note = bicyclic nucleic acid (BNA)
  source 1..10: mol_type = other DNA
agatggcatt

SEQ ID NO: 9013-9014 - skipped (2 entries)

SEQ ID NO: 9015 - DNA, 30 bp, synthetic construct; identical to SEQ ID NO: 8
  misc_feature 1..30: note = Description of Artificial Sequence: Synthetic Antisense oligonucleotide
  modified_base 1: mod_base = OTHER; note = 5-methyl
  modified_base 3..4: mod_base = OTHER; note = 5-methyl
  modified_base 7: mod_base = OTHER; note = 5-methyl
  modified_base 10: mod_base = OTHER; note = 5-methyl
  modified_base 22: mod_base = OTHER; note = 5-methyl
  modified_base 27: mod_base = OTHER; note = 5-methyl
  modified_base 30: mod_base = OTHER; note = bicyclic nucleic acid (BNA)
  source 1..30: mol_type = other DNA

SEQ ID NO: 9016 - DNA, 29 bp, synthetic construct
  misc_feature 1..29: note = Description of Artificial Sequence: Synthetic Antisense oligonucleotide
  modified_base 1: mod_base = OTHER; note = 5-methyl
  modified_base 3..4: mod_base = OTHER; note = 5-methyl
  modified_base 7: mod_base = OTHER; note = 5-methyl
  modified_base 10: mod_base = OTHER; note = 5-methyl
  modified_base 22: mod_base = OTHER; note = 5-methyl
  modified_base 27: mod_base = OTHER; note = 5-methyl
  modified_base 29: mod_base = OTHER; note = bicyclic nucleic acid (BNA)
  source 1..29: mol_type = other DNA
ctccaacatcaaggaagatggcatttcta

SEQ ID NO: 9017 - DNA, 28 bp, synthetic construct
  misc_feature 1..28: note = Description of Artificial Sequence: Synthetic Antisense oligonucleotide
  modified_base 1: mod_base = OTHER; note = 5-methyl
  modified_base 3..4: mod_base = OTHER; note = 5-methyl
  modified_base 7: mod_base = OTHER; note = 5-methyl
  modified_base 10: mod_base = OTHER; note = 5-methyl
  modified_base 22: mod_base = OTHER; note = 5-methyl
  modified_base 27: mod_base = OTHER; note = 5-methyl
  modified_base 28: mod_base = OTHER; note = bicyclic nucleic acid (BNA)
  source 1..28: mol_type = other DNA
ctccaacatcaaggaagatggcatttct

SEQ ID NO: 9018 - DNA, 27 bp, synthetic construct
  misc_feature 1..27: note = Description of Artificial Sequence: Synthetic Antisense oligonucleotide
  modified_base 1: mod_base = OTHER; note = 5-methyl
  modified_base 3..4: mod_base = OTHER; note = 5-methyl
  modified_base 7: mod_base = OTHER; note = 5-methyl
  modified_base 10: mod_base = OTHER; note = 5-methyl
  modified_base 22: mod_base = OTHER; note = 5-methyl
  modified_base 27: mod_base = OTHER; note = 5-methyl
  modified_base 27: mod_base = OTHER; note = bicyclic nucleic acid (BNA)
  source 1..27: mol_type = other DNA
ctccaacatcaaggaagatggcatttc

SEQ ID NO: 9019 - DNA, 26 bp, synthetic construct
  misc_feature 1..26: note = Description of Artificial Sequence: Synthetic Antisense oligonucleotide
  modified_base 1: mod_base = OTHER; note = 5-methyl
  modified_base 3..4: mod_base = OTHER; note = 5-methyl
  modified_base 7: mod_base = OTHER; note = 5-methyl
  modified_base 10: mod_base = OTHER; note = 5-methyl
  modified_base 22: mod_base = OTHER; note = 5-methyl
  modified_base 26: mod_base = OTHER; note = bicyclic nucleic acid (BNA)
  source 1..26: mol_type = other DNA
ctccaacatcaaggaagatggcattt

SEQ ID NO: 9020 - DNA, 25 bp, synthetic construct
  misc_feature 1..25: note = Description of Artificial Sequence: Synthetic Antisense oligonucleotide
  modified_base 1: mod_base = OTHER; note = 5-methyl
  modified_base 3..4: mod_base = OTHER; note = 5-methyl
  modified_base 7: mod_base = OTHER; note = 5-methyl
  modified_base 10: mod_base = OTHER; note = 5-methyl
  modified_base 22: mod_base = OTHER; note = 5-methyl
  modified_base 25: mod_base = OTHER; note = bicyclic nucleic acid (BNA)
  source 1..25: mol_type = other DNA
ctccaacatcaaggaagatggcatt

SEQ ID NO: 9021 - DNA, 24 bp, synthetic construct
  misc_feature 1..24: note = Description of Artificial Sequence: Synthetic Antisense oligonucleotide
  modified_base 1: mod_base = OTHER; note = 5-methyl
  modified_base 3..4: mod_base = OTHER; note = 5-methyl
  modified_base 7: mod_base = OTHER; note = 5-methyl
  modified_base 10: mod_base = OTHER; note = 5-methyl
  modified_base 22: mod_base = OTHER; note = 5-methyl
  modified_base 24: mod_base = OTHER; note = bicyclic nucleic acid (BNA)
  source 1..24: mol_type = other DNA
ctccaacatcaaggaagatggcat

SEQ ID NO: 9022 - DNA, 23 bp, synthetic construct
  misc_feature 1..23: note = Description of Artificial Sequence: Synthetic Antisense oligonucleotide
  modified_base 1: mod_base = OTHER; note = 5-methyl
  modified_base 3..4: mod_base = OTHER; note = 5-methyl
  modified_base 7: mod_base = OTHER; note = 5-methyl
  modified_base 10: mod_base = OTHER; note = 5-methyl
  modified_base 22: mod_base = OTHER; note = 5-methyl
  modified_base 23: mod_base = OTHER; note = bicyclic nucleic acid (BNA)
  source 1..23: mol_type = other DNA
ctccaacatcaaggaagatggca

SEQ ID NO: 9023 - DNA, 22 bp, synthetic construct
  misc_feature 1..22: note = Description of Artificial Sequence: Synthetic Antisense oligonucleotide
  modified_base 1: mod_base = OTHER; note = 5-methyl
  modified_base 3..4: mod_base = OTHER; note = 5-methyl
  modified_base 7: mod_base = OTHER; note = 5-methyl
  modified_base 10: mod_base = OTHER; note = 5-methyl
  modified_base 22: mod_base = OTHER; note = 5-methyl
  modified_base 22: mod_base = OTHER; note = bicyclic nucleic acid (BNA)
  source 1..22: mol_type = other DNA
ctccaacatcaaggaagatggc

SEQ ID NO: 9024 - DNA, 21 bp, synthetic construct
  misc_feature 1..21: note = Description of Artificial Sequence: Synthetic Antisense oligonucleotide
  modified_base 1: mod_base = OTHER; note = 5-methyl
  modified_base 3..4: mod_base = OTHER; note = 5-methyl
  modified_base 7: mod_base = OTHER; note = 5-methyl
  modified_base 10: mod_base = OTHER; note = 5-methyl
  modified_base 21: mod_base = OTHER; note = bicyclic nucleic acid (BNA)
  source 1..21: mol_type = other DNA
ctccaacatcaaggaagatgg

SEQ ID NO: 9025 - DNA, 20 bp, synthetic construct
  misc_feature 1..20: note = Description of Artificial Sequence: Synthetic Antisense oligonucleotide
  modified_base 1: mod_base = OTHER; note = 5-methyl
  modified_base 3..4: mod_base = OTHER; note = 5-methyl
  modified_base 7: mod_base = OTHER; note = 5-methyl
  modified_base 10: mod_base = OTHER; note = 5-methyl
  modified_base 20: mod_base = OTHER; note = bicyclic nucleic acid (BNA)
  source 1..20: mol_type = other DNA
ctccaacatcaaggaagatg

SEQ ID NO: 9026 - DNA, 19 bp, synthetic construct
  misc_feature 1..19: note = Description of Artificial Sequence: Synthetic Antisense oligonucleotide
  modified_base 1: mod_base = OTHER; note = 5-methyl
  modified_base 3..4: mod_base = OTHER; note = 5-methyl
  modified_base 7: mod_base = OTHER; note = 5-methyl
  modified_base 10: mod_base = OTHER; note = 5-methyl
  modified_base 19: mod_base = OTHER; note = bicyclic nucleic acid (BNA)
  source 1..19: mol_type = other DNA
ctccaacatcaaggaagat

SEQ ID NO: 9027 - DNA, 18 bp, synthetic construct
  misc_feature 1..18: note = Description of Artificial Sequence: Synthetic Antisense oligonucleotide
  modified_base 1: mod_base = OTHER; note = 5-methyl
  modified_base 3..4: mod_base = OTHER; note = 5-methyl
  modified_base 7: mod_base = OTHER; note = 5-methyl
  modified_base 10: mod_base = OTHER; note = 5-methyl
  modified_base 18: mod_base = OTHER; note = bicyclic nucleic acid (BNA)
  source 1..18: mol_type = other DNA
ctccaacatcaaggaaga

SEQ ID NO: 9028 - DNA, 17 bp, synthetic construct
  misc_feature 1..17: note = Description of Artificial Sequence: Synthetic Antisense oligonucleotide
  modified_base 1: mod_base = OTHER; note = 5-methyl
  modified_base 3..4: mod_base = OTHER; note = 5-methyl
  modified_base 7: mod_base = OTHER; note = 5-methyl
  modified_base 10: mod_base = OTHER; note = 5-methyl
  modified_base 17: mod_base = OTHER; note = bicyclic nucleic acid (BNA)
  source 1..17: mol_type = other DNA
ctccaacatcaaggaag

SEQ ID NO: 9029 - DNA, 29 bp, synthetic construct
  misc_feature 1..29: note = Description of Artificial Sequence: Synthetic Antisense oligonucleotide
  modified_base 2..3: mod_base = OTHER; note = 5-methyl
  modified_base 6: mod_base = OTHER; note = 5-methyl
  modified_base 9: mod_base = OTHER; note = 5-methyl
  modified_base 21: mod_base = OTHER; note = 5-methyl
  modified_base 26: mod_base = OTHER; note = 5-methyl
  modified_base 29: mod_base = OTHER; note = bicyclic nucleic acid (BNA)
  source 1..29: mol_type = other DNA
tccaacatcaaggaagatggcatttctag

SEQ ID NO: 9030 - DNA, 28 bp, synthetic construct
  misc_feature 1..28: note = Description of Artificial Sequence: Synthetic Antisense oligonucleotide
  modified_base 2..3: mod_base = OTHER; note = 5-methyl
  modified_base 6: mod_base = OTHER; note = 5-methyl
  modified_base 9: mod_base = OTHER; note = 5-methyl
  modified_base 21: mod_base = OTHER; note = 5-methyl
  modified_base 26: mod_base = OTHER; note = 5-methyl
  modified_base 28: mod_base = OTHER; note = bicyclic nucleic acid (BNA)
  source 1..28: mol_type = other DNA
tccaacatcaaggaagatggcatttcta

SEQ ID NO: 9031 - DNA, 27 bp, synthetic construct
  misc_feature 1..27: note = Description of Artificial Sequence: Synthetic Antisense oligonucleotide
  modified_base 2..3: mod_base = OTHER; note = 5-methyl
  modified_base 6: mod_base = OTHER; note = 5-methyl
  modified_base 9: mod_base = OTHER; note = 5-methyl
  modified_base 21: mod_base = OTHER; note = 5-methyl
  modified_base 26: mod_base = OTHER; note = 5-methyl
  modified_base 27: mod_base = OTHER; note = bicyclic nucleic acid (BNA)
  source 1..27: mol_type = other DNA
tccaacatcaaggaagatggcatttct

SEQ ID NO: 9032 - DNA, 26 bp, synthetic construct
  misc_feature 1..26: note = Description of Artificial Sequence: Synthetic Antisense oligonucleotide
  modified_base 2..3: mod_base = OTHER; note = 5-methyl
  modified_base 6: mod_base = OTHER; note = 5-methyl
  modified_base 9: mod_base = OTHER; note = 5-methyl
  modified_base 21: mod_base = OTHER; note = 5-methyl
  modified_base 26: mod_base = OTHER; note = 5-methyl
  modified_base 26: mod_base = OTHER; note = bicyclic nucleic acid (BNA)
  source 1..26: mol_type = other DNA
tccaacatcaaggaagatggcatttc

SEQ ID NO: 9033 - DNA, 25 bp, synthetic construct
  misc_feature 1..25: note = Description of Artificial Sequence: Synthetic Antisense oligonucleotide
  modified_base 2..3: mod_base = OTHER; note = 5-methyl
  modified_base 6: mod_base = OTHER; note = 5-methyl
  modified_base 9: mod_base = OTHER; note = 5-methyl
  modified_base 21: mod_base = OTHER; note = 5-methyl
  modified_base 25: mod_base = OTHER; note = bicyclic nucleic acid (BNA)
  source 1..25: mol_type = other DNA
tccaacatcaaggaagatggcattt

SEQ ID NO: 9034 - DNA, 24 bp, synthetic construct
  misc_feature 1..24: note = Description of Artificial Sequence: Synthetic Antisense oligonucleotide
  modified_base 2..3: mod_base = OTHER; note = 5-methyl
  modified_base 6: mod_base = OTHER; note = 5-methyl
  modified_base 9: mod_base = OTHER; note = 5-methyl
  modified_base 21: mod_base = OTHER; note = 5-methyl
  modified_base 24: mod_base = OTHER; note = bicyclic nucleic acid (BNA)
  source 1..24: mol_type = other DNA
tccaacatcaaggaagatggcatt

SEQ ID NO: 9035 - DNA, 23 bp, synthetic construct
  misc_feature 1..23: note = Description of Artificial Sequence: Synthetic Antisense oligonucleotide
  modified_base 2..3: mod_base = OTHER; note = 5-methyl
  modified_base 6: mod_base = OTHER; note = 5-methyl
  modified_base 9: mod_base = OTHER; note = 5-methyl
  modified_base 21: mod_base = OTHER; note = 5-methyl
  modified_base 23: mod_base = OTHER; note = bicyclic nucleic acid (BNA)
  source 1..23: mol_type = other DNA
tccaacatcaaggaagatggcat

SEQ ID NO: 9036 - DNA, 22 bp, synthetic construct
  misc_feature 1..22: note = Description of Artificial Sequence: Synthetic Antisense oligonucleotide
  modified_base 2..3: mod_base = OTHER; note = 5-methyl
  modified_base 6: mod_base = OTHER; note = 5-methyl
  modified_base 9: mod_base = OTHER; note = 5-methyl
  modified_base 21: mod_base = OTHER; note = 5-methyl
  modified_base 22: mod_base = OTHER; note = bicyclic nucleic acid (BNA)
  source 1..22: mol_type = other DNA
tccaacatcaaggaagatggca

SEQ ID NO: 9037 - DNA, 21 bp, synthetic construct
  misc_feature 1..21: note = Description of Artificial Sequence: Synthetic Antisense oligonucleotide
  modified_base 2..3: mod_base = OTHER; note = 5-methyl
  modified_base 6: mod_base = OTHER; note = 5-methyl
  modified_base 9: mod_base = OTHER; note = 5-methyl
  modified_base 21: mod_base = OTHER; note = 5-methyl
  modified_base 21: mod_base = OTHER; note = bicyclic nucleic acid (BNA)
  source 1..21: mol_type = other DNA
tccaacatcaaggaagatggc

SEQ ID NO: 9038 - DNA, 20 bp, synthetic construct
  misc_feature 1..20: note = Description of Artificial Sequence: Synthetic Antisense oligonucleotide
  modified_base 2..3: mod_base = OTHER; note = 5-methyl
  modified_base 6: mod_base = OTHER; note = 5-methyl
  modified_base 9: mod_base = OTHER; note = 5-methyl
  modified_base 20: mod_base = OTHER; note = bicyclic nucleic acid (BNA)
  source 1..20: mol_type = other DNA
tccaacatcaaggaagatgg

SEQ ID NO: 9039 - DNA, 19 bp, synthetic construct
  misc_feature 1..19: note = Description of Artificial Sequence: Synthetic Antisense oligonucleotide
  modified_base 2..3: mod_base = OTHER; note = 5-methyl
  modified_base 6: mod_base = OTHER; note = 5-methyl
  modified_base 9: mod_base = OTHER; note = 5-methyl
  modified_base 19: mod_base = OTHER; note = bicyclic nucleic acid (BNA)
  source 1..19: mol_type = other DNA
tccaacatcaaggaagatg

SEQ ID NO: 9040 - DNA, 18 bp, synthetic construct
  misc_feature 1..18: note = Description of Artificial Sequence: Synthetic Antisense oligonucleotide
  modified_base 2..3: mod_base = OTHER; note = 5-methyl
  modified_base 6: mod_base = OTHER; note = 5-methyl
  modified_base 9: mod_base = OTHER; note = 5-methyl
  modified_base 18: mod_base = OTHER; note = bicyclic nucleic acid (BNA)
  source 1..18: mol_type = other DNA
tccaacatcaaggaagat

SEQ ID NO: 9041 - DNA, 17 bp, synthetic construct
  misc_feature 1..17: note = Description of Artificial Sequence: Synthetic Antisense oligonucleotide
  modified_base 2..3: mod_base = OTHER; note = 5-methyl
  modified_base 6: mod_base = OTHER; note = 5-methyl
  modified_base 9: mod_base = OTHER; note = 5-methyl
  modified_base 17: mod_base = OTHER; note = bicyclic nucleic acid (BNA)
  source 1..17: mol_type = other DNA
tccaacatcaaggaaga

SEQ ID NO: 9042 - DNA, 16 bp, synthetic construct
  misc_feature 1..16: note = Description of Artificial Sequence: Synthetic Antisense oligonucleotide
  modified_base 2..3: mod_base = OTHER; note = 5-methyl
  modified_base 6: mod_base = OTHER; note = 5-methyl
  modified_base 9: mod_base = OTHER; note = 5-methyl
  modified_base 16: mod_base = OTHER; note = bicyclic nucleic acid (BNA)
  source 1..16: mol_type = other DNA
tccaacatcaaggaag

SEQ ID NO: 9043 - DNA, 28 bp, synthetic construct
  misc_feature 1..28: note = Description of Artificial Sequence: Synthetic Antisense oligonucleotide
  modified_base 1..2: mod_base = OTHER; note = 5-methyl
  modified_base 5: mod_base = OTHER; note = 5-methyl
  modified_base 8: mod_base = OTHER; note = 5-methyl
  modified_base 20: mod_base = OTHER; note = 5-methyl
  modified_base 25: mod_base = OTHER; note = 5-methyl
  modified_base 28: mod_base = OTHER; note = bicyclic nucleic acid (BNA)
  source 1..28: mol_type = other DNA
ccaacatcaaggaagatggcatttctag

SEQ ID NO: 9044 - DNA, 27 bp, synthetic construct
  misc_feature 1..27: note = Description of Artificial Sequence: Synthetic Antisense oligonucleotide
  modified_base 1..2: mod_base = OTHER; note = 5-methyl
  modified_base 5: mod_base = OTHER; note = 5-methyl
  modified_base 8: mod_base = OTHER; note = 5-methyl
  modified_base 20: mod_base = OTHER; note = 5-methyl
  modified_base 25: mod_base = OTHER; note = 5-methyl
  modified_base 27: mod_base = OTHER; note = bicyclic nucleic acid (BNA)
  source 1..27: mol_type = other DNA
ccaacatcaaggaagatggcatttcta

SEQ ID NO: 9045 - DNA, 26 bp, synthetic construct
  misc_feature 1..26: note = Description of Artificial Sequence: Synthetic Antisense oligonucleotide
  modified_base 1..2: mod_base = OTHER; note = 5-methyl
  modified_base 5: mod_base = OTHER; note = 5-methyl
  modified_base 8: mod_base = OTHER; note = 5-methyl
  modified_base 20: mod_base = OTHER; note = 5-methyl
  modified_base 25: mod_base = OTHER; note = 5-methyl
  modified_base 26: mod_base = OTHER; note = bicyclic nucleic acid (BNA)
  source 1..26: mol_type = other DNA
ccaacatcaaggaagatggcatttct

SEQ ID NO: 9046 - DNA, 25 bp, synthetic construct
  misc_feature 1..25: note = Description of Artificial Sequence: Synthetic Antisense oligonucleotide
  modified_base 1..2: mod_base = OTHER; note = 5-methyl
  modified_base 5: mod_base = OTHER; note = 5-methyl
  modified_base 8: mod_base = OTHER; note = 5-methyl
  modified_base 20: mod_base = OTHER; note = 5-methyl
  modified_base 25: mod_base = OTHER; note = 5-methyl
  modified_base 25: mod_base = OTHER; note = bicyclic nucleic acid (BNA)
  source 1..25: mol_type = other DNA
ccaacatcaaggaagatggcatttc

SEQ ID NO: 9047 - DNA, 24 bp, synthetic construct
  misc_feature 1..24: note = Description of Artificial Sequence: Synthetic Antisense oligonucleotide
  modified_base 1..2: mod_base = OTHER; note = 5-methyl
  modified_base 5: mod_base = OTHER; note = 5-methyl
  modified_base 8: mod_base = OTHER; note = 5-methyl
  modified_base 20: mod_base = OTHER; note = 5-methyl
  modified_base 24: mod_base = OTHER; note = bicyclic nucleic acid (BNA)
  source 1..24: mol_type = other DNA
ccaacatcaaggaagatggcattt

SEQ ID NO: 9048 - DNA, 23 bp, synthetic construct
  misc_feature 1..23: note = Description of Artificial Sequence: Synthetic Antisense oligonucleotide
  modified_base 1..2: mod_base = OTHER; note = 5-methyl
  modified_base 5: mod_base = OTHER; note = 5-methyl
  modified_base 8: mod_base = OTHER; note = 5-methyl
  modified_base 20: mod_base = OTHER; note = 5-methyl
  modified_base 23: mod_base = OTHER; note = bicyclic nucleic acid (BNA)
  source 1..23: mol_type = other DNA
ccaacatcaaggaagatggcatt

SEQ ID NO: 9049 - DNA, 22 bp, synthetic construct
  misc_feature 1..22: note = Description of Artificial Sequence: Synthetic Antisense oligonucleotide
  modified_base 1..2: mod_base = OTHER; note = 5-methyl
  modified_base 5: mod_base = OTHER; note = 5-methyl
  modified_base 8: mod_base = OTHER; note = 5-methyl
  modified_base 20: mod_base = OTHER; note = 5-methyl
  modified_base 22: mod_base = OTHER; note = bicyclic nucleic acid (BNA)
  source 1..22: mol_type = other DNA
ccaacatcaaggaagatggcat

SEQ ID NO: 9050 - DNA, 21 bp, synthetic construct
  misc_feature 1..21: note = Description of Artificial Sequence: Synthetic Antisense oligonucleotide
  modified_base 1..2: mod_base = OTHER; note = 5-methyl
  modified_base 5: mod_base = OTHER; note = 5-methyl
  modified_base 8: mod_base = OTHER; note = 5-methyl
  modified_base 20: mod_base = OTHER; note = 5-methyl
  modified_base 21: mod_base = OTHER; note = bicyclic nucleic acid (BNA)
  source 1..21: mol_type = other DNA
ccaacatcaaggaagatggca

SEQ ID NO: 9051 - DNA, 20 bp, synthetic construct
  misc_feature 1..20: note = Description of Artificial Sequence: Synthetic Antisense oligonucleotide
  modified_base 1..2: mod_base = OTHER; note = 5-methyl
  modified_base 5: mod_base = OTHER; note = 5-methyl
  modified_base 8: mod_base = OTHER; note = 5-methyl
  modified_base 20: mod_base = OTHER; note = 5-methyl
  modified_base 20: mod_base = OTHER; note = bicyclic nucleic acid (BNA)
  source 1..20: mol_type = other DNA
ccaacatcaaggaagatggc

SEQ ID NO: 9052 - DNA, 19 bp, synthetic construct
  misc_feature 1..19: note = Description of Artificial Sequence: Synthetic Antisense oligonucleotide
  modified_base 1..2: mod_base = OTHER; note = 5-methyl
  modified_base 5: mod_base = OTHER; note = 5-methyl
  modified_base 8: mod_base = OTHER; note = 5-methyl
  modified_base 19: mod_base = OTHER; note = bicyclic nucleic acid (BNA)
  source 1..19: mol_type = other DNA
ccaacatcaaggaagatgg

SEQ ID NO: 9053 - DNA, 18 bp, synthetic construct
  misc_feature 1..18: note = Description of Artificial Sequence: Synthetic Antisense oligonucleotide
  modified_base 1..2: mod_base = OTHER; note = 5-methyl
  modified_base 5: mod_base = OTHER; note = 5-methyl
  modified_base 8: mod_base = OTHER; note = 5-methyl
  modified_base 18: mod_base = OTHER; note = bicyclic nucleic acid (BNA)
  source 1..18: mol_type = other DNA
ccaacatcaaggaagatg

SEQ ID NO: 9054 - DNA, 17 bp, synthetic construct
  misc_feature 1..17: note = Description of Artificial Sequence: Synthetic Antisense oligonucleotide
  modified_base 1..2: mod_base = OTHER; note = 5-methyl
  modified_base 5: mod_base = OTHER; note = 5-methyl
  modified_base 8: mod_base = OTHER; note = 5-methyl
  modified_base 17: mod_base = OTHER; note = bicyclic nucleic acid (BNA)
  source 1..17: mol_type = other DNA
ccaacatcaaggaagat

SEQ ID NO: 9055 - DNA, 16 bp, synthetic construct
  misc_feature 1..16: note = Description of Artificial Sequence: Synthetic Antisense oligonucleotide
  modified_base 1..2: mod_base = OTHER; note = 5-methyl
  modified_base 5: mod_base = OTHER; note = 5-methyl
  modified_base 8: mod_base = OTHER; note = 5-methyl
  modified_base 16: mod_base = OTHER; note = bicyclic nucleic acid (BNA)
  source 1..16: mol_type = other DNA
ccaacatcaaggaaga

SEQ ID NO: 9056 - DNA, 15 bp, synthetic construct
  misc_feature 1..15: note = Description of Artificial Sequence: Synthetic Antisense oligonucleotide
  modified_base 1..2: mod_base = OTHER; note = 5-methyl
  modified_base 5: mod_base = OTHER; note = 5-methyl
  modified_base 8: mod_base = OTHER; note = 5-methyl
  modified_base 15: mod_base = OTHER; note = bicyclic nucleic acid (BNA)
  source 1..15: mol_type = other DNA
ccaacatcaaggaag

SEQ ID NO: 9057 - DNA, 27 bp, synthetic construct
  misc_feature 1..27: note = Description of Artificial Sequence: Synthetic Antisense oligonucleotide
  modified_base 1: mod_base = OTHER; note = 5-methyl
  modified_base 4: mod_base = OTHER; note = 5-methyl
  modified_base 7: mod_base = OTHER; note = 5-methyl
  modified_base 19: mod_base = OTHER; note = 5-methyl
  modified_base 24: mod_base = OTHER; note = 5-methyl
  modified_base 27: mod_base = OTHER; note = bicyclic nucleic acid (BNA)
  source 1..27: mol_type = other DNA
caacatcaaggaagatggcatttctag

SEQ ID NO: 9058 - DNA, 26 bp, synthetic construct
  misc_feature 1..26: note = Description of Artificial Sequence: Synthetic Antisense oligonucleotide
  modified_base 1: mod_base = OTHER; note = 5-methyl
  modified_base 4: mod_base = OTHER; note = 5-methyl
  modified_base 7: mod_base = OTHER; note = 5-methyl
  modified_base 19: mod_base = OTHER; note = 5-methyl
  modified_base 24: mod_base = OTHER; note = 5-methyl
  modified_base 26: mod_base = OTHER; note = bicyclic nucleic acid (BNA)
  source 1..26: mol_type = other DNA
caacatcaaggaagatggcatttcta

SEQ ID NO: 9059 - DNA, 25 bp, synthetic construct
  misc_feature 1..25: note = Description of Artificial Sequence: Synthetic Antisense oligonucleotide
  modified_base 1: mod_base = OTHER; note = 5-methyl
  modified_base 4: mod_base = OTHER; note = 5-methyl
  modified_base 7: mod_base = OTHER; note = 5-methyl
  modified_base 19: mod_base = OTHER; note = 5-methyl
  modified_base 24: mod_base = OTHER; note = 5-methyl
  modified_base 25: mod_base = OTHER; note = bicyclic nucleic acid (BNA)
  source 1..25: mol_type = other DNA
caacatcaaggaagatggcatttct

SEQ ID NO: 9060 - DNA, 24 bp, synthetic construct
  misc_feature 1..24: note = Description of Artificial Sequence: Synthetic Antisense oligonucleotide
  modified_base 1: mod_base = OTHER; note = 5-methyl
  modified_base 4: mod_base = OTHER; note = 5-methyl
  modified_base 7: mod_base = OTHER; note = 5-methyl
  modified_base 19: mod_base = OTHER; note = 5-methyl
  modified_base 24: mod_base = OTHER; note = 5-methyl
  modified_base 24: mod_base = OTHER; note = bicyclic nucleic acid (BNA)
  source 1..24: mol_type = other DNA
caacatcaaggaagatggcatttc

SEQ ID NO: 9061 - DNA, 23 bp, synthetic construct
  misc_feature 1..23: note = Description of Artificial Sequence: Synthetic Antisense oligonucleotide
  modified_base 1: mod_base = OTHER; note = 5-methyl
  modified_base 4: mod_base = OTHER; note = 5-methyl
  modified_base 7: mod_base = OTHER; note = 5-methyl
  modified_base 19: mod_base = OTHER; note = 5-methyl
  modified_base 23: mod_base = OTHER; note = bicyclic nucleic acid (BNA)
  source 1..23: mol_type = other DNA
caacatcaaggaagatggcattt

SEQ ID NO: 9062 - DNA, 22 bp, synthetic construct
  misc_feature 1..22: note = Description of Artificial Sequence: Synthetic Antisense oligonucleotide
  modified_base 1: mod_base = OTHER; note = 5-methyl
  modified_base 4: mod_base = OTHER; note = 5-methyl
  modified_base 7: mod_base = OTHER; note = 5-methyl
  modified_base 19: mod_base = OTHER; note = 5-methyl
  modified_base 22: mod_base = OTHER; note = bicyclic nucleic acid (BNA)
  source 1..22: mol_type = other DNA
caacatcaaggaagatggcatt

SEQ ID NO: 9063 - DNA, 21 bp, synthetic construct
  misc_feature 1..21: note = Description of Artificial Sequence: Synthetic Antisense oligonucleotide
  modified_base 1: mod_base = OTHER; note = 5-methyl
  modified_base 4: mod_base = OTHER; note = 5-methyl
  modified_base 7: mod_base = OTHER; note = 5-methyl
  modified_base 19: mod_base = OTHER; note = 5-methyl
  modified_base 21: mod_base = OTHER; note = bicyclic nucleic acid (BNA)
  source 1..21: mol_type = other DNA
caacatcaaggaagatggcat

SEQ ID NO: 9064 - DNA, 20 bp, synthetic construct
  misc_feature 1..20: note = Description of Artificial Sequence: Synthetic Antisense oligonucleotide
  modified_base 1: mod_base = OTHER; note = 5-methyl
  modified_base 4: mod_base = OTHER; note = 5-methyl
  modified_base 7: mod_base = OTHER; note = 5-methyl
  modified_base 19: mod_base = OTHER; note = 5-methyl
  modified_base 20: mod_base = OTHER; note = bicyclic nucleic acid (BNA)
  source 1..20: mol_type = other DNA
caacatcaaggaagatggca

SEQ ID NO: 9065 - DNA, 19 bp, synthetic construct
  misc_feature 1..19: note = Description of Artificial Sequence: Synthetic Antisense oligonucleotide
  modified_base 1: mod_base = OTHER; note = 5-methyl
  modified_base 4: mod_base = OTHER; note = 5-methyl
  modified_base 7: mod_base = OTHER; note = 5-methyl
  modified_base 19: mod_base = OTHER; note = 5-methyl
  modified_base 19: mod_base = OTHER; note = bicyclic nucleic acid (BNA)
  source 1..19: mol_type = other DNA
caacatcaaggaagatggc

SEQ ID NO: 9066 - DNA, 18 bp, synthetic construct
  misc_feature 1..18: note = Description of Artificial Sequence: Synthetic Antisense oligonucleotide
  modified_base 1: mod_base = OTHER; note = 5-methyl
  modified_base 4: mod_base = OTHER; note = 5-methyl
  modified_base 7: mod_base = OTHER; note = 5-methyl
  modified_base 18: mod_base = OTHER; note = bicyclic nucleic acid (BNA)
  source 1..18: mol_type = other DNA
caacatcaaggaagatgg

SEQ ID NO: 9067 - DNA, 17 bp, synthetic construct
  misc_feature 1..17: note = Description of Artificial Sequence: Synthetic Antisense oligonucleotide
  modified_base 1: mod_base = OTHER; note = 5-methyl
  modified_base 4: mod_base = OTHER; note = 5-methyl
  modified_base 7: mod_base = OTHER; note = 5-methyl
  modified_base 17: mod_base = OTHER; note = bicyclic nucleic acid (BNA)
  source 1..17: mol_type = other DNA
caacatcaaggaagatg

SEQ ID NO: 9068 - DNA, 16 bp, synthetic construct
  misc_feature 1..16: note = Description of Artificial Sequence: Synthetic Antisense oligonucleotide
  modified_base 1: mod_base = OTHER; note = 5-methyl
  modified_base 4: mod_base = OTHER; note = 5-methyl
  modified_base 7: mod_base = OTHER; note = 5-methyl
  modified_base 16: mod_base = OTHER; note = bicyclic nucleic acid (BNA)
  source 1..16: mol_type = other DNA
caacatcaaggaagat

SEQ ID NO: 9069 - DNA, 15 bp, synthetic construct
  misc_feature 1..15: note = Description of Artificial Sequence: Synthetic Antisense oligonucleotide
  modified_base 1: mod_base = OTHER; note = 5-methyl
  modified_base 4: mod_base = OTHER; note = 5-methyl
  modified_base 7: mod_base = OTHER; note = 5-methyl
  modified_base 15: mod_base = OTHER; note = bicyclic nucleic acid (BNA)
  source 1..15: mol_type = other DNA
caacatcaaggaaga

SEQ ID NO: 9070 - DNA, 14 bp, synthetic construct
  misc_feature 1..14: note = Description of Artificial Sequence: Synthetic Antisense oligonucleotide
  modified_base 1: mod_base = OTHER; note = 5-methyl
  modified_base 4: mod_base = OTHER; note = 5-methyl
  modified_base 7: mod_base = OTHER; note = 5-methyl
  modified_base 14: mod_base = OTHER; note = bicyclic nucleic acid (BNA)
  source 1..14: mol_type = other DNA
caacatcaaggaag

SEQ ID NO: 9071 - DNA, 26 bp, synthetic construct
  misc_feature 1..26: note = Description of Artificial Sequence: Synthetic Antisense oligonucleotide
  modified_base 3: mod_base = OTHER; note = 5-methyl
  modified_base 6: mod_base = OTHER; note = 5-methyl
  modified_base 18: mod_base = OTHER; note = 5-methyl
  modified_base 23: mod_base = OTHER; note = 5-methyl
  modified_base 26: mod_base = OTHER; note = bicyclic nucleic acid (BNA)
  source 1..26: mol_type = other DNA
aacatcaaggaagatggcatttctag

SEQ ID NO: 9072 - DNA, 25 bp, synthetic construct
  misc_feature 1..25: note = Description of Artificial Sequence: Synthetic Antisense oligonucleotide
  modified_base 3: mod_base = OTHER; note = 5-methyl
  modified_base 6: mod_base = OTHER; note = 5-methyl
  modified_base 18: mod_base = OTHER; note = 5-methyl
  modified_base 23: mod_base = OTHER; note = 5-methyl
  modified_base 25: mod_base = OTHER; note = bicyclic nucleic acid (BNA)
  source 1..25: mol_type = other DNA
aacatcaaggaagatggcatttcta

SEQ ID NO: 9073 - DNA, 24 bp, synthetic construct
  misc_feature 1..24: note = Description of Artificial Sequence: Synthetic Antisense oligonucleotide
  modified_base 3: mod_base = OTHER; note = 5-methyl
  modified_base 6: mod_base = OTHER; note = 5-methyl
  modified_base 18: mod_base = OTHER; note = 5-methyl
  modified_base 23: mod_base = OTHER; note = 5-methyl
  modified_base 24: mod_base = OTHER; note = bicyclic nucleic acid (BNA)
  source 1..24: mol_type = other DNA
aacatcaaggaagatggcatttct

SEQ ID NO: 9074 - DNA, 23 bp, synthetic construct
  misc_feature 1..23: note = Description of Artificial Sequence: Synthetic Antisense oligonucleotide
  modified_base 3: mod_base = OTHER; note = 5-methyl
  modified_base 6: mod_base = OTHER; note = 5-methyl
  modified_base 18: mod_base = OTHER; note = 5-methyl
  modified_base 23: mod_base = OTHER; note = 5-methyl
  modified_base 23: mod_base = OTHER; note = bicyclic nucleic acid (BNA)
  source 1..23: mol_type = other DNA
aacatcaaggaagatggcatttc

SEQ ID NO: 9075 - DNA, 22 bp, synthetic construct
  misc_feature 1..22: note = Description of Artificial Sequence: Synthetic Antisense oligonucleotide
  modified_base 3: mod_base = OTHER; note = 5-methyl
  modified_base 6: mod_base = OTHER; note = 5-methyl
  modified_base 18: mod_base = OTHER; note = 5-methyl
  modified_base 22: mod_base = OTHER; note = bicyclic nucleic acid (BNA)
  source 1..22: mol_type = other DNA
aacatcaaggaagatggcattt

SEQ ID NO: 9076 - DNA, 21 bp, synthetic construct
  misc_feature 1..21: note = Description of Artificial Sequence: Synthetic Antisense oligonucleotide
  modified_base 3: mod_base = OTHER; note = 5-methyl
  modified_base 6: mod_base = OTHER; note = 5-methyl
  modified_base 18: mod_base = OTHER; note = 5-methyl
  modified_base 21: mod_base = OTHER; note = bicyclic nucleic acid (BNA)
  source 1..21: mol_type = other DNA
aacatcaaggaagatggcatt

SEQ ID NO: 9077 - DNA, 20 bp, synthetic construct
  misc_feature 1..20: note = Description of Artificial Sequence: Synthetic Antisense oligonucleotide
  modified_base 3: mod_base = OTHER; note = 5-methyl
  modified_base 6: mod_base = OTHER; note = 5-methyl
  modified_base 18: mod_base = OTHER; note = 5-methyl
  modified_base 20: mod_base = OTHER; note = bicyclic nucleic acid (BNA)
  source 1..20: mol_type = other DNA
aacatcaaggaagatggcat

SEQ ID NO: 9078 - DNA, 19 bp, synthetic construct
  misc_feature 1..19: note = Description of Artificial Sequence: Synthetic Antisense oligonucleotide
  modified_base 3: mod_base = OTHER; note = 5-methyl
  modified_base 6: mod_base = OTHER; note = 5-methyl
  modified_base 18: mod_base = OTHER; note = 5-methyl
  modified_base 19: mod_base = OTHER; note = bicyclic nucleic acid (BNA)
  source 1..19: mol_type = other DNA
aacatcaaggaagatggca

SEQ ID NO: 9079 - DNA, 18 bp, synthetic construct
  misc_feature 1..18: note = Description of Artificial Sequence: Synthetic Antisense oligonucleotide
  modified_base 3: mod_base = OTHER; note = 5-methyl
  modified_base 6: mod_base = OTHER; note = 5-methyl
  modified_base 18: mod_base = OTHER; note = 5-methyl
  modified_base 18: mod_base = OTHER; note = bicyclic nucleic acid (BNA)
  source 1..18: mol_type = other DNA
aacatcaaggaagatggc

SEQ ID NO: 9080 - DNA, 17 bp, synthetic construct
  misc_feature 1..17: note = Description of Artificial Sequence: Synthetic Antisense oligonucleotide
  modified_base 3: mod_base = OTHER; note = 5-methyl
  modified_base 6: mod_base = OTHER; note = 5-methyl
  modified_base 17: mod_base = OTHER; note = bicyclic nucleic acid (BNA)
  source 1..17: mol_type = other DNA
aacatcaaggaagatgg

SEQ ID NO: 9081 - DNA, 16 bp, synthetic construct
  misc_feature 1..16: note = Description of Artificial Sequence: Synthetic Antisense oligonucleotide
  modified_base 3: mod_base = OTHER; note = 5-methyl
  modified_base 6: mod_base = OTHER; note = 5-methyl
  modified_base 16: mod_base = OTHER; note = bicyclic nucleic acid (BNA)
  source 1..16: mol_type = other DNA
aacatcaaggaagatg

SEQ ID NO: 9082 - DNA, 15 bp, synthetic construct
  misc_feature 1..15: note = Description of Artificial Sequence: Synthetic Antisense oligonucleotide
  modified_base 3: mod_base = OTHER; note = 5-methyl
  modified_base 6: mod_base = OTHER; note = 5-methyl
  modified_base 15: mod_base = OTHER; note = bicyclic nucleic acid (BNA)
  source 1..15: mol_type = other DNA
aacatcaaggaagat

SEQ ID NO: 9083 - DNA, 14 bp, synthetic construct
  misc_feature 1..14: note = Description of Artificial Sequence: Synthetic Antisense oligonucleotide
  modified_base 3: mod_base = OTHER; note = 5-methyl
  modified_base 6: mod_base = OTHER; note = 5-methyl
  modified_base 14: mod_base = OTHER; note = bicyclic nucleic acid (BNA)
  source 1..14: mol_type = other DNA
aacatcaaggaaga

SEQ ID NO: 9084 - DNA, 13 bp, synthetic construct
  misc_feature 1..13: note = Description of Artificial Sequence: Synthetic Antisense oligonucleotide
  modified_base 3: mod_base = OTHER; note = 5-methyl
  modified_base 6: mod_base = OTHER; note = 5-methyl
  modified_base 13: mod_base = OTHER; note = bicyclic nucleic acid (BNA)
  source 1..13: mol_type = other DNA
aacatcaaggaag

SEQ ID NO: 9085 - DNA, 25 bp, synthetic construct
  misc_feature 1..25: note = Description of Artificial Sequence: Synthetic Antisense oligonucleotide
  modified_base 2: mod_base = OTHER; note = 5-methyl
  modified_base 5: mod_base = OTHER; note = 5-methyl
  modified_base 17: mod_base = OTHER; note = 5-methyl
  modified_base 22: mod_base = OTHER; note = 5-methyl
  modified_base 25: mod_base = OTHER; note = bicyclic nucleic acid (BNA)
  source 1..25: mol_type = other DNA
acatcaaggaagatggcatttctag

SEQ ID NO: 9086 - DNA, 24 bp, synthetic construct
  misc_feature 1..24: note = Description of Artificial Sequence: Synthetic Antisense oligonucleotide
  modified_base 2: mod_base = OTHER; note = 5-methyl
  modified_base 5: mod_base = OTHER; note = 5-methyl
  modified_base 17: mod_base = OTHER; note = 5-methyl
  modified_base 22: mod_base = OTHER; note = 5-methyl
  modified_base 24: mod_base = OTHER; note = bicyclic nucleic acid (BNA)
  source 1..24: mol_type = other DNA
acatcaaggaagatggcatttcta

SEQ ID NO: 9087 - DNA, 23 bp, synthetic construct
  misc_feature 1..23: note = Description of Artificial Sequence: Synthetic Antisense oligonucleotide
  modified_base 2: mod_base = OTHER; note = 5-methyl
  modified_base 5: mod_base = OTHER; note = 5-methyl
  modified_base 17: mod_base = OTHER; note = 5-methyl
  modified_base 22: mod_base = OTHER; note = 5-methyl
  modified_base 23: mod_base = OTHER; note = bicyclic nucleic acid (BNA)
  source 1..23: mol_type = other DNA
acatcaaggaagatggcatttct

SEQ ID NO: 9088 - DNA, 22 bp, synthetic construct
  misc_feature 1..22: note = Description of Artificial Sequence: Synthetic Antisense oligonucleotide
  modified_base 2: mod_base = OTHER; note = 5-methyl
  modified_base 5: mod_base = OTHER; note = 5-methyl
  modified_base 17: mod_base = OTHER; note = 5-methyl
  modified_base 22: mod_base = OTHER; note = 5-methyl
  modified_base 22: mod_base = OTHER; note = bicyclic nucleic acid (BNA)
  source 1..22: mol_type = other DNA
acatcaaggaagatggcatttc

SEQ ID NO: 9089 - DNA, 21 bp, synthetic construct
  misc_feature 1..21: note = Description of Artificial Sequence: Synthetic Antisense oligonucleotide
  modified_base 2: mod_base = OTHER; note = 5-methyl
  modified_base 5: mod_base = OTHER; note = 5-methyl
  modified_base 17: mod_base = OTHER; note = 5-methyl
  modified_base 21: mod_base = OTHER; note = bicyclic nucleic acid (BNA)
  source 1..21: mol_type = other DNA
acatcaaggaagatggcattt

SEQ ID NO: 9090 - DNA, 20 bp, synthetic construct
  misc_feature 1..20: note = Description of Artificial Sequence: Synthetic Antisense oligonucleotide
  modified_base 2: mod_base = OTHER; note = 5-methyl
  modified_base 5: mod_base = OTHER; note = 5-methyl
  modified_base 17: mod_base = OTHER; note = 5-methyl
  modified_base 20: mod_base = OTHER; note = bicyclic nucleic acid (BNA)
  source 1..20: mol_type = other DNA
acatcaaggaagatggcatt

SEQ ID NO: 9091 - DNA, 19 bp, synthetic construct
  misc_feature 1..19: note = Description of Artificial Sequence: Synthetic Antisense oligonucleotide
  modified_base 2: mod_base = OTHER; note = 5-methyl
  modified_base 5: mod_base = OTHER; note = 5-methyl
  modified_base 17: mod_base = OTHER; note = 5-methyl
  modified_base 19: mod_base = OTHER; note = bicyclic nucleic acid (BNA)
  source 1..19: mol_type = other DNA
acatcaaggaagatggcat

SEQ ID NO: 9092 - DNA, 18 bp, synthetic construct
  misc_feature 1..18: note = Description of Artificial Sequence: Synthetic Antisense oligonucleotide
  modified_base 2: mod_base = OTHER; note = 5-methyl
  modified_base 5: mod_base = OTHER; note = 5-methyl
  modified_base 17: mod_base = OTHER; note = 5-methyl
  modified_base 18: mod_base = OTHER; note = bicyclic nucleic acid (BNA)
  source 1..18: mol_type = other DNA
acatcaaggaagatggca

SEQ ID NO: 9093 - DNA, 17 bp, synthetic construct
  misc_feature 1..17: note = Description of Artificial Sequence: Synthetic Antisense oligonucleotide
  modified_base 2: mod_base = OTHER; note = 5-methyl
  modified_base 5: mod_base = OTHER; note = 5-methyl
  modified_base 17: mod_base = OTHER; note = 5-methyl
  modified_base 17: mod_base = OTHER; note = bicyclic nucleic acid (BNA)
  source 1..17: mol_type = other DNA
acatcaaggaagatggc

SEQ ID NO: 9094 - DNA, 16 bp, synthetic construct
  misc_feature 1..16: note = Description of Artificial Sequence: Synthetic Antisense oligonucleotide
  modified_base 2: mod_base = OTHER; note = 5-methyl
  modified_base 5: mod_base = OTHER; note = 5-methyl
  modified_base 16: mod_base = OTHER; note = bicyclic nucleic acid (BNA)
  source 1..16: mol_type = other DNA
acatcaaggaagatgg

SEQ ID NO: 9095 - DNA, 15 bp, synthetic construct
  misc_feature 1..15: note = Description of Artificial Sequence: Synthetic Antisense oligonucleotide
  modified_base 2: mod_base = OTHER; note = 5-methyl
  modified_base 5: mod_base = OTHER; note = 5-methyl
  modified_base 15: mod_base = OTHER; note = bicyclic nucleic acid (BNA)
  source 1..15: mol_type = other DNA
acatcaaggaagatg

SEQ ID NO: 9096 - DNA, 14 bp, synthetic construct
  misc_feature 1..14: note = Description of Artificial Sequence: Synthetic Antisense oligonucleotide
  modified_base 2: mod_base = OTHER; note = 5-methyl
  modified_base 5: mod_base = OTHER; note = 5-methyl
  modified_base 14: mod_base = OTHER; note = bicyclic nucleic acid (BNA)
  source 1..14: mol_type = other DNA
acatcaaggaagat

SEQ ID NO: 9097 - DNA, 13 bp, synthetic construct
  misc_feature 1..13: note = Description of Artificial Sequence: Synthetic Antisense oligonucleotide
  modified_base 2: mod_base = OTHER; note = 5-methyl
  modified_base 5: mod_base = OTHER; note = 5-methyl
  modified_base 13: mod_base = OTHER; note = bicyclic nucleic acid (BNA)
  source 1..13: mol_type = other DNA
acatcaaggaaga

SEQ ID NO: 9098 - DNA, 12 bp, synthetic construct
  misc_feature 1..12: note = Description of Artificial Sequence: Synthetic Antisense oligonucleotide
  modified_base 2: mod_base = OTHER; note = 5-methyl
  modified_base 5: mod_base = OTHER; note = 5-methyl
  modified_base 12: mod_base = OTHER; note = bicyclic nucleic acid (BNA)
  source 1..12: mol_type = other DNA
acatcaaggaag

SEQ ID NO: 9099 - DNA, 24 bp, synthetic construct
  misc_feature 1..24: note = Description of Artificial Sequence: Synthetic Antisense oligonucleotide
  modified_base 1: mod_base = OTHER; note = 5-methyl
  modified_base 4: mod_base = OTHER; note = 5-methyl
  modified_base 16: mod_base = OTHER; note = 5-methyl
  modified_base 21: mod_base = OTHER; note = 5-methyl
  modified_base 24: mod_base = OTHER; note = bicyclic nucleic acid (BNA)
  source 1..24: mol_type = other DNA
catcaaggaagatggcatttctag

SEQ ID NO: 9100 - DNA, 23 bp, synthetic construct
  misc_feature 1..23: note = Description of Artificial Sequence: Synthetic Antisense oligonucleotide
  modified_base 1: mod_base = OTHER; note = 5-methyl
  modified_base 4: mod_base = OTHER; note = 5-methyl
  modified_base 16: mod_base = OTHER; note = 5-methyl
  modified_base 21: mod_base = OTHER; note = 5-methyl
  modified_base 23: mod_base = OTHER; note = bicyclic nucleic acid (BNA)
  source 1..23: mol_type = other DNA
catcaaggaagatggcatttcta

SEQ ID NO: 9101 - DNA, 22 bp, synthetic construct
  misc_feature 1..22: note = Description of Artificial Sequence: Synthetic Antisense oligonucleotide
  modified_base 1: mod_base = OTHER; note = 5-methyl
  modified_base 4: mod_base = OTHER; note = 5-methyl
  modified_base 16: mod_base = OTHER; note = 5-methyl
  modified_base 21: mod_base = OTHER; note = 5-methyl
  modified_base 22: mod_base = OTHER; note = bicyclic nucleic acid (BNA)
  source 1..22: mol_type = other DNA
catcaaggaagatggcatttct

SEQ ID NO: 9102 - DNA, 21 bp, synthetic construct
  misc_feature 1..21: note = Description of Artificial Sequence: Synthetic Antisense oligonucleotide
  modified_base 1: mod_base = OTHER; note = 5-methyl
  modified_base 4: mod_base = OTHER; note = 5-methyl
  modified_base 16: mod_base = OTHER; note = 5-methyl
  modified_base 21: mod_base = OTHER; note = 5-methyl
  modified_base 21: mod_base = OTHER; note = bicyclic nucleic acid (BNA)
  source 1..21: mol_type = other DNA
catcaaggaagatggcatttc

SEQ ID NO: 9103 - DNA, 20 bp, synthetic construct
  misc_feature 1..20: note = Description of Artificial Sequence: Synthetic Antisense oligonucleotide
  modified_base 1: mod_base = OTHER; note = 5-methyl
  modified_base 4: mod_base = OTHER; note = 5-methyl
  modified_base 16: mod_base = OTHER; note = 5-methyl
  modified_base 20: mod_base = OTHER; note = bicyclic nucleic acid (BNA)
  source 1..20: mol_type = other DNA
catcaaggaagatggcattt

SEQ ID NO: 9104 - DNA, 19 bp, synthetic construct
  misc_feature 1..19: note = Description of Artificial Sequence: Synthetic Antisense oligonucleotide
  modified_base 1: mod_base = OTHER; note = 5-methyl
  modified_base 4: mod_base = OTHER; note = 5-methyl
  modified_base 16: mod_base = OTHER; note = 5-methyl
  modified_base 19: mod_base = OTHER; note = bicyclic nucleic acid (BNA)
  source 1..19: mol_type = other DNA
catcaaggaagatggcatt

SEQ ID NO: 9105 - DNA, 18 bp, synthetic construct
  misc_feature 1..18: note = Description of Artificial Sequence: Synthetic Antisense oligonucleotide
  modified_base 1: mod_base = OTHER; note = 5-methyl
  modified_base 4: mod_base = OTHER; note = 5-methyl
  modified_base 16: mod_base = OTHER; note = 5-methyl
  modified_base 18: mod_base = OTHER; note = bicyclic nucleic acid (BNA)
  source 1..18: mol_type = other DNA
catcaaggaagatggcat

SEQ ID NO: 9106 - DNA, 17 bp, synthetic construct
  misc_feature 1..17: note = Description of Artificial Sequence: Synthetic Antisense oligonucleotide
  modified_base 1: mod_base = OTHER; note = 5-methyl
  modified_base 4: mod_base = OTHER; note = 5-methyl
  modified_base 16: mod_base = OTHER; note = 5-methyl
  modified_base 17: mod_base = OTHER; note = bicyclic nucleic acid (BNA)
  source 1..17: mol_type = other DNA
catcaaggaagatggca

SEQ ID NO: 9107 - DNA, 16 bp, synthetic construct
  misc_feature 1..16: note = Description of Artificial Sequence: Synthetic Antisense oligonucleotide
  modified_base 1: mod_base = OTHER; note = 5-methyl
  modified_base 4: mod_base = OTHER; note = 5-methyl
  modified_base 16: mod_base = OTHER; note = 5-methyl
  modified_base 16: mod_base = OTHER; note = bicyclic nucleic acid (BNA)
  source 1..16: mol_type = other DNA
catcaaggaagatggc

SEQ ID NO: 9108 - DNA, 15 bp, synthetic construct
  misc_feature 1..15: note = Description of Artificial Sequence: Synthetic Antisense oligonucleotide
  modified_base 1: mod_base = OTHER; note = 5-methyl
  modified_base 4: mod_base = OTHER; note = 5-methyl
  modified_base 15: mod_base = OTHER; note = bicyclic nucleic acid (BNA)
  source 1..15: mol_type = other DNA
catcaaggaagatgg

SEQ ID NO: 9109 - DNA, 14 bp, synthetic construct
  misc_feature 1..14: note = Description of Artificial Sequence: Synthetic Antisense oligonucleotide
  modified_base 1: mod_base = OTHER; note = 5-methyl
  modified_base 4: mod_base = OTHER; note = 5-methyl
  modified_base 14: mod_base = OTHER; note = bicyclic nucleic acid (BNA)
  source 1..14: mol_type = other DNA
catcaaggaagatg

SEQ ID NO: 9110 - DNA, 13 bp, synthetic construct
  misc_feature 1..13: note = Description of Artificial Sequence: Synthetic Antisense oligonucleotide
  modified_base 1: mod_base = OTHER; note = 5-methyl
  modified_base 4: mod_base = OTHER; note = 5-methyl
  modified_base 13: mod_base = OTHER; note = bicyclic nucleic acid (BNA)
  source 1..13: mol_type = other DNA
catcaaggaagat

SEQ ID NO: 9111 - DNA, 12 bp, synthetic construct
  misc_feature 1..12: note = Description of Artificial Sequence: Synthetic Antisense oligonucleotide
  modified_base 1: mod_base = OTHER; note = 5-methyl
  modified_base 4: mod_base = OTHER; note = 5-methyl
  modified_base 12: mod_base = OTHER; note = bicyclic nucleic acid (BNA)
  source 1..12: mol_type = other DNA
catcaaggaaga

SEQ ID NO: 9112 - DNA, 11 bp, synthetic construct
  misc_feature 1..11: note = Description of Artificial Sequence: Synthetic Antisense oligonucleotide
  modified_base 1: mod_base = OTHER; note = 5-methyl
  modified_base 4: mod_base = OTHER; note = 5-methyl
  modified_base 11: mod_base = OTHER; note = bicyclic nucleic acid (BNA)
  source 1..11: mol_type = other DNA
catcaaggaag

SEQ ID NO: 9113 - DNA, 23 bp, synthetic construct
  misc_feature 1..23: note = Description of Artificial Sequence: Synthetic Antisense oligonucleotide
  modified_base 3: mod_base = OTHER; note = 5-methyl
  modified_base 15: mod_base = OTHER; note = 5-methyl
  modified_base 20: mod_base = OTHER; note = 5-methyl
  modified_base 23: mod_base = OTHER; note = bicyclic nucleic acid (BNA)
  source 1..23: mol_type = other DNA
atcaaggaagatggcatttctag

SEQ ID NO: 9114 - DNA, 22 bp, synthetic construct
  misc_feature 1..22: note = Description of Artificial Sequence: Synthetic Antisense oligonucleotide
  modified_base 3: mod_base = OTHER; note = 5-methyl
  modified_base 15: mod_base = OTHER; note = 5-methyl
  modified_base 20: mod_base = OTHER; note = 5-methyl
  modified_base 22: mod_base = OTHER; note = bicyclic nucleic acid (BNA)
  source 1..22: mol_type = other DNA
atcaaggaagatggcatttcta

SEQ ID NO: 9115 - DNA, 21 bp, synthetic construct
  misc_feature 1..21: note = Description of Artificial Sequence: Synthetic Antisense oligonucleotide
  modified_base 3: mod_base = OTHER; note = 5-methyl
  modified_base 15: mod_base = OTHER; note = 5-methyl
  modified_base 20: mod_base = OTHER; note = 5-methyl
  modified_base 21: mod_base = OTHER; note = bicyclic nucleic acid (BNA)
  source 1..21: mol_type = other DNA
atcaaggaagatggcatttct

SEQ ID NO: 9116 - DNA, 20 bp, synthetic construct
  misc_feature 1..20: note = Description of Artificial Sequence: Synthetic Antisense oligonucleotide
  modified_base 3: mod_base = OTHER; note = 5-methyl
  modified_base 15: mod_base = OTHER; note = 5-methyl
  modified_base 20: mod_base = OTHER; note = 5-methyl
  modified_base 20: mod_base = OTHER; note = bicyclic nucleic acid (BNA)
  source 1..20: mol_type = other DNA
atcaaggaagatggcatttc

SEQ ID NO: 9117 - DNA, 19 bp, synthetic construct
  misc_feature 1..19: note = Description of Artificial Sequence: Synthetic Antisense oligonucleotide
  modified_base 3: mod_base = OTHER; note = 5-methyl
  modified_base 15: mod_base = OTHER; note = 5-methyl
  modified_base 19: mod_base = OTHER; note = bicyclic nucleic acid (BNA)
  source 1..19: mol_type = other DNA
atcaaggaagatggcattt

SEQ ID NO: 9118 - DNA, 18 bp, synthetic construct
  misc_feature 1..18: note = Description of Artificial Sequence: Synthetic Antisense oligonucleotide
  modified_base 3: mod_base = OTHER; note = 5-methyl
  modified_base 15: mod_base = OTHER; note = 5-methyl
  modified_base 18: mod_base = OTHER; note = bicyclic nucleic acid (BNA)
  source 1..18: mol_type = other DNA
atcaaggaagatggcatt

SEQ ID NO: 9119 - DNA, 17 bp, synthetic construct
  misc_feature 1..17: note = Description of Artificial Sequence: Synthetic Antisense oligonucleotide
  modified_base 3: mod_base = OTHER; note = 5-methyl
  modified_base 15: mod_base = OTHER; note = 5-methyl
  modified_base 17: mod_base = OTHER; note = bicyclic nucleic acid (BNA)
  source 1..17: mol_type = other DNA
atcaaggaagatggcat

SEQ ID NO: 9120 - DNA, 16 bp, synthetic construct
  misc_feature 1..16: note = Description of Artificial Sequence: Synthetic Antisense oligonucleotide
  modified_base 3: mod_base = OTHER; note = 5-methyl
  modified_base 15: mod_base = OTHER; note = 5-methyl
  modified_base 16: mod_base = OTHER; note = bicyclic nucleic acid (BNA)
  source 1..16: mol_type = other DNA
atcaaggaagatggca

SEQ ID NO: 9121 - DNA, 15 bp, synthetic construct
  misc_feature 1..15: note = Description of Artificial Sequence: Synthetic Antisense oligonucleotide
  modified_base 3: mod_base = OTHER; note = 5-methyl
  modified_base 15: mod_base = OTHER; note = 5-methyl
  modified_base 15: mod_base = OTHER; note = bicyclic nucleic acid (BNA)
  source 1..15: mol_type = other DNA
atcaaggaagatggc

SEQ ID NO: 9122 - DNA, 14 bp, synthetic construct
  misc_feature 1..14: note = Description of Artificial Sequence: Synthetic Antisense oligonucleotide
  modified_base 3: mod_base = OTHER; note = 5-methyl
  modified_base 14: mod_base = OTHER; note = bicyclic nucleic acid (BNA)
  source 1..14: mol_type = other DNA
atcaaggaagatgg

SEQ ID NO: 9123 - DNA, 13 bp, synthetic construct
  misc_feature 1..13: note = Description of Artificial Sequence: Synthetic Antisense oligonucleotide
  modified_base 3: mod_base = OTHER; note = 5-methyl
  modified_base 13: mod_base = OTHER; note = bicyclic nucleic acid (BNA)
  source 1..13: mol_type = other DNA
atcaaggaagatg

SEQ ID NO: 9124 - DNA, 12 bp, synthetic construct
  misc_feature 1..12: note = Description of Artificial Sequence: Synthetic Antisense oligonucleotide
  modified_base 3: mod_base = OTHER; note = 5-methyl
  modified_base 12: mod_base = OTHER; note = bicyclic nucleic acid (BNA)
  source 1..12: mol_type = other DNA
atcaaggaagat

SEQ ID NO: 9125 - DNA, 11 bp, synthetic construct
  misc_feature 1..11: note = Description of Artificial Sequence: Synthetic Antisense oligonucleotide
  modified_base 3: mod_base = OTHER; note = 5-methyl
  modified_base 11: mod_base = OTHER; note = bicyclic nucleic acid (BNA)
  source 1..11: mol_type = other DNA
atcaaggaaga

SEQ ID NO: 9126 - DNA, 10 bp, synthetic construct
  misc_feature 1..10: note = Description of Artificial Sequence: Synthetic Antisense oligonucleotide
  modified_base 3: mod_base = OTHER; note = 5-methyl
  modified_base 10: mod_base = OTHER; note = bicyclic nucleic acid (BNA)
  source 1..10: mol_type = other DNA
atcaaggaag

SEQ ID NO: 9127 - DNA, 18 bp, synthetic construct
  misc_feature 1..18: note = Description of Artificial Sequence: Synthetic Antisense oligonucleotide
  modified_base 1: mod_base = OTHER; note = bicyclic nucleic acid (BNA)
  modified_base 18: mod_base = OTHER; note = bicyclic nucleic acid (BNA)
  modified_base 9: mod_base = OTHER; note = 5-methyl
  modified_base 13..14: mod_base = OTHER; note = 5-methyl
  modified_base 18: mod_base = OTHER; note = 5-methyl
  source 1..18: mol_type = other DNA
ggtaagttctgtccaagc

SEQ ID NO: 9128 - DNA, 18 bp, synthetic construct
  misc_feature 1..18: note = Description of Artificial Sequence: Synthetic Antisense oligonucleotide
  modified_base 1: mod_base = OTHER; note = bicyclic nucleic acid (BNA)
  modified_base 18: mod_base = OTHER; note = bicyclic nucleic acid (BNA)
  modified_base 8: mod_base = OTHER; note = 5-methyl
  modified_base 12..13: mod_base = OTHER; note = 5-methyl
  modified_base 17..18: mod_base = OTHER; note = 5-methyl
  source 1..18: mol_type = other DNA
gtaagttctgtccaagcc

SEQ ID NO: 9129 - DNA, 18 bp, synthetic construct
  misc_feature 1..18: note = Description of Artificial Sequence: Synthetic Antisense oligonucleotide
  modified_base 1: mod_base = OTHER; note = bicyclic nucleic acid (BNA)
  modified_base 18: mod_base = OTHER; note = bicyclic nucleic acid (BNA)
  modified_base 4: mod_base = OTHER; note = 5-methyl
  modified_base 13: mod_base = OTHER; note = 5-methyl
  modified_base 17..18: mod_base = OTHER; note = 5-methyl
  source 1..18: mol_type = other DNA
agtcggtaagttctgtcc

SEQ ID NO: 9130 - DNA, 18 bp, synthetic construct
  misc_feature 1..18: note = Description of Artificial Sequence: Synthetic Antisense oligonucleotide
  modified_base 1: mod_base = OTHER; note = 5-methyl
  modified_base 5..6: mod_base = OTHER; note = 5-methyl
  modified_base 10..12: mod_base = OTHER; note = 5-methyl
  modified_base 1: mod_base = OTHER; note = bicyclic nucleic acid (BNA)
  modified_base 18: mod_base = OTHER; note = bicyclic nucleic acid (BNA)
  source 1..18: mol_type = other DNA
ctgtccaagcccggttga

SEQ ID NO: 9131 - DNA, 15 bp, synthetic construct
  misc_feature 1..15: note = Description of Artificial Sequence: Synthetic Antisense oligonucleotide
  modified_base 1: mod_base = OTHER; note = bicyclic nucleic acid (BNA)
  modified_base 15: mod_base = OTHER; note = bicyclic nucleic acid (BNA)
  modified_base 7: mod_base = OTHER; note = 5-methyl
  modified_base 11..12: mod_base = OTHER; note = 5-methyl
  source 1..15: mol_type = other DNA
taagttctgtccaag

SEQ ID NO: 9132 - DNA, 20 bp, synthetic construct
  misc_feature 1..20: note = Description of Artificial Sequence: Synthetic Antisense oligonucleotide
  modified_base 1: mod_base = OTHER; note = bicyclic nucleic acid (BNA)
  modified_base 20: mod_base = OTHER; note = bicyclic nucleic acid (BNA)
  modified_base 3: mod_base = OTHER; note = 5-methyl
  modified_base 7..8: mod_base = OTHER; note = 5-methyl
  modified_base 12..14: mod_base = OTHER; note = 5-methyl
  source 1..20: mol_type = other DNA
ttctgtccaagcccggttga

SEQ ID NO: 9133 - DNA, 19 bp, synthetic construct
  misc_feature 1..19: note = Description of Artificial Sequence: Synthetic Antisense oligonucleotide
  modified_base 1: mod_base = OTHER; note = bicyclic nucleic acid (BNA)
  modified_base 19: mod_base = OTHER; note = bicyclic nucleic acid (BNA)
  modified_base 3: mod_base = OTHER; note = 5-methyl
  modified_base 7..8: mod_base = OTHER; note = 5-methyl
  modified_base 12..14: mod_base = OTHER; note = 5-methyl
  source 1..19: mol_type = other DNA
ttctgtccaagcccggttg

SEQ ID NO: 9134 - DNA, 18 bp, synthetic construct
  misc_feature 1..18: note = Description of Artificial Sequence: Synthetic Antisense oligonucleotide
  modified_base 1: mod_base = OTHER; note = bicyclic nucleic acid (BNA)
  modified_base 18: mod_base = OTHER; note = bicyclic nucleic acid (BNA)
  modified_base 3: mod_base = OTHER; note = 5-methyl
  modified_base 7..8: mod_base = OTHER; note = 5-methyl
  modified_base 12..14: mod_base = OTHER; note = 5-methyl
  source 1..18: mol_type = other DNA
ttctgtccaagcccggtt

SEQ ID NO: 9135 - DNA, 17 bp, synthetic construct
  misc_feature 1..17: note = Description of Artificial Sequence: Synthetic Antisense oligonucleotide
  modified_base 1: mod_base = OTHER; note = bicyclic nucleic acid (BNA)
  modified_base 17: mod_base = OTHER; note = bicyclic nucleic acid (BNA)
  modified_base 3: mod_base = OTHER; note = 5-methyl
  modified_base 7..8: mod_base = OTHER; note = 5-methyl
  modified_base 12..14: mod_base = OTHER; note = 5-methyl
  source 1..17: mol_type = other DNA
ttctgtccaagcccggt

SEQ ID NO: 9136 - DNA, 16 bp, synthetic construct
  misc_feature 1..16: note = Description of Artificial Sequence: Synthetic Antisense oligonucleotide
  modified_base 1: mod_base = OTHER; note = bicyclic nucleic acid (BNA)
  modified_base 16: mod_base = OTHER; note = bicyclic nucleic acid (BNA)
  modified_base 3: mod_base = OTHER; note = 5-methyl
  modified_base 7..8: mod_base = OTHER; note = 5-methyl
  modified_base 12..14: mod_base = OTHER; note = 5-methyl
  source 1..16: mol_type = other DNA
ttctgtccaagcccgg

SEQ ID NO: 9137 - DNA, 15 bp, synthetic construct
  misc_feature 1..15: note = Description of Artificial Sequence: Synthetic Antisense oligonucleotide
  modified_base 1: mod_base = OTHER; note = bicyclic nucleic acid (BNA)
  modified_base 15: mod_base = OTHER; note = bicyclic nucleic acid (BNA)
  modified_base 3: mod_base = OTHER; note = 5-methyl
  modified_base 7..8: mod_base = OTHER; note = 5-methyl
  modified_base 12..14: mod_base = OTHER; note = 5-methyl
  source 1..15: mol_type = other DNA
ttctgtccaagcccg

SEQ ID NO: 9138 - DNA, 14 bp, synthetic construct
  misc_feature 1..14: note = Description of Artificial Sequence: Synthetic Antisense oligonucleotide
  modified_base 1: mod_base = OTHER; note = bicyclic nucleic acid (BNA)
  modified_base 14: mod_base = OTHER; note = bicyclic nucleic acid (BNA)
  modified_base 3: mod_base = OTHER; note = 5-methyl
  modified_base 7..8: mod_base = OTHER; note = 5-methyl
  modified_base 12..14: mod_base = OTHER; note = 5-methyl
  source 1..14: mol_type = other DNA
ttctgtccaagccc

SEQ ID NO: 9139 - DNA, 13 bp, synthetic construct
  misc_feature 1..13: note = Description of Artificial Sequence: Synthetic Antisense oligonucleotide
  modified_base 1: mod_base = OTHER; note = bicyclic nucleic acid (BNA)
  modified_base 13: mod_base = OTHER; note = bicyclic nucleic acid (BNA)
  modified_base 3: mod_base = OTHER; note = 5-methyl
  modified_base 7..8: mod_base = OTHER; note = 5-methyl
  modified_base 12..13: mod_base = OTHER; note = 5-methyl
  source 1..13: mol_type = other DNA
ttctgtccaagcc

SEQ ID NO: 9140 - DNA, 12 bp, synthetic construct
  misc_feature 1..12: note = Description of Artificial Sequence: Synthetic Antisense oligonucleotide
  modified_base 1: mod_base = OTHER; note = bicyclic nucleic acid (BNA)
  modified_base 12: mod_base = OTHER; note = bicyclic nucleic acid (BNA)
  modified_base 3: mod_base = OTHER; note = 5-methyl
  modified_base 7..8: mod_base = OTHER; note = 5-methyl
  modified_base 12: mod_base = OTHER; note = 5-methyl
  source 1..12: mol_type = other DNA
ttctgtccaagc

SEQ ID NO: 9141 - DNA, 11 bp, synthetic construct
  misc_feature 1..11: note = Description of Artificial Sequence: Synthetic Antisense oligonucleotide
  modified_base 1: mod_base = OTHER; note = bicyclic nucleic acid (BNA)
  modified_base 11: mod_base = OTHER; note = bicyclic nucleic acid (BNA)
  modified_base 3: mod_base = OTHER; note = 5-methyl
  modified_base 7..8: mod_base = OTHER; note = 5-methyl
  source 1..11: mol_type = other DNA
ttctgtccaag

SEQ ID NO: 9142 - DNA, 10 bp, synthetic construct
  misc_feature 1..10: note = Description of Artificial Sequence: Synthetic Antisense oligonucleotide
  modified_base 1: mod_base = OTHER; note = bicyclic nucleic acid (BNA)
  modified_base 10: mod_base = OTHER; note = bicyclic nucleic acid (BNA)
  modified_base 3: mod_base = OTHER; note = 5-methyl
  modified_base 7..8: mod_base = OTHER; note = 5-methyl
  source 1..10: mol_type = other DNA
ttctgtccaa

SEQ ID NO: 9143-9144 - skipped (2 entries)

SEQ ID NO: 9145 - DNA, 19 bp, synthetic construct
  misc_feature 1..19: note = Description of Artificial Sequence: Synthetic Antisense oligonucleotide
  modified_base 1: mod_base = OTHER; note = bicyclic nucleic acid (BNA)
  modified_base 19: mod_base = OTHER; note = bicyclic nucleic acid (BNA)
  modified_base 2: mod_base = OTHER; note = 5-methyl
  modified_base 6..7: mod_base = OTHER; note = 5-methyl
  modified_base 11..13: mod_base = OTHER; note = 5-methyl
  source 1..19: mol_type = other DNA
tctgtccaagcccggttga

SEQ ID NO: 9146 - DNA, 18 bp, synthetic construct
  misc_feature 1..18: note = Description of Artificial Sequence: Synthetic Antisense oligonucleotide
  modified_base 1: mod_base = OTHER; note = bicyclic nucleic acid (BNA)
  modified_base 18: mod_base = OTHER; note = bicyclic nucleic acid (BNA)
  modified_base 2: mod_base = OTHER; note = 5-methyl
  modified_base 6..7: mod_base = OTHER; note = 5-methyl
  modified_base 11..13: mod_base = OTHER; note = 5-methyl
  source 1..18: mol_type = other DNA
tctgtccaagcccggttg

SEQ ID NO: 9147 - DNA, 17 bp, synthetic construct
  misc_feature 1..17: note = Description of Artificial Sequence: Synthetic Antisense oligonucleotide
  modified_base 1: mod_base = OTHER; note = bicyclic nucleic acid (BNA)
  modified_base 17: mod_base = OTHER; note = bicyclic nucleic acid (BNA)
  modified_base 2: mod_base = OTHER; note = 5-methyl
  modified_base 6..7: mod_base = OTHER; note = 5-methyl
  modified_base 11..13: mod_base = OTHER; note = 5-methyl
  source 1..17: mol_type = other DNA
tctgtccaagcccggtt

SEQ ID NO: 9148 - DNA, 16 bp, synthetic construct
  misc_feature 1..16: note = Description of Artificial Sequence: Synthetic Antisense oligonucleotide
  modified_base 1: mod_base = OTHER; note = bicyclic nucleic acid (BNA)
  modified_base 16: mod_base = OTHER; note = bicyclic nucleic acid (BNA)
  modified_base 2: mod_base = OTHER; note = 5-methyl
  modified_base 6..7: mod_base = OTHER; note = 5-methyl
  modified_base 11..13: mod_base = OTHER; note = 5-methyl
  source 1..16: mol_type = other DNA
tctgtccaagcccggt

SEQ ID NO: 9149 - DNA, 15 bp, synthetic construct
  misc_feature 1..15: note = Description of Artificial Sequence: Synthetic Antisense oligonucleotide
  modified_base 1: mod_base = OTHER; note = bicyclic nucleic acid (BNA)
  modified_base 15: mod_base = OTHER; note = bicyclic nucleic acid (BNA)
  modified_base 2: mod_base = OTHER; note = 5-methyl
  modified_base 6..7: mod_base = OTHER; note = 5-methyl
  modified_base 11..13: mod_base = OTHER; note = 5-methyl
  source 1..15: mol_type = other DNA
tctgtccaagcccgg

SEQ ID NO: 9150 - DNA, 14 bp, synthetic construct
  misc_feature 1..14: note = Description of Artificial Sequence: Synthetic Antisense oligonucleotide
  modified_base 1: mod_base = OTHER; note = bicyclic nucleic acid (BNA)
  modified_base 14: mod_base = OTHER; note = bicyclic nucleic acid (BNA)
  modified_base 2: mod_base = OTHER; note = 5-methyl
  modified_base 6..7: mod_base = OTHER; note = 5-methyl
  modified_base 11..13: mod_base = OTHER; note = 5-methyl
  source 1..14: mol_type = other DNA
tctgtccaagcccg

SEQ ID NO: 9151 - DNA, 13 bp, synthetic construct
  misc_feature 1..13: note = Description of Artificial Sequence: Synthetic Antisense oligonucleotide
  modified_base 1: mod_base = OTHER; note = bicyclic nucleic acid (BNA)
  modified_base 13: mod_base = OTHER; note = bicyclic nucleic acid (BNA)
  modified_base 2: mod_base = OTHER; note = 5-methyl
  modified_base 6..7: mod_base = OTHER; note = 5-methyl
  modified_base 11..13: mod_base = OTHER; note = 5-methyl
  source 1..13: mol_type = other DNA
tctgtccaagccc

SEQ ID NO: 9152 - DNA, 12 bp, synthetic construct
  misc_feature 1..12: note = Description of Artificial Sequence: Synthetic Antisense oligonucleotide
  modified_base 1: mod_base = OTHER; note = bicyclic nucleic acid (BNA)
  modified_base 12: mod_base = OTHER; note = bicyclic nucleic acid (BNA)
  modified_base 2: mod_base = OTHER; note = 5-methyl
  modified_base 6..7: mod_base = OTHER; note = 5-methyl
  modified_base 11..12: mod_base = OTHER; note = 5-methyl
  source 1..12: mol_type = other DNA
tctgtccaagcc

SEQ ID NO: 9153 - DNA, 11 bp, synthetic construct
  misc_feature 1..11: note = Description of Artificial Sequence: Synthetic Antisense oligonucleotide
  modified_base 1: mod_base = OTHER; note = bicyclic nucleic acid (BNA)
  modified_base 11: mod_base = OTHER; note = bicyclic nucleic acid (BNA)
  modified_base 2: mod_base = OTHER; note = 5-methyl
  modified_base 6..7: mod_base = OTHER; note = 5-methyl
  modified_base 11: mod_base = OTHER; note = 5-methyl
  source 1..11: mol_type = other DNA
tctgtccaagc

SEQ ID NO: 9154 - DNA, 10 bp, synthetic construct
  misc_feature 1..10: note = Description of Artificial Sequence: Synthetic Antisense oligonucleotide
  modified_base 1: mod_base = OTHER; note = bicyclic nucleic acid (BNA)
  modified_base 10: mod_base = OTHER; note = bicyclic nucleic acid (BNA)
  modified_base 2: mod_base = OTHER; note = 5-methyl
  modified_base 6..7: mod_base = OTHER; note = 5-methyl
  source 1..10: mol_type = other DNA
tctgtccaag

SEQ ID NO: 9155-9156 - skipped (2 entries)

SEQ ID NO: 9157 - DNA, 17 bp, synthetic construct
  misc_feature 1..17: note = Description of Artificial Sequence: Synthetic Antisense oligonucleotide
  modified_base 1: mod_base = OTHER; note = 5-methyl
  modified_base 5..6: mod_base = OTHER; note = 5-methyl
  modified_base 10..12: mod_base = OTHER; note = 5-methyl
  modified_base 1: mod_base = OTHER; note = bicyclic nucleic acid (BNA)
  modified_base 17: mod_base = OTHER; note = bicyclic nucleic acid (BNA)
  source 1..17: mol_type = other DNA
ctgtccaagcccggttg

SEQ ID NO: 9158 - DNA, 16 bp, synthetic construct
  misc_feature 1..16: note = Description of Artificial Sequence: Synthetic Antisense oligonucleotide
  modified_base 1: mod_base = OTHER; note = 5-methyl
  modified_base 5..6: mod_base = OTHER; note = 5-methyl
  modified_base 10..12: mod_base = OTHER; note = 5-methyl
  modified_base 1: mod_base = OTHER; note = bicyclic nucleic acid (BNA)
  modified_base 16: mod_base = OTHER; note = bicyclic nucleic acid (BNA)
  source 1..16: mol_type = other DNA
ctgtccaagcccggtt

SEQ ID NO: 9159 - DNA, 15 bp, synthetic construct
  misc_feature 1..15: note = Description of Artificial Sequence: Synthetic Antisense oligonucleotide
  modified_base 1: mod_base = OTHER; note = 5-methyl
  modified_base 5..6: mod_base = OTHER; note = 5-methyl
  modified_base 10..12: mod_base = OTHER; note = 5-methyl
  modified_base 1: mod_base = OTHER; note = bicyclic nucleic acid (BNA)
  modified_base 15: mod_base = OTHER; note = bicyclic nucleic acid (BNA)
  source 1..15: mol_type = other DNA
ctgtccaagcccggt

SEQ ID NO: 9160 - DNA, 14 bp, synthetic construct
  misc_feature 1..14: note = Description of Artificial Sequence: Synthetic Antisense oligonucleotide
  modified_base 1: mod_base = OTHER; note = 5-methyl
  modified_base 5..6: mod_base = OTHER; note = 5-methyl
  modified_base 10..12: mod_base = OTHER; note = 5-methyl
  modified_base 1: mod_base = OTHER; note = bicyclic nucleic acid (BNA)
  modified_base 14: mod_base = OTHER; note = bicyclic nucleic acid (BNA)
  source 1..14: mol_type = other DNA
ctgtccaagcccgg

SEQ ID NO: 9161 - DNA, 13 bp, synthetic construct
  misc_feature 1..13: note = Description of Artificial Sequence: Synthetic Antisense oligonucleotide
  modified_base 1: mod_base = OTHER; note = 5-methyl
  modified_base 5..6: mod_base = OTHER; note = 5-methyl
  modified_base 10..12: mod_base = OTHER; note = 5-methyl
  modified_base 1: mod_base = OTHER; note = bicyclic nucleic acid (BNA)
  modified_base 13: mod_base = OTHER; note = bicyclic nucleic acid (BNA)
  source 1..13: mol_type = other DNA
ctgtccaagcccg

SEQ ID NO: 9162 - DNA, 12 bp, synthetic construct
  misc_feature 1..12: note = Description of Artificial Sequence: Synthetic Antisense oligonucleotide
  modified_base 1: mod_base = OTHER; note = 5-methyl
  modified_base 5..6: mod_base = OTHER; note = 5-methyl
  modified_base 10..12: mod_base = OTHER; note = 5-methyl
  modified_base 1: mod_base = OTHER; note = bicyclic nucleic acid (BNA)
  modified_base 12: mod_base = OTHER; note = bicyclic nucleic acid (BNA)
  source 1..12: mol_type = other DNA
ctgtccaagccc

SEQ ID NO: 9163 - DNA, 11 bp, synthetic construct
  misc_feature 1..11: note = Description of Artificial Sequence: Synthetic Antisense oligonucleotide
  modified_base 1: mod_base = OTHER; note = 5-methyl
  modified_base 5..6: mod_base = OTHER; note = 5-methyl
  modified_base 10..11: mod_base = OTHER; note = 5-methyl
  modified_base 1: mod_base = OTHER; note = bicyclic nucleic acid (BNA)
  modified_base 11: mod_base = OTHER; note = bicyclic nucleic acid (BNA)
  source 1..11: mol_type = other DNA
ctgtccaagcc

SEQ ID NO: 9164 - DNA, 10 bp, synthetic construct
  misc_feature 1..10: note = Description of Artificial Sequence: Synthetic Antisense oligonucleotide
  modified_base 1: mod_base = OTHER; note = 5-methyl
  modified_base 5..6: mod_base = OTHER; note = 5-methyl
  modified_base 10: mod_base = OTHER; note = 5-methyl
  modified_base 1: mod_base = OTHER; note = bicyclic nucleic acid (BNA)
  modified_base 10: mod_base = OTHER; note = bicyclic nucleic acid (BNA)
  source 1..10: mol_type = other DNA
ctgtccaagc

SEQ ID NO: 9165-9166 - skipped (2 entries)

SEQ ID NO: 9167 - DNA, 20 bp, synthetic construct
  misc_feature 1..20: note = Description of Artificial Sequence: Synthetic Antisense oligonucleotide
  modified_base 1: mod_base = OTHER; note = bicyclic nucleic acid (BNA)
  modified_base 20: mod_base = OTHER; note = bicyclic nucleic acid (BNA)
  modified_base 4: mod_base = OTHER; note = 5-methyl
  modified_base 8..9: mod_base = OTHER; note = 5-methyl
  modified_base 13..15: mod_base = OTHER; note = 5-methyl
  source 1..20: mol_type = other DNA
gttctgtccaagcccggttg

SEQ ID NO: 9168 - DNA, 19 bp, synthetic construct
  misc_feature 1..19: note = Description of Artificial Sequence: Synthetic Antisense oligonucleotide
  modified_base 1: mod_base = OTHER; note = bicyclic nucleic acid (BNA)
  modified_base 19: mod_base = OTHER; note = bicyclic nucleic acid (BNA)
  modified_base 4: mod_base = OTHER; note = 5-methyl
  modified_base 8..9: mod_base = OTHER; note = 5-methyl
  modified_base 13..15: mod_base = OTHER; note = 5-methyl
  source 1..19: mol_type = other DNA
gttctgtccaagcccggtt

SEQ ID NO: 9169 - DNA, 18 bp, synthetic construct
  misc_feature 1..18: note = Description of Artificial Sequence: Synthetic Antisense oligonucleotide
  modified_base 1: mod_base = OTHER; note = bicyclic nucleic acid (BNA)
  modified_base 18: mod_base = OTHER; note = bicyclic nucleic acid (BNA)
  modified_base 4: mod_base = OTHER; note = 5-methyl
  modified_base 8..9: mod_base = OTHER; note = 5-methyl
  modified_base 13..15: mod_base = OTHER; note = 5-methyl
  source 1..18: mol_type = other DNA
gttctgtccaagcccggt

SEQ ID NO: 9170 - DNA, 17 bp, synthetic construct
  misc_feature 1..17: note = Description of Artificial Sequence: Synthetic Antisense oligonucleotide
  modified_base 1: mod_base = OTHER; note = bicyclic nucleic acid (BNA)
  modified_base 17: mod_base = OTHER; note = bicyclic nucleic acid (BNA)
  modified_base 4: mod_base = OTHER; note = 5-methyl
  modified_base 8..9: mod_base = OTHER; note = 5-methyl
  modified_base 13..15: mod_base = OTHER; note = 5-methyl
  source 1..17: mol_type = other DNA
gttctgtccaagcccgg

SEQ ID NO: 9171 - DNA, 16 bp, synthetic construct
  misc_feature 1..16: note = Description of Artificial Sequence: Synthetic Antisense oligonucleotide
  modified_base 1: mod_base = OTHER; note = bicyclic nucleic acid (BNA)
  modified_base 16: mod_base = OTHER; note = bicyclic nucleic acid (BNA)
  modified_base 4: mod_base = OTHER; note = 5-methyl
  modified_base 8..9: mod_base = OTHER; note = 5-methyl
  modified_base 13..15: mod_base = OTHER; note = 5-methyl
  source 1..16: mol_type = other DNA
gttctgtccaagcccg

SEQ ID NO: 9172 - DNA, 15 bp, synthetic construct
  misc_feature 1..15: note = Description of Artificial Sequence: Synthetic Antisense oligonucleotide
  modified_base 1: mod_base = OTHER; note = bicyclic nucleic acid (BNA)
  modified_base 15: mod_base = OTHER; note = bicyclic nucleic acid (BNA)
  modified_base 4: mod_base = OTHER; note = 5-methyl
  modified_base 8..9: mod_base = OTHER; note = 5-methyl
  modified_base 13..15: mod_base = OTHER; note = 5-methyl
  source 1..15: mol_type = other DNA
gttctgtccaagccc

SEQ ID NO: 9173 - DNA, 14 bp, synthetic construct
  misc_feature 1..14: note = Description of Artificial Sequence: Synthetic Antisense oligonucleotide
  modified_base 1: mod_base = OTHER; note = bicyclic nucleic acid (BNA)
  modified_base 14: mod_base = OTHER; note = bicyclic nucleic acid (BNA)
  modified_base 4: mod_base = OTHER; note = 5-methyl
  modified_base 8..9: mod_base = OTHER; note = 5-methyl
  modified_base 13..14: mod_base = OTHER; note = 5-methyl
  source 1..14: mol_type = other DNA
gttctgtccaagcc

SEQ ID NO: 9174 - DNA, 13 bp, synthetic construct
  misc_feature 1..13: note = Description of Artificial Sequence: Synthetic Antisense oligonucleotide
  modified_base 1: mod_base = OTHER; note = bicyclic nucleic acid (BNA)
  modified_base 13: mod_base = OTHER; note = bicyclic nucleic acid (BNA)
  modified_base 4: mod_base = OTHER; note = 5-methyl
  modified_base 8..9: mod_base = OTHER; note = 5-methyl
  modified_base 13: mod_base = OTHER; note = 5-methyl
  source 1..13: mol_type = other DNA
gttctgtccaagc

SEQ ID NO: 9175 - DNA, 12 bp, synthetic construct
  misc_feature 1..12: note = Description of Artificial Sequence: Synthetic Antisense oligonucleotide
  modified_base 1: mod_base = OTHER; note = bicyclic nucleic acid (BNA)
  modified_base 12: mod_base = OTHER; note = bicyclic nucleic acid (BNA)
  modified_base 4: mod_base = OTHER; note = 5-methyl
  modified_base 8..9: mod_base = OTHER; note = 5-methyl
  source 1..12: mol_type = other DNA
gttctgtccaag

SEQ ID NO: 9176 - DNA, 11 bp, synthetic construct
  misc_feature 1..11: note = Description of Artificial Sequence: Synthetic Antisense oligonucleotide
  modified_base 1: mod_base = OTHER; note = bicyclic nucleic acid (BNA)
  modified_base 11: mod_base = OTHER; note = bicyclic nucleic acid (BNA)
  modified_base 4: mod_base = OTHER; note = 5-methyl
  modified_base 8..9: mod_base = OTHER; note = 5-methyl
  source 1..11: mol_type = other DNA
gttctgtccaa

SEQ ID NO: 9177 - DNA, 10 bp, synthetic construct
  misc_feature 1..10: note = Description of Artificial Sequence: Synthetic Antisense oligonucleotide
  modified_base 1: mod_base = OTHER; note = bicyclic nucleic acid (BNA)
  modified_base 10: mod_base = OTHER; note = bicyclic nucleic acid (BNA)
  modified_base 4: mod_base = OTHER; note = 5-methyl
  modified_base 8..9: mod_base = OTHER; note = 5-methyl
  source 1..10: mol_type = other DNA
gttctgtcca

SEQ ID NO: 9178-9179 - skipped (2 entries)

SEQ ID NO: 9180 - DNA, 20 bp, synthetic construct
  misc_feature 1..20: note = Description of Artificial Sequence: Synthetic Antisense oligonucleotide
  modified_base 1: mod_base = OTHER; note = bicyclic nucleic acid (BNA)
  modified_base 20: mod_base = OTHER; note = bicyclic nucleic acid (BNA)
  modified_base 5: mod_base = OTHER; note = 5-methyl
  modified_base 9..10: mod_base = OTHER; note = 5-methyl
  modified_base 14..16: mod_base = OTHER; note = 5-methyl
  source 1..20: mol_type = other DNA
agttctgtccaagcccggtt

SEQ ID NO: 9181 - DNA, 19 bp, synthetic construct
  misc_feature 1..19: note = Description of Artificial Sequence: Synthetic Antisense oligonucleotide
  modified_base 1: mod_base = OTHER; note = bicyclic nucleic acid (BNA)
  modified_base 19: mod_base = OTHER; note = bicyclic nucleic acid (BNA)
  modified_base 5: mod_base = OTHER; note = 5-methyl
  modified_base 9..10: mod_base = OTHER; note = 5-methyl
  modified_base 14..16: mod_base = OTHER; note = 5-methyl
  source 1..19: mol_type = other DNA
agttctgtccaagcccggt

SEQ ID NO: 9182 - DNA, 18 bp, synthetic construct
  misc_feature 1..18: note = Description of Artificial Sequence: Synthetic Antisense oligonucleotide
  modified_base 1: mod_base = OTHER; note = bicyclic nucleic acid (BNA)
  modified_base 18: mod_base = OTHER; note = bicyclic nucleic acid (BNA)
  modified_base 5: mod_base = OTHER; note = 5-methyl
  modified_base 9..10: mod_base = OTHER; note = 5-methyl
  modified_base 14..16: mod_base = OTHER; note = 5-methyl
  source 1..18: mol_type = other DNA
agttctgtccaagcccgg

SEQ ID NO: 9183 - DNA, 17 bp, synthetic construct
  misc_feature 1..17: note = Description of Artificial Sequence: Synthetic Antisense oligonucleotide
  modified_base 1: mod_base = OTHER; note = bicyclic nucleic acid (BNA)
  modified_base 17: mod_base = OTHER; note = bicyclic nucleic acid (BNA)
  modified_base 5: mod_base = OTHER; note = 5-methyl
  modified_base 9..10: mod_base = OTHER; note = 5-methyl
  modified_base 14..16: mod_base = OTHER; note = 5-methyl
  source 1..17: mol_type = other DNA
agttctgtccaagcccg

SEQ ID NO: 9184 - DNA, 16 bp, synthetic construct
  misc_feature 1..16: note = Description of Artificial Sequence: Synthetic Antisense oligonucleotide
  modified_base 1: mod_base = OTHER; note = bicyclic nucleic acid (BNA)
  modified_base 16: mod_base = OTHER; note = bicyclic nucleic acid (BNA)
  modified_base 5: mod_base = OTHER; note = 5-methyl
  modified_base 9..10: mod_base = OTHER; note = 5-methyl
  modified_base 14..16: mod_base = OTHER; note = 5-methyl
  source 1..16: mol_type = other DNA
agttctgtccaagccc

SEQ ID NO: 9185 - DNA, 15 bp, synthetic construct
  misc_feature 1..15: note = Description of Artificial Sequence: Synthetic Antisense oligonucleotide
  modified_base 1: mod_base = OTHER; note = bicyclic nucleic acid (BNA)
  modified_base 15: mod_base = OTHER; note = bicyclic nucleic acid (BNA)
  modified_base 5: mod_base = OTHER; note = 5-methyl
  modified_base 9..10: mod_base = OTHER; note = 5-methyl
  modified_base 14..15: mod_base = OTHER; note = 5-methyl
  source 1..15: mol_type = other DNA
agttctgtccaagcc

SEQ ID NO: 9186 - DNA, 14 bp, synthetic construct
  misc_feature 1..14: note = Description of Artificial Sequence: Synthetic Antisense oligonucleotide
  modified_base 1: mod_base = OTHER; note = bicyclic nucleic acid (BNA)
  modified_base 14: mod_base = OTHER; note = bicyclic nucleic acid (BNA)
  modified_base 5: mod_base = OTHER; note = 5-methyl
  modified_base 9..10: mod_base = OTHER; note = 5-methyl
  modified_base 14: mod_base = OTHER; note = 5-methyl
  source 1..14: mol_type = other DNA
agttctgtccaagc

SEQ ID NO: 9187 - DNA, 13 bp, synthetic construct
  misc_feature 1..13: note = Description of Artificial Sequence: Synthetic Antisense oligonucleotide
  modified_base 1: mod_base = OTHER; note = bicyclic nucleic acid (BNA)
  modified_base 13: mod_base = OTHER; note = bicyclic nucleic acid (BNA)
  modified_base 5: mod_base = OTHER; note = 5-methyl
  modified_base 9..10: mod_base = OTHER; note = 5-methyl
  source 1..13: mol_type = other DNA
agttctgtccaag

SEQ ID NO: 9188 - DNA, 12 bp, synthetic construct
  misc_feature 1..12: note = Description of Artificial Sequence: Synthetic Antisense oligonucleotide
  modified_base 1: mod_base = OTHER; note = bicyclic nucleic acid (BNA)
  modified_base 12: mod_base = OTHER; note = bicyclic nucleic acid (BNA)
  modified_base 5: mod_base = OTHER; note = 5-methyl
  modified_base 9..10: mod_base = OTHER; note = 5-methyl
  source 1..12: mol_type = other DNA
agttctgtccaa

SEQ ID NO: 9189 - DNA, 11 bp, synthetic construct
  misc_feature 1..11: note = Description of Artificial Sequence: Synthetic Antisense oligonucleotide
  modified_base 1: mod_base = OTHER; note = bicyclic nucleic acid (BNA)
  modified_base 11: mod_base = OTHER; note = bicyclic nucleic acid (BNA)
  modified_base 5: mod_base = OTHER; note = 5-methyl
  modified_base 9..10: mod_base = OTHER; note = 5-methyl
  source 1..11: mol_type = other DNA
agttctgtcca

SEQ ID NO: 9190 - DNA, 10 bp, synthetic construct
  misc_feature 1..10: note = Description of Artificial Sequence: Synthetic Antisense oligonucleotide
  modified_base 1: mod_base = OTHER; note = bicyclic nucleic acid (BNA)
  modified_base 10: mod_base = OTHER; note = bicyclic nucleic acid (BNA)
  modified_base 5: mod_base = OTHER; note = 5-methyl
  modified_base 9..10: mod_base = OTHER; note = 5-methyl
  source 1..10: mol_type = other DNA
agttctgtcc

SEQ ID NO: 9191-9192 - skipped (2 entries)

SEQ ID NO: 9193 - DNA, 20 bp, synthetic construct
  misc_feature 1..20: note = Description of Artificial Sequence: Synthetic Antisense oligonucleotide
  modified_base 1: mod_base = OTHER; note = bicyclic nucleic acid (BNA)
  modified_base 20: mod_base = OTHER; note = bicyclic nucleic acid (BNA)
  modified_base 6: mod_base = OTHER; note = 5-methyl
  modified_base 10..11: mod_base = OTHER; note = 5-methyl
  modified_base 15..17: mod_base = OTHER; note = 5-methyl
  source 1..20: mol_type = other DNA
aagttctgtccaagcccggt

SEQ ID NO: 9194 - DNA, 19 bp, synthetic construct
  misc_feature 1..19: note = Description of Artificial Sequence: Synthetic Antisense oligonucleotide
  modified_base 1: mod_base = OTHER; note = bicyclic nucleic acid (BNA)
  modified_base 19: mod_base = OTHER; note = bicyclic nucleic acid (BNA)
  modified_base 6: mod_base = OTHER; note = 5-methyl
  modified_base 10..11: mod_base = OTHER; note = 5-methyl
  modified_base 15..17: mod_base = OTHER; note = 5-methyl
  source 1..19: mol_type = other DNA
aagttctgtccaagcccgg

SEQ ID NO: 9195 - DNA, 18 bp, synthetic construct
  misc_feature 1..18: note = Description of Artificial Sequence: Synthetic Antisense oligonucleotide
  modified_base 1: mod_base = OTHER; note = bicyclic nucleic acid (BNA)
  modified_base 18: mod_base = OTHER; note = bicyclic nucleic acid (BNA)
  modified_base 6: mod_base = OTHER; note = 5-methyl
  modified_base 10..11: mod_base = OTHER; note = 5-methyl
  modified_base 15..17: mod_base = OTHER; note = 5-methyl
  source 1..18: mol_type = other DNA
aagttctgtccaagcccg

SEQ ID NO: 9196 - DNA, 17 bp, synthetic construct
  misc_feature 1..17: note = Description of Artificial Sequence: Synthetic Antisense oligonucleotide
  modified_base 1: mod_base = OTHER; note = bicyclic nucleic acid (BNA)
  modified_base 17: mod_base = OTHER; note = bicyclic nucleic acid (BNA)
  modified_base 6: mod_base = OTHER; note = 5-methyl
  modified_base 10..11: mod_base = OTHER; note = 5-methyl
  modified_base 15..17: mod_base = OTHER; note = 5-methyl
  source 1..17: mol_type = other DNA
aagttctgtccaagccc

SEQ ID NO: 9197 - DNA, 16 bp, synthetic construct
  misc_feature 1..16: note = Description of Artificial Sequence: Synthetic Antisense oligonucleotide
  modified_base 1: mod_base = OTHER; note = bicyclic nucleic acid (BNA)
  modified_base 16: mod_base = OTHER; note = bicyclic nucleic acid (BNA)
  modified_base 6: mod_base = OTHER; note = 5-methyl
  modified_base 10..11: mod_base = OTHER; note = 5-methyl
  modified_base 15..16: mod_base = OTHER; note = 5-methyl
  source 1..16: mol_type = other DNA
aagttctgtccaagcc

SEQ ID NO: 9198 - DNA, 15 bp, synthetic construct
  misc_feature 1..15: note = Description of Artificial Sequence: Synthetic Antisense oligonucleotide
  modified_base 1: mod_base = OTHER; note = bicyclic nucleic acid (BNA)
  modified_base 15: mod_base = OTHER; note = bicyclic nucleic acid (BNA)
  modified_base 6: mod_base = OTHER; note = 5-methyl
  modified_base 10..11: mod_base = OTHER; note = 5-methyl
  modified_base 15: mod_base = OTHER; note = 5-methyl
  source 1..15: mol_type = other DNA
aagttctgtccaagc

SEQ ID NO: 9199 - DNA, 14 bp, synthetic construct
  misc_feature 1..14: note = Description of Artificial Sequence: Synthetic Antisense oligonucleotide
  modified_base 1: mod_base = OTHER; note = bicyclic nucleic acid (BNA)
  modified_base 14: mod_base = OTHER; note = bicyclic nucleic acid (BNA)
  modified_base 6: mod_base = OTHER; note = 5-methyl
  modified_base 10..11: mod_base = OTHER; note = 5-methyl
  source 1..14: mol_type = other DNA
aagttctgtccaag

SEQ ID NO: 9200 - DNA, 13 bp, synthetic construct
  misc_feature 1..13: note = Description of Artificial Sequence: Synthetic Antisense oligonucleotide
  modified_base 1: mod_base = OTHER; note = bicyclic nucleic acid (BNA)
  modified_base 13: mod_base = OTHER; note = bicyclic nucleic acid (BNA)
  modified_base 6: mod_base = OTHER; note = 5-methyl
  modified_base 10..11: mod_base = OTHER; note = 5-methyl
  source 1..13: mol_type = other DNA
aagttctgtccaa

SEQ ID NO: 9201 - DNA, 12 bp, synthetic construct
  misc_feature 1..12: note = Description of Artificial Sequence: Synthetic Antisense oligonucleotide
  modified_base 1: mod_base = OTHER; note = bicyclic nucleic acid (BNA)
  modified_base 12: mod_base = OTHER; note = bicyclic nucleic acid (BNA)
  modified_base 6: mod_base = OTHER; note = 5-methyl
  modified_base 10..11: mod_base = OTHER; note = 5-methyl
  source 1..12: mol_type = other DNA
aagttctgtcca

SEQ ID NO: 9202 - DNA, 11 bp, synthetic construct
  misc_feature 1..11: note = Description of Artificial Sequence: Synthetic Antisense oligonucleotide
  modified_base 1: mod_base = OTHER; note = bicyclic nucleic acid (BNA)
  modified_base 11: mod_base = OTHER; note = bicyclic nucleic acid (BNA)
  modified_base 6: mod_base = OTHER; note = 5-methyl
  modified_base 10..11: mod_base = OTHER; note = 5-methyl
  source 1..11: mol_type = other DNA
aagttctgtcc

SEQ ID NO: 9203 - DNA, 10 bp, synthetic construct
  misc_feature 1..10: note = Description of Artificial Sequence: Synthetic Antisense oligonucleotide
  modified_base 1: mod_base = OTHER; note = bicyclic nucleic acid (BNA)
  modified_base 10: mod_base = OTHER; note = bicyclic nucleic acid (BNA)
  modified_base 6: mod_base = OTHER; note = 5-methyl
  modified_base 10: mod_base = OTHER; note = 5-methyl
  source 1..10: mol_type = other DNA
aagttctgtc

SEQ ID NO: 9204-9205 - skipped (2 entries)

SEQ ID NO: 9206 - DNA, 20 bp, synthetic construct
  misc_feature 1..20: note = Description of Artificial Sequence: Synthetic Antisense oligonucleotide
  modified_base 1: mod_base = OTHER; note = bicyclic nucleic acid (BNA)
  modified_base 20: mod_base = OTHER; note = bicyclic nucleic acid (BNA)
  modified_base 7: mod_base = OTHER; note = 5-methyl
  modified_base 11..12: mod_base = OTHER; note = 5-methyl
  modified_base 16..18: mod_base = OTHER; note = 5-methyl
  source 1..20: mol_type = other DNA
taagttctgtccaagcccgg

SEQ ID NO: 9207 - DNA, 19 bp, synthetic construct
  misc_feature 1..19: note = Description of Artificial Sequence: Synthetic Antisense oligonucleotide
  modified_base 1: mod_base = OTHER; note = bicyclic nucleic acid (BNA)
  modified_base 19: mod_base = OTHER; note = bicyclic nucleic acid (BNA)
  modified_base 7: mod_base = OTHER; note = 5-methyl
  modified_base 11..12: mod_base = OTHER; note = 5-methyl
  modified_base 16..18: mod_base = OTHER; note = 5-methyl
  source 1..19: mol_type = other DNA
taagttctgtccaagcccg

SEQ ID NO: 9208 - DNA, 18 bp, synthetic construct
  misc_feature 1..18: note = Description of Artificial Sequence: Synthetic Antisense oligonucleotide
  modified_base 1: mod_base = OTHER; note = bicyclic nucleic acid (BNA)
  modified_base 18: mod_base = OTHER; note = bicyclic nucleic acid (BNA)
  modified_base 7: mod_base = OTHER; note = 5-methyl
  modified_base 11..12: mod_base = OTHER; note = 5-methyl
  modified_base 16..18: mod_base = OTHER; note = 5-methyl
  source 1..18: mol_type = other DNA
taagttctgtccaagccc

SEQ ID NO: 9209 - DNA, 17 bp, synthetic construct
  misc_feature 1..17: note = Description of Artificial Sequence: Synthetic Antisense oligonucleotide
  modified_base 1: mod_base = OTHER; note = bicyclic nucleic acid (BNA)
  modified_base 17: mod_base = OTHER; note = bicyclic nucleic acid (BNA)
  modified_base 7: mod_base = OTHER; note = 5-methyl
  modified_base 11..12: mod_base = OTHER; note = 5-methyl
  modified_base 16..17: mod_base = OTHER; note = 5-methyl
  source 1..17: mol_type = other DNA
taagttctgtccaagcc

SEQ ID NO: 9210 - DNA, 16 bp, synthetic construct
  misc_feature 1..16: note = Description of Artificial Sequence: Synthetic Antisense oligonucleotide
  modified_base 1: mod_base = OTHER; note = bicyclic nucleic acid (BNA)
  modified_base 16: mod_base = OTHER; note = bicyclic nucleic acid (BNA)
  modified_base 7: mod_base = OTHER; note = 5-methyl
  modified_base 11..12: mod_base = OTHER; note = 5-methyl
  modified_base 16: mod_base = OTHER; note = 5-methyl
  source 1..16: mol_type = other DNA
taagttctgtccaagc

SEQ ID NO: 9211 - DNA, 14 bp, synthetic construct
  misc_feature 1..14: note = Description of Artificial Sequence: Synthetic Antisense oligonucleotide
  modified_base 1: mod_base = OTHER; note = bicyclic nucleic acid (BNA)
  modified_base 14: mod_base = OTHER; note = bicyclic nucleic acid (BNA)
  modified_base 7: mod_base = OTHER; note = 5-methyl
  modified_base 11..12: mod_base = OTHER; note = 5-methyl
  source 1..14: mol_type = other DNA
taagttctgtccaa

SEQ ID NO: 9212 - DNA, 13 bp, synthetic construct
  misc_feature 1..13: note = Description of Artificial Sequence: Synthetic Antisense oligonucleotide
  modified_base 1: mod_base = OTHER; note = bicyclic nucleic acid (BNA)
  modified_base 13: mod_base = OTHER; note = bicyclic nucleic acid (BNA)
  modified_base 7: mod_base = OTHER; note = 5-methyl
  modified_base 11..12: mod_base = OTHER; note = 5-methyl
  source 1..13: mol_type = other DNA
taagttctgtcca

SEQ ID NO: 9213 - DNA, 12 bp, synthetic construct
  misc_feature 1..12: note = Description of Artificial Sequence: Synthetic Antisense oligonucleotide
  modified_base 1: mod_base = OTHER; note = bicyclic nucleic acid (BNA)
  modified_base 12: mod_base = OTHER; note = bicyclic nucleic acid (BNA)
  modified_base 7: mod_base = OTHER; note = 5-methyl
  modified_base 11..12: mod_base = OTHER; note = 5-methyl
  source 1..12: mol_type = other DNA
taagttctgtcc

SEQ ID NO: 9214 - DNA, 11 bp, synthetic construct
  misc_feature 1..11: note = Description of Artificial Sequence: Synthetic Antisense oligonucleotide
  modified_base 1: mod_base = OTHER; note = bicyclic nucleic acid (BNA)
  modified_base 11: mod_base = OTHER; note = bicyclic nucleic acid (BNA)
  modified_base 7: mod_base = OTHER; note = 5-methyl
  modified_base 11: mod_base = OTHER; note = 5-methyl
  source 1..11: mol_type = other DNA
taagttctgtc

SEQ ID NO: 9215 - DNA, 10 bp, synthetic construct
  misc_feature 1..10: note = Description of Artificial Sequence: Synthetic Antisense oligonucleotide
  modified_base 1: mod_base = OTHER; note = bicyclic nucleic acid (BNA)
  modified_base 10: mod_base = OTHER; note = bicyclic nucleic acid (BNA)
  modified_base 7: mod_base = OTHER; note = 5-methyl
  source 1..10: mol_type = other DNA
taagttctgt

SEQ ID NO: 9216-9217 - skipped (2 entries)

SEQ ID NO: 9218 - DNA, 20 bp, synthetic construct
  misc_feature 1..20: note = Description of Artificial Sequence: Synthetic Antisense oligonucleotide
  modified_base 1: mod_base = OTHER; note = bicyclic nucleic acid (BNA)
  modified_base 20: mod_base = OTHER; note = bicyclic nucleic acid (BNA)
  modified_base 8: mod_base = OTHER; note = 5-methyl
  modified_base 12..13: mod_base = OTHER; note = 5-methyl
  modified_base 17..19: mod_base = OTHER; note = 5-methyl
  source 1..20: mol_type = other DNA
gtaagttctgtccaagcccg

SEQ ID NO: 9219 - DNA, 19 bp, synthetic construct
  misc_feature 1..19: note = Description of Artificial Sequence: Synthetic Antisense oligonucleotide
  modified_base 1: mod_base = OTHER; note = bicyclic nucleic acid (BNA)
  modified_base 19: mod_base = OTHER; note = bicyclic nucleic acid (BNA)
  modified_base 8: mod_base = OTHER; note = 5-methyl
  modified_base 12..13: mod_base = OTHER; note = 5-methyl
  modified_base 17..19: mod_base = OTHER; note = 5-methyl
  source 1..19: mol_type = other DNA
gtaagttctgtccaagccc

SEQ ID NO: 9220 - DNA, 17 bp, synthetic construct
  misc_feature 1..17: note = Description of Artificial Sequence: Synthetic Antisense oligonucleotide
  modified_base 1: mod_base = OTHER; note = bicyclic nucleic acid (BNA)
  modified_base 17: mod_base = OTHER; note = bicyclic nucleic acid (BNA)
  modified_base 8: mod_base = OTHER; note = 5-methyl
  modified_base 12..13: mod_base = OTHER; note = 5-methyl
  modified_base 17: mod_base = OTHER; note = 5-methyl
  source 1..17: mol_type = other DNA
gtaagttctgtccaagc

SEQ ID NO: 9221 - DNA, 16 bp, synthetic construct
  misc_feature 1..16: note = Description of Artificial Sequence: Synthetic Antisense oligonucleotide
  modified_base 1: mod_base = OTHER; note = bicyclic nucleic acid (BNA)
  modified_base 16: mod_base = OTHER; note = bicyclic nucleic acid (BNA)
  modified_base 8: mod_base = OTHER; note = 5-methyl
  modified_base 12..13: mod_base = OTHER; note = 5-methyl
  source 1..16: mol_type = other DNA
gtaagttctgtccaag

SEQ ID NO: 9222 - DNA, 15 bp, synthetic construct
  misc_feature 1..15: note = Description of Artificial Sequence: Synthetic Antisense oligonucleotide
  modified_base 1: mod_base = OTHER; note = bicyclic nucleic acid (BNA)
  modified_base 15: mod_base = OTHER; note = bicyclic nucleic acid (BNA)
  modified_base 8: mod_base = OTHER; note = 5-methyl
  modified_base 12..13: mod_base = OTHER; note = 5-methyl
  source 1..15: mol_type = other DNA
gtaagttctgtccaa

SEQ ID NO: 9223 - DNA, 14 bp, synthetic construct
  misc_feature 1..14: note = Description of Artificial Sequence: Synthetic Antisense oligonucleotide
  modified_base 1: mod_base = OTHER; note = bicyclic nucleic acid (BNA)
  modified_base 14: mod_base = OTHER; note = bicyclic nucleic acid (BNA)
  modified_base 8: mod_base = OTHER; note = 5-methyl
  modified_base 12..13: mod_base = OTHER; note = 5-methyl
  source 1..14: mol_type = other DNA
gtaagttctgtcca

SEQ ID NO: 9224 - DNA, 13 bp, synthetic construct
  misc_feature 1..13: note = Description of Artificial Sequence: Synthetic Antisense oligonucleotide
  modified_base 1: mod_base = OTHER; note = bicyclic nucleic acid (BNA)
  modified_base 13: mod_base = OTHER; note = bicyclic nucleic acid (BNA)
  modified_base 8: mod_base = OTHER; note = 5-methyl
  modified_base 12..13: mod_base = OTHER; note = 5-methyl
  source 1..13: mol_type = other DNA
gtaagttctgtcc

SEQ ID NO: 9225 - DNA, 12 bp, synthetic construct
  misc_feature 1..12: note = Description of Artificial Sequence: Synthetic Antisense oligonucleotide
  modified_base 1: mod_base = OTHER; note = bicyclic nucleic acid (BNA)
  modified_base 12: mod_base = OTHER; note = bicyclic nucleic acid (BNA)
  modified_base 8: mod_base = OTHER; note = 5-methyl
  modified_base 12: mod_base = OTHER; note = 5-methyl
  source 1..12: mol_type = other DNA
gtaagttctgtc

SEQ ID NO: 9226 - DNA, 11 bp, synthetic construct
  misc_feature 1..11: note = Description of Artificial Sequence: Synthetic Antisense oligonucleotide
  modified_base 1: mod_base = OTHER; note = bicyclic nucleic acid (BNA)
  modified_base 11: mod_base = OTHER; note = bicyclic nucleic acid (BNA)
  modified_base 8: mod_base = OTHER; note = 5-methyl
  source 1..11: mol_type = other DNA
gtaagttctgt

SEQ ID NO: 9227 - DNA, 10 bp, synthetic construct
  misc_feature 1..10: note = Description of Artificial Sequence: Synthetic Antisense oligonucleotide
  modified_base 1: mod_base = OTHER; note = bicyclic nucleic acid (BNA)
  modified_base 10: mod_base = OTHER; note = bicyclic nucleic acid (BNA)
  modified_base 8: mod_base = OTHER; note = 5-methyl
  source 1..10: mol_type = other DNA
gtaagttctg

SEQ ID NO: 9228-9229 - skipped (2 entries)

SEQ ID NO: 9230 - DNA, 20 bp, synthetic construct
  misc_feature 1..20: note = Description of Artificial Sequence: Synthetic Antisense oligonucleotide
  modified_base 1: mod_base = OTHER; note = bicyclic nucleic acid (BNA)
  modified_base 20: mod_base = OTHER; note = bicyclic nucleic acid (BNA)
  modified_base 9: mod_base = OTHER; note = 5-methyl
  modified_base 13..14: mod_base = OTHER; note = 5-methyl
  modified_base 18..20: mod_base = OTHER; note = 5-methyl
  source 1..20: mol_type = other DNA
ggtaagttctgtccaagccc

SEQ ID NO: 9231 - DNA, 19 bp, synthetic construct
  misc_feature 1..19: note = Description of Artificial Sequence: Synthetic Antisense oligonucleotide
  modified_base 1: mod_base = OTHER; note = bicyclic nucleic acid (BNA)
  modified_base 19: mod_base = OTHER; note = bicyclic nucleic acid (BNA)
  modified_base 9: mod_base = OTHER; note = 5-methyl
  modified_base 13..14: mod_base = OTHER; note = 5-methyl
  modified_base 18..19: mod_base = OTHER; note = 5-methyl
  source 1..19: mol_type = other DNA
ggtaagttctgtccaagcc

SEQ ID NO: 9232 - DNA, 17 bp, synthetic construct
  misc_feature 1..17: note = Description of Artificial Sequence: Synthetic Antisense oligonucleotide
  modified_base 1: mod_base = OTHER; note = bicyclic nucleic acid (BNA)
  modified_base 17: mod_base = OTHER; note = bicyclic nucleic acid (BNA)
  modified_base 9: mod_base = OTHER; note = 5-methyl
  modified_base 13..14: mod_base = OTHER; note = 5-methyl
  source 1..17: mol_type = other DNA
ggtaagttctgtccaag

SEQ ID NO: 9233 - DNA, 16 bp, synthetic construct
  misc_feature 1..16: note = Description of Artificial Sequence: Synthetic Antisense oligonucleotide
  modified_base 1: mod_base = OTHER; note = bicyclic nucleic acid (BNA)
  modified_base 16: mod_base = OTHER; note = bicyclic nucleic acid (BNA)
  modified_base 9: mod_base = OTHER; note = 5-methyl
  modified_base 13..14: mod_base = OTHER; note = 5-methyl
  source 1..16: mol_type = other DNA
ggtaagttctgtccaa

SEQ ID NO: 9234 - DNA, 15 bp, synthetic construct
  misc_feature 1..15: note = Description of Artificial Sequence: Synthetic Antisense oligonucleotide
  modified_base 1: mod_base = OTHER; note = bicyclic nucleic acid (BNA)
  modified_base 15: mod_base = OTHER; note = bicyclic nucleic acid (BNA)
  modified_base 9: mod_base = OTHER; note = 5-methyl
  modified_base 13..14: mod_base = OTHER; note = 5-methyl
  source 1..15: mol_type = other DNA
ggtaagttctgtcca

SEQ ID NO: 9235 - DNA, 14 bp, synthetic construct
  misc_feature 1..14: note = Description of Artificial Sequence: Synthetic Antisense oligonucleotide
  modified_base 1: mod_base = OTHER; note = bicyclic nucleic acid (BNA)
  modified_base 14: mod_base = OTHER; note = bicyclic nucleic acid (BNA)
  modified_base 9: mod_base = OTHER; note = 5-methyl
  modified_base 13..14: mod_base = OTHER; note = 5-methyl
  source 1..14: mol_type = other DNA
ggtaagttctgtcc

SEQ ID NO: 9236 - DNA, 13 bp, synthetic construct
  misc_feature 1..13: note = Description of Artificial Sequence: Synthetic Antisense oligonucleotide
  modified_base 1: mod_base = OTHER; note = bicyclic nucleic acid (BNA)
  modified_base 13: mod_base = OTHER; note = bicyclic nucleic acid (BNA)
  modified_base 9: mod_base = OTHER; note = 5-methyl
  modified_base 13: mod_base = OTHER; note = 5-methyl
  source 1..13: mol_type = other DNA
ggtaagttctgtc

SEQ ID NO: 9237 - DNA, 12 bp, synthetic construct
  misc_feature 1..12: note = Description of Artificial Sequence: Synthetic Antisense oligonucleotide
  modified_base 1: mod_base = OTHER; note = bicyclic nucleic acid (BNA)
  modified_base 12: mod_base = OTHER; note = bicyclic nucleic acid (BNA)
  modified_base 9: mod_base = OTHER; note = 5-methyl
  source 1..12: mol_type = other DNA
ggtaagttctgt

SEQ ID NO: 9238 - DNA, 11 bp, synthetic construct
  misc_feature 1..11: note = Description of Artificial Sequence: Synthetic Antisense oligonucleotide
  modified_base 1: mod_base = OTHER; note = bicyclic nucleic acid (BNA)
  modified_base 11: mod_base = OTHER; note = bicyclic nucleic acid (BNA)
  modified_base 9: mod_base = OTHER; note = 5-methyl
  source 1..11: mol_type = other DNA
ggtaagttctg

SEQ ID NO: 9239 - DNA, 10 bp, synthetic construct
  misc_feature 1..10: note = Description of Artificial Sequence: Synthetic Antisense oligonucleotide
  modified_base 1: mod_base = OTHER; note = bicyclic nucleic acid (BNA)
  modified_base 10: mod_base = OTHER; note = bicyclic nucleic acid (BNA)
  modified_base 9: mod_base = OTHER; note = 5-methyl
  source 1..10: mol_type = other DNA
ggtaagttct

SEQ ID NO: 9240 - skipped

SEQ ID NO: 9241 - DNA, 20 bp, synthetic construct
  misc_feature 1..20: note = Description of Artificial Sequence: Synthetic Antisense oligonucleotide
  modified_base 1: mod_base = OTHER; note = 5-methyl
  modified_base 10: mod_base = OTHER; note = 5-methyl
  modified_base 14..15: mod_base = OTHER; note = 5-methyl
  modified_base 19..20: mod_base = OTHER; note = 5-methyl
  modified_base 1: mod_base = OTHER; note = bicyclic nucleic acid (BNA)
  modified_base 20: mod_base = OTHER; note = bicyclic nucleic acid (BNA)
  source 1..20: mol_type = other DNA
cggtaagttctgtccaagcc

SEQ ID NO: 9242 - DNA, 19 bp, synthetic construct
  misc_feature 1..19: note = Description of Artificial Sequence: Synthetic Antisense oligonucleotide
  modified_base 1: mod_base = OTHER; note = 5-methyl
  modified_base 10: mod_base = OTHER; note = 5-methyl
  modified_base 14..15: mod_base = OTHER; note = 5-methyl
  modified_base 19: mod_base = OTHER; note = 5-methyl
  modified_base 1: mod_base = OTHER; note = bicyclic nucleic acid (BNA)
  modified_base 19: mod_base = OTHER; note = bicyclic nucleic acid (BNA)
  source 1..19: mol_type = other DNA
cggtaagttctgtccaagc

SEQ ID NO: 9243 - DNA, 18 bp, synthetic construct
  misc_feature 1..18: note = Description of Artificial Sequence: Synthetic Antisense oligonucleotide
  modified_base 1: mod_base = OTHER; note = 5-methyl
  modified_base 10: mod_base = OTHER; note = 5-methyl
  modified_base 14..15: mod_base = OTHER; note = 5-methyl
  modified_base 1: mod_base = OTHER; note = bicyclic nucleic acid (BNA)
  modified_base 18: mod_base = OTHER; note = bicyclic nucleic acid (BNA)
  source 1..18: mol_type = other DNA
cggtaagttctgtccaag

SEQ ID NO: 9244 - DNA, 17 bp, synthetic construct
  misc_feature 1..17: note = Description of Artificial Sequence: Synthetic Antisense oligonucleotide
  modified_base 1: mod_base = OTHER; note = 5-methyl
  modified_base 10: mod_base = OTHER; note = 5-methyl
  modified_base 14..15: mod_base = OTHER; note = 5-methyl
  modified_base 1: mod_base = OTHER; note = bicyclic nucleic acid (BNA)
  modified_base 17: mod_base = OTHER; note = bicyclic nucleic acid (BNA)
  source 1..17: mol_type = other DNA
cggtaagttctgtccaa

SEQ ID NO: 9245 - DNA, 16 bp, synthetic construct
  misc_feature 1..16: note = Description of Artificial Sequence: Synthetic Antisense oligonucleotide
  modified_base 1: mod_base = OTHER; note = 5-methyl
  modified_base 10: mod_base = OTHER; note = 5-methyl
  modified_base 14..15: mod_base = OTHER; note = 5-methyl
  modified_base 1: mod_base = OTHER; note = bicyclic nucleic acid (BNA)
  modified_base 16: mod_base = OTHER; note = bicyclic nucleic acid (BNA)
  source 1..16: mol_type = other DNA
cggtaagttctgtcca

SEQ ID NO: 9246 - DNA, 15 bp, synthetic construct
  misc_feature 1..15: note = Description of Artificial Sequence: Synthetic Antisense oligonucleotide
  modified_base 1: mod_base = OTHER; note = 5-methyl
  modified_base 10: mod_base = OTHER; note = 5-methyl
  modified_base 14..15: mod_base = OTHER; note = 5-methyl
  modified_base 1: mod_base = OTHER; note = bicyclic nucleic acid (BNA)
  modified_base 15: mod_base = OTHER; note = bicyclic nucleic acid (BNA)
  source 1..15: mol_type = other DNA
cggtaagttctgtcc

SEQ ID NO: 9247 - DNA, 14 bp, synthetic construct
  misc_feature 1..14: note = Description of Artificial Sequence: Synthetic Antisense oligonucleotide
  modified_base 1: mod_base = OTHER; note = 5-methyl
  modified_base 10: mod_base = OTHER; note = 5-methyl
  modified_base 14: mod_base = OTHER; note = 5-methyl
  modified_base 1: mod_base = OTHER; note = bicyclic nucleic acid (BNA)
  modified_base 14: mod_base = OTHER; note = bicyclic nucleic acid (BNA)
  source 1..14: mol_type = other DNA
cggtaagttctgtc

SEQ ID NO: 9248 - DNA, 13 bp, synthetic construct
  misc_feature 1..13: note = Description of Artificial Sequence: Synthetic Antisense oligonucleotide
  modified_base 1: mod_base = OTHER; note = 5-methyl
  modified_base 10: mod_base = OTHER; note = 5-methyl
  modified_base 1: mod_base = OTHER; note = bicyclic nucleic acid (BNA)
  modified_base 13: mod_base = OTHER; note = bicyclic nucleic acid (BNA)
  source 1..13: mol_type = other DNA
cggtaagttctgt

SEQ ID NO: 9249 - DNA, 12 bp, synthetic construct
  misc_feature 1..12: note = Description of Artificial Sequence: Synthetic Antisense oligonucleotide
  modified_base 1: mod_base = OTHER; note = 5-methyl
  modified_base 10: mod_base = OTHER; note = 5-methyl
  modified_base 1: mod_base = OTHER; note = bicyclic nucleic acid (BNA)
  modified_base 12: mod_base = OTHER; note = bicyclic nucleic acid (BNA)
  source 1..12: mol_type = other DNA
cggtaagttctg

SEQ ID NO: 9250 - DNA, 11 bp, synthetic construct
  misc_feature 1..11: note = Description of Artificial Sequence: Synthetic Antisense oligonucleotide
  modified_base 1: mod_base = OTHER; note = 5-methyl
  modified_base 10: mod_base = OTHER; note = 5-methyl
  modified_base 1: mod_base = OTHER; note = bicyclic nucleic acid (BNA)
  modified_base 11: mod_base = OTHER; note = bicyclic nucleic acid (BNA)
  source 1..11: mol_type = other DNA
cggtaagttct

SEQ ID NO: 9251 - DNA, 10 bp, synthetic construct
  misc_feature 1..10: note = Description of Artificial Sequence: Synthetic Antisense oligonucleotide
  modified_base 1: mod_base = OTHER; note = 5-methyl
  modified_base 10: mod_base = OTHER; note = 5-methyl
  modified_base 1: mod_base = OTHER; note = bicyclic nucleic acid (BNA)
  modified_base 10: mod_base = OTHER; note = bicyclic nucleic acid (BNA)
  source 1..10: mol_type = other DNA
cggtaagttc

SEQ ID NO: 9252-9253 - skipped (2 entries)

SEQ ID NO: 9254 - DNA, 20 bp, synthetic construct
  misc_feature 1..20: note = Description of Artificial Sequence: Synthetic Antisense oligonucleotide
  modified_base 1: mod_base = OTHER; note = bicyclic nucleic acid (BNA)
  modified_base 20: mod_base = OTHER; note = bicyclic nucleic acid (BNA)
  modified_base 2: mod_base = OTHER; note = 5-methyl
  modified_base 11: mod_base = OTHER; note = 5-methyl
  modified_base 15..16: mod_base = OTHER; note = 5-methyl
  modified_base 20: mod_base = OTHER; note = 5-methyl
  source 1..20: mol_type = other DNA
tcggtaagttctgtccaagc

SEQ ID NO: 9255 - DNA, 19 bp, synthetic construct
  misc_feature 1..19: note = Description of Artificial Sequence: Synthetic Antisense oligonucleotide
  modified_base 1: mod_base = OTHER; note = bicyclic nucleic acid (BNA)
  modified_base 19: mod_base = OTHER; note = bicyclic nucleic acid (BNA)
  modified_base 2: mod_base = OTHER; note = 5-methyl
  modified_base 11: mod_base = OTHER; note = 5-methyl
  modified_base 15..16: mod_base = OTHER; note = 5-methyl
  source 1..19: mol_type = other DNA
tcggtaagttctgtccaag

SEQ ID NO: 9256 - DNA, 18 bp, synthetic construct
  misc_feature 1..18: note = Description of Artificial Sequence: Synthetic Antisense oligonucleotide
  modified_base 1: mod_base = OTHER; note = bicyclic nucleic acid (BNA)
  modified_base 18: mod_base = OTHER; note = bicyclic nucleic acid (BNA)
  modified_base 2: mod_base = OTHER; note = 5-methyl
  modified_base 11: mod_base = OTHER; note = 5-methyl
  modified_base 15..16: mod_base = OTHER; note = 5-methyl
  source 1..18: mol_type = other DNA
tcggtaagttctgtccaa

SEQ ID NO: 9257 - DNA, 17 bp, synthetic construct
  misc_feature 1..17: note = Description of Artificial Sequence: Synthetic Antisense oligonucleotide
  modified_base 1: mod_base = OTHER; note = bicyclic nucleic acid (BNA)
  modified_base 17: mod_base = OTHER; note = bicyclic nucleic acid (BNA)
  modified_base 2: mod_base = OTHER; note = 5-methyl
  modified_base 11: mod_base = OTHER; note = 5-methyl
  modified_base 15..16: mod_base = OTHER; note = 5-methyl
  source 1..17: mol_type = other DNA
tcggtaagttctgtcca

SEQ ID NO: 9258 - DNA, 16 bp, synthetic construct
  misc_feature 1..16: note = Description of Artificial Sequence: Synthetic Antisense oligonucleotide
  modified_base 1: mod_base = OTHER; note = bicyclic nucleic acid (BNA)
  modified_base 16: mod_base = OTHER; note = bicyclic nucleic acid (BNA)
  modified_base 2: mod_base = OTHER; note = 5-methyl
  modified_base 11: mod_base = OTHER; note = 5-methyl
  modified_base 15..16: mod_base = OTHER; note = 5-methyl
  source 1..16: mol_type = other DNA
tcggtaagttctgtcc

SEQ ID NO: 9259 - DNA, 15 bp, synthetic construct
  misc_feature 1..15: note = Description of Artificial Sequence: Synthetic Antisense oligonucleotide
  modified_base 1: mod_base = OTHER; note = bicyclic nucleic acid (BNA)
  modified_base 15: mod_base = OTHER; note = bicyclic nucleic acid (BNA)
  modified_base 2: mod_base = OTHER; note = 5-methyl
  modified_base 11: mod_base = OTHER; note = 5-methyl
  modified_base 15: mod_base = OTHER; note = 5-methyl
  source 1..15: mol_type = other DNA
tcggtaagttctgtc

SEQ ID NO: 9260 - DNA, 14 bp, synthetic construct
  misc_feature 1..14: note = Description of Artificial Sequence: Synthetic Antisense oligonucleotide
  modified_base 1: mod_base = OTHER; note = bicyclic nucleic acid (BNA)
  modified_base 14: mod_base = OTHER; note = bicyclic nucleic acid (BNA)
  modified_base 2: mod_base = OTHER; note = 5-methyl
  modified_base 11: mod_base = OTHER; note = 5-methyl
  source 1..14: mol_type = other DNA
tcggtaagttctgt

SEQ ID NO: 9261 - DNA, 13 bp, synthetic construct
  misc_feature 1..13: note = Description of Artificial Sequence: Synthetic Antisense oligonucleotide
  modified_base 1: mod_base = OTHER; note = bicyclic nucleic acid (BNA)
  modified_base 13: mod_base = OTHER; note = bicyclic nucleic acid (BNA)
  modified_base 2: mod_base = OTHER; note = 5-methyl
  modified_base 11: mod_base = OTHER; note = 5-methyl
  source 1..13: mol_type = other DNA
tcggtaagttctg

SEQ ID NO: 9262 - DNA, 12 bp, synthetic construct
  misc_feature 1..12: note = Description of Artificial Sequence: Synthetic Antisense oligonucleotide
  modified_base 1: mod_base = OTHER; note = bicyclic nucleic acid (BNA)
  modified_base 12: mod_base = OTHER; note = bicyclic nucleic acid (BNA)
  modified_base 2: mod_base = OTHER; note = 5-methyl
  modified_base 11: mod_base = OTHER; note = 5-methyl
  source 1..12: mol_type = other DNA
tcggtaagttct

SEQ ID NO: 9263 - DNA, 11 bp, synthetic construct
  misc_feature 1..11: note = Description of Artificial Sequence: Synthetic Antisense oligonucleotide
  modified_base 1: mod_base = OTHER; note = bicyclic nucleic acid (BNA)
  modified_base 11: mod_base = OTHER; note = bicyclic nucleic acid (BNA)
  modified_base 2: mod_base = OTHER; note = 5-methyl
  modified_base 11: mod_base = OTHER; note = 5-methyl
  source 1..11: mol_type = other DNA
tcggtaagttc

SEQ ID NO: 9264 - DNA, 10 bp, synthetic construct
  misc_feature 1..10: note = Description of Artificial Sequence: Synthetic Antisense oligonucleotide
  modified_base 1: mod_base = OTHER; note = bicyclic nucleic acid (BNA)
  modified_base 10: mod_base = OTHER; note = bicyclic nucleic acid (BNA)
  modified_base 2: mod_base = OTHER; note = 5-methyl
  source 1..10: mol_type = other DNA
tcggtaagtt

SEQ ID NO: 9265 - skipped

SEQ ID NO: 9266 - DNA, 20 bp, synthetic construct
  misc_feature 1..20: note = Description of Artificial Sequence: Synthetic Antisense oligonucleotide
  modified_base 1: mod_base = OTHER; note = bicyclic nucleic acid (BNA)
  modified_base 20: mod_base = OTHER; note = bicyclic nucleic acid (BNA)
  modified_base 3: mod_base = OTHER; note = 5-methyl
  modified_base 12: mod_base = OTHER; note = 5-methyl
  modified_base 16..17: mod_base = OTHER; note = 5-methyl
  source 1..20: mol_type = other DNA
gtcggtaagttctgtccaag

SEQ ID NO: 9267 - DNA, 19 bp, synthetic construct
  misc_feature 1..19: note = Description of Artificial Sequence: Synthetic Antisense oligonucleotide
  modified_base 1: mod_base = OTHER; note = bicyclic nucleic acid (BNA)
  modified_base 19: mod_base = OTHER; note = bicyclic nucleic acid (BNA)
  modified_base 3: mod_base = OTHER; note = 5-methyl
  modified_base 12: mod_base = OTHER; note = 5-methyl
  modified_base 16..17: mod_base = OTHER; note = 5-methyl
  source 1..19: mol_type = other DNA
gtcggtaagttctgtccaa

SEQ ID NO: 9268 - DNA, 18 bp, synthetic construct
  misc_feature 1..18: note = Description of Artificial Sequence: Synthetic Antisense oligonucleotide
  modified_base 1: mod_base = OTHER; note = bicyclic nucleic acid (BNA)
  modified_base 18: mod_base = OTHER; note = bicyclic nucleic acid (BNA)
  modified_base 3: mod_base = OTHER; note = 5-methyl
  modified_base 12: mod_base = OTHER; note = 5-methyl
  modified_base 16..17: mod_base = OTHER; note = 5-methyl
  source 1..18: mol_type = other DNA
gtcggtaagttctgtcca

SEQ ID NO: 9269 - DNA, 17 bp, synthetic construct
  misc_feature 1..17: note = Description of Artificial Sequence: Synthetic Antisense oligonucleotide
  modified_base 1: mod_base = OTHER; note = bicyclic nucleic acid (BNA)
  modified_base 17: mod_base = OTHER; note = bicyclic nucleic acid (BNA)
  modified_base 3: mod_base = OTHER; note = 5-methyl
  modified_base 12: mod_base = OTHER; note = 5-methyl
  modified_base 16..17: mod_base = OTHER; note = 5-methyl
  source 1..17: mol_type = other DNA
gtcggtaagttctgtcc

SEQ ID NO: 9270 - DNA, 16 bp, synthetic construct
  misc_feature 1..16: note = Description of Artificial Sequence: Synthetic Antisense oligonucleotide
  modified_base 1: mod_base = OTHER; note = bicyclic nucleic acid (BNA)
  modified_base 16: mod_base = OTHER; note = bicyclic nucleic acid (BNA)
  modified_base 3: mod_base = OTHER; note = 5-methyl
  modified_base 12: mod_base = OTHER; note = 5-methyl
  modified_base 16: mod_base = OTHER; note = 5-methyl
  source 1..16: mol_type = other DNA
gtcggtaagttctgtc

SEQ ID NO: 9271 - DNA, 15 bp, synthetic construct
  misc_feature 1..15: note = Description of Artificial Sequence: Synthetic Antisense oligonucleotide
  modified_base 1: mod_base = OTHER; note = bicyclic nucleic acid (BNA)
  modified_base 15: mod_base = OTHER; note = bicyclic nucleic acid (BNA)
  modified_base 3: mod_base = OTHER; note = 5-methyl
  modified_base 12: mod_base = OTHER; note = 5-methyl
  source 1..15: mol_type = other DNA
gtcggtaagttctgt

SEQ ID NO: 9272 - DNA, 14 bp, synthetic construct
  misc_feature 1..14: note = Description of Artificial Sequence: Synthetic Antisense oligonucleotide
  modified_base 1: mod_base = OTHER; note = bicyclic nucleic acid (BNA)
  modified_base 14: mod_base = OTHER; note = bicyclic nucleic acid (BNA)
  modified_base 3: mod_base = OTHER; note = 5-methyl
  modified_base 12: mod_base = OTHER; note = 5-methyl
  source 1..14: mol_type = other DNA
gtcggtaagttctg

SEQ ID NO: 9273 - DNA, 13 bp, synthetic construct
  misc_feature 1..13: note = Description of Artificial Sequence: Synthetic Antisense oligonucleotide
  modified_base 1: mod_base = OTHER; note = bicyclic nucleic acid (BNA)
  modified_base 13: mod_base = OTHER; note = bicyclic nucleic acid (BNA)
  modified_base 3: mod_base = OTHER; note = 5-methyl
  modified_base 12: mod_base = OTHER; note = 5-methyl
  source 1..13: mol_type = other DNA
gtcggtaagttct

SEQ ID NO: 9274 - DNA, 12 bp, synthetic construct
  misc_feature 1..12: note = Description of Artificial Sequence: Synthetic Antisense oligonucleotide
  modified_base 1: mod_base = OTHER; note = bicyclic nucleic acid (BNA)
  modified_base 12: mod_base = OTHER; note = bicyclic nucleic acid (BNA)
  modified_base 3: mod_base = OTHER; note = 5-methyl
  modified_base 12: mod_base = OTHER; note = 5-methyl
  source 1..12: mol_type = other DNA
gtcggtaagttc

SEQ ID NO: 9275 - DNA, 11 bp, synthetic construct
  misc_feature 1..11: note = Description of Artificial Sequence: Synthetic Antisense oligonucleotide
  modified_base 1: mod_base = OTHER; note = bicyclic nucleic acid (BNA)
  modified_base 11: mod_base = OTHER; note = bicyclic nucleic acid (BNA)
  modified_base 3: mod_base = OTHER; note = 5-methyl
  source 1..11: mol_type = other DNA
gtcggtaagtt

SEQ ID NO: 9276 - DNA, 10 bp, synthetic construct
  misc_feature 1..10: note = Description of Artificial Sequence: Synthetic Antisense oligonucleotide
  modified_base 1: mod_base = OTHER; note = bicyclic nucleic acid (BNA)
  modified_base 10: mod_base = OTHER; note = bicyclic nucleic acid (BNA)
  modified_base 3: mod_base = OTHER; note = 5-methyl
  source 1..10: mol_type = other DNA
gtcggtaagt

SEQ ID NO: 9277 - DNA, 20 bp, synthetic construct
  misc_feature 1..20: note = Description of Artificial Sequence: Synthetic Antisense oligonucleotide
  modified_base 1: mod_base = OTHER; note = bicyclic nucleic acid (BNA)
  modified_base 20: mod_base = OTHER; note = bicyclic nucleic acid (BNA)
  modified_base 4: mod_base = OTHER; note = 5-methyl
  modified_base 13: mod_base = OTHER; note = 5-methyl
  modified_base 17..18: mod_base = OTHER; note = 5-methyl
  source 1..20: mol_type = other DNA
agtcggtaagttctgtccaa

SEQ ID NO: 9278 - DNA, 19 bp, synthetic construct
  misc_feature 1..19: note = Description of Artificial Sequence: Synthetic Antisense oligonucleotide
  modified_base 1: mod_base = OTHER; note = bicyclic nucleic acid (BNA)
  modified_base 19: mod_base = OTHER; note = bicyclic nucleic acid (BNA)
  modified_base 4: mod_base = OTHER; note = 5-methyl
  modified_base 13: mod_base = OTHER; note = 5-methyl
  modified_base 17..18: mod_base = OTHER; note = 5-methyl
  source 1..19: mol_type = other DNA
agtcggtaagttctgtcca

SEQ ID NO: 9279 - DNA, 17 bp, synthetic construct
  misc_feature 1..17: note = Description of Artificial Sequence: Synthetic Antisense oligonucleotide
  modified_base 1: mod_base = OTHER; note = bicyclic nucleic acid (BNA)
  modified_base 17: mod_base = OTHER; note = bicyclic nucleic acid (BNA)
  modified_base 4: mod_base = OTHER; note = 5-methyl
  modified_base 13: mod_base = OTHER; note = 5-methyl
  modified_base 17: mod_base = OTHER; note = 5-methyl
  source 1..17: mol_type = other DNA
agtcggtaagttctgtc

SEQ ID NO: 9280 - DNA, 16 bp, synthetic construct
  misc_feature 1..16: note = Description of Artificial Sequence: Synthetic Antisense oligonucleotide
  modified_base 1: mod_base = OTHER; note = bicyclic nucleic acid (BNA)
  modified_base 16: mod_base = OTHER; note = bicyclic nucleic acid (BNA)
  modified_base 4: mod_base = OTHER; note = 5-methyl
  modified_base 13: mod_base = OTHER; note = 5-methyl
  source 1..16: mol_type = other DNA
agtcggtaagttctgt

SEQ ID NO: 9281 - DNA, 15 bp, synthetic construct
  misc_feature 1..15: note = Description of Artificial Sequence: Synthetic Antisense oligonucleotide
  modified_base 1: mod_base = OTHER; note = bicyclic nucleic acid (BNA)
  modified_base 15: mod_base = OTHER; note = bicyclic nucleic acid (BNA)
  modified_base 4: mod_base = OTHER; note = 5-methyl
  modified_base 13: mod_base = OTHER; note = 5-methyl
  source 1..15: mol_type = other DNA
agtcggtaagttctg

SEQ ID NO: 9282 - DNA, 14 bp, synthetic construct
  misc_feature 1..14: note = Description of Artificial Sequence: Synthetic Antisense oligonucleotide
  modified_base 1: mod_base = OTHER; note = bicyclic nucleic acid (BNA)
  modified_base 14: mod_base = OTHER; note = bicyclic nucleic acid (BNA)
  modified_base 4: mod_base = OTHER; note = 5-methyl
  modified_base 13: mod_base = OTHER; note = 5-methyl
  source 1..14: mol_type = other DNA
agtcggtaagttct

SEQ ID NO: 9283 - DNA, 13 bp, synthetic construct
  misc_feature 1..13: note = Description of Artificial Sequence: Synthetic Antisense oligonucleotide
  modified_base 1: mod_base = OTHER; note = bicyclic nucleic acid (BNA)
  modified_base 13: mod_base = OTHER; note = bicyclic nucleic acid (BNA)
  modified_base 4: mod_base = OTHER; note = 5-methyl
  modified_base 13: mod_base = OTHER; note = 5-methyl
  source 1..13: mol_type = other DNA
agtcggtaagttc

SEQ ID NO: 9284 - DNA, 12 bp, synthetic construct
  misc_feature 1..12: note = Description of Artificial Sequence: Synthetic Antisense oligonucleotide
  modified_base 1: mod_base = OTHER; note = bicyclic nucleic acid (BNA)
  modified_base 12: mod_base = OTHER; note = bicyclic nucleic acid (BNA)
  modified_base 4: mod_base = OTHER; note = 5-methyl
  source 1..12: mol_type = other DNA
agtcggtaagtt

SEQ ID NO: 9285 - DNA, 11 bp, synthetic construct
  misc_feature 1..11: note = Description of Artificial Sequence: Synthetic Antisense oligonucleotide
  modified_base 1: mod_base = OTHER; note = bicyclic nucleic acid (BNA)
  modified_base 11: mod_base = OTHER; note = bicyclic nucleic acid (BNA)
  modified_base 4: mod_base = OTHER; note = 5-methyl
  source 1..11: mol_type = other DNA
agtcggtaagt

SEQ ID NO: 9286 - DNA, 20 bp, synthetic construct
  misc_feature 1..20: note = Description of Artificial Sequence: Synthetic Antisense oligonucleotide
  modified_base 1: mod_base = OTHER; note = 5-methyl
  modified_base 5: mod_base = OTHER; note = 5-methyl
  modified_base 14: mod_base = OTHER; note = 5-methyl
  modified_base 18..19: mod_base = OTHER; note = 5-methyl
  modified_base 1: mod_base = OTHER; note = bicyclic nucleic acid (BNA)
  modified_base 20: mod_base = OTHER; note = bicyclic nucleic acid (BNA)
  source 1..20: mol_type = other DNA
cagtcggtaagttctgtcca

SEQ ID NO: 9287 - DNA, 19 bp, synthetic construct
  misc_feature 1..19: note = Description of Artificial Sequence: Synthetic Antisense oligonucleotide
  modified_base 1: mod_base = OTHER; note = 5-methyl
  modified_base 5: mod_base = OTHER; note = 5-methyl
  modified_base 14: mod_base = OTHER; note = 5-methyl
  modified_base 18..19: mod_base = OTHER; note = 5-methyl
  modified_base 1: mod_base = OTHER; note = bicyclic nucleic acid (BNA)
  modified_base 19: mod_base = OTHER; note = bicyclic nucleic acid (BNA)
  source 1..19: mol_type = other DNA
cagtcggtaagttctgtcc

SEQ ID NO: 9288 - DNA, 18 bp, synthetic construct
  misc_feature 1..18: note = Description of Artificial Sequence: Synthetic Antisense oligonucleotide
  modified_base 1: mod_base = OTHER; note = 5-methyl
  modified_base 5: mod_base = OTHER; note = 5-methyl
  modified_base 14: mod_base = OTHER; note = 5-methyl
  modified_base 18: mod_base = OTHER; note = 5-methyl
  modified_base 1: mod_base = OTHER; note = bicyclic nucleic acid (BNA)
  modified_base 18: mod_base = OTHER; note = bicyclic nucleic acid (BNA)
  source 1..18: mol_type = other DNA
cagtcggtaagttctgtc

SEQ ID NO: 9289 - DNA, 17 bp, synthetic construct
  misc_feature 1..17: note = Description of Artificial Sequence: Synthetic Antisense oligonucleotide
  modified_base 1: mod_base = OTHER; note = 5-methyl
  modified_base 5: mod_base = OTHER; note = 5-methyl
  modified_base 14: mod_base = OTHER; note = 5-methyl
  modified_base 1: mod_base = OTHER; note = bicyclic nucleic acid (BNA)
  modified_base 17: mod_base = OTHER; note = bicyclic nucleic acid (BNA)
  source 1..17: mol_type = other DNA
cagtcggtaagttctgt

SEQ ID NO: 9290 - DNA, 16 bp, synthetic construct
  misc_feature 1..16: note = Description of Artificial Sequence: Synthetic Antisense oligonucleotide
  modified_base 1: mod_base = OTHER; note = 5-methyl
  modified_base 5: mod_base = OTHER; note = 5-methyl
  modified_base 14: mod_base = OTHER; note = 5-methyl
  modified_base 1: mod_base = OTHER; note = bicyclic nucleic acid (BNA)
  modified_base 16: mod_base = OTHER; note = bicyclic nucleic acid (BNA)
  source 1..16: mol_type = other DNA
cagtcggtaagttctg

SEQ ID NO: 9291 - DNA, 15 bp, synthetic construct
  misc_feature 1..15: note = Description of Artificial Sequence: Synthetic Antisense oligonucleotide
  modified_base 1: mod_base = OTHER; note = 5-methyl
  modified_base 5: mod_base = OTHER; note = 5-methyl
  modified_base 14: mod_base = OTHER; note = 5-methyl
  modified_base 1: mod_base = OTHER; note = bicyclic nucleic acid (BNA)
  modified_base 15: mod_base = OTHER; note = bicyclic nucleic acid (BNA)
  source 1..15: mol_type = other DNA
cagtcggtaagttct

SEQ ID NO: 9292 - DNA, 14 bp, synthetic construct
  misc_feature 1..14: note = Description of Artificial Sequence: Synthetic Antisense oligonucleotide
  modified_base 1: mod_base = OTHER; note = 5-methyl
  modified_base 5: mod_base = OTHER; note = 5-methyl
  modified_base 14: mod_base = OTHER; note = 5-methyl
  modified_base 1: mod_base = OTHER; note = bicyclic nucleic acid (BNA)
  modified_base 14: mod_base = OTHER; note = bicyclic nucleic acid (BNA)
  source 1..14: mol_type = other DNA
cagtcggtaagttc

SEQ ID NO: 9293 - DNA, 13 bp, synthetic construct
  misc_feature 1..13: note = Description of Artificial Sequence: Synthetic Antisense oligonucleotide
  modified_base 1: mod_base = OTHER; note = 5-methyl
  modified_base 5: mod_base = OTHER; note = 5-methyl
  modified_base 1: mod_base = OTHER; note = bicyclic nucleic acid (BNA)
  modified_base 13: mod_base = OTHER; note = bicyclic nucleic acid (BNA)
  source 1..13: mol_type = other DNA
cagtcggtaagtt

SEQ ID NO: 9294 - DNA, 12 bp, synthetic construct
  misc_feature 1..12: note = Description of Artificial Sequence: Synthetic Antisense oligonucleotide
  modified_base 1: mod_base = OTHER; note = 5-methyl
  modified_base 5: mod_base = OTHER; note = 5-methyl
  modified_base 1: mod_base = OTHER; note = bicyclic nucleic acid (BNA)
  modified_base 12: mod_base = OTHER; note = bicyclic nucleic acid (BNA)
  source 1..12: mol_type = other DNA
cagtcggtaagt

SEQ ID NO: 9295 - DNA, 20 bp, synthetic construct
  misc_feature 1..20: note = Description of Artificial Sequence: Synthetic Antisense oligonucleotide
  modified_base 1..2: mod_base = OTHER; note = 5-methyl
  modified_base 6: mod_base = OTHER; note = 5-methyl
  modified_base 15: mod_base = OTHER; note = 5-methyl
  modified_base 19..20: mod_base = OTHER; note = 5-methyl
  modified_base 1: mod_base = OTHER; note = bicyclic nucleic acid (BNA)
  modified_base 20: mod_base = OTHER; note = bicyclic nucleic acid (BNA)
  source 1..20: mol_type = other DNA
ccagtcggtaagttctgtcc

SEQ ID NO: 9296 - DNA, 19 bp, synthetic construct
  misc_feature 1..19: note = Description of Artificial Sequence: Synthetic Antisense oligonucleotide
  modified_base 1..2: mod_base = OTHER; note = 5-methyl
  modified_base 6: mod_base = OTHER; note = 5-methyl
  modified_base 15: mod_base = OTHER; note = 5-methyl
  modified_base 19: mod_base = OTHER; note = 5-methyl
  modified_base 1: mod_base = OTHER; note = bicyclic nucleic acid (BNA)
  modified_base 19: mod_base = OTHER; note = bicyclic nucleic acid (BNA)
  source 1..19: mol_type = other DNA
ccagtcggtaagttctgtc

SEQ ID NO: 9297 - DNA, 18 bp, synthetic construct
  misc_feature 1..18: note = Description of Artificial Sequence: Synthetic Antisense oligonucleotide
  modified_base 1..2: mod_base = OTHER; note = 5-methyl
  modified_base 6: mod_base = OTHER; note = 5-methyl
  modified_base 15: mod_base = OTHER; note = 5-methyl
  modified_base 1: mod_base = OTHER; note = bicyclic nucleic acid (BNA)
  modified_base 18: mod_base = OTHER; note = bicyclic nucleic acid (BNA)
  source 1..18: mol_type = other DNA
ccagtcggtaagttctgt

SEQ ID NO: 9298 - DNA, 17 bp, synthetic construct
  misc_feature 1..17: note = Description of Artificial Sequence: Synthetic Antisense oligonucleotide
  modified_base 1..2: mod_base = OTHER; note = 5-methyl
  modified_base 6: mod_base = OTHER; note = 5-methyl
  modified_base 15: mod_base = OTHER; note = 5-methyl
  modified_base 1: mod_base = OTHER; note = bicyclic nucleic acid (BNA)
  modified_base 17: mod_base = OTHER; note = bicyclic nucleic acid (BNA)
  source 1..17: mol_type = other DNA
ccagtcggtaagttctg

SEQ ID NO: 9299 - DNA, 16 bp, synthetic construct
  misc_feature 1..16: note = Description of Artificial Sequence: Synthetic Antisense oligonucleotide
  modified_base 1..2: mod_base = OTHER; note = 5-methyl
  modified_base 6: mod_base = OTHER; note = 5-methyl
  modified_base 15: mod_base = OTHER; note = 5-methyl
  modified_base 1: mod_base = OTHER; note = bicyclic nucleic acid (BNA)
  modified_base 16: mod_base = OTHER; note = bicyclic nucleic acid (BNA)
  source 1..16: mol_type = other DNA
ccagtcggtaagttct

SEQ ID NO: 9300 - DNA, 15 bp, synthetic construct
  misc_feature 1..15: note = Description of Artificial Sequence: Synthetic Antisense oligonucleotide
  modified_base 1..2: mod_base = OTHER; note = 5-methyl
  modified_base 6: mod_base = OTHER; note = 5-methyl
  modified_base 15: mod_base = OTHER; note = 5-methyl
  modified_base 1: mod_base = OTHER; note = bicyclic nucleic acid (BNA)
  modified_base 15: mod_base = OTHER; note = bicyclic nucleic acid (BNA)
  source 1..15: mol_type = other DNA
ccagtcggtaagttc

SEQ ID NO: 9301 - DNA, 14 bp, synthetic construct
  misc_feature 1..14: note = Description of Artificial Sequence: Synthetic Antisense oligonucleotide
  modified_base 1..2: mod_base = OTHER; note = 5-methyl
  modified_base 6: mod_base = OTHER; note = 5-methyl
  modified_base 1: mod_base = OTHER; note = bicyclic nucleic acid (BNA)
  modified_base 14: mod_base = OTHER; note = bicyclic nucleic acid (BNA)
  source 1..14: mol_type = other DNA
ccagtcggtaagtt

SEQ ID NO: 9302 - DNA, 13 bp, synthetic construct
  misc_feature 1..13: note = Description of Artificial Sequence: Synthetic Antisense oligonucleotide
  modified_base 1..2: mod_base = OTHER; note = 5-methyl
  modified_base 6: mod_base = OTHER; note = 5-methyl
  modified_base 1: mod_base = OTHER; note = bicyclic nucleic acid (BNA)
  modified_base 13: mod_base = OTHER; note = bicyclic nucleic acid (BNA)
  source 1..13: mol_type = other DNA
ccagtcggtaagt

SEQ ID NO: 9303 - DNA, 20 bp, synthetic construct
  misc_feature 1..20: note = Description of Artificial Sequence: Synthetic Antisense oligonucleotide
  modified_base 1: mod_base = OTHER; note = bicyclic nucleic acid (BNA)
  modified_base 20: mod_base = OTHER; note = bicyclic nucleic acid (BNA)
  modified_base 2..3: mod_base = OTHER; note = 5-methyl
  modified_base 7: mod_base = OTHER; note = 5-methyl
  modified_base 16: mod_base = OTHER; note = 5-methyl
  modified_base 20: mod_base = OTHER; note = 5-methyl
  source 1..20: mol_type = other DNA
gccagtcggtaagttctgtc

SEQ ID NO: 9304 - DNA, 19 bp, synthetic construct
  misc_feature 1..19: note = Description of Artificial Sequence: Synthetic Antisense oligonucleotide
  modified_base 1: mod_base = OTHER; note = bicyclic nucleic acid (BNA)
  modified_base 19: mod_base = OTHER; note = bicyclic nucleic acid (BNA)
  modified_base 2..3: mod_base = OTHER; note = 5-methyl
  modified_base 7: mod_base = OTHER; note = 5-methyl
  modified_base 16: mod_base = OTHER; note = 5-methyl
  source 1..19: mol_type = other DNA
gccagtcggtaagttctgt

SEQ ID NO: 9305 - DNA, 18 bp, synthetic construct
  misc_feature 1..18: note = Description of Artificial Sequence: Synthetic Antisense oligonucleotide
  modified_base 1: mod_base = OTHER; note = bicyclic nucleic acid (BNA)
  modified_base 18: mod_base = OTHER; note = bicyclic nucleic acid (BNA)
  modified_base 2..3: mod_base = OTHER; note = 5-methyl
  modified_base 7: mod_base = OTHER; note = 5-methyl
  modified_base 16: mod_base = OTHER; note = 5-methyl
  source 1..18: mol_type = other DNA
gccagtcggtaagttctg

SEQ ID NO: 9306 - DNA, 17 bp, synthetic construct
  misc_feature 1..17: note = Description of Artificial Sequence: Synthetic Antisense oligonucleotide
  modified_base 1: mod_base = OTHER; note = bicyclic nucleic acid (BNA)
  modified_base 17: mod_base = OTHER; note = bicyclic nucleic acid (BNA)
  modified_base 2..3: mod_base = OTHER; note = 5-methyl
  modified_base 7: mod_base = OTHER; note = 5-methyl
  modified_base 16: mod_base = OTHER; note = 5-methyl
  source 1..17: mol_type = other DNA
gccagtcggtaagttct

SEQ ID NO: 9307 - DNA, 16 bp, synthetic construct
  misc_feature 1..16: note = Description of Artificial Sequence: Synthetic Antisense oligonucleotide
  modified_base 1: mod_base = OTHER; note = bicyclic nucleic acid (BNA)
  modified_base 16: mod_base = OTHER; note = bicyclic nucleic acid (BNA)
  modified_base 2..3: mod_base = OTHER; note = 5-methyl
  modified_base 7: mod_base = OTHER; note = 5-methyl
  modified_base 16: mod_base = OTHER; note = 5-methyl
  source 1..16: mol_type = other DNA
gccagtcggtaagttc

SEQ ID NO: 9308 - DNA, 15 bp, synthetic construct
  misc_feature 1..15: note = Description of Artificial Sequence: Synthetic Antisense oligonucleotide
  modified_base 1: mod_base = OTHER; note = bicyclic nucleic acid (BNA)
  modified_base 15: mod_base = OTHER; note = bicyclic nucleic acid (BNA)
  modified_base 2..3: mod_base = OTHER; note = 5-methyl
  modified_base 7: mod_base = OTHER; note = 5-methyl
  source 1..15: mol_type = other DNA
gccagtcggtaagtt

SEQ ID NO: 9309 - DNA, 14 bp, synthetic construct
  misc_feature 1..14: note = Description of Artificial Sequence: Synthetic Antisense oligonucleotide
  modified_base 1: mod_base = OTHER; note = bicyclic nucleic acid (BNA)
  modified_base 14: mod_base = OTHER; note = bicyclic nucleic acid (BNA)
  modified_base 2..3: mod_base = OTHER; note = 5-methyl
  modified_base 7: mod_base = OTHER; note = 5-methyl
  source 1..14: mol_type = other DNA
gccagtcggtaagt

SEQ ID NO: 9310 - DNA, 20 bp, synthetic construct
  misc_feature 1..20: note = Description of Artificial Sequence: Synthetic Antisense oligonucleotide
  modified_base 1: mod_base = OTHER; note = bicyclic nucleic acid (BNA)
  modified_base 20: mod_base = OTHER; note = bicyclic nucleic acid (BNA)
  modified_base 2: mod_base = OTHER; note = 5-methyl
  modified_base 14: mod_base = OTHER; note = 5-methyl
  modified_base 19: mod_base = OTHER; note = 5-methyl
  source 1..20: mol_type = other DNA
tcaaggaagatggcatttct

SEQ ID NO: 9311 - DNA, 22 bp, synthetic construct
  misc_feature 1..22: note = Description of Artificial Sequence: Synthetic Antisense oligonucleotide
  modified_base 1: mod_base = OTHER; note = bicyclic nucleic acid (BNA)
  modified_base 22: mod_base = OTHER; note = bicyclic nucleic acid (BNA)
  modified_base 2: mod_base = OTHER; note = 5-methyl
  modified_base 14: mod_base = OTHER; note = 5-methyl
  modified_base 19: mod_base = OTHER; note = 5-methyl
  source 1..22: mol_type = other DNA
tcaaggaagatggcatttctag

SEQ ID NO: 9312 - DNA, 16 bp, synthetic construct
  misc_feature 1..16: note = Description of Artificial Sequence: Synthetic Antisense oligonucleotide
  modified_base 1: mod_base = OTHER; note = bicyclic nucleic acid (BNA)
  modified_base 16: mod_base = OTHER; note = bicyclic nucleic acid (BNA)
  modified_base 2: mod_base = OTHER; note = 5-methyl
  modified_base 14: mod_base = OTHER; note = 5-methyl
  source 1..16: mol_type = other DNA
tcaaggaagatggcat

SEQ ID NO: 9313 - DNA, 15 bp, synthetic construct
  misc_feature 1..15: note = Description of Artificial Sequence: Synthetic Antisense oligonucleotide
  modified_base 1: mod_base = OTHER; note = bicyclic nucleic acid (BNA)
  modified_base 15: mod_base = OTHER; note = bicyclic nucleic acid (BNA)
  modified_base 9: mod_base = OTHER; note = 5-methyl
  modified_base 14: mod_base = OTHER; note = 5-methyl
  source 1..15: mol_type = other DNA
gaagatggcatttct

SEQ ID NO: 9314 - DNA, 21 bp, synthetic construct
  misc_feature 1..21: note = Description of Artificial Sequence: Synthetic Antisense oligonucleotide
  modified_base 1: mod_base = OTHER; note = bicyclic nucleic acid (BNA)
  modified_base 21: mod_base = OTHER; note = bicyclic nucleic acid (BNA)
  modified_base 2: mod_base = OTHER; note = 5-methyl
  modified_base 14: mod_base = OTHER; note = 5-methyl
  modified_base 19: mod_base = OTHER; note = 5-methyl
  source 1..21: mol_type = other DNA
tcaaggaagatggcatttcta

SEQ ID NO: 9315 - DNA, 19 bp, synthetic construct
  misc_feature 1..19: note = Description of Artificial Sequence: Synthetic Antisense oligonucleotide
  modified_base 1: mod_base = OTHER; note = bicyclic nucleic acid (BNA)
  modified_base 19: mod_base = OTHER; note = bicyclic nucleic acid (BNA)
  modified_base 2: mod_base = OTHER; note = 5-methyl
  modified_base 14: mod_base = OTHER; note = 5-methyl
  modified_base 19: mod_base = OTHER; note = 5-methyl
  source 1..19: mol_type = other DNA
tcaaggaagatggcatttc

SEQ ID NO: 9316 - DNA, 18 bp, synthetic construct
  misc_feature 1..18: note = Description of Artificial Sequence: Synthetic Antisense oligonucleotide
  modified_base 1: mod_base = OTHER; note = bicyclic nucleic acid (BNA)
  modified_base 18: mod_base = OTHER; note = bicyclic nucleic acid (BNA)
  modified_base 2: mod_base = OTHER; note = 5-methyl
  modified_base 14: mod_base = OTHER; note = 5-methyl
  source 1..18: mol_type = other DNA
tcaaggaagatggcattt

SEQ ID NO: 9317 - DNA, 17 bp, synthetic construct
  misc_feature 1..17: note = Description of Artificial Sequence: Synthetic Antisense oligonucleotide
  modified_base 1: mod_base = OTHER; note = bicyclic nucleic acid (BNA)
  modified_base 17: mod_base = OTHER; note = bicyclic nucleic acid (BNA)
  modified_base 2: mod_base = OTHER; note = 5-methyl
  modified_base 14: mod_base = OTHER; note = 5-methyl
  source 1..17: mol_type = other DNA
tcaaggaagatggcatt

SEQ ID NO: 9318 - DNA, 15 bp, synthetic construct
  misc_feature 1..15: note = Description of Artificial Sequence: Synthetic Antisense oligonucleotide
  modified_base 1: mod_base = OTHER; note = bicyclic nucleic acid (BNA)
  modified_base 15: mod_base = OTHER; note = bicyclic nucleic acid (BNA)
  modified_base 2: mod_base = OTHER; note = 5-methyl
  modified_base 14: mod_base = OTHER; note = 5-methyl
  source 1..15: mol_type = other DNA
tcaaggaagatggca

SEQ ID NO: 9319 - DNA, 14 bp, synthetic construct
  misc_feature 1..14: note = Description of Artificial Sequence: Synthetic Antisense oligonucleotide
  modified_base 1: mod_base = OTHER; note = bicyclic nucleic acid (BNA)
  modified_base 14: mod_base = OTHER; note = bicyclic nucleic acid (BNA)
  modified_base 2: mod_base = OTHER; note = 5-methyl
  modified_base 14: mod_base = OTHER; note = 5-methyl
  source 1..14: mol_type = other DNA
tcaaggaagatggc

SEQ ID NO: 9320 - DNA, 13 bp, synthetic construct
  misc_feature 1..13: note = Description of Artificial Sequence: Synthetic Antisense oligonucleotide
  modified_base 1: mod_base = OTHER; note = bicyclic nucleic acid (BNA)
  modified_base 13: mod_base = OTHER; note = bicyclic nucleic acid (BNA)
  modified_base 2: mod_base = OTHER; note = 5-methyl
  source 1..13: mol_type = other DNA
tcaaggaagatgg

SEQ ID NO: 9321 - DNA, 12 bp, synthetic construct
  misc_feature 1..12: note = Description of Artificial Sequence: Synthetic Antisense oligonucleotide
  modified_base 1: mod_base = OTHER; note = bicyclic nucleic acid (BNA)
  modified_base 12: mod_base = OTHER; note = bicyclic nucleic acid (BNA)
  modified_base 2: mod_base = OTHER; note = 5-methyl
  source 1..12: mol_type = other DNA
tcaaggaagatg

SEQ ID NO: 9322 - DNA, 11 bp, synthetic construct
  misc_feature 1..11: note = Description of Artificial Sequence: Synthetic Antisense oligonucleotide
  modified_base 1: mod_base = OTHER; note = bicyclic nucleic acid (BNA)
  modified_base 11: mod_base = OTHER; note = bicyclic nucleic acid (BNA)
  modified_base 2: mod_base = OTHER; note = 5-methyl
  source 1..11: mol_type = other DNA
tcaaggaagat

SEQ ID NO: 9323 - DNA, 10 bp, synthetic construct
  misc_feature 1..10: note = Description of Artificial Sequence: Synthetic Antisense oligonucleotide
  modified_base 1: mod_base = OTHER; note = bicyclic nucleic acid (BNA)
  modified_base 10: mod_base = OTHER; note = bicyclic nucleic acid (BNA)
  modified_base 2: mod_base = OTHER; note = 5-methyl
  source 1..10: mol_type = other DNA
tcaaggaaga

SEQ ID NO: 9324 - skipped

SEQ ID NO: 9325 - DNA, 21 bp, synthetic construct
  misc_feature 1..21: note = Description of Artificial Sequence: Synthetic Antisense oligonucleotide
  modified_base 1: mod_base = OTHER; note = 5-methyl
  modified_base 13: mod_base = OTHER; note = 5-methyl
  modified_base 18: mod_base = OTHER; note = 5-methyl
  modified_base 1: mod_base = OTHER; note = bicyclic nucleic acid (BNA)
  modified_base 21: mod_base = OTHER; note = bicyclic nucleic acid (BNA)
  source 1..21: mol_type = other DNA
caaggaagatggcatttctag

SEQ ID NO: 9326 - DNA, 20 bp, synthetic construct
  misc_feature 1..20: note = Description of Artificial Sequence: Synthetic Antisense oligonucleotide
  modified_base 1: mod_base = OTHER; note = 5-methyl
  modified_base 13: mod_base = OTHER; note = 5-methyl
  modified_base 18: mod_base = OTHER; note = 5-methyl
  modified_base 1: mod_base = OTHER; note = bicyclic nucleic acid (BNA)
  modified_base 20: mod_base = OTHER; note = bicyclic nucleic acid (BNA)
  source 1..20: mol_type = other DNA
caaggaagatggcatttcta

SEQ ID NO: 9327 - DNA, 19 bp, synthetic construct
  misc_feature 1..19: note = Description of Artificial Sequence: Synthetic Antisense oligonucleotide
  modified_base 1: mod_base = OTHER; note = 5-methyl
  modified_base 13: mod_base = OTHER; note = 5-methyl
  modified_base 18: mod_base = OTHER; note = 5-methyl
  modified_base 1: mod_base = OTHER; note = bicyclic nucleic acid (BNA)
  modified_base 19: mod_base = OTHER; note = bicyclic nucleic acid (BNA)
  source 1..19: mol_type = other DNA
caaggaagatggcatttct

SEQ ID NO: 9328 - DNA, 18 bp, synthetic construct
  misc_feature 1..18: note = Description of Artificial Sequence: Synthetic Antisense oligonucleotide
  modified_base 1: mod_base = OTHER; note = 5-methyl
  modified_base 13: mod_base = OTHER; note = 5-methyl
  modified_base 18: mod_base = OTHER; note = 5-methyl
  modified_base 1: mod_base = OTHER; note = bicyclic nucleic acid (BNA)
  modified_base 18: mod_base = OTHER; note = bicyclic nucleic acid (BNA)
  source 1..18: mol_type = other DNA
caaggaagatggcatttc

SEQ ID NO: 9329 - DNA, 17 bp, synthetic construct
  misc_feature 1..17: note = Description of Artificial Sequence: Synthetic Antisense oligonucleotide
  modified_base 1: mod_base = OTHER; note = 5-methyl
  modified_base 13: mod_base = OTHER; note = 5-methyl
  modified_base 1: mod_base = OTHER; note = bicyclic nucleic acid (BNA)
  modified_base 17: mod_base = OTHER; note = bicyclic nucleic acid (BNA)
  source 1..17: mol_type = other DNA
caaggaagatggcattt

SEQ ID NO: 9330 - DNA, 16 bp, synthetic construct
  misc_feature 1..16: note = Description of Artificial Sequence: Synthetic Antisense oligonucleotide
  modified_base 1: mod_base = OTHER; note = 5-methyl
  modified_base 13: mod_base = OTHER; note = 5-methyl
  modified_base 1: mod_base = OTHER; note = bicyclic nucleic acid (BNA)
  modified_base 16: mod_base = OTHER; note = bicyclic nucleic acid (BNA)
  source 1..16: mol_type = other DNA
caaggaagatggcatt

SEQ ID NO: 9331 - DNA, 15 bp, synthetic construct
  misc_feature 1..15: note = Description of Artificial Sequence: Synthetic Antisense oligonucleotide
  modified_base 1: mod_base = OTHER; note = 5-methyl
  modified_base 13: mod_base = OTHER; note = 5-methyl
  modified_base 1: mod_base = OTHER; note = bicyclic nucleic acid (BNA)
  modified_base 15: mod_base = OTHER; note = bicyclic nucleic acid (BNA)
  source 1..15: mol_type = other DNA
caaggaagatggcat

SEQ ID NO: 9332 - DNA, 14 bp, synthetic construct
  misc_feature 1..14: note = Description of Artificial Sequence: Synthetic Antisense oligonucleotide
  modified_base 1: mod_base = OTHER; note = 5-methyl
  modified_base 13: mod_base = OTHER; note = 5-methyl
  modified_base 1: mod_base = OTHER; note = bicyclic nucleic acid (BNA)
  modified_base 14: mod_base = OTHER; note = bicyclic nucleic acid (BNA)
  source 1..14: mol_type = other DNA
caaggaagatggca

SEQ ID NO: 9333 - DNA, 13 bp, synthetic construct
  misc_feature 1..13: note = Description of Artificial Sequence: Synthetic Antisense oligonucleotide
  modified_base 1: mod_base = OTHER; note = 5-methyl
  modified_base 13: mod_base = OTHER; note = 5-methyl
  modified_base 1: mod_base = OTHER; note = bicyclic nucleic acid (BNA)
  modified_base 13: mod_base = OTHER; note = bicyclic nucleic acid (BNA)
  source 1..13: mol_type = other DNA
caaggaagatggc

SEQ ID NO: 9334 - DNA, 12 bp, synthetic construct
  misc_feature 1..12: note = Description of Artificial Sequence: Synthetic Antisense oligonucleotide
  modified_base 1: mod_base = OTHER; note = 5-methyl
  modified_base 1: mod_base = OTHER; note = bicyclic nucleic acid (BNA)
  modified_base 12: mod_base = OTHER; note = bicyclic nucleic acid (BNA)
  source 1..12: mol_type = other DNA
caaggaagatgg

SEQ ID NO: 9335 - DNA, 11 bp, synthetic construct
  misc_feature 1..11: note = Description of Artificial Sequence: Synthetic Antisense oligonucleotide
  modified_base 1: mod_base = OTHER; note = 5-methyl
  modified_base 1: mod_base = OTHER; note = bicyclic nucleic acid (BNA)
  modified_base 11: mod_base = OTHER; note = bicyclic nucleic acid (BNA)
  source 1..11: mol_type = other DNA
caaggaagatg

SEQ ID NO: 9336 - DNA, 10 bp, synthetic construct
  misc_feature 1..10: note = Description of Artificial Sequence: Synthetic Antisense oligonucleotide
  modified_base 1: mod_base = OTHER; note = 5-methyl
  modified_base 1: mod_base = OTHER; note = bicyclic nucleic acid (BNA)
  modified_base 10: mod_base = OTHER; note = bicyclic nucleic acid (BNA)
  source 1..10: mol_type = other DNA
caaggaagat

SEQ ID NO: 9337 - DNA, 20 bp, synthetic construct
  misc_feature 1..20: note = Description of Artificial Sequence: Synthetic Antisense oligonucleotide
  modified_base 1: mod_base = OTHER; note = bicyclic nucleic acid (BNA)
  modified_base 20: mod_base = OTHER; note = bicyclic nucleic acid (BNA)
  modified_base 12: mod_base = OTHER; note = 5-methyl
  modified_base 17: mod_base = OTHER; note = 5-methyl
  source 1..20: mol_type = other DNA
aaggaagatggcatttctag

SEQ ID NO: 9338 - DNA, 19 bp, synthetic construct
  misc_feature 1..19: note = Description of Artificial Sequence: Synthetic Antisense oligonucleotide
  modified_base 1: mod_base = OTHER; note = bicyclic nucleic acid (BNA)
  modified_base 19: mod_base = OTHER; note = bicyclic nucleic acid (BNA)
  modified_base 12: mod_base = OTHER; note = 5-methyl
  modified_base 17: mod_base = OTHER; note = 5-methyl
  source 1..19: mol_type = other DNA
aaggaagatggcatttcta

SEQ ID NO: 9339 - DNA, 18 bp, synthetic construct
  misc_feature 1..18: note = Description of Artificial Sequence: Synthetic Antisense oligonucleotide
  modified_base 1: mod_base = OTHER; note = bicyclic nucleic acid (BNA)
  modified_base 18: mod_base = OTHER; note = bicyclic nucleic acid (BNA)
  modified_base 12: mod_base = OTHER; note = 5-methyl
  modified_base 17: mod_base = OTHER; note = 5-methyl
  source 1..18: mol_type = other DNA
aaggaagatggcatttct

SEQ ID NO: 9340 - DNA, 17 bp, synthetic construct
  misc_feature 1..17: note = Description of Artificial Sequence: Synthetic Antisense oligonucleotide
  modified_base 1: mod_base = OTHER; note = bicyclic nucleic acid (BNA)
  modified_base 17: mod_base = OTHER; note = bicyclic nucleic acid (BNA)
  modified_base 12: mod_base = OTHER; note = 5-methyl
  modified_base 17: mod_base = OTHER; note = 5-methyl
  source 1..17: mol_type = other DNA
aaggaagatggcatttc

SEQ ID NO: 9341 - DNA, 16 bp, synthetic construct
  misc_feature 1..16: note = Description of Artificial Sequence: Synthetic Antisense oligonucleotide
  modified_base 1: mod_base = OTHER; note = bicyclic nucleic acid (BNA)
  modified_base 16: mod_base = OTHER; note = bicyclic nucleic acid (BNA)
  modified_base 12: mod_base = OTHER; note = 5-methyl
  source 1..16: mol_type = other DNA
aaggaagatggcattt

SEQ ID NO: 9342 - DNA, 15 bp, synthetic construct
  misc_feature 1..15: note = Description of Artificial Sequence: Synthetic Antisense oligonucleotide
  modified_base 1: mod_base = OTHER; note = bicyclic nucleic acid (BNA)
  modified_base 15: mod_base = OTHER; note = bicyclic nucleic acid (BNA)
  modified_base 12: mod_base = OTHER; note = 5-methyl
  source 1..15: mol_type = other DNA
aaggaagatggcatt

SEQ ID NO: 9343 - DNA, 14 bp, synthetic construct
  misc_feature 1..14: note = Description of Artificial Sequence: Synthetic Antisense oligonucleotide
  modified_base 1: mod_base = OTHER; note = bicyclic nucleic acid (BNA)
  modified_base 14: mod_base = OTHER; note = bicyclic nucleic acid (BNA)
  modified_base 12: mod_base = OTHER; note = 5-methyl
  source 1..14: mol_type = other DNA
aaggaagatggcat

SEQ ID NO: 9344 - DNA, 13 bp, synthetic construct
  misc_feature 1..13: note = Description of Artificial Sequence: Synthetic Antisense oligonucleotide
  modified_base 1: mod_base = OTHER; note = bicyclic nucleic acid (BNA)
  modified_base 13: mod_base = OTHER; note = bicyclic nucleic acid (BNA)
  modified_base 12: mod_base = OTHER; note = 5-methyl
  source 1..13: mol_type = other DNA
aaggaagatggca

SEQ ID NO: 9345 - DNA, 12 bp, synthetic construct
  misc_feature 1..12: note = Description of Artificial Sequence: Synthetic Antisense oligonucleotide
  modified_base 1: mod_base = OTHER; note = bicyclic nucleic acid (BNA)
  modified_base 12: mod_base = OTHER; note = bicyclic nucleic acid (BNA)
  modified_base 12: mod_base = OTHER; note = 5-methyl
  source 1..12: mol_type = other DNA
aaggaagatggc

SEQ ID NO: 9346 - DNA, 19 bp, synthetic construct
  misc_feature 1..19: note = Description of Artificial Sequence: Synthetic Antisense oligonucleotide
  modified_base 1: mod_base = OTHER; note = bicyclic nucleic acid (BNA)
  modified_base 19: mod_base = OTHER; note = bicyclic nucleic acid (BNA)
  modified_base 11: mod_base = OTHER; note = 5-methyl
  modified_base 16: mod_base = OTHER; note = 5-methyl
  source 1..19: mol_type = other DNA
aggaagatggcatttctag

SEQ ID NO: 9347 - DNA, 18 bp, synthetic construct
  misc_feature 1..18: note = Description of Artificial Sequence: Synthetic Antisense oligonucleotide
  modified_base 1: mod_base = OTHER; note = bicyclic nucleic acid (BNA)
  modified_base 18: mod_base = OTHER; note = bicyclic nucleic acid (BNA)
  modified_base 11: mod_base = OTHER; note = 5-methyl
  modified_base 16: mod_base = OTHER; note = 5-methyl
  source 1..18: mol_type = other DNA
aggaagatggcatttcta

SEQ ID NO: 9348 - DNA, 17 bp, synthetic construct
  misc_feature 1..17: note = Description of Artificial Sequence: Synthetic Antisense oligonucleotide
  modified_base 1: mod_base = OTHER; note = bicyclic nucleic acid (BNA)
  modified_base 17: mod_base = OTHER; note = bicyclic nucleic acid (BNA)
  modified_base 11: mod_base = OTHER; note = 5-methyl
  modified_base 16: mod_base = OTHER; note = 5-methyl
  source 1..17: mol_type = other DNA
aggaagatggcatttct

SEQ ID NO: 9349 - DNA, 16 bp, synthetic construct
  misc_feature 1..16: note = Description of Artificial Sequence: Synthetic Antisense oligonucleotide
  modified_base 1: mod_base = OTHER; note = bicyclic nucleic acid (BNA)
  modified_base 16: mod_base = OTHER; note = bicyclic nucleic acid (BNA)
  modified_base 11: mod_base = OTHER; note = 5-methyl
  modified_base 16: mod_base = OTHER; note = 5-methyl
  source 1..16: mol_type = other DNA
aggaagatggcatttc

SEQ ID NO: 9350 - DNA, 15 bp, synthetic construct
  misc_feature 1..15: note = Description of Artificial Sequence: Synthetic Antisense oligonucleotide
  modified_base 1: mod_base = OTHER; note = bicyclic nucleic acid (BNA)
  modified_base 15: mod_base = OTHER; note = bicyclic nucleic acid (BNA)
  modified_base 11: mod_base = OTHER; note = 5-methyl
  source 1..15: mol_type = other DNA
aggaagatggcattt

SEQ ID NO: 9351 - DNA, 14 bp, synthetic construct
  misc_feature 1..14: note = Description of Artificial Sequence: Synthetic Antisense oligonucleotide
  modified_base 1: mod_base = OTHER; note = bicyclic nucleic acid (BNA)
  modified_base 14: mod_base = OTHER; note = bicyclic nucleic acid (BNA)
  modified_base 11: mod_base = OTHER; note = 5-methyl
  source 1..14: mol_type = other DNA
aggaagatggcatt

SEQ ID NO: 9352 - DNA, 13 bp, synthetic construct
  misc_feature 1..13: note = Description of Artificial Sequence: Synthetic Antisense oligonucleotide
  modified_base 1: mod_base = OTHER; note = bicyclic nucleic acid (BNA)
  modified_base 13: mod_base = OTHER; note = bicyclic nucleic acid (BNA)
  modified_base 11: mod_base = OTHER; note = 5-methyl
  source 1..13: mol_type = other DNA
aggaagatggcat

SEQ ID NO: 9353 - DNA, 12 bp, synthetic construct
  misc_feature 1..12: note = Description of Artificial Sequence: Synthetic Antisense oligonucleotide
  modified_base 1: mod_base = OTHER; note = bicyclic nucleic acid (BNA)
  modified_base 12: mod_base = OTHER; note = bicyclic nucleic acid (BNA)
  modified_base 11: mod_base = OTHER; note = 5-methyl
  source 1..12: mol_type = other DNA
aggaagatggca

SEQ ID NO: 9354 - DNA, 18 bp, synthetic construct
  misc_feature 1..18: note = Description of Artificial Sequence: Synthetic Antisense oligonucleotide
  modified_base 1: mod_base = OTHER; note = bicyclic nucleic acid (BNA)
  modified_base 18: mod_base = OTHER; note = bicyclic nucleic acid (BNA)
  modified_base 10: mod_base = OTHER; note = 5-methyl
  modified_base 15: mod_base = OTHER; note = 5-methyl
  source 1..18: mol_type = other DNA
ggaagatggcatttctag

SEQ ID NO: 9355 - DNA, 17 bp, synthetic construct
  misc_feature 1..17: note = Description of Artificial Sequence: Synthetic Antisense oligonucleotide
  modified_base 1: mod_base = OTHER; note = bicyclic nucleic acid (BNA)
  modified_base 17: mod_base = OTHER; note = bicyclic nucleic acid (BNA)
  modified_base 10: mod_base = OTHER; note = 5-methyl
  modified_base 15: mod_base = OTHER; note = 5-methyl
  source 1..17: mol_type = other DNA
ggaagatggcatttcta

SEQ ID NO: 9356 - DNA, 16 bp, synthetic construct
  misc_feature 1..16: note = Description of Artificial Sequence: Synthetic Antisense oligonucleotide
  modified_base 1: mod_base = OTHER; note = bicyclic nucleic acid (BNA)
  modified_base 16: mod_base = OTHER; note = bicyclic nucleic acid (BNA)
  modified_base 10: mod_base = OTHER; note = 5-methyl
  modified_base 15: mod_base = OTHER; note = 5-methyl
  source 1..16: mol_type = other DNA
ggaagatggcatttct

SEQ ID NO: 9357 - DNA, 15 bp, synthetic construct
  misc_feature 1..15: note = Description of Artificial Sequence: Synthetic Antisense oligonucleotide
  modified_base 1: mod_base = OTHER; note = bicyclic nucleic acid (BNA)
  modified_base 15: mod_base = OTHER; note = bicyclic nucleic acid (BNA)
  modified_base 10: mod_base = OTHER; note = 5-methyl
  modified_base 15: mod_base = OTHER; note = 5-methyl
  source 1..15: mol_type = other DNA
ggaagatggcatttc

SEQ ID NO: 9358 - DNA, 14 bp, synthetic construct
  misc_feature 1..14: note = Description of Artificial Sequence: Synthetic Antisense oligonucleotide
  modified_base 1: mod_base = OTHER; note = bicyclic nucleic acid (BNA)
  modified_base 14: mod_base = OTHER; note = bicyclic nucleic acid (BNA)
  modified_base 10: mod_base = OTHER; note = 5-methyl
  source 1..14: mol_type = other DNA
ggaagatggcattt

SEQ ID NO: 9359 - DNA, 13 bp, synthetic construct
  misc_feature 1..13: note = Description of Artificial Sequence: Synthetic Antisense oligonucleotide
  modified_base 1: mod_base = OTHER; note = bicyclic nucleic acid (BNA)
  modified_base 13: mod_base = OTHER; note = bicyclic nucleic acid (BNA)
  modified_base 10: mod_base = OTHER; note = 5-methyl
  source 1..13: mol_type = other DNA
ggaagatggcatt

SEQ ID NO: 9360 - DNA, 12 bp, synthetic construct
  misc_feature 1..12: note = Description of Artificial Sequence: Synthetic Antisense oligonucleotide
  modified_base 1: mod_base = OTHER; note = bicyclic nucleic acid (BNA)
  modified_base 12: mod_base = OTHER; note = bicyclic nucleic acid (BNA)
  modified_base 10: mod_base = OTHER; note = 5-methyl
  source 1..12: mol_type = other DNA
ggaagatggcat

SEQ ID NO: 9361 - DNA, 11 bp, synthetic construct
  misc_feature 1..11: note = Description of Artificial Sequence: Synthetic Antisense oligonucleotide
  modified_base 1: mod_base = OTHER; note = bicyclic nucleic acid (BNA)
  modified_base 11: mod_base = OTHER; note = bicyclic nucleic acid (BNA)
  modified_base 10: mod_base = OTHER; note = 5-methyl
  source 1..11: mol_type = other DNA
ggaagatggca

SEQ ID NO: 9362 - DNA, 10 bp, synthetic construct
  misc_feature 1..10: note = Description of Artificial Sequence: Synthetic Antisense oligonucleotide
  modified_base 1: mod_base = OTHER; note = bicyclic nucleic acid (BNA)
  modified_base 10: mod_base = OTHER; note = bicyclic nucleic acid (BNA)
  modified_base 10: mod_base = OTHER; note = 5-methyl
  source 1..10: mol_type = other DNA
ggaagatggc

SEQ ID NO: 9363 - DNA, 17 bp, synthetic construct
  misc_feature 1..17: note = Description of Artificial Sequence: Synthetic Antisense oligonucleotide
  modified_base 1: mod_base = OTHER; note = bicyclic nucleic acid (BNA)
  modified_base 17: mod_base = OTHER; note = bicyclic nucleic acid (BNA)
  modified_base 9: mod_base = OTHER; note = 5-methyl
  modified_base 14: mod_base = OTHER; note = 5-methyl
  source 1..17: mol_type = other DNA
gaagatggcatttctag

SEQ ID NO: 9364 - DNA, 16 bp, synthetic construct
  misc_feature 1..16: note = Description of Artificial Sequence: Synthetic Antisense oligonucleotide
  modified_base 1: mod_base = OTHER; note = bicyclic nucleic acid (BNA)
  modified_base 16: mod_base = OTHER; note = bicyclic nucleic acid (BNA)
  modified_base 9: mod_base = OTHER; note = 5-methyl
  modified_base 14: mod_base = OTHER; note = 5-methyl
  source 1..16: mol_type = other DNA
gaagatggcatttcta

SEQ ID NO: 9365 - DNA, 14 bp, synthetic construct
  misc_feature 1..14: note = Description of Artificial Sequence: Synthetic Antisense oligonucleotide
  modified_base 1: mod_base = OTHER; note = bicyclic nucleic acid (BNA)
  modified_base 14: mod_base = OTHER; note = bicyclic nucleic acid (BNA)
  modified_base 9: mod_base = OTHER; note = 5-methyl
  modified_base 14: mod_base = OTHER; note = 5-methyl
  source 1..14: mol_type = other DNA
gaagatggcatttc

SEQ ID NO: 9366 - DNA, 13 bp, synthetic construct
  misc_feature 1..13: note = Description of Artificial Sequence: Synthetic Antisense oligonucleotide
  modified_base 1: mod_base = OTHER; note = bicyclic nucleic acid (BNA)
  modified_base 13: mod_base = OTHER; note = bicyclic nucleic acid (BNA)
  modified_base 9: mod_base = OTHER; note = 5-methyl
  source 1..13: mol_type = other DNA
gaagatggcattt

SEQ ID NO: 9367 - DNA, 12 bp, synthetic construct
  misc_feature 1..12: note = Description of Artificial Sequence: Synthetic Antisense oligonucleotide
  modified_base 1: mod_base = OTHER; note = bicyclic nucleic acid (BNA)
  modified_base 12: mod_base = OTHER; note = bicyclic nucleic acid (BNA)
  modified_base 9: mod_base = OTHER; note = 5-methyl
  source 1..12: mol_type = other DNA
gaagatggcatt

SEQ ID NO: 9368 - DNA, 11 bp, synthetic construct
  misc_feature 1..11: note = Description of Artificial Sequence: Synthetic Antisense oligonucleotide
  modified_base 1: mod_base = OTHER; note = bicyclic nucleic acid (BNA)
  modified_base 11: mod_base = OTHER; note = bicyclic nucleic acid (BNA)
  modified_base 9: mod_base = OTHER; note = 5-methyl
  source 1..11: mol_type = other DNA
gaagatggcat

SEQ ID NO: 9369 - DNA, 10 bp, synthetic construct
  misc_feature 1..10: note = Description of Artificial Sequence: Synthetic Antisense oligonucleotide
  modified_base 1: mod_base = OTHER; note = bicyclic nucleic acid (BNA)
  modified_base 10: mod_base = OTHER; note = bicyclic nucleic acid (BNA)
  modified_base 9: mod_base = OTHER; note = 5-methyl
  source 1..10: mol_type = other DNA
gaagatggca

SEQ ID NO: 9370 - skipped

SEQ ID NO: 9371 - DNA, 16 bp, synthetic construct
  misc_feature 1..16: note = Description of Artificial Sequence: Synthetic Antisense oligonucleotide
  modified_base 1: mod_base = OTHER; note = bicyclic nucleic acid (BNA)
  modified_base 16: mod_base = OTHER; note = bicyclic nucleic acid (BNA)
  modified_base 8: mod_base = OTHER; note = 5-methyl
  modified_base 13: mod_base = OTHER; note = 5-methyl
  source 1..16: mol_type = other DNA
aagatggcatttctag

SEQ ID NO: 9372 - DNA, 15 bp, synthetic construct
  misc_feature 1..15: note = Description of Artificial Sequence: Synthetic Antisense oligonucleotide
  modified_base 1: mod_base = OTHER; note = bicyclic nucleic acid (BNA)
  modified_base 15: mod_base = OTHER; note = bicyclic nucleic acid (BNA)
  modified_base 8: mod_base = OTHER; note = 5-methyl
  modified_base 13: mod_base = OTHER; note = 5-methyl
  source 1..15: mol_type = other DNA
aagatggcatttcta

SEQ ID NO: 9373 - DNA, 14 bp, synthetic construct
  misc_feature 1..14: note = Description of Artificial Sequence: Synthetic Antisense oligonucleotide
  modified_base 1: mod_base = OTHER; note = bicyclic nucleic acid (BNA)
  modified_base 14: mod_base = OTHER; note = bicyclic nucleic acid (BNA)
  modified_base 8: mod_base = OTHER; note = 5-methyl
  modified_base 13: mod_base = OTHER; note = 5-methyl
  source 1..14: mol_type = other DNA
aagatggcatttct

SEQ ID NO: 9374 - DNA, 13 bp, synthetic construct
  misc_feature 1..13: note = Description of Artificial Sequence: Synthetic Antisense oligonucleotide
  modified_base 1: mod_base = OTHER; note = bicyclic nucleic acid (BNA)
  modified_base 13: mod_base = OTHER; note = bicyclic nucleic acid (BNA)
  modified_base 8: mod_base = OTHER; note = 5-methyl
  modified_base 13: mod_base = OTHER; note = 5-methyl
  source 1..13: mol_type = other DNA
aagatggcatttc

SEQ ID NO: 9375 - DNA, 12 bp, synthetic construct
  misc_feature 1..12: note = Description of Artificial Sequence: Synthetic Antisense oligonucleotide
  modified_base 1: mod_base = OTHER; note = bicyclic nucleic acid (BNA)
  modified_base 12: mod_base = OTHER; note = bicyclic nucleic acid (BNA)
  modified_base 8: mod_base = OTHER; note = 5-methyl
  source 1..12: mol_type = other DNA
aagatggcattt

SEQ ID NO: 9376 - DNA, 11 bp, synthetic construct
  misc_feature 1..11: note = Description of Artificial Sequence: Synthetic Antisense oligonucleotide
  modified_base 1: mod_base = OTHER; note = bicyclic nucleic acid (BNA)
  modified_base 11: mod_base = OTHER; note = bicyclic nucleic acid (BNA)
  modified_base 8: mod_base = OTHER; note = 5-methyl
  source 1..11: mol_type = other DNA
aagatggcatt

SEQ ID NO: 9377 - DNA, 10 bp, synthetic construct
  misc_feature 1..10: note = Description of Artificial Sequence: Synthetic Antisense oligonucleotide
  modified_base 1: mod_base = OTHER; note = bicyclic nucleic acid (BNA)
  modified_base 10: mod_base = OTHER; note = bicyclic nucleic acid (BNA)
  modified_base 8: mod_base = OTHER; note = 5-methyl
  source 1..10: mol_type = other DNA
aagatggcat

SEQ ID NO: 9378-9379 - skipped (2 entries)

SEQ ID NO: 9380 - DNA, 15 bp, synthetic construct
  misc_feature 1..15: note = Description of Artificial Sequence: Synthetic Antisense oligonucleotide
  modified_base 1: mod_base = OTHER; note = bicyclic nucleic acid (BNA)
  modified_base 15: mod_base = OTHER; note = bicyclic nucleic acid (BNA)
  modified_base 7: mod_base = OTHER; note = 5-methyl
  modified_base 12: mod_base = OTHER; note = 5-methyl
  source 1..15: mol_type = other DNA
agatggcatttctag

SEQ ID NO: 9381 - DNA, 14 bp, synthetic construct
  misc_feature 1..14: note = Description of Artificial Sequence: Synthetic Antisense oligonucleotide
  modified_base 1: mod_base = OTHER; note = bicyclic nucleic acid (BNA)
  modified_base 14: mod_base = OTHER; note = bicyclic nucleic acid (BNA)
  modified_base 7: mod_base = OTHER; note = 5-methyl
  modified_base 12: mod_base = OTHER; note = 5-methyl
  source 1..14: mol_type = other DNA
agatggcatttcta

SEQ ID NO: 9382 - DNA, 13 bp, synthetic construct
  misc_feature 1..13: note = Description of Artificial Sequence: Synthetic Antisense oligonucleotide
  modified_base 1: mod_base = OTHER; note = bicyclic nucleic acid (BNA)
  modified_base 13: mod_base = OTHER; note = bicyclic nucleic acid (BNA)
  modified_base 7: mod_base = OTHER; note = 5-methyl
  modified_base 12: mod_base = OTHER; note = 5-methyl
  source 1..13: mol_type = other DNA
agatggcatttct

SEQ ID NO: 9383 - DNA, 12 bp, synthetic construct
  misc_feature 1..12: note = Description of Artificial Sequence: Synthetic Antisense oligonucleotide
  modified_base 1: mod_base = OTHER; note = bicyclic nucleic acid (BNA)
  modified_base 12: mod_base = OTHER; note = bicyclic nucleic acid (BNA)
  modified_base 7: mod_base = OTHER; note = 5-methyl
  modified_base 12: mod_base = OTHER; note = 5-methyl
  source 1..12: mol_type = other DNA
agatggcatttc

SEQ ID NO: 9384 - DNA, 11 bp, synthetic construct
  misc_feature 1..11: note = Description of Artificial Sequence: Synthetic Antisense oligonucleotide
  modified_base 1: mod_base = OTHER; note = bicyclic nucleic acid (BNA)
  modified_base 11: mod_base = OTHER; note = bicyclic nucleic acid (BNA)
  modified_base 7: mod_base = OTHER; note = 5-methyl
  source 1..11: mol_type = other DNA
agatggcattt

SEQ ID NO: 9385 - DNA, 10 bp, synthetic construct
  misc_feature 1..10: note = Description of Artificial Sequence: Synthetic Antisense oligonucleotide
  modified_base 1: mod_base = OTHER; note = bicyclic nucleic acid (BNA)
  modified_base 10: mod_base = OTHER; note = bicyclic nucleic acid (BNA)
  modified_base 7: mod_base = OTHER; note = 5-methyl
  source 1..10: mol_type = other DNA
agatggcatt

SEQ ID NO: 9386-9387 - skipped (2 entries)

SEQ ID NO: 9388 - DNA, 30 bp, synthetic construct; identical to SEQ ID NO: 8
  misc_feature 1..30: note = Description of Artificial Sequence: Synthetic Antisense oligonucleotide
  modified_base 1: mod_base = OTHER; note = 5-methyl
  modified_base 3..4: mod_base = OTHER; note = 5-methyl
  modified_base 7: mod_base = OTHER; note = 5-methyl
  modified_base 10: mod_base = OTHER; note = 5-methyl
  modified_base 22: mod_base = OTHER; note = 5-methyl
  modified_base 27: mod_base = OTHER; note = 5-methyl
  modified_base 1: mod_base = OTHER; note = bicyclic nucleic acid (BNA)
  modified_base 30: mod_base = OTHER; note = bicyclic nucleic acid (BNA)
  source 1..30: mol_type = other DNA

SEQ ID NO: 9389 - DNA, 29 bp, synthetic construct
  misc_feature 1..29: note = Description of Artificial Sequence: Synthetic Antisense oligonucleotide
  modified_base 1: mod_base = OTHER; note = 5-methyl
  modified_base 3..4: mod_base = OTHER; note = 5-methyl
  modified_base 7: mod_base = OTHER; note = 5-methyl
  modified_base 10: mod_base = OTHER; note = 5-methyl
  modified_base 22: mod_base = OTHER; note = 5-methyl
  modified_base 27: mod_base = OTHER; note = 5-methyl
  modified_base 1: mod_base = OTHER; note = bicyclic nucleic acid (BNA)
  modified_base 29: mod_base = OTHER; note = bicyclic nucleic acid (BNA)
  source 1..29: mol_type = other DNA
ctccaacatcaaggaagatggcatttcta

SEQ ID NO: 9390 - DNA, 28 bp, synthetic construct
  misc_feature 1..28: note = Description of Artificial Sequence: Synthetic Antisense oligonucleotide
  modified_base 1: mod_base = OTHER; note = 5-methyl
  modified_base 3..4: mod_base = OTHER; note = 5-methyl
  modified_base 7: mod_base = OTHER; note = 5-methyl
  modified_base 10: mod_base = OTHER; note = 5-methyl
  modified_base 22: mod_base = OTHER; note = 5-methyl
  modified_base 27: mod_base = OTHER; note = 5-methyl
  modified_base 1: mod_base = OTHER; note = bicyclic nucleic acid (BNA)
  modified_base 28: mod_base = OTHER; note = bicyclic nucleic acid (BNA)
  source 1..28: mol_type = other DNA
ctccaacatcaaggaagatggcatttct

SEQ ID NO: 9391 - DNA, 27 bp, synthetic construct
  misc_feature 1..27: note = Description of Artificial Sequence: Synthetic Antisense oligonucleotide
  modified_base 1: mod_base = OTHER; note = 5-methyl
  modified_base 3..4: mod_base = OTHER; note = 5-methyl
  modified_base 7: mod_base = OTHER; note = 5-methyl
  modified_base 10: mod_base = OTHER; note = 5-methyl
  modified_base 22: mod_base = OTHER; note = 5-methyl
  modified_base 27: mod_base = OTHER; note = 5-methyl
  modified_base 1: mod_base = OTHER; note = bicyclic nucleic acid (BNA)
  modified_base 27: mod_base = OTHER; note = bicyclic nucleic acid (BNA)
  source 1..27: mol_type = other DNA
ctccaacatcaaggaagatggcatttc

SEQ ID NO: 9392 - DNA, 26 bp, synthetic construct
  misc_feature 1..26: note = Description of Artificial Sequence: Synthetic Antisense oligonucleotide
  modified_base 1: mod_base = OTHER; note = 5-methyl
  modified_base 3..4: mod_base = OTHER; note = 5-methyl
  modified_base 7: mod_base = OTHER; note = 5-methyl
  modified_base 10: mod_base = OTHER; note = 5-methyl
  modified_base 22: mod_base = OTHER; note = 5-methyl
  modified_base 1: mod_base = OTHER; note = bicyclic nucleic acid (BNA)
  modified_base 26: mod_base = OTHER; note = bicyclic nucleic acid (BNA)
  source 1..26: mol_type = other DNA
ctccaacatcaaggaagatggcattt

SEQ ID NO: 9393 - DNA, 25 bp, synthetic construct
  misc_feature 1..25: note = Description of Artificial Sequence: Synthetic Antisense oligonucleotide
  modified_base 1: mod_base = OTHER; note = 5-methyl
  modified_base 3..4: mod_base = OTHER; note = 5-methyl
  modified_base 7: mod_base = OTHER; note = 5-methyl
  modified_base 10: mod_base = OTHER; note = 5-methyl
  modified_base 22: mod_base = OTHER; note = 5-methyl
  modified_base 1: mod_base = OTHER; note = bicyclic nucleic acid (BNA)
  modified_base 25: mod_base = OTHER; note = bicyclic nucleic acid (BNA)
  source 1..25: mol_type = other DNA
ctccaacatcaaggaagatggcatt

SEQ ID NO: 9394 - DNA, 24 bp, synthetic construct
  misc_feature 1..24: note = Description of Artificial Sequence: Synthetic Antisense oligonucleotide
  modified_base 1: mod_base = OTHER; note = 5-methyl
  modified_base 3..4: mod_base = OTHER; note = 5-methyl
  modified_base 7: mod_base = OTHER; note = 5-methyl
  modified_base 10: mod_base = OTHER; note = 5-methyl
  modified_base 22: mod_base = OTHER; note = 5-methyl
  modified_base 1: mod_base = OTHER; note = bicyclic nucleic acid (BNA)
  modified_base 24: mod_base = OTHER; note = bicyclic nucleic acid (BNA)
  source 1..24: mol_type = other DNA
ctccaacatcaaggaagatggcat

SEQ ID NO: 9395 - DNA, 23 bp, synthetic construct
  misc_feature 1..23: note = Description of Artificial Sequence: Synthetic Antisense oligonucleotide
  modified_base 1: mod_base = OTHER; note = 5-methyl
  modified_base 3..4: mod_base = OTHER; note = 5-methyl
  modified_base 7: mod_base = OTHER; note = 5-methyl
  modified_base 10: mod_base = OTHER; note = 5-methyl
  modified_base 22: mod_base = OTHER; note = 5-methyl
  modified_base 1: mod_base = OTHER; note = bicyclic nucleic acid (BNA)
  modified_base 23: mod_base = OTHER; note = bicyclic nucleic acid (BNA)
  source 1..23: mol_type = other DNA
ctccaacatcaaggaagatggca

SEQ ID NO: 9396 - DNA, 22 bp, synthetic construct
  misc_feature 1..22: note = Description of Artificial Sequence: Synthetic Antisense oligonucleotide
  modified_base 1: mod_base = OTHER; note = 5-methyl
  modified_base 3..4: mod_base = OTHER; note = 5-methyl
  modified_base 7: mod_base = OTHER; note = 5-methyl
  modified_base 10: mod_base = OTHER; note = 5-methyl
  modified_base 22: mod_base = OTHER; note = 5-methyl
  modified_base 1: mod_base = OTHER; note = bicyclic nucleic acid (BNA)
  modified_base 22: mod_base = OTHER; note = bicyclic nucleic acid (BNA)
  source 1..22: mol_type = other DNA
ctccaacatcaaggaagatggc

SEQ ID NO: 9397 - DNA, 21 bp, synthetic construct
  misc_feature 1..21: note = Description of Artificial Sequence: Synthetic Antisense oligonucleotide
  modified_base 1: mod_base = OTHER; note = 5-methyl
  modified_base 3..4: mod_base = OTHER; note = 5-methyl
  modified_base 7: mod_base = OTHER; note = 5-methyl
  modified_base 10: mod_base = OTHER; note = 5-methyl
  modified_base 1: mod_base = OTHER; note = bicyclic nucleic acid (BNA)
  modified_base 21: mod_base = OTHER; note = bicyclic nucleic acid (BNA)
  source 1..21: mol_type = other DNA
ctccaacatcaaggaagatgg

SEQ ID NO: 9398 - DNA, 20 bp, synthetic construct
  misc_feature 1..20: note = Description of Artificial Sequence: Synthetic Antisense oligonucleotide
  modified_base 1: mod_base = OTHER; note = 5-methyl
  modified_base 3..4: mod_base = OTHER; note = 5-methyl
  modified_base 7: mod_base = OTHER; note = 5-methyl
  modified_base 10: mod_base = OTHER; note = 5-methyl
  modified_base 1: mod_base = OTHER; note = bicyclic nucleic acid (BNA)
  modified_base 20: mod_base = OTHER; note = bicyclic nucleic acid (BNA)
  source 1..20: mol_type = other DNA
ctccaacatcaaggaagatg

SEQ ID NO: 9399 - DNA, 19 bp, synthetic construct
  misc_feature 1..19: note = Description of Artificial Sequence: Synthetic Antisense oligonucleotide
  modified_base 1: mod_base = OTHER; note = 5-methyl
  modified_base 3..4: mod_base = OTHER; note = 5-methyl
  modified_base 7: mod_base = OTHER; note = 5-methyl
  modified_base 10: mod_base = OTHER; note = 5-methyl
  modified_base 1: mod_base = OTHER; note = bicyclic nucleic acid (BNA)
  modified_base 19: mod_base = OTHER; note = bicyclic nucleic acid (BNA)
  source 1..19: mol_type = other DNA
ctccaacatcaaggaagat

SEQ ID NO: 9400 - DNA, 18 bp, synthetic construct
  misc_feature 1..18: note = Description of Artificial Sequence: Synthetic Antisense oligonucleotide
  modified_base 1: mod_base = OTHER; note = 5-methyl
  modified_base 3..4: mod_base = OTHER; note = 5-methyl
  modified_base 7: mod_base = OTHER; note = 5-methyl
  modified_base 10: mod_base = OTHER; note = 5-methyl
  modified_base 1: mod_base = OTHER; note = bicyclic nucleic acid (BNA)
  modified_base 18: mod_base = OTHER; note = bicyclic nucleic acid (BNA)
  source 1..18: mol_type = other DNA
ctccaacatcaaggaaga

SEQ ID NO: 9401 - DNA, 17 bp, synthetic construct
  misc_feature 1..17: note = Description of Artificial Sequence: Synthetic Antisense oligonucleotide
  modified_base 1: mod_base = OTHER; note = 5-methyl
  modified_base 3..4: mod_base = OTHER; note = 5-methyl
  modified_base 7: mod_base = OTHER; note = 5-methyl
  modified_base 10: mod_base = OTHER; note = 5-methyl
  modified_base 1: mod_base = OTHER; note = bicyclic nucleic acid (BNA)
  modified_base 17: mod_base = OTHER; note = bicyclic nucleic acid (BNA)
  source 1..17: mol_type = other DNA
ctccaacatcaaggaag

SEQ ID NO: 9402 - DNA, 29 bp, synthetic construct
  misc_feature 1..29: note = Description of Artificial Sequence: Synthetic Antisense oligonucleotide
  modified_base 1: mod_base = OTHER; note = bicyclic nucleic acid (BNA)
  modified_base 29: mod_base = OTHER; note = bicyclic nucleic acid (BNA)
  modified_base 2..3: mod_base = OTHER; note = 5-methyl
  modified_base 6: mod_base = OTHER; note = 5-methyl
  modified_base 9: mod_base = OTHER; note = 5-methyl
  modified_base 21: mod_base = OTHER; note = 5-methyl
  modified_base 26: mod_base = OTHER; note = 5-methyl
  source 1..29: mol_type = other DNA
tccaacatcaaggaagatggcatttctag

SEQ ID NO: 9403 - DNA, 28 bp, synthetic construct
  misc_feature 1..28: note = Description of Artificial Sequence: Synthetic Antisense oligonucleotide
  modified_base 1: mod_base = OTHER; note = bicyclic nucleic acid (BNA)
  modified_base 28: mod_base = OTHER; note = bicyclic nucleic acid (BNA)
  modified_base 2..3: mod_base = OTHER; note = 5-methyl
  modified_base 6: mod_base = OTHER; note = 5-methyl
  modified_base 9: mod_base = OTHER; note = 5-methyl
  modified_base 21: mod_base = OTHER; note = 5-methyl
  modified_base 26: mod_base = OTHER; note = 5-methyl
  source 1..28: mol_type = other DNA
tccaacatcaaggaagatggcatttcta

SEQ ID NO: 9404 - DNA, 27 bp, synthetic construct
  misc_feature 1..27: note = Description of Artificial Sequence: Synthetic Antisense oligonucleotide
  modified_base 1: mod_base = OTHER; note = bicyclic nucleic acid (BNA)
  modified_base 27: mod_base = OTHER; note = bicyclic nucleic acid (BNA)
  modified_base 2..3: mod_base = OTHER; note = 5-methyl
  modified_base 6: mod_base = OTHER; note = 5-methyl
  modified_base 9: mod_base = OTHER; note = 5-methyl
  modified_base 21: mod_base = OTHER; note = 5-methyl
  modified_base 26: mod_base = OTHER; note = 5-methyl
  source 1..27: mol_type = other DNA
tccaacatcaaggaagatggcatttct

SEQ ID NO: 9405 - DNA, 26 bp, synthetic construct
  misc_feature 1..26: note = Description of Artificial Sequence: Synthetic Antisense oligonucleotide
  modified_base 1: mod_base = OTHER; note = bicyclic nucleic acid (BNA)
  modified_base 26: mod_base = OTHER; note = bicyclic nucleic acid (BNA)
  modified_base 2..3: mod_base = OTHER; note = 5-methyl
  modified_base 6: mod_base = OTHER; note = 5-methyl
  modified_base 9: mod_base = OTHER; note = 5-methyl
  modified_base 21: mod_base = OTHER; note = 5-methyl
  modified_base 26: mod_base = OTHER; note = 5-methyl
  source 1..26: mol_type = other DNA
tccaacatcaaggaagatggcatttc

SEQ ID NO: 9406 - DNA, 25 bp, synthetic construct
  misc_feature 1..25: note = Description of Artificial Sequence: Synthetic Antisense oligonucleotide
  modified_base 1: mod_base = OTHER; note = bicyclic nucleic acid (BNA)
  modified_base 25: mod_base = OTHER; note = bicyclic nucleic acid (BNA)
  modified_base 2..3: mod_base = OTHER; note = 5-methyl
  modified_base 6: mod_base = OTHER; note = 5-methyl
  modified_base 9: mod_base = OTHER; note = 5-methyl
  modified_base 21: mod_base = OTHER; note = 5-methyl
  source 1..25: mol_type = other DNA
tccaacatcaaggaagatggcattt

SEQ ID NO: 9407 - DNA, 24 bp, synthetic construct
  misc_feature 1..24: note = Description of Artificial Sequence: Synthetic Antisense oligonucleotide
  modified_base 1: mod_base = OTHER; note = bicyclic nucleic acid (BNA)
  modified_base 24: mod_base = OTHER; note = bicyclic nucleic acid (BNA)
  modified_base 2..3: mod_base = OTHER; note = 5-methyl
  modified_base 6: mod_base = OTHER; note = 5-methyl
  modified_base 9: mod_base = OTHER; note = 5-methyl
  modified_base 21: mod_base = OTHER; note = 5-methyl
  source 1..24: mol_type = other DNA
tccaacatcaaggaagatggcatt

SEQ ID NO: 9408 - DNA, 23 bp, synthetic construct
  misc_feature 1..23: note = Description of Artificial Sequence: Synthetic Antisense oligonucleotide
  modified_base 1: mod_base = OTHER; note = bicyclic nucleic acid (BNA)
  modified_base 23: mod_base = OTHER; note = bicyclic nucleic acid (BNA)
  modified_base 2..3: mod_base = OTHER; note = 5-methyl
  modified_base 6: mod_base = OTHER; note = 5-methyl
  modified_base 9: mod_base = OTHER; note = 5-methyl
  modified_base 21: mod_base = OTHER; note = 5-methyl
  source 1..23: mol_type = other DNA
tccaacatcaaggaagatggcat

SEQ ID NO: 9409 - DNA, 22 bp, synthetic construct
  misc_feature 1..22: note = Description of Artificial Sequence: Synthetic Antisense oligonucleotide
  modified_base 1: mod_base = OTHER; note = bicyclic nucleic acid (BNA)
  modified_base 22: mod_base = OTHER; note = bicyclic nucleic acid (BNA)
  modified_base 2..3: mod_base = OTHER; note = 5-methyl
  modified_base 6: mod_base = OTHER; note = 5-methyl
  modified_base 9: mod_base = OTHER; note = 5-methyl
  modified_base 21: mod_base = OTHER; note = 5-methyl
  source 1..22: mol_type = other DNA
tccaacatcaaggaagatggca

SEQ ID NO: 9410 - DNA, 21 bp, synthetic construct
  misc_feature 1..21: note = Description of Artificial Sequence: Synthetic Antisense oligonucleotide
  modified_base 1: mod_base = OTHER; note = bicyclic nucleic acid (BNA)
  modified_base 21: mod_base = OTHER; note = bicyclic nucleic acid (BNA)
  modified_base 2..3: mod_base = OTHER; note = 5-methyl
  modified_base 6: mod_base = OTHER; note = 5-methyl
  modified_base 9: mod_base = OTHER; note = 5-methyl
  modified_base 21: mod_base = OTHER; note = 5-methyl
  source 1..21: mol_type = other DNA
tccaacatcaaggaagatggc

SEQ ID NO: 9411 - DNA, 20 bp, synthetic construct
  misc_feature 1..20: note = Description of Artificial Sequence: Synthetic Antisense oligonucleotide
  modified_base 1: mod_base = OTHER; note = bicyclic nucleic acid (BNA)
  modified_base 20: mod_base = OTHER; note = bicyclic nucleic acid (BNA)
  modified_base 2..3: mod_base = OTHER; note = 5-methyl
  modified_base 6: mod_base = OTHER; note = 5-methyl
  modified_base 9: mod_base = OTHER; note = 5-methyl
  source 1..20: mol_type = other DNA
tccaacatcaaggaagatgg

SEQ ID NO: 9412 - DNA, 19 bp, synthetic construct
  misc_feature 1..19: note = Description of Artificial Sequence: Synthetic Antisense oligonucleotide
  modified_base 1: mod_base = OTHER; note = bicyclic nucleic acid (BNA)
  modified_base 19: mod_base = OTHER; note = bicyclic nucleic acid (BNA)
  modified_base 2..3: mod_base = OTHER; note = 5-methyl
  modified_base 6: mod_base = OTHER; note = 5-methyl
  modified_base 9: mod_base = OTHER; note = 5-methyl
  source 1..19: mol_type = other DNA
tccaacatcaaggaagatg

SEQ ID NO: 9413 - DNA, 18 bp, synthetic construct
  misc_feature 1..18: note = Description of Artificial Sequence: Synthetic Antisense oligonucleotide
  modified_base 1: mod_base = OTHER; note = bicyclic nucleic acid (BNA)
  modified_base 18: mod_base = OTHER; note = bicyclic nucleic acid (BNA)
  modified_base 2..3: mod_base = OTHER; note = 5-methyl
  modified_base 6: mod_base = OTHER; note = 5-methyl
  modified_base 9: mod_base = OTHER; note = 5-methyl
  source 1..18: mol_type = other DNA
tccaacatcaaggaagat

SEQ ID NO: 9414 - DNA, 17 bp, synthetic construct
  misc_feature 1..17: note = Description of Artificial Sequence: Synthetic Antisense oligonucleotide
  modified_base 1: mod_base = OTHER; note = bicyclic nucleic acid (BNA)
  modified_base 17: mod_base = OTHER; note = bicyclic nucleic acid (BNA)
  modified_base 2..3: mod_base = OTHER; note = 5-methyl
  modified_base 6: mod_base = OTHER; note = 5-methyl
  modified_base 9: mod_base = OTHER; note = 5-methyl
  source 1..17: mol_type = other DNA
tccaacatcaaggaaga

SEQ ID NO: 9415 - DNA, 16 bp, synthetic construct
  misc_feature 1..16: note = Description of Artificial Sequence: Synthetic Antisense oligonucleotide
  modified_base 1: mod_base = OTHER; note = bicyclic nucleic acid (BNA)
  modified_base 16: mod_base = OTHER; note = bicyclic nucleic acid (BNA)
  modified_base 2..3: mod_base = OTHER; note = 5-methyl
  modified_base 6: mod_base = OTHER; note = 5-methyl
  modified_base 9: mod_base = OTHER; note = 5-methyl
  source 1..16: mol_type = other DNA
tccaacatcaaggaag

SEQ ID NO: 9416 - DNA, 28 bp, synthetic construct
  misc_feature 1..28: note = Description of Artificial Sequence: Synthetic Antisense oligonucleotide
  modified_base 1..2: mod_base = OTHER; note = 5-methyl
  modified_base 5: mod_base = OTHER; note = 5-methyl
  modified_base 8: mod_base = OTHER; note = 5-methyl
  modified_base 20: mod_base = OTHER; note = 5-methyl
  modified_base 25: mod_base = OTHER; note = 5-methyl
  modified_base 1: mod_base = OTHER; note = bicyclic nucleic acid (BNA)
  modified_base 28: mod_base = OTHER; note = bicyclic nucleic acid (BNA)
  source 1..28: mol_type = other DNA
ccaacatcaaggaagatggcatttctag

SEQ ID NO: 9417 - DNA, 27 bp, synthetic construct
  misc_feature 1..27: note = Description of Artificial Sequence: Synthetic Antisense oligonucleotide
  modified_base 1..2: mod_base = OTHER; note = 5-methyl
  modified_base 5: mod_base = OTHER; note = 5-methyl
  modified_base 8: mod_base = OTHER; note = 5-methyl
  modified_base 20: mod_base = OTHER; note = 5-methyl
  modified_base 25: mod_base = OTHER; note = 5-methyl
  modified_base 1: mod_base = OTHER; note = bicyclic nucleic acid (BNA)
  modified_base 27: mod_base = OTHER; note = bicyclic nucleic acid (BNA)
  source 1..27: mol_type = other DNA
ccaacatcaaggaagatggcatttcta

SEQ ID NO: 9418 - DNA, 26 bp, synthetic construct
  misc_feature 1..26: note = Description of Artificial Sequence: Synthetic Antisense oligonucleotide
  modified_base 1..2: mod_base = OTHER; note = 5-methyl
  modified_base 5: mod_base = OTHER; note = 5-methyl
  modified_base 8: mod_base = OTHER; note = 5-methyl
  modified_base 20: mod_base = OTHER; note = 5-methyl
  modified_base 25: mod_base = OTHER; note = 5-methyl
  modified_base 1: mod_base = OTHER; note = bicyclic nucleic acid (BNA)
  modified_base 26: mod_base = OTHER; note = bicyclic nucleic acid (BNA)
  source 1..26: mol_type = other DNA
ccaacatcaaggaagatggcatttct

SEQ ID NO: 9419 - DNA, 25 bp, synthetic construct
  misc_feature 1..25: note = Description of Artificial Sequence: Synthetic Antisense oligonucleotide
  modified_base 1..2: mod_base = OTHER; note = 5-methyl
  modified_base 5: mod_base = OTHER; note = 5-methyl
  modified_base 8: mod_base = OTHER; note = 5-methyl
  modified_base 20: mod_base = OTHER; note = 5-methyl
  modified_base 25: mod_base = OTHER; note = 5-methyl
  modified_base 1: mod_base = OTHER; note = bicyclic nucleic acid (BNA)
  modified_base 25: mod_base = OTHER; note = bicyclic nucleic acid (BNA)
  source 1..25: mol_type = other DNA
ccaacatcaaggaagatggcatttc

SEQ ID NO: 9420 - DNA, 24 bp, synthetic construct
  misc_feature 1..24: note = Description of Artificial Sequence: Synthetic Antisense oligonucleotide
  modified_base 1..2: mod_base = OTHER; note = 5-methyl
  modified_base 5: mod_base = OTHER; note = 5-methyl
  modified_base 8: mod_base = OTHER; note = 5-methyl
  modified_base 20: mod_base = OTHER; note = 5-methyl
  modified_base 1: mod_base = OTHER; note = bicyclic nucleic acid (BNA)
  modified_base 24: mod_base = OTHER; note = bicyclic nucleic acid (BNA)
  source 1..24: mol_type = other DNA
ccaacatcaaggaagatggcattt

SEQ ID NO: 9421 - DNA, 23 bp, synthetic construct
  misc_feature 1..23: note = Description of Artificial Sequence: Synthetic Antisense oligonucleotide
  modified_base 1..2: mod_base = OTHER; note = 5-methyl
  modified_base 5: mod_base = OTHER; note = 5-methyl
  modified_base 8: mod_base = OTHER; note = 5-methyl
  modified_base 20: mod_base = OTHER; note = 5-methyl
  modified_base 1: mod_base = OTHER; note = bicyclic nucleic acid (BNA)
  modified_base 23: mod_base = OTHER; note = bicyclic nucleic acid (BNA)
  source 1..23: mol_type = other DNA
ccaacatcaaggaagatggcatt

SEQ ID NO: 9422 - DNA, 22 bp, synthetic construct
  misc_feature 1..22: note = Description of Artificial Sequence: Synthetic Antisense oligonucleotide
  modified_base 1..2: mod_base = OTHER; note = 5-methyl
  modified_base 5: mod_base = OTHER; note = 5-methyl
  modified_base 8: mod_base = OTHER; note = 5-methyl
  modified_base 20: mod_base = OTHER; note = 5-methyl
  modified_base 1: mod_base = OTHER; note = bicyclic nucleic acid (BNA)
  modified_base 22: mod_base = OTHER; note = bicyclic nucleic acid (BNA)
  source 1..22: mol_type = other DNA
ccaacatcaaggaagatggcat

SEQ ID NO: 9423 - DNA, 21 bp, synthetic construct
  misc_feature 1..21: note = Description of Artificial Sequence: Synthetic Antisense oligonucleotide
  modified_base 1..2: mod_base = OTHER; note = 5-methyl
  modified_base 5: mod_base = OTHER; note = 5-methyl
  modified_base 8: mod_base = OTHER; note = 5-methyl
  modified_base 20: mod_base = OTHER; note = 5-methyl
  modified_base 1: mod_base = OTHER; note = bicyclic nucleic acid (BNA)
  modified_base 21: mod_base = OTHER; note = bicyclic nucleic acid (BNA)
  source 1..21: mol_type = other DNA
ccaacatcaaggaagatggca

SEQ ID NO: 9424 - DNA, 20 bp, synthetic construct
  misc_feature 1..20: note = Description of Artificial Sequence: Synthetic Antisense oligonucleotide
  modified_base 1..2: mod_base = OTHER; note = 5-methyl
  modified_base 5: mod_base = OTHER; note = 5-methyl
  modified_base 8: mod_base = OTHER; note = 5-methyl
  modified_base 20: mod_base = OTHER; note = 5-methyl
  modified_base 1: mod_base = OTHER; note = bicyclic nucleic acid (BNA)
  modified_base 20: mod_base = OTHER; note = bicyclic nucleic acid (BNA)
  source 1..20: mol_type = other DNA
ccaacatcaaggaagatggc

SEQ ID NO: 9425 - DNA, 19 bp, synthetic construct
  misc_feature 1..19: note = Description of Artificial Sequence: Synthetic Antisense oligonucleotide
  modified_base 1..2: mod_base = OTHER; note = 5-methyl
  modified_base 5: mod_base = OTHER; note = 5-methyl
  modified_base 8: mod_base = OTHER; note = 5-methyl
  modified_base 1: mod_base = OTHER; note = bicyclic nucleic acid (BNA)
  modified_base 19: mod_base = OTHER; note = bicyclic nucleic acid (BNA)
  source 1..19: mol_type = other DNA
ccaacatcaaggaagatgg

SEQ ID NO: 9426 - DNA, 18 bp, synthetic construct
  misc_feature 1..18: note = Description of Artificial Sequence: Synthetic Antisense oligonucleotide
  modified_base 1..2: mod_base = OTHER; note = 5-methyl
  modified_base 5: mod_base = OTHER; note = 5-methyl
  modified_base 8: mod_base = OTHER; note = 5-methyl
  modified_base 1: mod_base = OTHER; note = bicyclic nucleic acid (BNA)
  modified_base 18: mod_base = OTHER; note = bicyclic nucleic acid (BNA)
  source 1..18: mol_type = other DNA
ccaacatcaaggaagatg

SEQ ID NO: 9427 - DNA, 17 bp, synthetic construct
  misc_feature 1..17: note = Description of Artificial Sequence: Synthetic Antisense oligonucleotide
  modified_base 1..2: mod_base = OTHER; note = 5-methyl
  modified_base 5: mod_base = OTHER; note = 5-methyl
  modified_base 8: mod_base = OTHER; note = 5-methyl
  modified_base 1: mod_base = OTHER; note = bicyclic nucleic acid (BNA)
  modified_base 17: mod_base = OTHER; note = bicyclic nucleic acid (BNA)
  source 1..17: mol_type = other DNA
ccaacatcaaggaagat

SEQ ID NO: 9428 - DNA, 16 bp, synthetic construct
  misc_feature 1..16: note = Description of Artificial Sequence: Synthetic Antisense oligonucleotide
  modified_base 1..2: mod_base = OTHER; note = 5-methyl
  modified_base 5: mod_base = OTHER; note = 5-methyl
  modified_base 8: mod_base = OTHER; note = 5-methyl
  modified_base 1: mod_base = OTHER; note = bicyclic nucleic acid (BNA)
  modified_base 16: mod_base = OTHER; note = bicyclic nucleic acid (BNA)
  source 1..16: mol_type = other DNA
ccaacatcaaggaaga

SEQ ID NO: 9429 - DNA, 15 bp, synthetic construct
  misc_feature 1..15: note = Description of Artificial Sequence: Synthetic Antisense oligonucleotide
  modified_base 1..2: mod_base = OTHER; note = 5-methyl
  modified_base 5: mod_base = OTHER; note = 5-methyl
  modified_base 8: mod_base = OTHER; note = 5-methyl
  modified_base 1: mod_base = OTHER; note = bicyclic nucleic acid (BNA)
  modified_base 15: mod_base = OTHER; note = bicyclic nucleic acid (BNA)
  source 1..15: mol_type = other DNA
ccaacatcaaggaag

SEQ ID NO: 9430 - DNA, 27 bp, synthetic construct
  misc_feature 1..27: note = Description of Artificial Sequence: Synthetic Antisense oligonucleotide
  modified_base 1: mod_base = OTHER; note = 5-methyl
  modified_base 4: mod_base = OTHER; note = 5-methyl
  modified_base 7: mod_base = OTHER; note = 5-methyl
  modified_base 19: mod_base = OTHER; note = 5-methyl
  modified_base 24: mod_base = OTHER; note = 5-methyl
  modified_base 1: mod_base = OTHER; note = bicyclic nucleic acid (BNA)
  modified_base 27: mod_base = OTHER; note = bicyclic nucleic acid (BNA)
  source 1..27: mol_type = other DNA
caacatcaaggaagatggcatttctag

SEQ ID NO: 9431 - DNA, 26 bp, synthetic construct
  misc_feature 1..26: note = Description of Artificial Sequence: Synthetic Antisense oligonucleotide
  modified_base 1: mod_base = OTHER; note = 5-methyl
  modified_base 4: mod_base = OTHER; note = 5-methyl
  modified_base 7: mod_base = OTHER; note = 5-methyl
  modified_base 19: mod_base = OTHER; note = 5-methyl
  modified_base 24: mod_base = OTHER; note = 5-methyl
  modified_base 1: mod_base = OTHER; note = bicyclic nucleic acid (BNA)
  modified_base 26: mod_base = OTHER; note = bicyclic nucleic acid (BNA)
  source 1..26: mol_type = other DNA
caacatcaaggaagatggcatttcta

SEQ ID NO: 9432 - DNA, 25 bp, synthetic construct
  misc_feature 1..25: note = Description of Artificial Sequence: Synthetic Antisense oligonucleotide
  modified_base 1: mod_base = OTHER; note = 5-methyl
  modified_base 4: mod_base = OTHER; note = 5-methyl
  modified_base 7: mod_base = OTHER; note = 5-methyl
  modified_base 19: mod_base = OTHER; note = 5-methyl
  modified_base 24: mod_base = OTHER; note = 5-methyl
  modified_base 1: mod_base = OTHER; note = bicyclic nucleic acid (BNA)
  modified_base 25: mod_base = OTHER; note = bicyclic nucleic acid (BNA)
  source 1..25: mol_type = other DNA
caacatcaaggaagatggcatttct

SEQ ID NO: 9433 - DNA, 24 bp, synthetic construct
  misc_feature 1..24: note = Description of Artificial Sequence: Synthetic Antisense oligonucleotide
  modified_base 1: mod_base = OTHER; note = 5-methyl
  modified_base 4: mod_base = OTHER; note = 5-methyl
  modified_base 7: mod_base = OTHER; note = 5-methyl
  modified_base 19: mod_base = OTHER; note = 5-methyl
  modified_base 24: mod_base = OTHER; note = 5-methyl
  modified_base 1: mod_base = OTHER; note = bicyclic nucleic acid (BNA)
  modified_base 24: mod_base = OTHER; note = bicyclic nucleic acid (BNA)
  source 1..24: mol_type = other DNA
caacatcaaggaagatggcatttc

SEQ ID NO: 9434 - DNA, 23 bp, synthetic construct
  misc_feature 1..23: note = Description of Artificial Sequence: Synthetic Antisense oligonucleotide
  modified_base 1: mod_base = OTHER; note = 5-methyl
  modified_base 4: mod_base = OTHER; note = 5-methyl
  modified_base 7: mod_base = OTHER; note = 5-methyl
  modified_base 19: mod_base = OTHER; note = 5-methyl
  modified_base 1: mod_base = OTHER; note = bicyclic nucleic acid (BNA)
  modified_base 23: mod_base = OTHER; note = bicyclic nucleic acid (BNA)
  source 1..23: mol_type = other DNA
caacatcaaggaagatggcattt

SEQ ID NO: 9435 - DNA, 22 bp, synthetic construct
  misc_feature 1..22: note = Description of Artificial Sequence: Synthetic Antisense oligonucleotide
  modified_base 1: mod_base = OTHER; note = 5-methyl
  modified_base 4: mod_base = OTHER; note = 5-methyl
  modified_base 7: mod_base = OTHER; note = 5-methyl
  modified_base 19: mod_base = OTHER; note = 5-methyl
  modified_base 1: mod_base = OTHER; note = bicyclic nucleic acid (BNA)
  modified_base 22: mod_base = OTHER; note = bicyclic nucleic acid (BNA)
  source 1..22: mol_type = other DNA
caacatcaaggaagatggcatt

SEQ ID NO: 9436 - DNA, 21 bp, synthetic construct
  misc_feature 1..21: note = Description of Artificial Sequence: Synthetic Antisense oligonucleotide
  modified_base 1: mod_base = OTHER; note = 5-methyl
  modified_base 4: mod_base = OTHER; note = 5-methyl
  modified_base 7: mod_base = OTHER; note = 5-methyl
  modified_base 19: mod_base = OTHER; note = 5-methyl
  modified_base 1: mod_base = OTHER; note = bicyclic nucleic acid (BNA)
  modified_base 21: mod_base = OTHER; note = bicyclic nucleic acid (BNA)
  source 1..21: mol_type = other DNA
caacatcaaggaagatggcat

SEQ ID NO: 9437 - DNA, 20 bp, synthetic construct
  misc_feature 1..20: note = Description of Artificial Sequence: Synthetic Antisense oligonucleotide
  modified_base 1: mod_base = OTHER; note = 5-methyl
  modified_base 4: mod_base = OTHER; note = 5-methyl
  modified_base 7: mod_base = OTHER; note = 5-methyl
  modified_base 19: mod_base = OTHER; note = 5-methyl
  modified_base 1: mod_base = OTHER; note = bicyclic nucleic acid (BNA)
  modified_base 20: mod_base = OTHER; note = bicyclic nucleic acid (BNA)
  source 1..20: mol_type = other DNA
caacatcaaggaagatggca

SEQ ID NO: 9438 - DNA, 19 bp, synthetic construct
  misc_feature 1..19: note = Description of Artificial Sequence: Synthetic Antisense oligonucleotide
  modified_base 1: mod_base = OTHER; note = 5-methyl
  modified_base 4: mod_base = OTHER; note = 5-methyl
  modified_base 7: mod_base = OTHER; note = 5-methyl
  modified_base 19: mod_base = OTHER; note = 5-methyl
  modified_base 1: mod_base = OTHER; note = bicyclic nucleic acid (BNA)
  modified_base 19: mod_base = OTHER; note = bicyclic nucleic acid (BNA)
  source 1..19: mol_type = other DNA
caacatcaaggaagatggc

SEQ ID NO: 9439 - DNA, 18 bp, synthetic construct
  misc_feature 1..18: note = Description of Artificial Sequence: Synthetic Antisense oligonucleotide
  modified_base 1: mod_base = OTHER; note = 5-methyl
  modified_base 4: mod_base = OTHER; note = 5-methyl
  modified_base 7: mod_base = OTHER; note = 5-methyl
  modified_base 1: mod_base = OTHER; note = bicyclic nucleic acid (BNA)
  modified_base 18: mod_base = OTHER; note = bicyclic nucleic acid (BNA)
  source 1..18: mol_type = other DNA
caacatcaaggaagatgg

SEQ ID NO: 9440 - DNA, 17 bp, synthetic construct
  misc_feature 1..17: note = Description of Artificial Sequence: Synthetic Antisense oligonucleotide
  modified_base 1: mod_base = OTHER; note = 5-methyl
  modified_base 4: mod_base = OTHER; note = 5-methyl
  modified_base 7: mod_base = OTHER; note = 5-methyl
  modified_base 1: mod_base = OTHER; note = bicyclic nucleic acid (BNA)
  modified_base 17: mod_base = OTHER; note = bicyclic nucleic acid (BNA)
  source 1..17: mol_type = other DNA
caacatcaaggaagatg

SEQ ID NO: 9441 - DNA, 16 bp, synthetic construct
  misc_feature 1..16: note = Description of Artificial Sequence: Synthetic Antisense oligonucleotide
  modified_base 1: mod_base = OTHER; note = 5-methyl
  modified_base 4: mod_base = OTHER; note = 5-methyl
  modified_base 7: mod_base = OTHER; note = 5-methyl
  modified_base 1: mod_base = OTHER; note = bicyclic nucleic acid (BNA)
  modified_base 16: mod_base = OTHER; note = bicyclic nucleic acid (BNA)
  source 1..16: mol_type = other DNA
caacatcaaggaagat

SEQ ID NO: 9442 - DNA, 15 bp, synthetic construct
  misc_feature 1..15: note = Description of Artificial Sequence: Synthetic Antisense oligonucleotide
  modified_base 1: mod_base = OTHER; note = 5-methyl
  modified_base 4: mod_base = OTHER; note = 5-methyl
  modified_base 7: mod_base = OTHER; note = 5-methyl
  modified_base 1: mod_base = OTHER; note = bicyclic nucleic acid (BNA)
  modified_base 15: mod_base = OTHER; note = bicyclic nucleic acid (BNA)
  source 1..15: mol_type = other DNA
caacatcaaggaaga

SEQ ID NO: 9443 - DNA, 14 bp, synthetic construct
  misc_feature 1..14: note = Description of Artificial Sequence: Synthetic Antisense oligonucleotide
  modified_base 1: mod_base = OTHER; note = 5-methyl
  modified_base 4: mod_base = OTHER; note = 5-methyl
  modified_base 7: mod_base = OTHER; note = 5-methyl
  modified_base 1: mod_base = OTHER; note = bicyclic nucleic acid (BNA)
  modified_base 14: mod_base = OTHER; note = bicyclic nucleic acid (BNA)
  source 1..14: mol_type = other DNA
caacatcaaggaag

SEQ ID NO: 9444 - DNA, 26 bp, synthetic construct
  misc_feature 1..26: note = Description of Artificial Sequence: Synthetic Antisense oligonucleotide
  modified_base 1: mod_base = OTHER; note = bicyclic nucleic acid (BNA)
  modified_base 26: mod_base = OTHER; note = bicyclic nucleic acid (BNA)
  modified_base 3: mod_base = OTHER; note = 5-methyl
  modified_base 6: mod_base = OTHER; note = 5-methyl
  modified_base 18: mod_base = OTHER; note = 5-methyl
  modified_base 23: mod_base = OTHER; note = 5-methyl
  source 1..26: mol_type = other DNA
aacatcaaggaagatggcatttctag

SEQ ID NO: 9445 - DNA, 25 bp, synthetic construct
  misc_feature 1..25: note = Description of Artificial Sequence: Synthetic Antisense oligonucleotide
  modified_base 1: mod_base = OTHER; note = bicyclic nucleic acid (BNA)
  modified_base 25: mod_base = OTHER; note = bicyclic nucleic acid (BNA)
  modified_base 3: mod_base = OTHER; note = 5-methyl
  modified_base 6: mod_base = OTHER; note = 5-methyl
  modified_base 18: mod_base = OTHER; note = 5-methyl
  modified_base 23: mod_base = OTHER; note = 5-methyl
  source 1..25: mol_type = other DNA
aacatcaaggaagatggcatttcta

SEQ ID NO: 9446 - DNA, 24 bp, synthetic construct
  misc_feature 1..24: note = Description of Artificial Sequence: Synthetic Antisense oligonucleotide
  modified_base 1: mod_base = OTHER; note = bicyclic nucleic acid (BNA)
  modified_base 24: mod_base = OTHER; note = bicyclic nucleic acid (BNA)
  modified_base 3: mod_base = OTHER; note = 5-methyl
  modified_base 6: mod_base = OTHER; note = 5-methyl
  modified_base 18: mod_base = OTHER; note = 5-methyl
  modified_base 23: mod_base = OTHER; note = 5-methyl
  source 1..24: mol_type = other DNA
aacatcaaggaagatggcatttct

SEQ ID NO: 9447 - DNA, 23 bp, synthetic construct
  misc_feature 1..23: note = Description of Artificial Sequence: Synthetic Antisense oligonucleotide
  modified_base 1: mod_base = OTHER; note = bicyclic nucleic acid (BNA)
  modified_base 23: mod_base = OTHER; note = bicyclic nucleic acid (BNA)
  modified_base 3: mod_base = OTHER; note = 5-methyl
  modified_base 6: mod_base = OTHER; note = 5-methyl
  modified_base 18: mod_base = OTHER; note = 5-methyl
  modified_base 23: mod_base = OTHER; note = 5-methyl
  source 1..23: mol_type = other DNA
aacatcaaggaagatggcatttc

SEQ ID NO: 9448 - DNA, 22 bp, synthetic construct
  misc_feature 1..22: note = Description of Artificial Sequence: Synthetic Antisense oligonucleotide
  modified_base 1: mod_base = OTHER; note = bicyclic nucleic acid (BNA)
  modified_base 22: mod_base = OTHER; note = bicyclic nucleic acid (BNA)
  modified_base 3: mod_base = OTHER; note = 5-methyl
  modified_base 6: mod_base = OTHER; note = 5-methyl
  modified_base 18: mod_base = OTHER; note = 5-methyl
  source 1..22: mol_type = other DNA
aacatcaaggaagatggcattt

SEQ ID NO: 9449 - DNA, 21 bp, synthetic construct
  misc_feature 1..21: note = Description of Artificial Sequence: Synthetic Antisense oligonucleotide
  modified_base 1: mod_base = OTHER; note = bicyclic nucleic acid (BNA)
  modified_base 21: mod_base = OTHER; note = bicyclic nucleic acid (BNA)
  modified_base 3: mod_base = OTHER; note = 5-methyl
  modified_base 6: mod_base = OTHER; note = 5-methyl
  modified_base 18: mod_base = OTHER; note = 5-methyl
  source 1..21: mol_type = other DNA
aacatcaaggaagatggcatt

SEQ ID NO: 9450 - DNA, 20 bp, synthetic construct
  misc_feature 1..20: note = Description of Artificial Sequence: Synthetic Antisense oligonucleotide
  modified_base 1: mod_base = OTHER; note = bicyclic nucleic acid (BNA)
  modified_base 20: mod_base = OTHER; note = bicyclic nucleic acid (BNA)
  modified_base 3: mod_base = OTHER; note = 5-methyl
  modified_base 6: mod_base = OTHER; note = 5-methyl
  modified_base 18: mod_base = OTHER; note = 5-methyl
  source 1..20: mol_type = other DNA
aacatcaaggaagatggcat

SEQ ID NO: 9451 - DNA, 19 bp, synthetic construct
  misc_feature 1..19: note = Description of Artificial Sequence: Synthetic Antisense oligonucleotide
  modified_base 1: mod_base = OTHER; note = bicyclic nucleic acid (BNA)
  modified_base 19: mod_base = OTHER; note = bicyclic nucleic acid (BNA)
  modified_base 3: mod_base = OTHER; note = 5-methyl
  modified_base 6: mod_base = OTHER; note = 5-methyl
  modified_base 18: mod_base = OTHER; note = 5-methyl
  source 1..19: mol_type = other DNA
aacatcaaggaagatggca

SEQ ID NO: 9452 - DNA, 18 bp, synthetic construct
  misc_feature 1..18: note = Description of Artificial Sequence: Synthetic Antisense oligonucleotide
  modified_base 1: mod_base = OTHER; note = bicyclic nucleic acid (BNA)
  modified_base 18: mod_base = OTHER; note = bicyclic nucleic acid (BNA)
  modified_base 3: mod_base = OTHER; note = 5-methyl
  modified_base 6: mod_base = OTHER; note = 5-methyl
  modified_base 18: mod_base = OTHER; note = 5-methyl
  source 1..18: mol_type = other DNA
aacatcaaggaagatggc

SEQ ID NO: 9453 - DNA, 17 bp, synthetic construct
  misc_feature 1..17: note = Description of Artificial Sequence: Synthetic Antisense oligonucleotide
  modified_base 1: mod_base = OTHER; note = bicyclic nucleic acid (BNA)
  modified_base 17: mod_base = OTHER; note = bicyclic nucleic acid (BNA)
  modified_base 3: mod_base = OTHER; note = 5-methyl
  modified_base 6: mod_base = OTHER; note = 5-methyl
  source 1..17: mol_type = other DNA
aacatcaaggaagatgg

SEQ ID NO: 9454 - DNA, 16 bp, synthetic construct
  misc_feature 1..16: note = Description of Artificial Sequence: Synthetic Antisense oligonucleotide
  modified_base 1: mod_base = OTHER; note = bicyclic nucleic acid (BNA)
  modified_base 16: mod_base = OTHER; note = bicyclic nucleic acid (BNA)
  modified_base 3: mod_base = OTHER; note = 5-methyl
  modified_base 6: mod_base = OTHER; note = 5-methyl
  source 1..16: mol_type = other DNA
aacatcaaggaagatg

SEQ ID NO: 9455 - DNA, 15 bp, synthetic construct
  misc_feature 1..15: note = Description of Artificial Sequence: Synthetic Antisense oligonucleotide
  modified_base 1: mod_base = OTHER; note = bicyclic nucleic acid (BNA)
  modified_base 15: mod_base = OTHER; note = bicyclic nucleic acid (BNA)
  modified_base 3: mod_base = OTHER; note = 5-methyl
  modified_base 6: mod_base = OTHER; note = 5-methyl
  source 1..15: mol_type = other DNA
aacatcaaggaagat

SEQ ID NO: 9456 - DNA, 14 bp, synthetic construct
  misc_feature 1..14: note = Description of Artificial Sequence: Synthetic Antisense oligonucleotide
  modified_base 1: mod_base = OTHER; note = bicyclic nucleic acid (BNA)
  modified_base 14: mod_base = OTHER; note = bicyclic nucleic acid (BNA)
  modified_base 3: mod_base = OTHER; note = 5-methyl
  modified_base 6: mod_base = OTHER; note = 5-methyl
  source 1..14: mol_type = other DNA
aacatcaaggaaga

SEQ ID NO: 9457 - DNA, 13 bp, synthetic construct
  misc_feature 1..13: note = Description of Artificial Sequence: Synthetic Antisense oligonucleotide
  modified_base 1: mod_base = OTHER; note = bicyclic nucleic acid (BNA)
  modified_base 13: mod_base = OTHER; note = bicyclic nucleic acid (BNA)
  modified_base 3: mod_base = OTHER; note = 5-methyl
  modified_base 6: mod_base = OTHER; note = 5-methyl
  source 1..13: mol_type = other DNA
aacatcaaggaag

SEQ ID NO: 9458 - DNA, 25 bp, synthetic construct
  misc_feature 1..25: note = Description of Artificial Sequence: Synthetic Antisense oligonucleotide
  modified_base 1: mod_base = OTHER; note = bicyclic nucleic acid (BNA)
  modified_base 25: mod_base = OTHER; note = bicyclic nucleic acid (BNA)
  modified_base 2: mod_base = OTHER; note = 5-methyl
  modified_base 5: mod_base = OTHER; note = 5-methyl
  modified_base 17: mod_base = OTHER; note = 5-methyl
  modified_base 22: mod_base = OTHER; note = 5-methyl
  source 1..25: mol_type = other DNA
acatcaaggaagatggcatttctag

SEQ ID NO: 9459 - DNA, 24 bp, synthetic construct
  misc_feature 1..24: note = Description of Artificial Sequence: Synthetic Antisense oligonucleotide
  modified_base 1: mod_base = OTHER; note = bicyclic nucleic acid (BNA)
  modified_base 24: mod_base = OTHER; note = bicyclic nucleic acid (BNA)
  modified_base 2: mod_base = OTHER; note = 5-methyl
  modified_base 5: mod_base = OTHER; note = 5-methyl
  modified_base 17: mod_base = OTHER; note = 5-methyl
  modified_base 22: mod_base = OTHER; note = 5-methyl
  source 1..24: mol_type = other DNA
acatcaaggaagatggcatttcta

SEQ ID NO: 9460 - DNA, 23 bp, synthetic construct
  misc_feature 1..23: note = Description of Artificial Sequence: Synthetic Antisense oligonucleotide
  modified_base 1: mod_base = OTHER; note = bicyclic nucleic acid (BNA)
  modified_base 23: mod_base = OTHER; note = bicyclic nucleic acid (BNA)
  modified_base 2: mod_base = OTHER; note = 5-methyl
  modified_base 5: mod_base = OTHER; note = 5-methyl
  modified_base 17: mod_base = OTHER; note = 5-methyl
  modified_base 22: mod_base = OTHER; note = 5-methyl
  source 1..23: mol_type = other DNA
acatcaaggaagatggcatttct

SEQ ID NO: 9461 - DNA, 22 bp, synthetic construct
  misc_feature 1..22: note = Description of Artificial Sequence: Synthetic Antisense oligonucleotide
  modified_base 1: mod_base = OTHER; note = bicyclic nucleic acid (BNA)
  modified_base 22: mod_base = OTHER; note = bicyclic nucleic acid (BNA)
  modified_base 2: mod_base = OTHER; note = 5-methyl
  modified_base 5: mod_base = OTHER; note = 5-methyl
  modified_base 17: mod_base = OTHER; note = 5-methyl
  modified_base 22: mod_base = OTHER; note = 5-methyl
  source 1..22: mol_type = other DNA
acatcaaggaagatggcatttc

SEQ ID NO: 9462 - DNA, 21 bp, synthetic construct
  misc_feature 1..21: note = Description of Artificial Sequence: Synthetic Antisense oligonucleotide
  modified_base 1: mod_base = OTHER; note = bicyclic nucleic acid (BNA)
  modified_base 21: mod_base = OTHER; note = bicyclic nucleic acid (BNA)
  modified_base 2: mod_base = OTHER; note = 5-methyl
  modified_base 5: mod_base = OTHER; note = 5-methyl
  modified_base 17: mod_base = OTHER; note = 5-methyl
  source 1..21: mol_type = other DNA
acatcaaggaagatggcattt

SEQ ID NO: 9463 - DNA, 20 bp, synthetic construct
  misc_feature 1..20: note = Description of Artificial Sequence: Synthetic Antisense oligonucleotide
  modified_base 1: mod_base = OTHER; note = bicyclic nucleic acid (BNA)
  modified_base 20: mod_base = OTHER; note = bicyclic nucleic acid (BNA)
  modified_base 2: mod_base = OTHER; note = 5-methyl
  modified_base 5: mod_base = OTHER; note = 5-methyl
  modified_base 17: mod_base = OTHER; note = 5-methyl
  source 1..20: mol_type = other DNA
acatcaaggaagatggcatt

SEQ ID NO: 9464 - DNA, 19 bp, synthetic construct
  misc_feature 1..19: note = Description of Artificial Sequence: Synthetic Antisense oligonucleotide
  modified_base 1: mod_base = OTHER; note = bicyclic nucleic acid (BNA)
  modified_base 19: mod_base = OTHER; note = bicyclic nucleic acid (BNA)
  modified_base 2: mod_base = OTHER; note = 5-methyl
  modified_base 5: mod_base = OTHER; note = 5-methyl
  modified_base 17: mod_base = OTHER; note = 5-methyl
  source 1..19: mol_type = other DNA
acatcaaggaagatggcat

SEQ ID NO: 9465 - DNA, 18 bp, synthetic construct
  misc_feature 1..18: note = Description of Artificial Sequence: Synthetic Antisense oligonucleotide
  modified_base 1: mod_base = OTHER; note = bicyclic nucleic acid (BNA)
  modified_base 18: mod_base = OTHER; note = bicyclic nucleic acid (BNA)
  modified_base 2: mod_base = OTHER; note = 5-methyl
  modified_base 5: mod_base = OTHER; note = 5-methyl
  modified_base 17: mod_base = OTHER; note = 5-methyl
  source 1..18: mol_type = other DNA
acatcaaggaagatggca

SEQ ID NO: 9466 - DNA, 17 bp, synthetic construct
  misc_feature 1..17: note = Description of Artificial Sequence: Synthetic Antisense oligonucleotide
  modified_base 1: mod_base = OTHER; note = bicyclic nucleic acid (BNA)
  modified_base 17: mod_base = OTHER; note = bicyclic nucleic acid (BNA)
  modified_base 2: mod_base = OTHER; note = 5-methyl
  modified_base 5: mod_base = OTHER; note = 5-methyl
  modified_base 17: mod_base = OTHER; note = 5-methyl
  source 1..17: mol_type = other DNA
acatcaaggaagatggc

SEQ ID NO: 9467 - DNA, 16 bp, synthetic construct
  misc_feature 1..16: note = Description of Artificial Sequence: Synthetic Antisense oligonucleotide
  modified_base 1: mod_base = OTHER; note = bicyclic nucleic acid (BNA)
  modified_base 16: mod_base = OTHER; note = bicyclic nucleic acid (BNA)
  modified_base 2: mod_base = OTHER; note = 5-methyl
  modified_base 5: mod_base = OTHER; note = 5-methyl
  source 1..16: mol_type = other DNA
acatcaaggaagatgg

SEQ ID NO: 9468 - DNA, 15 bp, synthetic construct
  misc_feature 1..15: note = Description of Artificial Sequence: Synthetic Antisense oligonucleotide
  modified_base 1: mod_base = OTHER; note = bicyclic nucleic acid (BNA)
  modified_base 15: mod_base = OTHER; note = bicyclic nucleic acid (BNA)
  modified_base 2: mod_base = OTHER; note = 5-methyl
  modified_base 5: mod_base = OTHER; note = 5-methyl
  source 1..15: mol_type = other DNA
acatcaaggaagatg

SEQ ID NO: 9469 - DNA, 14 bp, synthetic construct
  misc_feature 1..14: note = Description of Artificial Sequence: Synthetic Antisense oligonucleotide
  modified_base 1: mod_base = OTHER; note = bicyclic nucleic acid (BNA)
  modified_base 14: mod_base = OTHER; note = bicyclic nucleic acid (BNA)
  modified_base 2: mod_base = OTHER; note = 5-methyl
  modified_base 5: mod_base = OTHER; note = 5-methyl
  source 1..14: mol_type = other DNA
acatcaaggaagat

SEQ ID NO: 9470 - DNA, 13 bp, synthetic construct
  misc_feature 1..13: note = Description of Artificial Sequence: Synthetic Antisense oligonucleotide
  modified_base 1: mod_base = OTHER; note = bicyclic nucleic acid (BNA)
  modified_base 13: mod_base = OTHER; note = bicyclic nucleic acid (BNA)
  modified_base 2: mod_base = OTHER; note = 5-methyl
  modified_base 5: mod_base = OTHER; note = 5-methyl
  source 1..13: mol_type = other DNA
acatcaaggaaga

SEQ ID NO: 9471 - DNA, 12 bp, synthetic construct
  misc_feature 1..12: note = Description of Artificial Sequence: Synthetic Antisense oligonucleotide
  modified_base 1: mod_base = OTHER; note = bicyclic nucleic acid (BNA)
  modified_base 12: mod_base = OTHER; note = bicyclic nucleic acid (BNA)
  modified_base 2: mod_base = OTHER; note = 5-methyl
  modified_base 5: mod_base = OTHER; note = 5-methyl
  source 1..12: mol_type = other DNA
acatcaaggaag

SEQ ID NO: 9472 - DNA, 24 bp, synthetic construct
  misc_feature 1..24: note = Description of Artificial Sequence: Synthetic Antisense oligonucleotide
  modified_base 1: mod_base = OTHER; note = 5-methyl
  modified_base 4: mod_base = OTHER; note = 5-methyl
  modified_base 16: mod_base = OTHER; note = 5-methyl
  modified_base 21: mod_base = OTHER; note = 5-methyl
  modified_base 1: mod_base = OTHER; note = bicyclic nucleic acid (BNA)
  modified_base 24: mod_base = OTHER; note = bicyclic nucleic acid (BNA)
  source 1..24: mol_type = other DNA
catcaaggaagatggcatttctag

SEQ ID NO: 9473 - DNA, 23 bp, synthetic construct
  misc_feature 1..23: note = Description of Artificial Sequence: Synthetic Antisense oligonucleotide
  modified_base 1: mod_base = OTHER; note = 5-methyl
  modified_base 4: mod_base = OTHER; note = 5-methyl
  modified_base 16: mod_base = OTHER; note = 5-methyl
  modified_base 21: mod_base = OTHER; note = 5-methyl
  modified_base 1: mod_base = OTHER; note = bicyclic nucleic acid (BNA)
  modified_base 23: mod_base = OTHER; note = bicyclic nucleic acid (BNA)
  source 1..23: mol_type = other DNA
catcaaggaagatggcatttcta

SEQ ID NO: 9474 - DNA, 22 bp, synthetic construct
  misc_feature 1..22: note = Description of Artificial Sequence: Synthetic Antisense oligonucleotide
  modified_base 1: mod_base = OTHER; note = 5-methyl
  modified_base 4: mod_base = OTHER; note = 5-methyl
  modified_base 16: mod_base = OTHER; note = 5-methyl
  modified_base 21: mod_base = OTHER; note = 5-methyl
  modified_base 1: mod_base = OTHER; note = bicyclic nucleic acid (BNA)
  modified_base 22: mod_base = OTHER; note = bicyclic nucleic acid (BNA)
  source 1..22: mol_type = other DNA
catcaaggaagatggcatttct

SEQ ID NO: 9475 - DNA, 21 bp, synthetic construct
  misc_feature 1..21: note = Description of Artificial Sequence: Synthetic Antisense oligonucleotide
  modified_base 1: mod_base = OTHER; note = 5-methyl
  modified_base 4: mod_base = OTHER; note = 5-methyl
  modified_base 16: mod_base = OTHER; note = 5-methyl
  modified_base 21: mod_base = OTHER; note = 5-methyl
  modified_base 1: mod_base = OTHER; note = bicyclic nucleic acid (BNA)
  modified_base 21: mod_base = OTHER; note = bicyclic nucleic acid (BNA)
  source 1..21: mol_type = other DNA
catcaaggaagatggcatttc

SEQ ID NO: 9476 - DNA, 20 bp, synthetic construct
  misc_feature 1..20: note = Description of Artificial Sequence: Synthetic Antisense oligonucleotide
  modified_base 1: mod_base = OTHER; note = 5-methyl
  modified_base 4: mod_base = OTHER; note = 5-methyl
  modified_base 16: mod_base = OTHER; note = 5-methyl
  modified_base 1: mod_base = OTHER; note = bicyclic nucleic acid (BNA)
  modified_base 20: mod_base = OTHER; note = bicyclic nucleic acid (BNA)
  source 1..20: mol_type = other DNA
catcaaggaagatggcattt

SEQ ID NO: 9477 - DNA, 19 bp, synthetic construct
  misc_feature 1..19: note = Description of Artificial Sequence: Synthetic Antisense oligonucleotide
  modified_base 1: mod_base = OTHER; note = 5-methyl
  modified_base 4: mod_base = OTHER; note = 5-methyl
  modified_base 16: mod_base = OTHER; note = 5-methyl
  modified_base 1: mod_base = OTHER; note = bicyclic nucleic acid (BNA)
  modified_base 19: mod_base = OTHER; note = bicyclic nucleic acid (BNA)
  source 1..19: mol_type = other DNA
catcaaggaagatggcatt

SEQ ID NO: 9478 - DNA, 18 bp, synthetic construct
  misc_feature 1..18: note = Description of Artificial Sequence: Synthetic Antisense oligonucleotide
  modified_base 1: mod_base = OTHER; note = 5-methyl
  modified_base 4: mod_base = OTHER; note = 5-methyl
  modified_base 16: mod_base = OTHER; note = 5-methyl
  modified_base 1: mod_base = OTHER; note = bicyclic nucleic acid (BNA)
  modified_base 18: mod_base = OTHER; note = bicyclic nucleic acid (BNA)
  source 1..18: mol_type = other DNA
catcaaggaagatggcat

SEQ ID NO: 9479 - DNA, 17 bp, synthetic construct
  misc_feature 1..17: note = Description of Artificial Sequence: Synthetic Antisense oligonucleotide
  modified_base 1: mod_base = OTHER; note = 5-methyl
  modified_base 4: mod_base = OTHER; note = 5-methyl
  modified_base 16: mod_base = OTHER; note = 5-methyl
  modified_base 1: mod_base = OTHER; note = bicyclic nucleic acid (BNA)
  modified_base 17: mod_base = OTHER; note = bicyclic nucleic acid (BNA)
  source 1..17: mol_type = other DNA
catcaaggaagatggca

SEQ ID NO: 9480 - DNA, 16 bp, synthetic construct
  misc_feature 1..16: note = Description of Artificial Sequence: Synthetic Antisense oligonucleotide
  modified_base 1: mod_base = OTHER; note = 5-methyl
  modified_base 4: mod_base = OTHER; note = 5-methyl
  modified_base 16: mod_base = OTHER; note = 5-methyl
  modified_base 1: mod_base = OTHER; note = bicyclic nucleic acid (BNA)
  modified_base 16: mod_base = OTHER; note = bicyclic nucleic acid (BNA)
  source 1..16: mol_type = other DNA
catcaaggaagatggc

SEQ ID NO: 9481 - DNA, 15 bp, synthetic construct
  misc_feature 1..15: note = Description of Artificial Sequence: Synthetic Antisense oligonucleotide
  modified_base 1: mod_base = OTHER; note = 5-methyl
  modified_base 4: mod_base = OTHER; note = 5-methyl
  modified_base 1: mod_base = OTHER; note = bicyclic nucleic acid (BNA)
  modified_base 15: mod_base = OTHER; note = bicyclic nucleic acid (BNA)
  source 1..15: mol_type = other DNA
catcaaggaagatgg

SEQ ID NO: 9482 - DNA, 14 bp, synthetic construct
  misc_feature 1..14: note = Description of Artificial Sequence: Synthetic Antisense oligonucleotide
  modified_base 1: mod_base = OTHER; note = 5-methyl
  modified_base 4: mod_base = OTHER; note = 5-methyl
  modified_base 1: mod_base = OTHER; note = bicyclic nucleic acid (BNA)
  modified_base 14: mod_base = OTHER; note = bicyclic nucleic acid (BNA)
  source 1..14: mol_type = other DNA
catcaaggaagatg

SEQ ID NO: 9483 - DNA, 13 bp, synthetic construct
  misc_feature 1..13: note = Description of Artificial Sequence: Synthetic Antisense oligonucleotide
  modified_base 1: mod_base = OTHER; note = 5-methyl
  modified_base 4: mod_base = OTHER; note = 5-methyl
  modified_base 1: mod_base = OTHER; note = bicyclic nucleic acid (BNA)
  modified_base 13: mod_base = OTHER; note = bicyclic nucleic acid (BNA)
  source 1..13: mol_type = other DNA
catcaaggaagat

SEQ ID NO: 9484 - DNA, 12 bp, synthetic construct
  misc_feature 1..12: note = Description of Artificial Sequence: Synthetic Antisense oligonucleotide
  modified_base 1: mod_base = OTHER; note = 5-methyl
  modified_base 4: mod_base = OTHER; note = 5-methyl
  modified_base 1: mod_base = OTHER; note = bicyclic nucleic acid (BNA)
  modified_base 12: mod_base = OTHER; note = bicyclic nucleic acid (BNA)
  source 1..12: mol_type = other DNA
catcaaggaaga

SEQ ID NO: 9485 - DNA, 11 bp, synthetic construct
  misc_feature 1..11: note = Description of Artificial Sequence: Synthetic Antisense oligonucleotide
  modified_base 1: mod_base = OTHER; note = 5-methyl
  modified_base 4: mod_base = OTHER; note = 5-methyl
  modified_base 1: mod_base = OTHER; note = bicyclic nucleic acid (BNA)
  modified_base 11: mod_base = OTHER; note = bicyclic nucleic acid (BNA)
  source 1..11: mol_type = other DNA
catcaaggaag

SEQ ID NO: 9486 - DNA, 23 bp, synthetic construct
  misc_feature 1..23: note = Description of Artificial Sequence: Synthetic Antisense oligonucleotide
  modified_base 1: mod_base = OTHER; note = bicyclic nucleic acid (BNA)
  modified_base 23: mod_base = OTHER; note = bicyclic nucleic acid (BNA)
  modified_base 3: mod_base = OTHER; note = 5-methyl
  modified_base 15: mod_base = OTHER; note = 5-methyl
  modified_base 20: mod_base = OTHER; note = 5-methyl
  source 1..23: mol_type = other DNA
atcaaggaagatggcatttctag

SEQ ID NO: 9487 - DNA, 22 bp, synthetic construct
  misc_feature 1..22: note = Description of Artificial Sequence: Synthetic Antisense oligonucleotide
  modified_base 1: mod_base = OTHER; note = bicyclic nucleic acid (BNA)
  modified_base 22: mod_base = OTHER; note = bicyclic nucleic acid (BNA)
  modified_base 3: mod_base = OTHER; note = 5-methyl
  modified_base 15: mod_base = OTHER; note = 5-methyl
  modified_base 20: mod_base = OTHER; note = 5-methyl
  source 1..22: mol_type = other DNA
atcaaggaagatggcatttcta

SEQ ID NO: 9488 - DNA, 21 bp, synthetic construct
  misc_feature 1..21: note = Description of Artificial Sequence: Synthetic Antisense oligonucleotide
  modified_base 1: mod_base = OTHER; note = bicyclic nucleic acid (BNA)
  modified_base 21: mod_base = OTHER; note = bicyclic nucleic acid (BNA)
  modified_base 3: mod_base = OTHER; note = 5-methyl
  modified_base 15: mod_base = OTHER; note = 5-methyl
  modified_base 20: mod_base = OTHER; note = 5-methyl
  source 1..21: mol_type = other DNA
atcaaggaagatggcatttct

SEQ ID NO: 9489 - DNA, 20 bp, synthetic construct
  misc_feature 1..20: note = Description of Artificial Sequence: Synthetic Antisense oligonucleotide
  modified_base 1: mod_base = OTHER; note = bicyclic nucleic acid (BNA)
  modified_base 20: mod_base = OTHER; note = bicyclic nucleic acid (BNA)
  modified_base 3: mod_base = OTHER; note = 5-methyl
  modified_base 15: mod_base = OTHER; note = 5-methyl
  modified_base 20: mod_base = OTHER; note = 5-methyl
  source 1..20: mol_type = other DNA
atcaaggaagatggcatttc

SEQ ID NO: 9490 - DNA, 19 bp, synthetic construct
  misc_feature 1..19: note = Description of Artificial Sequence: Synthetic Antisense oligonucleotide
  modified_base 1: mod_base = OTHER; note = bicyclic nucleic acid (BNA)
  modified_base 19: mod_base = OTHER; note = bicyclic nucleic acid (BNA)
  modified_base 3: mod_base = OTHER; note = 5-methyl
  modified_base 15: mod_base = OTHER; note = 5-methyl
  source 1..19: mol_type = other DNA
atcaaggaagatggcattt

SEQ ID NO: 9491 - DNA, 18 bp, synthetic construct
  misc_feature 1..18: note = Description of Artificial Sequence: Synthetic Antisense oligonucleotide
  modified_base 1: mod_base = OTHER; note = bicyclic nucleic acid (BNA)
  modified_base 18: mod_base = OTHER; note = bicyclic nucleic acid (BNA)
  modified_base 3: mod_base = OTHER; note = 5-methyl
  modified_base 15: mod_base = OTHER; note = 5-methyl
  source 1..18: mol_type = other DNA
atcaaggaagatggcatt

SEQ ID NO: 9492 - DNA, 17 bp, synthetic construct
  misc_feature 1..17: note = Description of Artificial Sequence: Synthetic Antisense oligonucleotide
  modified_base 1: mod_base = OTHER; note = bicyclic nucleic acid (BNA)
  modified_base 17: mod_base = OTHER; note = bicyclic nucleic acid (BNA)
  modified_base 3: mod_base = OTHER; note = 5-methyl
  modified_base 15: mod_base = OTHER; note = 5-methyl
  source 1..17: mol_type = other DNA
atcaaggaagatggcat

SEQ ID NO: 9493 - DNA, 16 bp, synthetic construct
  misc_feature 1..16: note = Description of Artificial Sequence: Synthetic Antisense oligonucleotide
  modified_base 1: mod_base = OTHER; note = bicyclic nucleic acid (BNA)
  modified_base 16: mod_base = OTHER; note = bicyclic nucleic acid (BNA)
  modified_base 3: mod_base = OTHER; note = 5-methyl
  modified_base 15: mod_base = OTHER; note = 5-methyl
  source 1..16: mol_type = other DNA
atcaaggaagatggca

SEQ ID NO: 9494 - DNA, 15 bp, synthetic construct
  misc_feature 1..15: note = Description of Artificial Sequence: Synthetic Antisense oligonucleotide
  modified_base 1: mod_base = OTHER; note = bicyclic nucleic acid (BNA)
  modified_base 15: mod_base = OTHER; note = bicyclic nucleic acid (BNA)
  modified_base 3: mod_base = OTHER; note = 5-methyl
  modified_base 15: mod_base = OTHER; note = 5-methyl
  source 1..15: mol_type = other DNA
atcaaggaagatggc

SEQ ID NO: 9495 - DNA, 14 bp, synthetic construct
  misc_feature 1..14: note = Description of Artificial Sequence: Synthetic Antisense oligonucleotide
  modified_base 1: mod_base = OTHER; note = bicyclic nucleic acid (BNA)
  modified_base 14: mod_base = OTHER; note = bicyclic nucleic acid (BNA)
  modified_base 3: mod_base = OTHER; note = 5-methyl
  source 1..14: mol_type = other DNA
atcaaggaagatgg

SEQ ID NO: 9496 - DNA, 13 bp, synthetic construct
  misc_feature 1..13: note = Description of Artificial Sequence: Synthetic Antisense oligonucleotide
  modified_base 1: mod_base = OTHER; note = bicyclic nucleic acid (BNA)
  modified_base 13: mod_base = OTHER; note = bicyclic nucleic acid (BNA)
  modified_base 3: mod_base = OTHER; note = 5-methyl
  source 1..13: mol_type = other DNA
atcaaggaagatg

SEQ ID NO: 9497 - DNA, 12 bp, synthetic construct
  misc_feature 1..12: note = Description of Artificial Sequence: Synthetic Antisense oligonucleotide
  modified_base 1: mod_base = OTHER; note = bicyclic nucleic acid (BNA)
  modified_base 12: mod_base = OTHER; note = bicyclic nucleic acid (BNA)
  modified_base 3: mod_base = OTHER; note = 5-methyl
  source 1..12: mol_type = other DNA
atcaaggaagat

SEQ ID NO: 9498 - DNA, 11 bp, synthetic construct
  misc_feature 1..11: note = Description of Artificial Sequence: Synthetic Antisense oligonucleotide
  modified_base 1: mod_base = OTHER; note = bicyclic nucleic acid (BNA)
  modified_base 11: mod_base = OTHER; note = bicyclic nucleic acid (BNA)
  modified_base 3: mod_base = OTHER; note = 5-methyl
  source 1..11: mol_type = other DNA
atcaaggaaga

SEQ ID NO: 9499 - DNA, 10 bp, synthetic construct
  misc_feature 1..10: note = Description of Artificial Sequence: Synthetic Antisense oligonucleotide
  modified_base 1: mod_base = OTHER; note = bicyclic nucleic acid (BNA)
  modified_base 10: mod_base = OTHER; note = bicyclic nucleic acid (BNA)
  modified_base 3: mod_base = OTHER; note = 5-methyl
  source 1..10: mol_type = other DNA
atcaaggaag

SEQ ID NO: 9500 - DNA, 18 bp, synthetic construct
  misc_feature 1..18: note = Description of Artificial Sequence: Synthetic Antisense oligonucleotide
  modified_base 1..2: mod_base = OTHER; note = bicyclic nucleic acid (BNA)
  modified_base 9: mod_base = OTHER; note = 5-methyl
  modified_base 13..14: mod_base = OTHER; note = 5-methyl
  modified_base 18: mod_base = OTHER; note = 5-methyl
  source 1..18: mol_type = other DNA
ggtaagttctgtccaagc

SEQ ID NO: 9501 - DNA, 18 bp, synthetic construct
  misc_feature 1..18: note = Description of Artificial Sequence: Synthetic Antisense oligonucleotide
  modified_base 1..2: mod_base = OTHER; note = bicyclic nucleic acid (BNA)
  modified_base 8: mod_base = OTHER; note = 5-methyl
  modified_base 12..13: mod_base = OTHER; note = 5-methyl
  modified_base 17..18: mod_base = OTHER; note = 5-methyl
  source 1..18: mol_type = other DNA
gtaagttctgtccaagcc

SEQ ID NO: 9502 - DNA, 18 bp, synthetic construct
  misc_feature 1..18: note = Description of Artificial Sequence: Synthetic Antisense oligonucleotide
  modified_base 1..2: mod_base = OTHER; note = bicyclic nucleic acid (BNA)
  modified_base 4: mod_base = OTHER; note = 5-methyl
  modified_base 13: mod_base = OTHER; note = 5-methyl
  modified_base 17..18: mod_base = OTHER; note = 5-methyl
  source 1..18: mol_type = other DNA
agtcggtaagttctgtcc

SEQ ID NO: 9503 - DNA, 18 bp, synthetic construct
  misc_feature 1..18: note = Description of Artificial Sequence: Synthetic Antisense oligonucleotide
  modified_base 1: mod_base = OTHER; note = 5-methyl
  modified_base 5..6: mod_base = OTHER; note = 5-methyl
  modified_base 10..12: mod_base = OTHER; note = 5-methyl
  modified_base 1..2: mod_base = OTHER; note = bicyclic nucleic acid (BNA)
  source 1..18: mol_type = other DNA
ctgtccaagcccggttga

SEQ ID NO: 9504 - DNA, 15 bp, synthetic construct
  misc_feature 1..15: note = Description of Artificial Sequence: Synthetic Antisense oligonucleotide
  modified_base 1..2: mod_base = OTHER; note = bicyclic nucleic acid (BNA)
  modified_base 7: mod_base = OTHER; note = 5-methyl
  modified_base 11..12: mod_base = OTHER; note = 5-methyl
  source 1..15: mol_type = other DNA
taagttctgtccaag

SEQ ID NO: 9505 - DNA, 20 bp, synthetic construct
  misc_feature 1..20: note = Description of Artificial Sequence: Synthetic Antisense oligonucleotide
  modified_base 1..2: mod_base = OTHER; note = bicyclic nucleic acid (BNA)
  modified_base 3: mod_base = OTHER; note = 5-methyl
  modified_base 7..8: mod_base = OTHER; note = 5-methyl
  modified_base 12..14: mod_base = OTHER; note = 5-methyl
  source 1..20: mol_type = other DNA
ttctgtccaagcccggttga

SEQ ID NO: 9506 - DNA, 19 bp, synthetic construct
  misc_feature 1..19: note = Description of Artificial Sequence: Synthetic Antisense oligonucleotide
  modified_base 1..2: mod_base = OTHER; note = bicyclic nucleic acid (BNA)
  modified_base 3: mod_base = OTHER; note = 5-methyl
  modified_base 7..8: mod_base = OTHER; note = 5-methyl
  modified_base 12..14: mod_base = OTHER; note = 5-methyl
  source 1..19: mol_type = other DNA
ttctgtccaagcccggttg

SEQ ID NO: 9507 - DNA, 18 bp, synthetic construct
  misc_feature 1..18: note = Description of Artificial Sequence: Synthetic Antisense oligonucleotide
  modified_base 1..2: mod_base = OTHER; note = bicyclic nucleic acid (BNA)
  modified_base 3: mod_base = OTHER; note = 5-methyl
  modified_base 7..8: mod_base = OTHER; note = 5-methyl
  modified_base 12..14: mod_base = OTHER; note = 5-methyl
  source 1..18: mol_type = other DNA
ttctgtccaagcccggtt

SEQ ID NO: 9508 - DNA, 17 bp, synthetic construct
  misc_feature 1..17: note = Description of Artificial Sequence: Synthetic Antisense oligonucleotide
  modified_base 1..2: mod_base = OTHER; note = bicyclic nucleic acid (BNA)
  modified_base 3: mod_base = OTHER; note = 5-methyl
  modified_base 7..8: mod_base = OTHER; note = 5-methyl
  modified_base 12..14: mod_base = OTHER; note = 5-methyl
  source 1..17: mol_type = other DNA
ttctgtccaagcccggt

SEQ ID NO: 9509 - DNA, 16 bp, synthetic construct
  misc_feature 1..16: note = Description of Artificial Sequence: Synthetic Antisense oligonucleotide
  modified_base 1..2: mod_base = OTHER; note = bicyclic nucleic acid (BNA)
  modified_base 3: mod_base = OTHER; note = 5-methyl
  modified_base 7..8: mod_base = OTHER; note = 5-methyl
  modified_base 12..14: mod_base = OTHER; note = 5-methyl
  source 1..16: mol_type = other DNA
ttctgtccaagcccgg

SEQ ID NO: 9510 - DNA, 15 bp, synthetic construct
  misc_feature 1..15: note = Description of Artificial Sequence: Synthetic Antisense oligonucleotide
  modified_base 1..2: mod_base = OTHER; note = bicyclic nucleic acid (BNA)
  modified_base 3: mod_base = OTHER; note = 5-methyl
  modified_base 7..8: mod_base = OTHER; note = 5-methyl
  modified_base 12..14: mod_base = OTHER; note = 5-methyl
  source 1..15: mol_type = other DNA
ttctgtccaagcccg

SEQ ID NO: 9511 - DNA, 14 bp, synthetic construct
  misc_feature 1..14: note = Description of Artificial Sequence: Synthetic Antisense oligonucleotide
  modified_base 1..2: mod_base = OTHER; note = bicyclic nucleic acid (BNA)
  modified_base 3: mod_base = OTHER; note = 5-methyl
  modified_base 7..8: mod_base = OTHER; note = 5-methyl
  modified_base 12..14: mod_base = OTHER; note = 5-methyl
  source 1..14: mol_type = other DNA
ttctgtccaagccc

SEQ ID NO: 9512 - DNA, 13 bp, synthetic construct
  misc_feature 1..13: note = Description of Artificial Sequence: Synthetic Antisense oligonucleotide
  modified_base 1..2: mod_base = OTHER; note = bicyclic nucleic acid (BNA)
  modified_base 3: mod_base = OTHER; note = 5-methyl
  modified_base 7..8: mod_base = OTHER; note = 5-methyl
  modified_base 12..13: mod_base = OTHER; note = 5-methyl
  source 1..13: mol_type = other DNA
ttctgtccaagcc

SEQ ID NO: 9513 - DNA, 12 bp, synthetic construct
  misc_feature 1..12: note = Description of Artificial Sequence: Synthetic Antisense oligonucleotide
  modified_base 1..2: mod_base = OTHER; note = bicyclic nucleic acid (BNA)
  modified_base 3: mod_base = OTHER; note = 5-methyl
  modified_base 7..8: mod_base = OTHER; note = 5-methyl
  modified_base 12: mod_base = OTHER; note = 5-methyl
  source 1..12: mol_type = other DNA
ttctgtccaagc

SEQ ID NO: 9514 - DNA, 11 bp, synthetic construct
  misc_feature 1..11: note = Description of Artificial Sequence: Synthetic Antisense oligonucleotide
  modified_base 1..2: mod_base = OTHER; note = bicyclic nucleic acid (BNA)
  modified_base 3: mod_base = OTHER; note = 5-methyl
  modified_base 7..8: mod_base = OTHER; note = 5-methyl
  source 1..11: mol_type = other DNA
ttctgtccaag

SEQ ID NO: 9515 - DNA, 10 bp, synthetic construct
  misc_feature 1..10: note = Description of Artificial Sequence: Synthetic Antisense oligonucleotide
  modified_base 1..2: mod_base = OTHER; note = bicyclic nucleic acid (BNA)
  modified_base 3: mod_base = OTHER; note = 5-methyl
  modified_base 7..8: mod_base = OTHER; note = 5-methyl
  source 1..10: mol_type = other DNA
ttctgtccaa

SEQ ID NO: 9516-9517 - skipped (2 entries)

SEQ ID NO: 9518 - DNA, 19 bp, synthetic construct
  misc_feature 1..19: note = Description of Artificial Sequence: Synthetic Antisense oligonucleotide
  modified_base 1..2: mod_base = OTHER; note = bicyclic nucleic acid (BNA)
  modified_base 2: mod_base = OTHER; note = 5-methyl
  modified_base 6..7: mod_base = OTHER; note = 5-methyl
  modified_base 11..13: mod_base = OTHER; note = 5-methyl
  source 1..19: mol_type = other DNA
tctgtccaagcccggttga

SEQ ID NO: 9519 - DNA, 18 bp, synthetic construct
  misc_feature 1..18: note = Description of Artificial Sequence: Synthetic Antisense oligonucleotide
  modified_base 1..2: mod_base = OTHER; note = bicyclic nucleic acid (BNA)
  modified_base 2: mod_base = OTHER; note = 5-methyl
  modified_base 6..7: mod_base = OTHER; note = 5-methyl
  modified_base 11..13: mod_base = OTHER; note = 5-methyl
  source 1..18: mol_type = other DNA
tctgtccaagcccggttg

SEQ ID NO: 9520 - DNA, 17 bp, synthetic construct
  misc_feature 1..17: note = Description of Artificial Sequence: Synthetic Antisense oligonucleotide
  modified_base 1..2: mod_base = OTHER; note = bicyclic nucleic acid (BNA)
  modified_base 2: mod_base = OTHER; note = 5-methyl
  modified_base 6..7: mod_base = OTHER; note = 5-methyl
  modified_base 11..13: mod_base = OTHER; note = 5-methyl
  source 1..17: mol_type = other DNA
tctgtccaagcccggtt

SEQ ID NO: 9521 - DNA, 16 bp, synthetic construct
  misc_feature 1..16: note = Description of Artificial Sequence: Synthetic Antisense oligonucleotide
  modified_base 1..2: mod_base = OTHER; note = bicyclic nucleic acid (BNA)
  modified_base 2: mod_base = OTHER; note = 5-methyl
  modified_base 6..7: mod_base = OTHER; note = 5-methyl
  modified_base 11..13: mod_base = OTHER; note = 5-methyl
  source 1..16: mol_type = other DNA
tctgtccaagcccggt

SEQ ID NO: 9522 - DNA, 15 bp, synthetic construct
  misc_feature 1..15: note = Description of Artificial Sequence: Synthetic Antisense oligonucleotide
  modified_base 1..2: mod_base = OTHER; note = bicyclic nucleic acid (BNA)
  modified_base 2: mod_base = OTHER; note = 5-methyl
  modified_base 6..7: mod_base = OTHER; note = 5-methyl
  modified_base 11..13: mod_base = OTHER; note = 5-methyl
  source 1..15: mol_type = other DNA
tctgtccaagcccgg

SEQ ID NO: 9523 - DNA, 14 bp, synthetic construct
  misc_feature 1..14: note = Description of Artificial Sequence: Synthetic Antisense oligonucleotide
  modified_base 1..2: mod_base = OTHER; note = bicyclic nucleic acid (BNA)
  modified_base 2: mod_base = OTHER; note = 5-methyl
  modified_base 6..7: mod_base = OTHER; note = 5-methyl
  modified_base 11..13: mod_base = OTHER; note = 5-methyl
  source 1..14: mol_type = other DNA
tctgtccaagcccg

SEQ ID NO: 9524 - DNA, 13 bp, synthetic construct
  misc_feature 1..13: note = Description of Artificial Sequence: Synthetic Antisense oligonucleotide
  modified_base 1..2: mod_base = OTHER; note = bicyclic nucleic acid (BNA)
  modified_base 2: mod_base = OTHER; note = 5-methyl
  modified_base 6..7: mod_base = OTHER; note = 5-methyl
  modified_base 11..13: mod_base = OTHER; note = 5-methyl
  source 1..13: mol_type = other DNA
tctgtccaagccc

SEQ ID NO: 9525 - DNA, 12 bp, synthetic construct
  misc_feature 1..12: note = Description of Artificial Sequence: Synthetic Antisense oligonucleotide
  modified_base 1..2: mod_base = OTHER; note = bicyclic nucleic acid (BNA)
  modified_base 2: mod_base = OTHER; note = 5-methyl
  modified_base 6..7: mod_base = OTHER; note = 5-methyl
  modified_base 11..12: mod_base = OTHER; note = 5-methyl
  source 1..12: mol_type = other DNA
tctgtccaagcc

SEQ ID NO: 9526 - DNA, 11 bp, synthetic construct
  misc_feature 1..11: note = Description of Artificial Sequence: Synthetic Antisense oligonucleotide
  modified_base 1..2: mod_base = OTHER; note = bicyclic nucleic acid (BNA)
  modified_base 2: mod_base = OTHER; note = 5-methyl
  modified_base 6..7: mod_base = OTHER; note = 5-methyl
  modified_base 11: mod_base = OTHER; note = 5-methyl
  source 1..11: mol_type = other DNA
tctgtccaagc

SEQ ID NO: 9527 - DNA, 10 bp, synthetic construct
  misc_feature 1..10: note = Description of Artificial Sequence: Synthetic Antisense oligonucleotide
  modified_base 1..2: mod_base = OTHER; note = bicyclic nucleic acid (BNA)
  modified_base 2: mod_base = OTHER; note = 5-methyl
  modified_base 6..7: mod_base = OTHER; note = 5-methyl
  source 1..10: mol_type = other DNA
tctgtccaag

SEQ ID NO: 9528-9529 - skipped (2 entries)

SEQ ID NO: 9530 - DNA, 17 bp, synthetic construct
  misc_feature 1..17: note = Description of Artificial Sequence: Synthetic Antisense oligonucleotide
  modified_base 1: mod_base = OTHER; note = 5-methyl
  modified_base 5..6: mod_base = OTHER; note = 5-methyl
  modified_base 10..12: mod_base = OTHER; note = 5-methyl
  modified_base 1..2: mod_base = OTHER; note = bicyclic nucleic acid (BNA)
  source 1..17: mol_type = other DNA
ctgtccaagcccggttg

SEQ ID NO: 9531 - DNA, 16 bp, synthetic construct
  misc_feature 1..16: note = Description of Artificial Sequence: Synthetic Antisense oligonucleotide
  modified_base 1: mod_base = OTHER; note = 5-methyl
  modified_base 5..6: mod_base = OTHER; note = 5-methyl
  modified_base 10..12: mod_base = OTHER; note = 5-methyl
  modified_base 1..2: mod_base = OTHER; note = bicyclic nucleic acid (BNA)
  source 1..16: mol_type = other DNA
ctgtccaagcccggtt

SEQ ID NO: 9532 - DNA, 15 bp, synthetic construct
  misc_feature 1..15: note = Description of Artificial Sequence: Synthetic Antisense oligonucleotide
  modified_base 1: mod_base = OTHER; note = 5-methyl
  modified_base 5..6: mod_base = OTHER; note = 5-methyl
  modified_base 10..12: mod_base = OTHER; note = 5-methyl
  modified_base 1..2: mod_base = OTHER; note = bicyclic nucleic acid (BNA)
  source 1..15: mol_type = other DNA
ctgtccaagcccggt

SEQ ID NO: 9533 - DNA, 14 bp, synthetic construct
  misc_feature 1..14: note = Description of Artificial Sequence: Synthetic Antisense oligonucleotide
  modified_base 1: mod_base = OTHER; note = 5-methyl
  modified_base 5..6: mod_base = OTHER; note = 5-methyl
  modified_base 10..12: mod_base = OTHER; note = 5-methyl
  modified_base 1..2: mod_base = OTHER; note = bicyclic nucleic acid (BNA)
  source 1..14: mol_type = other DNA
ctgtccaagcccgg

SEQ ID NO: 9534 - DNA, 13 bp, synthetic construct
  misc_feature 1..13: note = Description of Artificial Sequence: Synthetic Antisense oligonucleotide
  modified_base 1: mod_base = OTHER; note = 5-methyl
  modified_base 5..6: mod_base = OTHER; note = 5-methyl
  modified_base 10..12: mod_base = OTHER; note = 5-methyl
  modified_base 1..2: mod_base = OTHER; note = bicyclic nucleic acid (BNA)
  source 1..13: mol_type = other DNA
ctgtccaagcccg

SEQ ID NO: 9535 - DNA, 12 bp, synthetic construct
  misc_feature 1..12: note = Description of Artificial Sequence: Synthetic Antisense oligonucleotide
  modified_base 1: mod_base = OTHER; note = 5-methyl
  modified_base 5..6: mod_base = OTHER; note = 5-methyl
  modified_base 10..12: mod_base = OTHER; note = 5-methyl
  modified_base 1..2: mod_base = OTHER; note = bicyclic nucleic acid (BNA)
  source 1..12: mol_type = other DNA
ctgtccaagccc

SEQ ID NO: 9536 - DNA, 11 bp, synthetic construct
  misc_feature 1..11: note = Description of Artificial Sequence: Synthetic Antisense oligonucleotide
  modified_base 1: mod_base = OTHER; note = 5-methyl
  modified_base 5..6: mod_base = OTHER; note = 5-methyl
  modified_base 10..11: mod_base = OTHER; note = 5-methyl
  modified_base 1..2: mod_base = OTHER; note = bicyclic nucleic acid (BNA)
  source 1..11: mol_type = other DNA
ctgtccaagcc

SEQ ID NO: 9537 - DNA, 10 bp, synthetic construct
  misc_feature 1..10: note = Description of Artificial Sequence: Synthetic Antisense oligonucleotide
  modified_base 1: mod_base = OTHER; note = 5-methyl
  modified_base 5..6: mod_base = OTHER; note = 5-methyl
  modified_base 10: mod_base = OTHER; note = 5-methyl
  modified_base 1..2: mod_base = OTHER; note = bicyclic nucleic acid (BNA)
  source 1..10: mol_type = other DNA
ctgtccaagc

SEQ ID NO: 9538-9539 - skipped (2 entries)

SEQ ID NO: 9540 - DNA, 20 bp, synthetic construct
  misc_feature 1..20: note = Description of Artificial Sequence: Synthetic Antisense oligonucleotide
  modified_base 1..2: mod_base = OTHER; note = bicyclic nucleic acid (BNA)
  modified_base 4: mod_base = OTHER; note = 5-methyl
  modified_base 8..9: mod_base = OTHER; note = 5-methyl
  modified_base 13..15: mod_base = OTHER; note = 5-methyl
  source 1..20: mol_type = other DNA
gttctgtccaagcccggttg

SEQ ID NO: 9541 - DNA, 19 bp, synthetic construct
  misc_feature 1..19: note = Description of Artificial Sequence: Synthetic Antisense oligonucleotide
  modified_base 1..2: mod_base = OTHER; note = bicyclic nucleic acid (BNA)
  modified_base 4: mod_base = OTHER; note = 5-methyl
  modified_base 8..9: mod_base = OTHER; note = 5-methyl
  modified_base 13..15: mod_base = OTHER; note = 5-methyl
  source 1..19: mol_type = other DNA
gttctgtccaagcccggtt

SEQ ID NO: 9542 - DNA, 18 bp, synthetic construct
  misc_feature 1..18: note = Description of Artificial Sequence: Synthetic Antisense oligonucleotide
  modified_base 1..2: mod_base = OTHER; note = bicyclic nucleic acid (BNA)
  modified_base 4: mod_base = OTHER; note = 5-methyl
  modified_base 8..9: mod_base = OTHER; note = 5-methyl
  modified_base 13..15: mod_base = OTHER; note = 5-methyl
  source 1..18: mol_type = other DNA
gttctgtccaagcccggt

SEQ ID NO: 9543 - DNA, 17 bp, synthetic construct
  misc_feature 1..17: note = Description of Artificial Sequence: Synthetic Antisense oligonucleotide
  modified_base 1..2: mod_base = OTHER; note = bicyclic nucleic acid (BNA)
  modified_base 4: mod_base = OTHER; note = 5-methyl
  modified_base 8..9: mod_base = OTHER; note = 5-methyl
  modified_base 13..15: mod_base = OTHER; note = 5-methyl
  source 1..17: mol_type = other DNA
gttctgtccaagcccgg

SEQ ID NO: 9544 - DNA, 16 bp, synthetic construct
  misc_feature 1..16: note = Description of Artificial Sequence: Synthetic Antisense oligonucleotide
  modified_base 1..2: mod_base = OTHER; note = bicyclic nucleic acid (BNA)
  modified_base 4: mod_base = OTHER; note = 5-methyl
  modified_base 8..9: mod_base = OTHER; note = 5-methyl
  modified_base 13..15: mod_base = OTHER; note = 5-methyl
  source 1..16: mol_type = other DNA
gttctgtccaagcccg

SEQ ID NO: 9545 - DNA, 15 bp, synthetic construct
  misc_feature 1..15: note = Description of Artificial Sequence: Synthetic Antisense oligonucleotide
  modified_base 1..2: mod_base = OTHER; note = bicyclic nucleic acid (BNA)
  modified_base 4: mod_base = OTHER; note = 5-methyl
  modified_base 8..9: mod_base = OTHER; note = 5-methyl
  modified_base 13..15: mod_base = OTHER; note = 5-methyl
  source 1..15: mol_type = other DNA
gttctgtccaagccc

SEQ ID NO: 9546 - DNA, 14 bp, synthetic construct
  misc_feature 1..14: note = Description of Artificial Sequence: Synthetic Antisense oligonucleotide
  modified_base 1..2: mod_base = OTHER; note = bicyclic nucleic acid (BNA)
  modified_base 4: mod_base = OTHER; note = 5-methyl
  modified_base 8..9: mod_base = OTHER; note = 5-methyl
  modified_base 13..14: mod_base = OTHER; note = 5-methyl
  source 1..14: mol_type = other DNA
gttctgtccaagcc

SEQ ID NO: 9547 - DNA, 13 bp, synthetic construct
  misc_feature 1..13: note = Description of Artificial Sequence: Synthetic Antisense oligonucleotide
  modified_base 1..2: mod_base = OTHER; note = bicyclic nucleic acid (BNA)
  modified_base 4: mod_base = OTHER; note = 5-methyl
  modified_base 8..9: mod_base = OTHER; note = 5-methyl
  modified_base 13: mod_base = OTHER; note = 5-methyl
  source 1..13: mol_type = other DNA
gttctgtccaagc

SEQ ID NO: 9548 - DNA, 12 bp, synthetic construct
  misc_feature 1..12: note = Description of Artificial Sequence: Synthetic Antisense oligonucleotide
  modified_base 1..2: mod_base = OTHER; note = bicyclic nucleic acid (BNA)
  modified_base 4: mod_base = OTHER; note = 5-methyl
  modified_base 8..9: mod_base = OTHER; note = 5-methyl
  source 1..12: mol_type = other DNA
gttctgtccaag

SEQ ID NO: 9549 - DNA, 11 bp, synthetic construct
  misc_feature 1..11: note = Description of Artificial Sequence: Synthetic Antisense oligonucleotide
  modified_base 1..2: mod_base = OTHER; note = bicyclic nucleic acid (BNA)
  modified_base 4: mod_base = OTHER; note = 5-methyl
  modified_base 8..9: mod_base = OTHER; note = 5-methyl
  source 1..11: mol_type = other DNA
gttctgtccaa

SEQ ID NO: 9550 - DNA, 10 bp, synthetic construct
  misc_feature 1..10: note = Description of Artificial Sequence: Synthetic Antisense oligonucleotide
  modified_base 1..2: mod_base = OTHER; note = bicyclic nucleic acid (BNA)
  modified_base 4: mod_base = OTHER; note = 5-methyl
  modified_base 8..9: mod_base = OTHER; note = 5-methyl
  source 1..10: mol_type = other DNA
gttctgtcca

SEQ ID NO: 9551-9552 - skipped (2 entries)

SEQ ID NO: 9553 - DNA, 20 bp, synthetic construct
  misc_feature 1..20: note = Description of Artificial Sequence: Synthetic Antisense oligonucleotide
  modified_base 1..2: mod_base = OTHER; note = bicyclic nucleic acid (BNA)
  modified_base 5: mod_base = OTHER; note = 5-methyl
  modified_base 9..10: mod_base = OTHER; note = 5-methyl
  modified_base 14..16: mod_base = OTHER; note = 5-methyl
  source 1..20: mol_type = other DNA
agttctgtccaagcccggtt

SEQ ID NO: 9554 - DNA, 19 bp, synthetic construct
  misc_feature 1..19: note = Description of Artificial Sequence: Synthetic Antisense oligonucleotide
  modified_base 1..2: mod_base = OTHER; note = bicyclic nucleic acid (BNA)
  modified_base 5: mod_base = OTHER; note = 5-methyl
  modified_base 9..10: mod_base = OTHER; note = 5-methyl
  modified_base 14..16: mod_base = OTHER; note = 5-methyl
  source 1..19: mol_type = other DNA
agttctgtccaagcccggt

SEQ ID NO: 9555 - DNA, 18 bp, synthetic construct
  misc_feature 1..18: note = Description of Artificial Sequence: Synthetic Antisense oligonucleotide
  modified_base 1..2: mod_base = OTHER; note = bicyclic nucleic acid (BNA)
  modified_base 5: mod_base = OTHER; note = 5-methyl
  modified_base 9..10: mod_base = OTHER; note = 5-methyl
  modified_base 14..16: mod_base = OTHER; note = 5-methyl
  source 1..18: mol_type = other DNA
agttctgtccaagcccgg

SEQ ID NO: 9556 - DNA, 17 bp, synthetic construct
  misc_feature 1..17: note = Description of Artificial Sequence: Synthetic Antisense oligonucleotide
  modified_base 1..2: mod_base = OTHER; note = bicyclic nucleic acid (BNA)
  modified_base 5: mod_base = OTHER; note = 5-methyl
  modified_base 9..10: mod_base = OTHER; note = 5-methyl
  modified_base 14..16: mod_base = OTHER; note = 5-methyl
  source 1..17: mol_type = other DNA
agttctgtccaagcccg

SEQ ID NO: 9557 - DNA, 16 bp, synthetic construct
  misc_feature 1..16: note = Description of Artificial Sequence: Synthetic Antisense oligonucleotide
  modified_base 1..2: mod_base = OTHER; note = bicyclic nucleic acid (BNA)
  modified_base 5: mod_base = OTHER; note = 5-methyl
  modified_base 9..10: mod_base = OTHER; note = 5-methyl
  modified_base 14..16: mod_base = OTHER; note = 5-methyl
  source 1..16: mol_type = other DNA
agttctgtccaagccc

SEQ ID NO: 9558 - DNA, 15 bp, synthetic construct
  misc_feature 1..15: note = Description of Artificial Sequence: Synthetic Antisense oligonucleotide
  modified_base 1..2: mod_base = OTHER; note = bicyclic nucleic acid (BNA)
  modified_base 5: mod_base = OTHER; note = 5-methyl
  modified_base 9..10: mod_base = OTHER; note = 5-methyl
  modified_base 14..15: mod_base = OTHER; note = 5-methyl
  source 1..15: mol_type = other DNA
agttctgtccaagcc

SEQ ID NO: 9559 - DNA, 14 bp, synthetic construct
  misc_feature 1..14: note = Description of Artificial Sequence: Synthetic Antisense oligonucleotide
  modified_base 1..2: mod_base = OTHER; note = bicyclic nucleic acid (BNA)
  modified_base 5: mod_base = OTHER; note = 5-methyl
  modified_base 9..10: mod_base = OTHER; note = 5-methyl
  modified_base 14: mod_base = OTHER; note = 5-methyl
  source 1..14: mol_type = other DNA
agttctgtccaagc

SEQ ID NO: 9560 - DNA, 13 bp, synthetic construct
  misc_feature 1..13: note = Description of Artificial Sequence: Synthetic Antisense oligonucleotide
  modified_base 1..2: mod_base = OTHER; note = bicyclic nucleic acid (BNA)
  modified_base 5: mod_base = OTHER; note = 5-methyl
  modified_base 9..10: mod_base = OTHER; note = 5-methyl
  source 1..13: mol_type = other DNA
agttctgtccaag

SEQ ID NO: 9561 - DNA, 12 bp, synthetic construct
  misc_feature 1..12: note = Description of Artificial Sequence: Synthetic Antisense oligonucleotide
  modified_base 1..2: mod_base = OTHER; note = bicyclic nucleic acid (BNA)
  modified_base 5: mod_base = OTHER; note = 5-methyl
  modified_base 9..10: mod_base = OTHER; note = 5-methyl
  source 1..12: mol_type = other DNA
agttctgtccaa

SEQ ID NO: 9562 - DNA, 11 bp, synthetic construct
  misc_feature 1..11: note = Description of Artificial Sequence: Synthetic Antisense oligonucleotide
  modified_base 1..2: mod_base = OTHER; note = bicyclic nucleic acid (BNA)
  modified_base 5: mod_base = OTHER; note = 5-methyl
  modified_base 9..10: mod_base = OTHER; note = 5-methyl
  source 1..11: mol_type = other DNA
agttctgtcca

SEQ ID NO: 9563 - DNA, 10 bp, synthetic construct
  misc_feature 1..10: note = Description of Artificial Sequence: Synthetic Antisense oligonucleotide
  modified_base 1..2: mod_base = OTHER; note = bicyclic nucleic acid (BNA)
  modified_base 5: mod_base = OTHER; note = 5-methyl
  modified_base 9..10: mod_base = OTHER; note = 5-methyl
  source 1..10: mol_type = other DNA
agttctgtcc

SEQ ID NO: 9564-9565 - skipped (2 entries)

SEQ ID NO: 9566 - DNA, 20 bp, synthetic construct
  misc_feature 1..20: note = Description of Artificial Sequence: Synthetic Antisense oligonucleotide
  modified_base 1..2: mod_base = OTHER; note = bicyclic nucleic acid (BNA)
  modified_base 6: mod_base = OTHER; note = 5-methyl
  modified_base 10..11: mod_base = OTHER; note = 5-methyl
  modified_base 15..17: mod_base = OTHER; note = 5-methyl
  source 1..20: mol_type = other DNA
aagttctgtccaagcccggt

SEQ ID NO: 9567 - DNA, 19 bp, synthetic construct
  misc_feature 1..19: note = Description of Artificial Sequence: Synthetic Antisense oligonucleotide
  modified_base 1..2: mod_base = OTHER; note = bicyclic nucleic acid (BNA)
  modified_base 6: mod_base = OTHER; note = 5-methyl
  modified_base 10..11: mod_base = OTHER; note = 5-methyl
  modified_base 15..17: mod_base = OTHER; note = 5-methyl
  source 1..19: mol_type = other DNA
aagttctgtccaagcccgg

SEQ ID NO: 9568 - DNA, 18 bp, synthetic construct
  misc_feature 1..18: note = Description of Artificial Sequence: Synthetic Antisense oligonucleotide
  modified_base 1..2: mod_base = OTHER; note = bicyclic nucleic acid (BNA)
  modified_base 6: mod_base = OTHER; note = 5-methyl
  modified_base 10..11: mod_base = OTHER; note = 5-methyl
  modified_base 15..17: mod_base = OTHER; note = 5-methyl
  source 1..18: mol_type = other DNA
aagttctgtccaagcccg

SEQ ID NO: 9569 - DNA, 17 bp, synthetic construct
  misc_feature 1..17: note = Description of Artificial Sequence: Synthetic Antisense oligonucleotide
  modified_base 1..2: mod_base = OTHER; note = bicyclic nucleic acid (BNA)
  modified_base 6: mod_base = OTHER; note = 5-methyl
  modified_base 10..11: mod_base = OTHER; note = 5-methyl
  modified_base 15..17: mod_base = OTHER; note = 5-methyl
  source 1..17: mol_type = other DNA
aagttctgtccaagccc

SEQ ID NO: 9570 - DNA, 16 bp, synthetic construct
  misc_feature 1..16: note = Description of Artificial Sequence: Synthetic Antisense oligonucleotide
  modified_base 1..2: mod_base = OTHER; note = bicyclic nucleic acid (BNA)
  modified_base 6: mod_base = OTHER; note = 5-methyl
  modified_base 10..11: mod_base = OTHER; note = 5-methyl
  modified_base 15..16: mod_base = OTHER; note = 5-methyl
  source 1..16: mol_type = other DNA
aagttctgtccaagcc

SEQ ID NO: 9571 - DNA, 15 bp, synthetic construct
  misc_feature 1..15: note = Description of Artificial Sequence: Synthetic Antisense oligonucleotide
  modified_base 1..2: mod_base = OTHER; note = bicyclic nucleic acid (BNA)
  modified_base 6: mod_base = OTHER; note = 5-methyl
  modified_base 10..11: mod_base = OTHER; note = 5-methyl
  modified_base 15: mod_base = OTHER; note = 5-methyl
  source 1..15: mol_type = other DNA
aagttctgtccaagc

SEQ ID NO: 9572 - DNA, 14 bp, synthetic construct
  misc_feature 1..14: note = Description of Artificial Sequence: Synthetic Antisense oligonucleotide
  modified_base 1..2: mod_base = OTHER; note = bicyclic nucleic acid (BNA)
  modified_base 6: mod_base = OTHER; note = 5-methyl
  modified_base 10..11: mod_base = OTHER; note = 5-methyl
  source 1..14: mol_type = other DNA
aagttctgtccaag

SEQ ID NO: 9573 - DNA, 13 bp, synthetic construct
  misc_feature 1..13: note = Description of Artificial Sequence: Synthetic Antisense oligonucleotide
  modified_base 1..2: mod_base = OTHER; note = bicyclic nucleic acid (BNA)
  modified_base 6: mod_base = OTHER; note = 5-methyl
  modified_base 10..11: mod_base = OTHER; note = 5-methyl
  source 1..13: mol_type = other DNA
aagttctgtccaa

SEQ ID NO: 9574 - DNA, 12 bp, synthetic construct
  misc_feature 1..12: note = Description of Artificial Sequence: Synthetic Antisense oligonucleotide
  modified_base 1..2: mod_base = OTHER; note = bicyclic nucleic acid (BNA)
  modified_base 6: mod_base = OTHER; note = 5-methyl
  modified_base 10..11: mod_base = OTHER; note = 5-methyl
  source 1..12: mol_type = other DNA
aagttctgtcca

SEQ ID NO: 9575 - DNA, 11 bp, synthetic construct
  misc_feature 1..11: note = Description of Artificial Sequence: Synthetic Antisense oligonucleotide
  modified_base 1..2: mod_base = OTHER; note = bicyclic nucleic acid (BNA)
  modified_base 6: mod_base = OTHER; note = 5-methyl
  modified_base 10..11: mod_base = OTHER; note = 5-methyl
  source 1..11: mol_type = other DNA
aagttctgtcc

SEQ ID NO: 9576 - DNA, 10 bp, synthetic construct
  misc_feature 1..10: note = Description of Artificial Sequence: Synthetic Antisense oligonucleotide
  modified_base 1..2: mod_base = OTHER; note = bicyclic nucleic acid (BNA)
  modified_base 6: mod_base = OTHER; note = 5-methyl
  modified_base 10: mod_base = OTHER; note = 5-methyl
  source 1..10: mol_type = other DNA
aagttctgtc

SEQ ID NO: 9577-9578 - skipped (2 entries)

SEQ ID NO: 9579 - DNA, 20 bp, synthetic construct
  misc_feature 1..20: note = Description of Artificial Sequence: Synthetic Antisense oligonucleotide
  modified_base 1..2: mod_base = OTHER; note = bicyclic nucleic acid (BNA)
  modified_base 7: mod_base = OTHER; note = 5-methyl
  modified_base 11..12: mod_base = OTHER; note = 5-methyl
  modified_base 16..18: mod_base = OTHER; note = 5-methyl
  source 1..20: mol_type = other DNA
taagttctgtccaagcccgg

SEQ ID NO: 9580 - DNA, 19 bp, synthetic construct
  misc_feature 1..19: note = Description of Artificial Sequence: Synthetic Antisense oligonucleotide
  modified_base 1..2: mod_base = OTHER; note = bicyclic nucleic acid (BNA)
  modified_base 7: mod_base = OTHER; note = 5-methyl
  modified_base 11..12: mod_base = OTHER; note = 5-methyl
  modified_base 16..18: mod_base = OTHER; note = 5-methyl
  source 1..19: mol_type = other DNA
taagttctgtccaagcccg

SEQ ID NO: 9581 - DNA, 18 bp, synthetic construct
  misc_feature 1..18: note = Description of Artificial Sequence: Synthetic Antisense oligonucleotide
  modified_base 1..2: mod_base = OTHER; note = bicyclic nucleic acid (BNA)
  modified_base 7: mod_base = OTHER; note = 5-methyl
  modified_base 11..12: mod_base = OTHER; note = 5-methyl
  modified_base 16..18: mod_base = OTHER; note = 5-methyl
  source 1..18: mol_type = other DNA
taagttctgtccaagccc

SEQ ID NO: 9582 - DNA, 17 bp, synthetic construct
  misc_feature 1..17: note = Description of Artificial Sequence: Synthetic Antisense oligonucleotide
  modified_base 1..2: mod_base = OTHER; note = bicyclic nucleic acid (BNA)
  modified_base 7: mod_base = OTHER; note = 5-methyl
  modified_base 11..12: mod_base = OTHER; note = 5-methyl
  modified_base 16..17: mod_base = OTHER; note = 5-methyl
  source 1..17: mol_type = other DNA
taagttctgtccaagcc

SEQ ID NO: 9583 - DNA, 16 bp, synthetic construct
  misc_feature 1..16: note = Description of Artificial Sequence: Synthetic Antisense oligonucleotide
  modified_base 1..2: mod_base = OTHER; note = bicyclic nucleic acid (BNA)
  modified_base 7: mod_base = OTHER; note = 5-methyl
  modified_base 11..12: mod_base = OTHER; note = 5-methyl
  modified_base 16: mod_base = OTHER; note = 5-methyl
  source 1..16: mol_type = other DNA
taagttctgtccaagc

SEQ ID NO: 9584 - DNA, 14 bp, synthetic construct
  misc_feature 1..14: note = Description of Artificial Sequence: Synthetic Antisense oligonucleotide
  modified_base 1..2: mod_base = OTHER; note = bicyclic nucleic acid (BNA)
  modified_base 7: mod_base = OTHER; note = 5-methyl
  modified_base 11..12: mod_base = OTHER; note = 5-methyl
  source 1..14: mol_type = other DNA
taagttctgtccaa

SEQ ID NO: 9585 - DNA, 13 bp, synthetic construct
  misc_feature 1..13: note = Description of Artificial Sequence: Synthetic Antisense oligonucleotide
  modified_base 1..2: mod_base = OTHER; note = bicyclic nucleic acid (BNA)
  modified_base 7: mod_base = OTHER; note = 5-methyl
  modified_base 11..12: mod_base = OTHER; note = 5-methyl
  source 1..13: mol_type = other DNA
taagttctgtcca

SEQ ID NO: 9586 - DNA, 12 bp, synthetic construct
  misc_feature 1..12: note = Description of Artificial Sequence: Synthetic Antisense oligonucleotide
  modified_base 1..2: mod_base = OTHER; note = bicyclic nucleic acid (BNA)
  modified_base 7: mod_base = OTHER; note = 5-methyl
  modified_base 11..12: mod_base = OTHER; note = 5-methyl
  source 1..12: mol_type = other DNA
taagttctgtcc

SEQ ID NO: 9587 - DNA, 11 bp, synthetic construct
  misc_feature 1..11: note = Description of Artificial Sequence: Synthetic Antisense oligonucleotide
  modified_base 1..2: mod_base = OTHER; note = bicyclic nucleic acid (BNA)
  modified_base 7: mod_base = OTHER; note = 5-methyl
  modified_base 11: mod_base = OTHER; note = 5-methyl
  source 1..11: mol_type = other DNA
taagttctgtc

SEQ ID NO: 9588 - DNA, 10 bp, synthetic construct
  misc_feature 1..10: note = Description of Artificial Sequence: Synthetic Antisense oligonucleotide
  modified_base 1..2: mod_base = OTHER; note = bicyclic nucleic acid (BNA)
  modified_base 7: mod_base = OTHER; note = 5-methyl
  source 1..10: mol_type = other DNA
taagttctgt

SEQ ID NO: 9589-9590 - skipped (2 entries)

SEQ ID NO: 9591 - DNA, 20 bp, synthetic construct
  misc_feature 1..20: note = Description of Artificial Sequence: Synthetic Antisense oligonucleotide
  modified_base 1..2: mod_base = OTHER; note = bicyclic nucleic acid (BNA)
  modified_base 8: mod_base = OTHER; note = 5-methyl
  modified_base 12..13: mod_base = OTHER; note = 5-methyl
  modified_base 17..19: mod_base = OTHER; note = 5-methyl
  source 1..20: mol_type = other DNA
gtaagttctgtccaagcccg

SEQ ID NO: 9592 - DNA, 19 bp, synthetic construct
  misc_feature 1..19: note = Description of Artificial Sequence: Synthetic Antisense oligonucleotide
  modified_base 1..2: mod_base = OTHER; note = bicyclic nucleic acid (BNA)
  modified_base 8: mod_base = OTHER; note = 5-methyl
  modified_base 12..13: mod_base = OTHER; note = 5-methyl
  modified_base 17..19: mod_base = OTHER; note = 5-methyl
  source 1..19: mol_type = other DNA
gtaagttctgtccaagccc

SEQ ID NO: 9593 - DNA, 17 bp, synthetic construct
  misc_feature 1..17: note = Description of Artificial Sequence: Synthetic Antisense oligonucleotide
  modified_base 1..2: mod_base = OTHER; note = bicyclic nucleic acid (BNA)
  modified_base 8: mod_base = OTHER; note = 5-methyl
  modified_base 12..13: mod_base = OTHER; note = 5-methyl
  modified_base 17: mod_base = OTHER; note = 5-methyl
  source 1..17: mol_type = other DNA
gtaagttctgtccaagc

SEQ ID NO: 9594 - DNA, 16 bp, synthetic construct
  misc_feature 1..16: note = Description of Artificial Sequence: Synthetic Antisense oligonucleotide
  modified_base 1..2: mod_base = OTHER; note = bicyclic nucleic acid (BNA)
  modified_base 8: mod_base = OTHER; note = 5-methyl
  modified_base 12..13: mod_base = OTHER; note = 5-methyl
  source 1..16: mol_type = other DNA
gtaagttctgtccaag

SEQ ID NO: 9595 - DNA, 15 bp, synthetic construct
  misc_feature 1..15: note = Description of Artificial Sequence: Synthetic Antisense oligonucleotide
  modified_base 1..2: mod_base = OTHER; note = bicyclic nucleic acid (BNA)
  modified_base 8: mod_base = OTHER; note = 5-methyl
  modified_base 12..13: mod_base = OTHER; note = 5-methyl
  source 1..15: mol_type = other DNA
gtaagttctgtccaa

SEQ ID NO: 9596 - DNA, 14 bp, synthetic construct
  misc_feature 1..14: note = Description of Artificial Sequence: Synthetic Antisense oligonucleotide
  modified_base 1..2: mod_base = OTHER; note = bicyclic nucleic acid (BNA)
  modified_base 8: mod_base = OTHER; note = 5-methyl
  modified_base 12..13: mod_base = OTHER; note = 5-methyl
  source 1..14: mol_type = other DNA
gtaagttctgtcca

SEQ ID NO: 9597 - DNA, 13 bp, synthetic construct
  misc_feature 1..13: note = Description of Artificial Sequence: Synthetic Antisense oligonucleotide
  modified_base 1..2: mod_base = OTHER; note = bicyclic nucleic acid (BNA)
  modified_base 8: mod_base = OTHER; note = 5-methyl
  modified_base 12..13: mod_base = OTHER; note = 5-methyl
  source 1..13: mol_type = other DNA
gtaagttctgtcc

SEQ ID NO: 9598 - DNA, 12 bp, synthetic construct
  misc_feature 1..12: note = Description of Artificial Sequence: Synthetic Antisense oligonucleotide
  modified_base 1..2: mod_base = OTHER; note = bicyclic nucleic acid (BNA)
  modified_base 8: mod_base = OTHER; note = 5-methyl
  modified_base 12: mod_base = OTHER; note = 5-methyl
  source 1..12: mol_type = other DNA
gtaagttctgtc

SEQ ID NO: 9599 - DNA, 11 bp, synthetic construct
  misc_feature 1..11: note = Description of Artificial Sequence: Synthetic Antisense oligonucleotide
  modified_base 1..2: mod_base = OTHER; note = bicyclic nucleic acid (BNA)
  modified_base 8: mod_base = OTHER; note = 5-methyl
  source 1..11: mol_type = other DNA
gtaagttctgt

SEQ ID NO: 9600 - DNA, 10 bp, synthetic construct
  misc_feature 1..10: note = Description of Artificial Sequence: Synthetic Antisense oligonucleotide
  modified_base 1..2: mod_base = OTHER; note = bicyclic nucleic acid (BNA)
  modified_base 8: mod_base = OTHER; note = 5-methyl
  source 1..10: mol_type = other DNA
gtaagttctg

SEQ ID NO: 9601-9602 - skipped (2 entries)

SEQ ID NO: 9603 - DNA, 20 bp, synthetic construct
  misc_feature 1..20: note = Description of Artificial Sequence: Synthetic Antisense oligonucleotide
  modified_base 1..2: mod_base = OTHER; note = bicyclic nucleic acid (BNA)
  modified_base 9: mod_base = OTHER; note = 5-methyl
  modified_base 13..14: mod_base = OTHER; note = 5-methyl
  modified_base 18..20: mod_base = OTHER; note = 5-methyl
  source 1..20: mol_type = other DNA
ggtaagttctgtccaagccc

SEQ ID NO: 9604 - DNA, 19 bp, synthetic construct
  misc_feature 1..19: note = Description of Artificial Sequence: Synthetic Antisense oligonucleotide
  modified_base 1..2: mod_base = OTHER; note = bicyclic nucleic acid (BNA)
  modified_base 9: mod_base = OTHER; note = 5-methyl
  modified_base 13..14: mod_base = OTHER; note = 5-methyl
  modified_base 18..19: mod_base = OTHER; note = 5-methyl
  source 1..19: mol_type = other DNA
ggtaagttctgtccaagcc

SEQ ID NO: 9605 - DNA, 17 bp, synthetic construct
  misc_feature 1..17: note = Description of Artificial Sequence: Synthetic Antisense oligonucleotide
  modified_base 1..2: mod_base = OTHER; note = bicyclic nucleic acid (BNA)
  modified_base 9: mod_base = OTHER; note = 5-methyl
  modified_base 13..14: mod_base = OTHER; note = 5-methyl
  source 1..17: mol_type = other DNA
ggtaagttctgtccaag

SEQ ID NO: 9606 - DNA, 16 bp, synthetic construct
  misc_feature 1..16: note = Description of Artificial Sequence: Synthetic Antisense oligonucleotide
  modified_base 1..2: mod_base = OTHER; note = bicyclic nucleic acid (BNA)
  modified_base 9: mod_base = OTHER; note = 5-methyl
  modified_base 13..14: mod_base = OTHER; note = 5-methyl
  source 1..16: mol_type = other DNA
ggtaagttctgtccaa

SEQ ID NO: 9607 - DNA, 15 bp, synthetic construct
  misc_feature 1..15: note = Description of Artificial Sequence: Synthetic Antisense oligonucleotide
  modified_base 1..2: mod_base = OTHER; note = bicyclic nucleic acid (BNA)
  modified_base 9: mod_base = OTHER; note = 5-methyl
  modified_base 13..14: mod_base = OTHER; note = 5-methyl
  source 1..15: mol_type = other DNA
ggtaagttctgtcca

SEQ ID NO: 9608 - DNA, 14 bp, synthetic construct
  misc_feature 1..14: note = Description of Artificial Sequence: Synthetic Antisense oligonucleotide
  modified_base 1..2: mod_base = OTHER; note = bicyclic nucleic acid (BNA)
  modified_base 9: mod_base = OTHER; note = 5-methyl
  modified_base 13..14: mod_base = OTHER; note = 5-methyl
  source 1..14: mol_type = other DNA
ggtaagttctgtcc

SEQ ID NO: 9609 - DNA, 13 bp, synthetic construct
  misc_feature 1..13: note = Description of Artificial Sequence: Synthetic Antisense oligonucleotide
  modified_base 1..2: mod_base = OTHER; note = bicyclic nucleic acid (BNA)
  modified_base 9: mod_base = OTHER; note = 5-methyl
  modified_base 13: mod_base = OTHER; note = 5-methyl
  source 1..13: mol_type = other DNA
ggtaagttctgtc

SEQ ID NO: 9610 - DNA, 12 bp, synthetic construct
  misc_feature 1..12: note = Description of Artificial Sequence: Synthetic Antisense oligonucleotide
  modified_base 1..2: mod_base = OTHER; note = bicyclic nucleic acid (BNA)
  modified_base 9: mod_base = OTHER; note = 5-methyl
  source 1..12: mol_type = other DNA
ggtaagttctgt

SEQ ID NO: 9611 - DNA, 11 bp, synthetic construct
  misc_feature 1..11: note = Description of Artificial Sequence: Synthetic Antisense oligonucleotide
  modified_base 1..2: mod_base = OTHER; note = bicyclic nucleic acid (BNA)
  modified_base 9: mod_base = OTHER; note = 5-methyl
  source 1..11: mol_type = other DNA
ggtaagttctg

SEQ ID NO: 9612 - DNA, 10 bp, synthetic construct
  misc_feature 1..10: note = Description of Artificial Sequence: Synthetic Antisense oligonucleotide
  modified_base 1..2: mod_base = OTHER; note = bicyclic nucleic acid (BNA)
  modified_base 9: mod_base = OTHER; note = 5-methyl
  source 1..10: mol_type = other DNA
ggtaagttct

SEQ ID NO: 9613 - skipped

SEQ ID NO: 9614 - DNA, 20 bp, synthetic construct
  misc_feature 1..20: note = Description of Artificial Sequence: Synthetic Antisense oligonucleotide
  modified_base 1: mod_base = OTHER; note = 5-methyl
  modified_base 10: mod_base = OTHER; note = 5-methyl
  modified_base 14..15: mod_base = OTHER; note = 5-methyl
  modified_base 19..20: mod_base = OTHER; note = 5-methyl
  modified_base 1..2: mod_base = OTHER; note = bicyclic nucleic acid (BNA)
  source 1..20: mol_type = other DNA
cggtaagttctgtccaagcc

SEQ ID NO: 9615 - DNA, 19 bp, synthetic construct
  misc_feature 1..19: note = Description of Artificial Sequence: Synthetic Antisense oligonucleotide
  modified_base 1: mod_base = OTHER; note = 5-methyl
  modified_base 10: mod_base = OTHER; note = 5-methyl
  modified_base 14..15: mod_base = OTHER; note = 5-methyl
  modified_base 19: mod_base = OTHER; note = 5-methyl
  modified_base 1..2: mod_base = OTHER; note = bicyclic nucleic acid (BNA)
  source 1..19: mol_type = other DNA
cggtaagttctgtccaagc

SEQ ID NO: 9616 - DNA, 18 bp, synthetic construct
  misc_feature 1..18: note = Description of Artificial Sequence: Synthetic Antisense oligonucleotide
  modified_base 1: mod_base = OTHER; note = 5-methyl
  modified_base 10: mod_base = OTHER; note = 5-methyl
  modified_base 14..15: mod_base = OTHER; note = 5-methyl
  modified_base 1..2: mod_base = OTHER; note = bicyclic nucleic acid (BNA)
  source 1..18: mol_type = other DNA
cggtaagttctgtccaag

SEQ ID NO: 9617 - DNA, 17 bp, synthetic construct
  misc_feature 1..17: note = Description of Artificial Sequence: Synthetic Antisense oligonucleotide
  modified_base 1: mod_base = OTHER; note = 5-methyl
  modified_base 10: mod_base = OTHER; note = 5-methyl
  modified_base 14..15: mod_base = OTHER; note = 5-methyl
  modified_base 1..2: mod_base = OTHER; note = bicyclic nucleic acid (BNA)
  source 1..17: mol_type = other DNA
cggtaagttctgtccaa

SEQ ID NO: 9618 - DNA, 16 bp, synthetic construct
  misc_feature 1..16: note = Description of Artificial Sequence: Synthetic Antisense oligonucleotide
  modified_base 1: mod_base = OTHER; note = 5-methyl
  modified_base 10: mod_base = OTHER; note = 5-methyl
  modified_base 14..15: mod_base = OTHER; note = 5-methyl
  modified_base 1..2: mod_base = OTHER; note = bicyclic nucleic acid (BNA)
  source 1..16: mol_type = other DNA
cggtaagttctgtcca

SEQ ID NO: 9619 - DNA, 15 bp, synthetic construct
  misc_feature 1..15: note = Description of Artificial Sequence: Synthetic Antisense oligonucleotide
  modified_base 1: mod_base = OTHER; note = 5-methyl
  modified_base 10: mod_base = OTHER; note = 5-methyl
  modified_base 14..15: mod_base = OTHER; note = 5-methyl
  modified_base 1..2: mod_base = OTHER; note = bicyclic nucleic acid (BNA)
  source 1..15: mol_type = other DNA
cggtaagttctgtcc

SEQ ID NO: 9620 - DNA, 14 bp, synthetic construct
  misc_feature 1..14: note = Description of Artificial Sequence: Synthetic Antisense oligonucleotide
  modified_base 1: mod_base = OTHER; note = 5-methyl
  modified_base 10: mod_base = OTHER; note = 5-methyl
  modified_base 14: mod_base = OTHER; note = 5-methyl
  modified_base 1..2: mod_base = OTHER; note = bicyclic nucleic acid (BNA)
  source 1..14: mol_type = other DNA
cggtaagttctgtc

SEQ ID NO: 9621 - DNA, 13 bp, synthetic construct
  misc_feature 1..13: note = Description of Artificial Sequence: Synthetic Antisense oligonucleotide
  modified_base 1: mod_base = OTHER; note = 5-methyl
  modified_base 10: mod_base = OTHER; note = 5-methyl
  modified_base 1..2: mod_base = OTHER; note = bicyclic nucleic acid (BNA)
  source 1..13: mol_type = other DNA
cggtaagttctgt

SEQ ID NO: 9622 - DNA, 12 bp, synthetic construct
  misc_feature 1..12: note = Description of Artificial Sequence: Synthetic Antisense oligonucleotide
  modified_base 1: mod_base = OTHER; note = 5-methyl
  modified_base 10: mod_base = OTHER; note = 5-methyl
  modified_base 1..2: mod_base = OTHER; note = bicyclic nucleic acid (BNA)
  source 1..12: mol_type = other DNA
cggtaagttctg

SEQ ID NO: 9623 - DNA, 11 bp, synthetic construct
  misc_feature 1..11: note = Description of Artificial Sequence: Synthetic Antisense oligonucleotide
  modified_base 1: mod_base = OTHER; note = 5-methyl
  modified_base 10: mod_base = OTHER; note = 5-methyl
  modified_base 1..2: mod_base = OTHER; note = bicyclic nucleic acid (BNA)
  source 1..11: mol_type = other DNA
cggtaagttct

SEQ ID NO: 9624 - DNA, 10 bp, synthetic construct
  misc_feature 1..10: note = Description of Artificial Sequence: Synthetic Antisense oligonucleotide
  modified_base 1: mod_base = OTHER; note = 5-methyl
  modified_base 10: mod_base = OTHER; note = 5-methyl
  modified_base 1..2: mod_base = OTHER; note = bicyclic nucleic acid (BNA)
  source 1..10: mol_type = other DNA
cggtaagttc

SEQ ID NO: 9625-9626 - skipped (2 entries)

SEQ ID NO: 9627 - DNA, 20 bp, synthetic construct
  misc_feature 1..20: note = Description of Artificial Sequence: Synthetic Antisense oligonucleotide
  modified_base 1..2: mod_base = OTHER; note = bicyclic nucleic acid (BNA)
  modified_base 2: mod_base = OTHER; note = 5-methyl
  modified_base 11: mod_base = OTHER; note = 5-methyl
  modified_base 15..16: mod_base = OTHER; note = 5-methyl
  modified_base 20: mod_base = OTHER; note = 5-methyl
  source 1..20: mol_type = other DNA
tcggtaagttctgtccaagc

SEQ ID NO: 9628 - DNA, 19 bp, synthetic construct
  misc_feature 1..19: note = Description of Artificial Sequence: Synthetic Antisense oligonucleotide
  modified_base 1..2: mod_base = OTHER; note = bicyclic nucleic acid (BNA)
  modified_base 2: mod_base = OTHER; note = 5-methyl
  modified_base 11: mod_base = OTHER; note = 5-methyl
  modified_base 15..16: mod_base = OTHER; note = 5-methyl
  source 1..19: mol_type = other DNA
tcggtaagttctgtccaag

SEQ ID NO: 9629 - DNA, 18 bp, synthetic construct
  misc_feature 1..18: note = Description of Artificial Sequence: Synthetic Antisense oligonucleotide
  modified_base 1..2: mod_base = OTHER; note = bicyclic nucleic acid (BNA)
  modified_base 2: mod_base = OTHER; note = 5-methyl
  modified_base 11: mod_base = OTHER; note = 5-methyl
  modified_base 15..16: mod_base = OTHER; note = 5-methyl
  source 1..18: mol_type = other DNA
tcggtaagttctgtccaa

SEQ ID NO: 9630 - DNA, 17 bp, synthetic construct
  misc_feature 1..17: note = Description of Artificial Sequence: Synthetic Antisense oligonucleotide
  modified_base 1..2: mod_base = OTHER; note = bicyclic nucleic acid (BNA)
  modified_base 2: mod_base = OTHER; note = 5-methyl
  modified_base 11: mod_base = OTHER; note = 5-methyl
  modified_base 15..16: mod_base = OTHER; note = 5-methyl
  source 1..17: mol_type = other DNA
tcggtaagttctgtcca

SEQ ID NO: 9631 - DNA, 16 bp, synthetic construct
  misc_feature 1..16: note = Description of Artificial Sequence: Synthetic Antisense oligonucleotide
  modified_base 1..2: mod_base = OTHER; note = bicyclic nucleic acid (BNA)
  modified_base 2: mod_base = OTHER; note = 5-methyl
  modified_base 11: mod_base = OTHER; note = 5-methyl
  modified_base 15..16: mod_base = OTHER; note = 5-methyl
  source 1..16: mol_type = other DNA
tcggtaagttctgtcc

SEQ ID NO: 9632 - DNA, 15 bp, synthetic construct
  misc_feature 1..15: note = Description of Artificial Sequence: Synthetic Antisense oligonucleotide
  modified_base 1..2: mod_base = OTHER; note = bicyclic nucleic acid (BNA)
  modified_base 2: mod_base = OTHER; note = 5-methyl
  modified_base 11: mod_base = OTHER; note = 5-methyl
  modified_base 15: mod_base = OTHER; note = 5-methyl
  source 1..15: mol_type = other DNA
tcggtaagttctgtc

SEQ ID NO: 9633 - DNA, 14 bp, synthetic construct
  misc_feature 1..14: note = Description of Artificial Sequence: Synthetic Antisense oligonucleotide
  modified_base 1..2: mod_base = OTHER; note = bicyclic nucleic acid (BNA)
  modified_base 2: mod_base = OTHER; note = 5-methyl
  modified_base 11: mod_base = OTHER; note = 5-methyl
  source 1..14: mol_type = other DNA
tcggtaagttctgt

SEQ ID NO: 9634 - DNA, 13 bp, synthetic construct
  misc_feature 1..13: note = Description of Artificial Sequence: Synthetic Antisense oligonucleotide
  modified_base 1..2: mod_base = OTHER; note = bicyclic nucleic acid (BNA)
  modified_base 2: mod_base = OTHER; note = 5-methyl
  modified_base 11: mod_base = OTHER; note = 5-methyl
  source 1..13: mol_type = other DNA
tcggtaagttctg

SEQ ID NO: 9635 - DNA, 12 bp, synthetic construct
  misc_feature 1..12: note = Description of Artificial Sequence: Synthetic Antisense oligonucleotide
  modified_base 1..2: mod_base = OTHER; note = bicyclic nucleic acid (BNA)
  modified_base 2: mod_base = OTHER; note = 5-methyl
  modified_base 11: mod_base = OTHER; note = 5-methyl
  source 1..12: mol_type = other DNA
tcggtaagttct

SEQ ID NO: 9636 - DNA, 11 bp, synthetic construct
  misc_feature 1..11: note = Description of Artificial Sequence: Synthetic Antisense oligonucleotide
  modified_base 1..2: mod_base = OTHER; note = bicyclic nucleic acid (BNA)
  modified_base 2: mod_base = OTHER; note = 5-methyl
  modified_base 11: mod_base = OTHER; note = 5-methyl
  source 1..11: mol_type = other DNA
tcggtaagttc

SEQ ID NO: 9637 - DNA, 10 bp, synthetic construct
  misc_feature 1..10: note = Description of Artificial Sequence: Synthetic Antisense oligonucleotide
  modified_base 1..2: mod_base = OTHER; note = bicyclic nucleic acid (BNA)
  modified_base 2: mod_base = OTHER; note = 5-methyl
  source 1..10: mol_type = other DNA
tcggtaagtt

SEQ ID NO: 9638 - skipped

SEQ ID NO: 9639 - DNA, 20 bp, synthetic construct
  misc_feature 1..20: note = Description of Artificial Sequence: Synthetic Antisense oligonucleotide
  modified_base 1..2: mod_base = OTHER; note = bicyclic nucleic acid (BNA)
  modified_base 3: mod_base = OTHER; note = 5-methyl
  modified_base 12: mod_base = OTHER; note = 5-methyl
  modified_base 16..17: mod_base = OTHER; note = 5-methyl
  source 1..20: mol_type = other DNA
gtcggtaagttctgtccaag

SEQ ID NO: 9640 - DNA, 19 bp, synthetic construct
  misc_feature 1..19: note = Description of Artificial Sequence: Synthetic Antisense oligonucleotide
  modified_base 1..2: mod_base = OTHER; note = bicyclic nucleic acid (BNA)
  modified_base 3: mod_base = OTHER; note = 5-methyl
  modified_base 12: mod_base = OTHER; note = 5-methyl
  modified_base 16..17: mod_base = OTHER; note = 5-methyl
  source 1..19: mol_type = other DNA
gtcggtaagttctgtccaa

SEQ ID NO: 9641 - DNA, 18 bp, synthetic construct
  misc_feature 1..18: note = Description of Artificial Sequence: Synthetic Antisense oligonucleotide
  modified_base 1..2: mod_base = OTHER; note = bicyclic nucleic acid (BNA)
  modified_base 3: mod_base = OTHER; note = 5-methyl
  modified_base 12: mod_base = OTHER; note = 5-methyl
  modified_base 16..17: mod_base = OTHER; note = 5-methyl
  source 1..18: mol_type = other DNA
gtcggtaagttctgtcca

SEQ ID NO: 9642 - DNA, 17 bp, synthetic construct
  misc_feature 1..17: note = Description of Artificial Sequence: Synthetic Antisense oligonucleotide
  modified_base 1..2: mod_base = OTHER; note = bicyclic nucleic acid (BNA)
  modified_base 3: mod_base = OTHER; note = 5-methyl
  modified_base 12: mod_base = OTHER; note = 5-methyl
  modified_base 16..17: mod_base = OTHER; note = 5-methyl
  source 1..17: mol_type = other DNA
gtcggtaagttctgtcc

SEQ ID NO: 9643 - DNA, 16 bp, synthetic construct
  misc_feature 1..16: note = Description of Artificial Sequence: Synthetic Antisense oligonucleotide
  modified_base 1..2: mod_base = OTHER; note = bicyclic nucleic acid (BNA)
  modified_base 3: mod_base = OTHER; note = 5-methyl
  modified_base 12: mod_base = OTHER; note = 5-methyl
  modified_base 16: mod_base = OTHER; note = 5-methyl
  source 1..16: mol_type = other DNA
gtcggtaagttctgtc

SEQ ID NO: 9644 - DNA, 15 bp, synthetic construct
  misc_feature 1..15: note = Description of Artificial Sequence: Synthetic Antisense oligonucleotide
  modified_base 1..2: mod_base = OTHER; note = bicyclic nucleic acid (BNA)
  modified_base 3: mod_base = OTHER; note = 5-methyl
  modified_base 12: mod_base = OTHER; note = 5-methyl
  source 1..15: mol_type = other DNA
gtcggtaagttctgt

SEQ ID NO: 9645 - DNA, 14 bp, synthetic construct
  misc_feature 1..14: note = Description of Artificial Sequence: Synthetic Antisense oligonucleotide
  modified_base 1..2: mod_base = OTHER; note = bicyclic nucleic acid (BNA)
  modified_base 3: mod_base = OTHER; note = 5-methyl
  modified_base 12: mod_base = OTHER; note = 5-methyl
  source 1..14: mol_type = other DNA
gtcggtaagttctg

SEQ ID NO: 9646 - DNA, 13 bp, synthetic construct
  misc_feature 1..13: note = Description of Artificial Sequence: Synthetic Antisense oligonucleotide
  modified_base 1..2: mod_base = OTHER; note = bicyclic nucleic acid (BNA)
  modified_base 3: mod_base = OTHER; note = 5-methyl
  modified_base 12: mod_base = OTHER; note = 5-methyl
  source 1..13: mol_type = other DNA
gtcggtaagttct

SEQ ID NO: 9647 - DNA, 12 bp, synthetic construct
  misc_feature 1..12: note = Description of Artificial Sequence: Synthetic Antisense oligonucleotide
  modified_base 1..2: mod_base = OTHER; note = bicyclic nucleic acid (BNA)
  modified_base 3: mod_base = OTHER; note = 5-methyl
  modified_base 12: mod_base = OTHER; note = 5-methyl
  source 1..12: mol_type = other DNA
gtcggtaagttc

SEQ ID NO: 9648 - DNA, 11 bp, synthetic construct
  misc_feature 1..11: note = Description of Artificial Sequence: Synthetic Antisense oligonucleotide
  modified_base 1..2: mod_base = OTHER; note = bicyclic nucleic acid (BNA)
  modified_base 3: mod_base = OTHER; note = 5-methyl
  source 1..11: mol_type = other DNA
gtcggtaagtt

SEQ ID NO: 9649 - DNA, 10 bp, synthetic construct
  misc_feature 1..10: note = Description of Artificial Sequence: Synthetic Antisense oligonucleotide
  modified_base 1..2: mod_base = OTHER; note = bicyclic nucleic acid (BNA)
  modified_base 3: mod_base = OTHER; note = 5-methyl
  source 1..10: mol_type = other DNA
gtcggtaagt

SEQ ID NO: 9650 - DNA, 20 bp, synthetic construct
  misc_feature 1..20: note = Description of Artificial Sequence: Synthetic Antisense oligonucleotide
  modified_base 1..2: mod_base = OTHER; note = bicyclic nucleic acid (BNA)
  modified_base 4: mod_base = OTHER; note = 5-methyl
  modified_base 13: mod_base = OTHER; note = 5-methyl
  modified_base 17..18: mod_base = OTHER; note = 5-methyl
  source 1..20: mol_type = other DNA
agtcggtaagttctgtccaa

SEQ ID NO: 9651 - DNA, 19 bp, synthetic construct
  misc_feature 1..19: note = Description of Artificial Sequence: Synthetic Antisense oligonucleotide
  modified_base 1..2: mod_base = OTHER; note = bicyclic nucleic acid (BNA)
  modified_base 4: mod_base = OTHER; note = 5-methyl
  modified_base 13: mod_base = OTHER; note = 5-methyl
  modified_base 17..18: mod_base = OTHER; note = 5-methyl
  source 1..19: mol_type = other DNA
agtcggtaagttctgtcca

SEQ ID NO: 9652 - DNA, 17 bp, synthetic construct
  misc_feature 1..17: note = Description of Artificial Sequence: Synthetic Antisense oligonucleotide
  modified_base 1..2: mod_base = OTHER; note = bicyclic nucleic acid (BNA)
  modified_base 4: mod_base = OTHER; note = 5-methyl
  modified_base 13: mod_base = OTHER; note = 5-methyl
  modified_base 17: mod_base = OTHER; note = 5-methyl
  source 1..17: mol_type = other DNA
agtcggtaagttctgtc

SEQ ID NO: 9653 - DNA, 16 bp, synthetic construct
  misc_feature 1..16: note = Description of Artificial Sequence: Synthetic Antisense oligonucleotide
  modified_base 1..2: mod_base = OTHER; note = bicyclic nucleic acid (BNA)
  modified_base 4: mod_base = OTHER; note = 5-methyl
  modified_base 13: mod_base = OTHER; note = 5-methyl
  source 1..16: mol_type = other DNA
agtcggtaagttctgt

SEQ ID NO: 9654 - DNA, 15 bp, synthetic construct
  misc_feature 1..15: note = Description of Artificial Sequence: Synthetic Antisense oligonucleotide
  modified_base 1..2: mod_base = OTHER; note = bicyclic nucleic acid (BNA)
  modified_base 4: mod_base = OTHER; note = 5-methyl
  modified_base 13: mod_base = OTHER; note = 5-methyl
  source 1..15: mol_type = other DNA
agtcggtaagttctg

SEQ ID NO: 9655 - DNA, 14 bp, synthetic construct
  misc_feature 1..14: note = Description of Artificial Sequence: Synthetic Antisense oligonucleotide
  modified_base 1..2: mod_base = OTHER; note = bicyclic nucleic acid (BNA)
  modified_base 4: mod_base = OTHER; note = 5-methyl
  modified_base 13: mod_base = OTHER; note = 5-methyl
  source 1..14: mol_type = other DNA
agtcggtaagttct

SEQ ID NO: 9656 - DNA, 13 bp, synthetic construct
  misc_feature 1..13: note = Description of Artificial Sequence: Synthetic Antisense oligonucleotide
  modified_base 1..2: mod_base = OTHER; note = bicyclic nucleic acid (BNA)
  modified_base 4: mod_base = OTHER; note = 5-methyl
  modified_base 13: mod_base = OTHER; note = 5-methyl
  source 1..13: mol_type = other DNA
agtcggtaagttc

SEQ ID NO: 9657 - DNA, 12 bp, synthetic construct
  misc_feature 1..12: note = Description of Artificial Sequence: Synthetic Antisense oligonucleotide
  modified_base 1..2: mod_base = OTHER; note = bicyclic nucleic acid (BNA)
  modified_base 4: mod_base = OTHER; note = 5-methyl
  source 1..12: mol_type = other DNA
agtcggtaagtt

SEQ ID NO: 9658 - DNA, 11 bp, synthetic construct
  misc_feature 1..11: note = Description of Artificial Sequence: Synthetic Antisense oligonucleotide
  modified_base 1..2: mod_base = OTHER; note = bicyclic nucleic acid (BNA)
  modified_base 4: mod_base = OTHER; note = 5-methyl
  source 1..11: mol_type = other DNA
agtcggtaagt

SEQ ID NO: 9659 - DNA, 20 bp, synthetic construct
  misc_feature 1..20: note = Description of Artificial Sequence: Synthetic Antisense oligonucleotide
  modified_base 1: mod_base = OTHER; note = 5-methyl
  modified_base 5: mod_base = OTHER; note = 5-methyl
  modified_base 14: mod_base = OTHER; note = 5-methyl
  modified_base 18..19: mod_base = OTHER; note = 5-methyl
  modified_base 1..2: mod_base = OTHER; note = bicyclic nucleic acid (BNA)
  source 1..20: mol_type = other DNA
cagtcggtaagttctgtcca

SEQ ID NO: 9660 - DNA, 19 bp, synthetic construct
  misc_feature 1..19: note = Description of Artificial Sequence: Synthetic Antisense oligonucleotide
  modified_base 1: mod_base = OTHER; note = 5-methyl
  modified_base 5: mod_base = OTHER; note = 5-methyl
  modified_base 14: mod_base = OTHER; note = 5-methyl
  modified_base 18..19: mod_base = OTHER; note = 5-methyl
  modified_base 1..2: mod_base = OTHER; note = bicyclic nucleic acid (BNA)
  source 1..19: mol_type = other DNA
cagtcggtaagttctgtcc

SEQ ID NO: 9661 - DNA, 18 bp, synthetic construct
  misc_feature 1..18: note = Description of Artificial Sequence: Synthetic Antisense oligonucleotide
  modified_base 1: mod_base = OTHER; note = 5-methyl
  modified_base 5: mod_base = OTHER; note = 5-methyl
  modified_base 14: mod_base = OTHER; note = 5-methyl
  modified_base 18: mod_base = OTHER; note = 5-methyl
  modified_base 1..2: mod_base = OTHER; note = bicyclic nucleic acid (BNA)
  source 1..18: mol_type = other DNA
cagtcggtaagttctgtc

SEQ ID NO: 9662 - DNA, 17 bp, synthetic construct
  misc_feature 1..17: note = Description of Artificial Sequence: Synthetic Antisense oligonucleotide
  modified_base 1: mod_base = OTHER; note = 5-methyl
  modified_base 5: mod_base = OTHER; note = 5-methyl
  modified_base 14: mod_base = OTHER; note = 5-methyl
  modified_base 1..2: mod_base = OTHER; note = bicyclic nucleic acid (BNA)
  source 1..17: mol_type = other DNA
cagtcggtaagttctgt

SEQ ID NO: 9663 - DNA, 16 bp, synthetic construct
  misc_feature 1..16: note = Description of Artificial Sequence: Synthetic Antisense oligonucleotide
  modified_base 1: mod_base = OTHER; note = 5-methyl
  modified_base 5: mod_base = OTHER; note = 5-methyl
  modified_base 14: mod_base = OTHER; note = 5-methyl
  modified_base 1..2: mod_base = OTHER; note = bicyclic nucleic acid (BNA)
  source 1..16: mol_type = other DNA
cagtcggtaagttctg

SEQ ID NO: 9664 - DNA, 15 bp, synthetic construct
  misc_feature 1..15: note = Description of Artificial Sequence: Synthetic Antisense oligonucleotide
  modified_base 1: mod_base = OTHER; note = 5-methyl
  modified_base 5: mod_base = OTHER; note = 5-methyl
  modified_base 14: mod_base = OTHER; note = 5-methyl
  modified_base 1..2: mod_base = OTHER; note = bicyclic nucleic acid (BNA)
  source 1..15: mol_type = other DNA
cagtcggtaagttct

SEQ ID NO: 9665 - DNA, 14 bp, synthetic construct
  misc_feature 1..14: note = Description of Artificial Sequence: Synthetic Antisense oligonucleotide
  modified_base 1: mod_base = OTHER; note = 5-methyl
  modified_base 5: mod_base = OTHER; note = 5-methyl
  modified_base 14: mod_base = OTHER; note = 5-methyl
  modified_base 1..2: mod_base = OTHER; note = bicyclic nucleic acid (BNA)
  source 1..14: mol_type = other DNA
cagtcggtaagttc

SEQ ID NO: 9666 - DNA, 13 bp, synthetic construct
  misc_feature 1..13: note = Description of Artificial Sequence: Synthetic Antisense oligonucleotide
  modified_base 1: mod_base = OTHER; note = 5-methyl
  modified_base 5: mod_base = OTHER; note = 5-methyl
  modified_base 1..2: mod_base = OTHER; note = bicyclic nucleic acid (BNA)
  source 1..13: mol_type = other DNA
cagtcggtaagtt

SEQ ID NO: 9667 - DNA, 12 bp, synthetic construct
  misc_feature 1..12: note = Description of Artificial Sequence: Synthetic Antisense oligonucleotide
  modified_base 1: mod_base = OTHER; note = 5-methyl
  modified_base 5: mod_base = OTHER; note = 5-methyl
  modified_base 1..2: mod_base = OTHER; note = bicyclic nucleic acid (BNA)
  source 1..12: mol_type = other DNA
cagtcggtaagt

SEQ ID NO: 9668 - DNA, 20 bp, synthetic construct
  misc_feature 1..20: note = Description of Artificial Sequence: Synthetic Antisense oligonucleotide
  modified_base 1..2: mod_base = OTHER; note = 5-methyl
  modified_base 6: mod_base = OTHER; note = 5-methyl
  modified_base 15: mod_base = OTHER; note = 5-methyl
  modified_base 19..20: mod_base = OTHER; note = 5-methyl
  modified_base 1..2: mod_base = OTHER; note = bicyclic nucleic acid (BNA)
  source 1..20: mol_type = other DNA
ccagtcggtaagttctgtcc

SEQ ID NO: 9669 - DNA, 19 bp, synthetic construct
  misc_feature 1..19: note = Description of Artificial Sequence: Synthetic Antisense oligonucleotide
  modified_base 1..2: mod_base = OTHER; note = 5-methyl
  modified_base 6: mod_base = OTHER; note = 5-methyl
  modified_base 15: mod_base = OTHER; note = 5-methyl
  modified_base 19: mod_base = OTHER; note = 5-methyl
  modified_base 1..2: mod_base = OTHER; note = bicyclic nucleic acid (BNA)
  source 1..19: mol_type = other DNA
ccagtcggtaagttctgtc

SEQ ID NO: 9670 - DNA, 18 bp, synthetic construct
  misc_feature 1..18: note = Description of Artificial Sequence: Synthetic Antisense oligonucleotide
  modified_base 1..2: mod_base = OTHER; note = 5-methyl
  modified_base 6: mod_base = OTHER; note = 5-methyl
  modified_base 15: mod_base = OTHER; note = 5-methyl
  modified_base 1..2: mod_base = OTHER; note = bicyclic nucleic acid (BNA)
  source 1..18: mol_type = other DNA
ccagtcggtaagttctgt

SEQ ID NO: 9671 - DNA, 17 bp, synthetic construct
  misc_feature 1..17: note = Description of Artificial Sequence: Synthetic Antisense oligonucleotide
  modified_base 1..2: mod_base = OTHER; note = 5-methyl
  modified_base 6: mod_base = OTHER; note = 5-methyl
  modified_base 15: mod_base = OTHER; note = 5-methyl
  modified_base 1..2: mod_base = OTHER; note = bicyclic nucleic acid (BNA)
  source 1..17: mol_type = other DNA
ccagtcggtaagttctg

SEQ ID NO: 9672 - DNA, 16 bp, synthetic construct
  misc_feature 1..16: note = Description of Artificial Sequence: Synthetic Antisense oligonucleotide
  modified_base 1..2: mod_base = OTHER; note = 5-methyl
  modified_base 6: mod_base = OTHER; note = 5-methyl
  modified_base 15: mod_base = OTHER; note = 5-methyl
  modified_base 1..2: mod_base = OTHER; note = bicyclic nucleic acid (BNA)
  source 1..16: mol_type = other DNA
ccagtcggtaagttct

SEQ ID NO: 9673 - DNA, 15 bp, synthetic construct
  misc_feature 1..15: note = Description of Artificial Sequence: Synthetic Antisense oligonucleotide
  modified_base 1..2: mod_base = OTHER; note = 5-methyl
  modified_base 6: mod_base = OTHER; note = 5-methyl
  modified_base 15: mod_base = OTHER; note = 5-methyl
  modified_base 1..2: mod_base = OTHER; note = bicyclic nucleic acid (BNA)
  source 1..15: mol_type = other DNA
ccagtcggtaagttc

SEQ ID NO: 9674 - DNA, 14 bp, synthetic construct
  misc_feature 1..14: note = Description of Artificial Sequence: Synthetic Antisense oligonucleotide
  modified_base 1..2: mod_base = OTHER; note = 5-methyl
  modified_base 6: mod_base = OTHER; note = 5-methyl
  modified_base 1..2: mod_base = OTHER; note = bicyclic nucleic acid (BNA)
  source 1..14: mol_type = other DNA
ccagtcggtaagtt

SEQ ID NO: 9675 - DNA, 13 bp, synthetic construct
  misc_feature 1..13: note = Description of Artificial Sequence: Synthetic Antisense oligonucleotide
  modified_base 1..2: mod_base = OTHER; note = 5-methyl
  modified_base 6: mod_base = OTHER; note = 5-methyl
  modified_base 1..2: mod_base = OTHER; note = bicyclic nucleic acid (BNA)
  source 1..13: mol_type = other DNA
ccagtcggtaagt

SEQ ID NO: 9676 - DNA, 20 bp, synthetic construct
  misc_feature 1..20: note = Description of Artificial Sequence: Synthetic Antisense oligonucleotide
  modified_base 1..2: mod_base = OTHER; note = bicyclic nucleic acid (BNA)
  modified_base 2..3: mod_base = OTHER; note = 5-methyl
  modified_base 7: mod_base = OTHER; note = 5-methyl
  modified_base 16: mod_base = OTHER; note = 5-methyl
  modified_base 20: mod_base = OTHER; note = 5-methyl
  source 1..20: mol_type = other DNA
gccagtcggtaagttctgtc

SEQ ID NO: 9677 - DNA, 19 bp, synthetic construct
  misc_feature 1..19: note = Description of Artificial Sequence: Synthetic Antisense oligonucleotide
  modified_base 1..2: mod_base = OTHER; note = bicyclic nucleic acid (BNA)
  modified_base 2..3: mod_base = OTHER; note = 5-methyl
  modified_base 7: mod_base = OTHER; note = 5-methyl
  modified_base 16: mod_base = OTHER; note = 5-methyl
  source 1..19: mol_type = other DNA
gccagtcggtaagttctgt

SEQ ID NO: 9678 - DNA, 18 bp, synthetic construct
  misc_feature 1..18: note = Description of Artificial Sequence: Synthetic Antisense oligonucleotide
  modified_base 1..2: mod_base = OTHER; note = bicyclic nucleic acid (BNA)
  modified_base 2..3: mod_base = OTHER; note = 5-methyl
  modified_base 7: mod_base = OTHER; note = 5-methyl
  modified_base 16: mod_base = OTHER; note = 5-methyl
  source 1..18: mol_type = other DNA
gccagtcggtaagttctg

SEQ ID NO: 9679 - DNA, 17 bp, synthetic construct
  misc_feature 1..17: note = Description of Artificial Sequence: Synthetic Antisense oligonucleotide
  modified_base 1..2: mod_base = OTHER; note = bicyclic nucleic acid (BNA)
  modified_base 2..3: mod_base = OTHER; note = 5-methyl
  modified_base 7: mod_base = OTHER; note = 5-methyl
  modified_base 16: mod_base = OTHER; note = 5-methyl
  source 1..17: mol_type = other DNA
gccagtcggtaagttct

SEQ ID NO: 9680 - DNA, 16 bp, synthetic construct
  misc_feature 1..16: note = Description of Artificial Sequence: Synthetic Antisense oligonucleotide
  modified_base 1..2: mod_base = OTHER; note = bicyclic nucleic acid (BNA)
  modified_base 2..3: mod_base = OTHER; note = 5-methyl
  modified_base 7: mod_base = OTHER; note = 5-methyl
  modified_base 16: mod_base = OTHER; note = 5-methyl
  source 1..16: mol_type = other DNA
gccagtcggtaagttc

SEQ ID NO: 9681 - DNA, 15 bp, synthetic construct
  misc_feature 1..15: note = Description of Artificial Sequence: Synthetic Antisense oligonucleotide
  modified_base 1..2: mod_base = OTHER; note = bicyclic nucleic acid (BNA)
  modified_base 2..3: mod_base = OTHER; note = 5-methyl
  modified_base 7: mod_base = OTHER; note = 5-methyl
  source 1..15: mol_type = other DNA
gccagtcggtaagtt

SEQ ID NO: 9682 - DNA, 14 bp, synthetic construct
  misc_feature 1..14: note = Description of Artificial Sequence: Synthetic Antisense oligonucleotide
  modified_base 1..2: mod_base = OTHER; note = bicyclic nucleic acid (BNA)
  modified_base 2..3: mod_base = OTHER; note = 5-methyl
  modified_base 7: mod_base = OTHER; note = 5-methyl
  source 1..14: mol_type = other DNA
gccagtcggtaagt

SEQ ID NO: 9683 - DNA, 20 bp, synthetic construct
  misc_feature 1..20: note = Description of Artificial Sequence: Synthetic Antisense oligonucleotide
  modified_base 1..2: mod_base = OTHER; note = bicyclic nucleic acid (BNA)
  modified_base 2: mod_base = OTHER; note = 5-methyl
  modified_base 14: mod_base = OTHER; note = 5-methyl
  modified_base 19: mod_base = OTHER; note = 5-methyl
  source 1..20: mol_type = other DNA
tcaaggaagatggcatttct

SEQ ID NO: 9684 - DNA, 22 bp, synthetic construct
  misc_feature 1..22: note = Description of Artificial Sequence: Synthetic Antisense oligonucleotide
  modified_base 1..2: mod_base = OTHER; note = bicyclic nucleic acid (BNA)
  modified_base 2: mod_base = OTHER; note = 5-methyl
  modified_base 14: mod_base = OTHER; note = 5-methyl
  modified_base 19: mod_base = OTHER; note = 5-methyl
  source 1..22: mol_type = other DNA
tcaaggaagatggcatttctag

SEQ ID NO: 9685 - DNA, 16 bp, synthetic construct
  misc_feature 1..16: note = Description of Artificial Sequence: Synthetic Antisense oligonucleotide
  modified_base 1..2: mod_base = OTHER; note = bicyclic nucleic acid (BNA)
  modified_base 2: mod_base = OTHER; note = 5-methyl
  modified_base 14: mod_base = OTHER; note = 5-methyl
  source 1..16: mol_type = other DNA
tcaaggaagatggcat

SEQ ID NO: 9686 - DNA, 15 bp, synthetic construct
  misc_feature 1..15: note = Description of Artificial Sequence: Synthetic Antisense oligonucleotide
  modified_base 1..2: mod_base = OTHER; note = bicyclic nucleic acid (BNA)
  modified_base 9: mod_base = OTHER; note = 5-methyl
  modified_base 14: mod_base = OTHER; note = 5-methyl
  source 1..15: mol_type = other DNA
gaagatggcatttct

SEQ ID NO: 9687 - DNA, 21 bp, synthetic construct
  misc_feature 1..21: note = Description of Artificial Sequence: Synthetic Antisense oligonucleotide
  modified_base 1..2: mod_base = OTHER; note = bicyclic nucleic acid (BNA)
  modified_base 2: mod_base = OTHER; note = 5-methyl
  modified_base 14: mod_base = OTHER; note = 5-methyl
  modified_base 19: mod_base = OTHER; note = 5-methyl
  source 1..21: mol_type = other DNA
tcaaggaagatggcatttcta

SEQ ID NO: 9688 - DNA, 19 bp, synthetic construct
  misc_feature 1..19: note = Description of Artificial Sequence: Synthetic Antisense oligonucleotide
  modified_base 1..2: mod_base = OTHER; note = bicyclic nucleic acid (BNA)
  modified_base 2: mod_base = OTHER; note = 5-methyl
  modified_base 14: mod_base = OTHER; note = 5-methyl
  modified_base 19: mod_base = OTHER; note = 5-methyl
  source 1..19: mol_type = other DNA
tcaaggaagatggcatttc

SEQ ID NO: 9689 - DNA, 18 bp, synthetic construct
  misc_feature 1..18: note = Description of Artificial Sequence: Synthetic Antisense oligonucleotide
  modified_base 1..2: mod_base = OTHER; note = bicyclic nucleic acid (BNA)
  modified_base 2: mod_base = OTHER; note = 5-methyl
  modified_base 14: mod_base = OTHER; note = 5-methyl
  source 1..18: mol_type = other DNA
tcaaggaagatggcattt

SEQ ID NO: 9690 - DNA, 17 bp, synthetic construct
  misc_feature 1..17: note = Description of Artificial Sequence: Synthetic Antisense oligonucleotide
  modified_base 1..2: mod_base = OTHER; note = bicyclic nucleic acid (BNA)
  modified_base 2: mod_base = OTHER; note = 5-methyl
  modified_base 14: mod_base = OTHER; note = 5-methyl
  source 1..17: mol_type = other DNA
tcaaggaagatggcatt

SEQ ID NO: 9691 - DNA, 15 bp, synthetic construct
  misc_feature 1..15: note = Description of Artificial Sequence: Synthetic Antisense oligonucleotide
  modified_base 1..2: mod_base = OTHER; note = bicyclic nucleic acid (BNA)
  modified_base 2: mod_base = OTHER; note = 5-methyl
  modified_base 14: mod_base = OTHER; note = 5-methyl
  source 1..15: mol_type = other DNA
tcaaggaagatggca

SEQ ID NO: 9692 - DNA, 14 bp, synthetic construct
  misc_feature 1..14: note = Description of Artificial Sequence: Synthetic Antisense oligonucleotide
  modified_base 1..2: mod_base = OTHER; note = bicyclic nucleic acid (BNA)
  modified_base 2: mod_base = OTHER; note = 5-methyl
  modified_base 14: mod_base = OTHER; note = 5-methyl
  source 1..14: mol_type = other DNA
tcaaggaagatggc

SEQ ID NO: 9693 - DNA, 13 bp, synthetic construct
  misc_feature 1..13: note = Description of Artificial Sequence: Synthetic Antisense oligonucleotide
  modified_base 1..2: mod_base = OTHER; note = bicyclic nucleic acid (BNA)
  modified_base 2: mod_base = OTHER; note = 5-methyl
  source 1..13: mol_type = other DNA
tcaaggaagatgg

SEQ ID NO: 9694 - DNA, 12 bp, synthetic construct
  misc_feature 1..12: note = Description of Artificial Sequence: Synthetic Antisense oligonucleotide
  modified_base 1..2: mod_base = OTHER; note = bicyclic nucleic acid (BNA)
  modified_base 2: mod_base = OTHER; note = 5-methyl
  source 1..12: mol_type = other DNA
tcaaggaagatg

SEQ ID NO: 9695 - DNA, 11 bp, synthetic construct
  misc_feature 1..11: note = Description of Artificial Sequence: Synthetic Antisense oligonucleotide
  modified_base 1..2: mod_base = OTHER; note = bicyclic nucleic acid (BNA)
  modified_base 2: mod_base = OTHER; note = 5-methyl
  source 1..11: mol_type = other DNA
tcaaggaagat

SEQ ID NO: 9696 - DNA, 10 bp, synthetic construct
  misc_feature 1..10: note = Description of Artificial Sequence: Synthetic Antisense oligonucleotide
  modified_base 1..2: mod_base = OTHER; note = bicyclic nucleic acid (BNA)
  modified_base 2: mod_base = OTHER; note = 5-methyl
  source 1..10: mol_type = other DNA
tcaaggaaga

SEQ ID NO: 9697 - skipped

SEQ ID NO: 9698 - DNA, 21 bp, synthetic construct
  misc_feature 1..21: note = Description of Artificial Sequence: Synthetic Antisense oligonucleotide
  modified_base 1: mod_base = OTHER; note = 5-methyl
  modified_base 13: mod_base = OTHER; note = 5-methyl
  modified_base 18: mod_base = OTHER; note = 5-methyl
  modified_base 1..2: mod_base = OTHER; note = bicyclic nucleic acid (BNA)
  source 1..21: mol_type = other DNA
caaggaagatggcatttctag

SEQ ID NO: 9699 - DNA, 20 bp, synthetic construct
  misc_feature 1..20: note = Description of Artificial Sequence: Synthetic Antisense oligonucleotide
  modified_base 1: mod_base = OTHER; note = 5-methyl
  modified_base 13: mod_base = OTHER; note = 5-methyl
  modified_base 18: mod_base = OTHER; note = 5-methyl
  modified_base 1..2: mod_base = OTHER; note = bicyclic nucleic acid (BNA)
  source 1..20: mol_type = other DNA
caaggaagatggcatttcta

SEQ ID NO: 9700 - DNA, 19 bp, synthetic construct
  misc_feature 1..19: note = Description of Artificial Sequence: Synthetic Antisense oligonucleotide
  modified_base 1: mod_base = OTHER; note = 5-methyl
  modified_base 13: mod_base = OTHER; note = 5-methyl
  modified_base 18: mod_base = OTHER; note = 5-methyl
  modified_base 1..2: mod_base = OTHER; note = bicyclic nucleic acid (BNA)
  source 1..19: mol_type = other DNA
caaggaagatggcatttct

SEQ ID NO: 9701 - DNA, 18 bp, synthetic construct
  misc_feature 1..18: note = Description of Artificial Sequence: Synthetic Antisense oligonucleotide
  modified_base 1: mod_base = OTHER; note = 5-methyl
  modified_base 13: mod_base = OTHER; note = 5-methyl
  modified_base 18: mod_base = OTHER; note = 5-methyl
  modified_base 1..2: mod_base = OTHER; note = bicyclic nucleic acid (BNA)
  source 1..18: mol_type = other DNA
caaggaagatggcatttc

SEQ ID NO: 9702 - DNA, 17 bp, synthetic construct
  misc_feature 1..17: note = Description of Artificial Sequence: Synthetic Antisense oligonucleotide
  modified_base 1: mod_base = OTHER; note = 5-methyl
  modified_base 13: mod_base = OTHER; note = 5-methyl
  modified_base 1..2: mod_base = OTHER; note = bicyclic nucleic acid (BNA)
  source 1..17: mol_type = other DNA
caaggaagatggcattt

SEQ ID NO: 9703 - DNA, 16 bp, synthetic construct
  misc_feature 1..16: note = Description of Artificial Sequence: Synthetic Antisense oligonucleotide
  modified_base 1: mod_base = OTHER; note = 5-methyl
  modified_base 13: mod_base = OTHER; note = 5-methyl
  modified_base 1..2: mod_base = OTHER; note = bicyclic nucleic acid (BNA)
  source 1..16: mol_type = other DNA
caaggaagatggcatt

SEQ ID NO: 9704 - DNA, 15 bp, synthetic construct
  misc_feature 1..15: note = Description of Artificial Sequence: Synthetic Antisense oligonucleotide
  modified_base 1: mod_base = OTHER; note = 5-methyl
  modified_base 13: mod_base = OTHER; note = 5-methyl
  modified_base 1..2: mod_base = OTHER; note = bicyclic nucleic acid (BNA)
  source 1..15: mol_type = other DNA
caaggaagatggcat

SEQ ID NO: 9705 - DNA, 14 bp, synthetic construct
  misc_feature 1..14: note = Description of Artificial Sequence: Synthetic Antisense oligonucleotide
  modified_base 1: mod_base = OTHER; note = 5-methyl
  modified_base 13: mod_base = OTHER; note = 5-methyl
  modified_base 1..2: mod_base = OTHER; note = bicyclic nucleic acid (BNA)
  source 1..14: mol_type = other DNA
caaggaagatggca

SEQ ID NO: 9706 - DNA, 13 bp, synthetic construct
  misc_feature 1..13: note = Description of Artificial Sequence: Synthetic Antisense oligonucleotide
  modified_base 1: mod_base = OTHER; note = 5-methyl
  modified_base 13: mod_base = OTHER; note = 5-methyl
  modified_base 1..2: mod_base = OTHER; note = bicyclic nucleic acid (BNA)
  source 1..13: mol_type = other DNA
caaggaagatggc

SEQ ID NO: 9707 - DNA, 12 bp, synthetic construct
  misc_feature 1..12: note = Description of Artificial Sequence: Synthetic Antisense oligonucleotide
  modified_base 1: mod_base = OTHER; note = 5-methyl
  modified_base 1..2: mod_base = OTHER; note = bicyclic nucleic acid (BNA)
  source 1..12: mol_type = other DNA
caaggaagatgg

SEQ ID NO: 9708 - DNA, 11 bp, synthetic construct
  misc_feature 1..11: note = Description of Artificial Sequence: Synthetic Antisense oligonucleotide
  modified_base 1: mod_base = OTHER; note = 5-methyl
  modified_base 1..2: mod_base = OTHER; note = bicyclic nucleic acid (BNA)
  source 1..11: mol_type = other DNA
caaggaagatg

SEQ ID NO: 9709 - DNA, 10 bp, synthetic construct
  misc_feature 1..10: note = Description of Artificial Sequence: Synthetic Antisense oligonucleotide
  modified_base 1: mod_base = OTHER; note = 5-methyl
  modified_base 1..2: mod_base = OTHER; note = bicyclic nucleic acid (BNA)
  source 1..10: mol_type = other DNA
caaggaagat

SEQ ID NO: 9710 - DNA, 20 bp, synthetic construct
  misc_feature 1..20: note = Description of Artificial Sequence: Synthetic Antisense oligonucleotide
  modified_base 1..2: mod_base = OTHER; note = bicyclic nucleic acid (BNA)
  modified_base 12: mod_base = OTHER; note = 5-methyl
  modified_base 17: mod_base = OTHER; note = 5-methyl
  source 1..20: mol_type = other DNA
aaggaagatggcatttctag

SEQ ID NO: 9711 - DNA, 19 bp, synthetic construct
  misc_feature 1..19: note = Description of Artificial Sequence: Synthetic Antisense oligonucleotide
  modified_base 1..2: mod_base = OTHER; note = bicyclic nucleic acid (BNA)
  modified_base 12: mod_base = OTHER; note = 5-methyl
  modified_base 17: mod_base = OTHER; note = 5-methyl
  source 1..19: mol_type = other DNA
aaggaagatggcatttcta

SEQ ID NO: 9712 - DNA, 18 bp, synthetic construct
  misc_feature 1..18: note = Description of Artificial Sequence: Synthetic Antisense oligonucleotide
  modified_base 1..2: mod_base = OTHER; note = bicyclic nucleic acid (BNA)
  modified_base 12: mod_base = OTHER; note = 5-methyl
  modified_base 17: mod_base = OTHER; note = 5-methyl
  source 1..18: mol_type = other DNA
aaggaagatggcatttct

SEQ ID NO: 9713 - DNA, 17 bp, synthetic construct
  misc_feature 1..17: note = Description of Artificial Sequence: Synthetic Antisense oligonucleotide
  modified_base 1..2: mod_base = OTHER; note = bicyclic nucleic acid (BNA)
  modified_base 12: mod_base = OTHER; note = 5-methyl
  modified_base 17: mod_base = OTHER; note = 5-methyl
  source 1..17: mol_type = other DNA
aaggaagatggcatttc

SEQ ID NO: 9714 - DNA, 16 bp, synthetic construct
  misc_feature 1..16: note = Description of Artificial Sequence: Synthetic Antisense oligonucleotide
  modified_base 1..2: mod_base = OTHER; note = bicyclic nucleic acid (BNA)
  modified_base 12: mod_base = OTHER; note = 5-methyl
  source 1..16: mol_type = other DNA
aaggaagatggcattt

SEQ ID NO: 9715 - DNA, 15 bp, synthetic construct
  misc_feature 1..15: note = Description of Artificial Sequence: Synthetic Antisense oligonucleotide
  modified_base 1..2: mod_base = OTHER; note = bicyclic nucleic acid (BNA)
  modified_base 12: mod_base = OTHER; note = 5-methyl
  source 1..15: mol_type = other DNA
aaggaagatggcatt

SEQ ID NO: 9716 - DNA, 14 bp, synthetic construct
  misc_feature 1..14: note = Description of Artificial Sequence: Synthetic Antisense oligonucleotide
  modified_base 1..2: mod_base = OTHER; note = bicyclic nucleic acid (BNA)
  modified_base 12: mod_base = OTHER; note = 5-methyl
  source 1..14: mol_type = other DNA
aaggaagatggcat

SEQ ID NO: 9717 - DNA, 13 bp, synthetic construct
  misc_feature 1..13: note = Description of Artificial Sequence: Synthetic Antisense oligonucleotide
  modified_base 1..2: mod_base = OTHER; note = bicyclic nucleic acid (BNA)
  modified_base 12: mod_base = OTHER; note = 5-methyl
  source 1..13: mol_type = other DNA
aaggaagatggca

SEQ ID NO: 9718 - DNA, 12 bp, synthetic construct
  misc_feature 1..12: note = Description of Artificial Sequence: Synthetic Antisense oligonucleotide
  modified_base 1..2: mod_base = OTHER; note = bicyclic nucleic acid (BNA)
  modified_base 12: mod_base = OTHER; note = 5-methyl
  source 1..12: mol_type = other DNA
aaggaagatggc

SEQ ID NO: 9719 - DNA, 19 bp, synthetic construct
  misc_feature 1..19: note = Description of Artificial Sequence: Synthetic Antisense oligonucleotide
  modified_base 1..2: mod_base = OTHER; note = bicyclic nucleic acid (BNA)
  modified_base 11: mod_base = OTHER; note = 5-methyl
  modified_base 16: mod_base = OTHER; note = 5-methyl
  source 1..19: mol_type = other DNA
aggaagatggcatttctag

SEQ ID NO: 9720 - DNA, 18 bp, synthetic construct
  misc_feature 1..18: note = Description of Artificial Sequence: Synthetic Antisense oligonucleotide
  modified_base 1..2: mod_base = OTHER; note = bicyclic nucleic acid (BNA)
  modified_base 11: mod_base = OTHER; note = 5-methyl
  modified_base 16: mod_base = OTHER; note = 5-methyl
  source 1..18: mol_type = other DNA
aggaagatggcatttcta

SEQ ID NO: 9721 - DNA, 17 bp, synthetic construct
  misc_feature 1..17: note = Description of Artificial Sequence: Synthetic Antisense oligonucleotide
  modified_base 1..2: mod_base = OTHER; note = bicyclic nucleic acid (BNA)
  modified_base 11: mod_base = OTHER; note = 5-methyl
  modified_base 16: mod_base = OTHER; note = 5-methyl
  source 1..17: mol_type = other DNA
aggaagatggcatttct

SEQ ID NO: 9722 - DNA, 16 bp, synthetic construct
  misc_feature 1..16: note = Description of Artificial Sequence: Synthetic Antisense oligonucleotide
  modified_base 1..2: mod_base = OTHER; note = bicyclic nucleic acid (BNA)
  modified_base 11: mod_base = OTHER; note = 5-methyl
  modified_base 16: mod_base = OTHER; note = 5-methyl
  source 1..16: mol_type = other DNA
aggaagatggcatttc

SEQ ID NO: 9723 - DNA, 15 bp, synthetic construct
  misc_feature 1..15: note = Description of Artificial Sequence: Synthetic Antisense oligonucleotide
  modified_base 1..2: mod_base = OTHER; note = bicyclic nucleic acid (BNA)
  modified_base 11: mod_base = OTHER; note = 5-methyl
  source 1..15: mol_type = other DNA
aggaagatggcattt

SEQ ID NO: 9724 - DNA, 14 bp, synthetic construct
  misc_feature 1..14: note = Description of Artificial Sequence: Synthetic Antisense oligonucleotide
  modified_base 1..2: mod_base = OTHER; note = bicyclic nucleic acid (BNA)
  modified_base 11: mod_base = OTHER; note = 5-methyl
  source 1..14: mol_type = other DNA
aggaagatggcatt

SEQ ID NO: 9725 - DNA, 13 bp, synthetic construct
  misc_feature 1..13: note = Description of Artificial Sequence: Synthetic Antisense oligonucleotide
  modified_base 1..2: mod_base = OTHER; note = bicyclic nucleic acid (BNA)
  modified_base 11: mod_base = OTHER; note = 5-methyl
  source 1..13: mol_type = other DNA
aggaagatggcat

SEQ ID NO: 9726 - DNA, 12 bp, synthetic construct
  misc_feature 1..12: note = Description of Artificial Sequence: Synthetic Antisense oligonucleotide
  modified_base 1..2: mod_base = OTHER; note = bicyclic nucleic acid (BNA)
  modified_base 11: mod_base = OTHER; note = 5-methyl
  source 1..12: mol_type = other DNA
aggaagatggca

SEQ ID NO: 9727 - DNA, 18 bp, synthetic construct
  misc_feature 1..18: note = Description of Artificial Sequence: Synthetic Antisense oligonucleotide
  modified_base 1..2: mod_base = OTHER; note = bicyclic nucleic acid (BNA)
  modified_base 10: mod_base = OTHER; note = 5-methyl
  modified_base 15: mod_base = OTHER; note = 5-methyl
  source 1..18: mol_type = other DNA
ggaagatggcatttctag

SEQ ID NO: 9728 - DNA, 17 bp, synthetic construct
  misc_feature 1..17: note = Description of Artificial Sequence: Synthetic Antisense oligonucleotide
  modified_base 1..2: mod_base = OTHER; note = bicyclic nucleic acid (BNA)
  modified_base 10: mod_base = OTHER; note = 5-methyl
  modified_base 15: mod_base = OTHER; note = 5-methyl
  source 1..17: mol_type = other DNA
ggaagatggcatttcta

SEQ ID NO: 9729 - DNA, 16 bp, synthetic construct
  misc_feature 1..16: note = Description of Artificial Sequence: Synthetic Antisense oligonucleotide
  modified_base 1..2: mod_base = OTHER; note = bicyclic nucleic acid (BNA)
  modified_base 10: mod_base = OTHER; note = 5-methyl
  modified_base 15: mod_base = OTHER; note = 5-methyl
  source 1..16: mol_type = other DNA
ggaagatggcatttct

SEQ ID NO: 9730 - DNA, 15 bp, synthetic construct
  misc_feature 1..15: note = Description of Artificial Sequence: Synthetic Antisense oligonucleotide
  modified_base 1..2: mod_base = OTHER; note = bicyclic nucleic acid (BNA)
  modified_base 10: mod_base = OTHER; note = 5-methyl
  modified_base 15: mod_base = OTHER; note = 5-methyl
  source 1..15: mol_type = other DNA
ggaagatggcatttc

SEQ ID NO: 9731 - DNA, 14 bp, synthetic construct
  misc_feature 1..14: note = Description of Artificial Sequence: Synthetic Antisense oligonucleotide
  modified_base 1..2: mod_base = OTHER; note = bicyclic nucleic acid (BNA)
  modified_base 10: mod_base = OTHER; note = 5-methyl
  source 1..14: mol_type = other DNA
ggaagatggcattt

SEQ ID NO: 9732 - DNA, 13 bp, synthetic construct
  misc_feature 1..13: note = Description of Artificial Sequence: Synthetic Antisense oligonucleotide
  modified_base 1..2: mod_base = OTHER; note = bicyclic nucleic acid (BNA)
  modified_base 10: mod_base = OTHER; note = 5-methyl
  source 1..13: mol_type = other DNA
ggaagatggcatt

SEQ ID NO: 9733 - DNA, 12 bp, synthetic construct
  misc_feature 1..12: note = Description of Artificial Sequence: Synthetic Antisense oligonucleotide
  modified_base 1..2: mod_base = OTHER; note = bicyclic nucleic acid (BNA)
  modified_base 10: mod_base = OTHER; note = 5-methyl
  source 1..12: mol_type = other DNA
ggaagatggcat

SEQ ID NO: 9734 - DNA, 11 bp, synthetic construct
  misc_feature 1..11: note = Description of Artificial Sequence: Synthetic Antisense oligonucleotide
  modified_base 1..2: mod_base = OTHER; note = bicyclic nucleic acid (BNA)
  modified_base 10: mod_base = OTHER; note = 5-methyl
  source 1..11: mol_type = other DNA
ggaagatggca

SEQ ID NO: 9735 - DNA, 10 bp, synthetic construct
  misc_feature 1..10: note = Description of Artificial Sequence: Synthetic Antisense oligonucleotide
  modified_base 1..2: mod_base = OTHER; note = bicyclic nucleic acid (BNA)
  modified_base 10: mod_base = OTHER; note = 5-methyl
  source 1..10: mol_type = other DNA
ggaagatggc

SEQ ID NO: 9736 - DNA, 17 bp, synthetic construct
  misc_feature 1..17: note = Description of Artificial Sequence: Synthetic Antisense oligonucleotide
  modified_base 1..2: mod_base = OTHER; note = bicyclic nucleic acid (BNA)
  modified_base 9: mod_base = OTHER; note = 5-methyl
  modified_base 14: mod_base = OTHER; note = 5-methyl
  source 1..17: mol_type = other DNA
gaagatggcatttctag

SEQ ID NO: 9737 - DNA, 16 bp, synthetic construct
  misc_feature 1..16: note = Description of Artificial Sequence: Synthetic Antisense oligonucleotide
  modified_base 1..2: mod_base = OTHER; note = bicyclic nucleic acid (BNA)
  modified_base 9: mod_base = OTHER; note = 5-methyl
  modified_base 14: mod_base = OTHER; note = 5-methyl
  source 1..16: mol_type = other DNA
gaagatggcatttcta

SEQ ID NO: 9738 - DNA, 14 bp, synthetic construct
  misc_feature 1..14: note = Description of Artificial Sequence: Synthetic Antisense oligonucleotide
  modified_base 1..2: mod_base = OTHER; note = bicyclic nucleic acid (BNA)
  modified_base 9: mod_base = OTHER; note = 5-methyl
  modified_base 14: mod_base = OTHER; note = 5-methyl
  source 1..14: mol_type = other DNA
gaagatggcatttc

SEQ ID NO: 9739 - DNA, 13 bp, synthetic construct
  misc_feature 1..13: note = Description of Artificial Sequence: Synthetic Antisense oligonucleotide
  modified_base 1..2: mod_base = OTHER; note = bicyclic nucleic acid (BNA)
  modified_base 9: mod_base = OTHER; note = 5-methyl
  source 1..13: mol_type = other DNA
gaagatggcattt

SEQ ID NO: 9740 - DNA, 12 bp, synthetic construct
  misc_feature 1..12: note = Description of Artificial Sequence: Synthetic Antisense oligonucleotide
  modified_base 1..2: mod_base = OTHER; note = bicyclic nucleic acid (BNA)
  modified_base 9: mod_base = OTHER; note = 5-methyl
  source 1..12: mol_type = other DNA
gaagatggcatt

SEQ ID NO: 9741 - DNA, 11 bp, synthetic construct
  misc_feature 1..11: note = Description of Artificial Sequence: Synthetic Antisense oligonucleotide
  modified_base 1..2: mod_base = OTHER; note = bicyclic nucleic acid (BNA)
  modified_base 9: mod_base = OTHER; note = 5-methyl
  source 1..11: mol_type = other DNA
gaagatggcat

SEQ ID NO: 9742 - DNA, 10 bp, synthetic construct
  misc_feature 1..10: note = Description of Artificial Sequence: Synthetic Antisense oligonucleotide
  modified_base 1..2: mod_base = OTHER; note = bicyclic nucleic acid (BNA)
  modified_base 9: mod_base = OTHER; note = 5-methyl
  source 1..10: mol_type = other DNA
gaagatggca

SEQ ID NO: 9743 - skipped

SEQ ID NO: 9744 - DNA, 16 bp, synthetic construct
  misc_feature 1..16: note = Description of Artificial Sequence: Synthetic Antisense oligonucleotide
  modified_base 1..2: mod_base = OTHER; note = bicyclic nucleic acid (BNA)
  modified_base 8: mod_base = OTHER; note = 5-methyl
  modified_base 13: mod_base = OTHER; note = 5-methyl
  source 1..16: mol_type = other DNA
aagatggcatttctag

SEQ ID NO: 9745 - DNA, 15 bp, synthetic construct
  misc_feature 1..15: note = Description of Artificial Sequence: Synthetic Antisense oligonucleotide
  modified_base 1..2: mod_base = OTHER; note = bicyclic nucleic acid (BNA)
  modified_base 8: mod_base = OTHER; note = 5-methyl
  modified_base 13: mod_base = OTHER; note = 5-methyl
  source 1..15: mol_type = other DNA
aagatggcatttcta

SEQ ID NO: 9746 - DNA, 14 bp, synthetic construct
  misc_feature 1..14: note = Description of Artificial Sequence: Synthetic Antisense oligonucleotide
  modified_base 1..2: mod_base = OTHER; note = bicyclic nucleic acid (BNA)
  modified_base 8: mod_base = OTHER; note = 5-methyl
  modified_base 13: mod_base = OTHER; note = 5-methyl
  source 1..14: mol_type = other DNA
aagatggcatttct

SEQ ID NO: 9747 - DNA, 13 bp, synthetic construct
  misc_feature 1..13: note = Description of Artificial Sequence: Synthetic Antisense oligonucleotide
  modified_base 1..2: mod_base = OTHER; note = bicyclic nucleic acid (BNA)
  modified_base 8: mod_base = OTHER; note = 5-methyl
  modified_base 13: mod_base = OTHER; note = 5-methyl
  source 1..13: mol_type = other DNA
aagatggcatttc

SEQ ID NO: 9748 - DNA, 12 bp, synthetic construct
  misc_feature 1..12: note = Description of Artificial Sequence: Synthetic Antisense oligonucleotide
  modified_base 1..2: mod_base = OTHER; note = bicyclic nucleic acid (BNA)
  modified_base 8: mod_base = OTHER; note = 5-methyl
  source 1..12: mol_type = other DNA
aagatggcattt

SEQ ID NO: 9749 - DNA, 11 bp, synthetic construct
  misc_feature 1..11: note = Description of Artificial Sequence: Synthetic Antisense oligonucleotide
  modified_base 1..2: mod_base = OTHER; note = bicyclic nucleic acid (BNA)
  modified_base 8: mod_base = OTHER; note = 5-methyl
  source 1..11: mol_type = other DNA
aagatggcatt

SEQ ID NO: 9750 - DNA, 10 bp, synthetic construct
  misc_feature 1..10: note = Description of Artificial Sequence: Synthetic Antisense oligonucleotide
  modified_base 1..2: mod_base = OTHER; note = bicyclic nucleic acid (BNA)
  modified_base 8: mod_base = OTHER; note = 5-methyl
  source 1..10: mol_type = other DNA
aagatggcat

SEQ ID NO: 9751-9752 - skipped (2 entries)

SEQ ID NO: 9753 - DNA, 15 bp, synthetic construct
  misc_feature 1..15: note = Description of Artificial Sequence: Synthetic Antisense oligonucleotide
  modified_base 1..2: mod_base = OTHER; note = bicyclic nucleic acid (BNA)
  modified_base 7: mod_base = OTHER; note = 5-methyl
  modified_base 12: mod_base = OTHER; note = 5-methyl
  source 1..15: mol_type = other DNA
agatggcatttctag

SEQ ID NO: 9754 - DNA, 14 bp, synthetic construct
  misc_feature 1..14: note = Description of Artificial Sequence: Synthetic Antisense oligonucleotide
  modified_base 1..2: mod_base = OTHER; note = bicyclic nucleic acid (BNA)
  modified_base 7: mod_base = OTHER; note = 5-methyl
  modified_base 12: mod_base = OTHER; note = 5-methyl
  source 1..14: mol_type = other DNA
agatggcatttcta

SEQ ID NO: 9755 - DNA, 13 bp, synthetic construct
  misc_feature 1..13: note = Description of Artificial Sequence: Synthetic Antisense oligonucleotide
  modified_base 1..2: mod_base = OTHER; note = bicyclic nucleic acid (BNA)
  modified_base 7: mod_base = OTHER; note = 5-methyl
  modified_base 12: mod_base = OTHER; note = 5-methyl
  source 1..13: mol_type = other DNA
agatggcatttct

SEQ ID NO: 9756 - DNA, 12 bp, synthetic construct
  misc_feature 1..12: note = Description of Artificial Sequence: Synthetic Antisense oligonucleotide
  modified_base 1..2: mod_base = OTHER; note = bicyclic nucleic acid (BNA)
  modified_base 7: mod_base = OTHER; note = 5-methyl
  modified_base 12: mod_base = OTHER; note = 5-methyl
  source 1..12: mol_type = other DNA
agatggcatttc

SEQ ID NO: 9757 - DNA, 11 bp, synthetic construct
  misc_feature 1..11: note = Description of Artificial Sequence: Synthetic Antisense oligonucleotide
  modified_base 1..2: mod_base = OTHER; note = bicyclic nucleic acid (BNA)
  modified_base 7: mod_base = OTHER; note = 5-methyl
  source 1..11: mol_type = other DNA
agatggcattt

SEQ ID NO: 9758 - DNA, 10 bp, synthetic construct
  misc_feature 1..10: note = Description of Artificial Sequence: Synthetic Antisense oligonucleotide
  modified_base 1..2: mod_base = OTHER; note = bicyclic nucleic acid (BNA)
  modified_base 7: mod_base = OTHER; note = 5-methyl
  source 1..10: mol_type = other DNA
agatggcatt

SEQ ID NO: 9759-9760 - skipped (2 entries)

SEQ ID NO: 9761 - DNA, 30 bp, synthetic construct; identical to SEQ ID NO: 8
  misc_feature 1..30: note = Description of Artificial Sequence: Synthetic Antisense oligonucleotide
  modified_base 1: mod_base = OTHER; note = 5-methyl
  modified_base 3..4: mod_base = OTHER; note = 5-methyl
  modified_base 7: mod_base = OTHER; note = 5-methyl
  modified_base 10: mod_base = OTHER; note = 5-methyl
  modified_base 22: mod_base = OTHER; note = 5-methyl
  modified_base 27: mod_base = OTHER; note = 5-methyl
  modified_base 1..2: mod_base = OTHER; note = bicyclic nucleic acid (BNA)
  source 1..30: mol_type = other DNA

SEQ ID NO: 9762 - DNA, 29 bp, synthetic construct
  misc_feature 1..29: note = Description of Artificial Sequence: Synthetic Antisense oligonucleotide
  modified_base 1: mod_base = OTHER; note = 5-methyl
  modified_base 3..4: mod_base = OTHER; note = 5-methyl
  modified_base 7: mod_base = OTHER; note = 5-methyl
  modified_base 10: mod_base = OTHER; note = 5-methyl
  modified_base 22: mod_base = OTHER; note = 5-methyl
  modified_base 27: mod_base = OTHER; note = 5-methyl
  modified_base 1..2: mod_base = OTHER; note = bicyclic nucleic acid (BNA)
  source 1..29: mol_type = other DNA
ctccaacatcaaggaagatggcatttcta

SEQ ID NO: 9763 - DNA, 28 bp, synthetic construct
  misc_feature 1..28: note = Description of Artificial Sequence: Synthetic Antisense oligonucleotide
  modified_base 1: mod_base = OTHER; note = 5-methyl
  modified_base 3..4: mod_base = OTHER; note = 5-methyl
  modified_base 7: mod_base = OTHER; note = 5-methyl
  modified_base 10: mod_base = OTHER; note = 5-methyl
  modified_base 22: mod_base = OTHER; note = 5-methyl
  modified_base 27: mod_base = OTHER; note = 5-methyl
  modified_base 1..2: mod_base = OTHER; note = bicyclic nucleic acid (BNA)
  source 1..28: mol_type = other DNA
ctccaacatcaaggaagatggcatttct

SEQ ID NO: 9764 - DNA, 27 bp, synthetic construct
  misc_feature 1..27: note = Description of Artificial Sequence: Synthetic Antisense oligonucleotide
  modified_base 1: mod_base = OTHER; note = 5-methyl
  modified_base 3..4: mod_base = OTHER; note = 5-methyl
  modified_base 7: mod_base = OTHER; note = 5-methyl
  modified_base 10: mod_base = OTHER; note = 5-methyl
  modified_base 22: mod_base = OTHER; note = 5-methyl
  modified_base 27: mod_base = OTHER; note = 5-methyl
  modified_base 1..2: mod_base = OTHER; note = bicyclic nucleic acid (BNA)
  source 1..27: mol_type = other DNA
ctccaacatcaaggaagatggcatttc

SEQ ID NO: 9765 - DNA, 26 bp, synthetic construct
  misc_feature 1..26: note = Description of Artificial Sequence: Synthetic Antisense oligonucleotide
  modified_base 1: mod_base = OTHER; note = 5-methyl
  modified_base 3..4: mod_base = OTHER; note = 5-methyl
  modified_base 7: mod_base = OTHER; note = 5-methyl
  modified_base 10: mod_base = OTHER; note = 5-methyl
  modified_base 22: mod_base = OTHER; note = 5-methyl
  modified_base 1..2: mod_base = OTHER; note = bicyclic nucleic acid (BNA)
  source 1..26: mol_type = other DNA
ctccaacatcaaggaagatggcattt

SEQ ID NO: 9766 - DNA, 25 bp, synthetic construct
  misc_feature 1..25: note = Description of Artificial Sequence: Synthetic Antisense oligonucleotide
  modified_base 1: mod_base = OTHER; note = 5-methyl
  modified_base 3..4: mod_base = OTHER; note = 5-methyl
  modified_base 7: mod_base = OTHER; note = 5-methyl
  modified_base 10: mod_base = OTHER; note = 5-methyl
  modified_base 22: mod_base = OTHER; note = 5-methyl
  modified_base 1..2: mod_base = OTHER; note = bicyclic nucleic acid (BNA)
  source 1..25: mol_type = other DNA
ctccaacatcaaggaagatggcatt

SEQ ID NO: 9767 - DNA, 24 bp, synthetic construct
  misc_feature 1..24: note = Description of Artificial Sequence: Synthetic Antisense oligonucleotide
  modified_base 1: mod_base = OTHER; note = 5-methyl
  modified_base 3..4: mod_base = OTHER; note = 5-methyl
  modified_base 7: mod_base = OTHER; note = 5-methyl
  modified_base 10: mod_base = OTHER; note = 5-methyl
  modified_base 22: mod_base = OTHER; note = 5-methyl
  modified_base 1..2: mod_base = OTHER; note = bicyclic nucleic acid (BNA)
  source 1..24: mol_type = other DNA
ctccaacatcaaggaagatggcat

SEQ ID NO: 9768 - DNA, 23 bp, synthetic construct
  misc_feature 1..23: note = Description of Artificial Sequence: Synthetic Antisense oligonucleotide
  modified_base 1: mod_base = OTHER; note = 5-methyl
  modified_base 3..4: mod_base = OTHER; note = 5-methyl
  modified_base 7: mod_base = OTHER; note = 5-methyl
  modified_base 10: mod_base = OTHER; note = 5-methyl
  modified_base 22: mod_base = OTHER; note = 5-methyl
  modified_base 1..2: mod_base = OTHER; note = bicyclic nucleic acid (BNA)
  source 1..23: mol_type = other DNA
ctccaacatcaaggaagatggca

SEQ ID NO: 9769 - DNA, 22 bp, synthetic construct
  misc_feature 1..22: note = Description of Artificial Sequence: Synthetic Antisense oligonucleotide
  modified_base 1: mod_base = OTHER; note = 5-methyl
  modified_base 3..4: mod_base = OTHER; note = 5-methyl
  modified_base 7: mod_base = OTHER; note = 5-methyl
  modified_base 10: mod_base = OTHER; note = 5-methyl
  modified_base 22: mod_base = OTHER; note = 5-methyl
  modified_base 1..2: mod_base = OTHER; note = bicyclic nucleic acid (BNA)
  source 1..22: mol_type = other DNA
ctccaacatcaaggaagatggc

SEQ ID NO: 9770 - DNA, 21 bp, synthetic construct
  misc_feature 1..21: note = Description of Artificial Sequence: Synthetic Antisense oligonucleotide
  modified_base 1: mod_base = OTHER; note = 5-methyl
  modified_base 3..4: mod_base = OTHER; note = 5-methyl
  modified_base 7: mod_base = OTHER; note = 5-methyl
  modified_base 10: mod_base = OTHER; note = 5-methyl
  modified_base 1..2: mod_base = OTHER; note = bicyclic nucleic acid (BNA)
  source 1..21: mol_type = other DNA
ctccaacatcaaggaagatgg

SEQ ID NO: 9771 - DNA, 20 bp, synthetic construct
  misc_feature 1..20: note = Description of Artificial Sequence: Synthetic Antisense oligonucleotide
  modified_base 1: mod_base = OTHER; note = 5-methyl
  modified_base 3..4: mod_base = OTHER; note = 5-methyl
  modified_base 7: mod_base = OTHER; note = 5-methyl
  modified_base 10: mod_base = OTHER; note = 5-methyl
  modified_base 1..2: mod_base = OTHER; note = bicyclic nucleic acid (BNA)
  source 1..20: mol_type = other DNA
ctccaacatcaaggaagatg

SEQ ID NO: 9772 - DNA, 19 bp, synthetic construct
  misc_feature 1..19: note = Description of Artificial Sequence: Synthetic Antisense oligonucleotide
  modified_base 1: mod_base = OTHER; note = 5-methyl
  modified_base 3..4: mod_base = OTHER; note = 5-methyl
  modified_base 7: mod_base = OTHER; note = 5-methyl
  modified_base 10: mod_base = OTHER; note = 5-methyl
  modified_base 1..2: mod_base = OTHER; note = bicyclic nucleic acid (BNA)
  source 1..19: mol_type = other DNA
ctccaacatcaaggaagat

SEQ ID NO: 9773 - DNA, 18 bp, synthetic construct
  misc_feature 1..18: note = Description of Artificial Sequence: Synthetic Antisense oligonucleotide
  modified_base 1: mod_base = OTHER; note = 5-methyl
  modified_base 3..4: mod_base = OTHER; note = 5-methyl
  modified_base 7: mod_base = OTHER; note = 5-methyl
  modified_base 10: mod_base = OTHER; note = 5-methyl
  modified_base 1..2: mod_base = OTHER; note = bicyclic nucleic acid (BNA)
  source 1..18: mol_type = other DNA
ctccaacatcaaggaaga

SEQ ID NO: 9774 - DNA, 17 bp, synthetic construct
  misc_feature 1..17: note = Description of Artificial Sequence: Synthetic Antisense oligonucleotide
  modified_base 1: mod_base = OTHER; note = 5-methyl
  modified_base 3..4: mod_base = OTHER; note = 5-methyl
  modified_base 7: mod_base = OTHER; note = 5-methyl
  modified_base 10: mod_base = OTHER; note = 5-methyl
  modified_base 1..2: mod_base = OTHER; note = bicyclic nucleic acid (BNA)
  source 1..17: mol_type = other DNA
ctccaacatcaaggaag

SEQ ID NO: 9775 - DNA, 29 bp, synthetic construct
  misc_feature 1..29: note = Description of Artificial Sequence: Synthetic Antisense oligonucleotide
  modified_base 1..2: mod_base = OTHER; note = bicyclic nucleic acid (BNA)
  modified_base 2..3: mod_base = OTHER; note = 5-methyl
  modified_base 6: mod_base = OTHER; note = 5-methyl
  modified_base 9: mod_base = OTHER; note = 5-methyl
  modified_base 21: mod_base = OTHER; note = 5-methyl
  modified_base 26: mod_base = OTHER; note = 5-methyl
  source 1..29: mol_type = other DNA
tccaacatcaaggaagatggcatttctag

SEQ ID NO: 9776 - DNA, 28 bp, synthetic construct
  misc_feature 1..28: note = Description of Artificial Sequence: Synthetic Antisense oligonucleotide
  modified_base 1..2: mod_base = OTHER; note = bicyclic nucleic acid (BNA)
  modified_base 2..3: mod_base = OTHER; note = 5-methyl
  modified_base 6: mod_base = OTHER; note = 5-methyl
  modified_base 9: mod_base = OTHER; note = 5-methyl
  modified_base 21: mod_base = OTHER; note = 5-methyl
  modified_base 26: mod_base = OTHER; note = 5-methyl
  source 1..28: mol_type = other DNA
tccaacatcaaggaagatggcatttcta

SEQ ID NO: 9777 - DNA, 27 bp, synthetic construct
  misc_feature 1..27: note = Description of Artificial Sequence: Synthetic Antisense oligonucleotide
  modified_base 1..2: mod_base = OTHER; note = bicyclic nucleic acid (BNA)
  modified_base 2..3: mod_base = OTHER; note = 5-methyl
  modified_base 6: mod_base = OTHER; note = 5-methyl
  modified_base 9: mod_base = OTHER; note = 5-methyl
  modified_base 21: mod_base = OTHER; note = 5-methyl
  modified_base 26: mod_base = OTHER; note = 5-methyl
  source 1..27: mol_type = other DNA
tccaacatcaaggaagatggcatttct

SEQ ID NO: 9778 - DNA, 26 bp, synthetic construct
  misc_feature 1..26: note = Description of Artificial Sequence: Synthetic Antisense oligonucleotide
  modified_base 1..2: mod_base = OTHER; note = bicyclic nucleic acid (BNA)
  modified_base 2..3: mod_base = OTHER; note = 5-methyl
  modified_base 6: mod_base = OTHER; note = 5-methyl
  modified_base 9: mod_base = OTHER; note = 5-methyl
  modified_base 21: mod_base = OTHER; note = 5-methyl
  modified_base 26: mod_base = OTHER; note = 5-methyl
  source 1..26: mol_type = other DNA
tccaacatcaaggaagatggcatttc

SEQ ID NO: 9779 - DNA, 25 bp, synthetic construct
  misc_feature 1..25: note = Description of Artificial Sequence: Synthetic Antisense oligonucleotide
  modified_base 1..2: mod_base = OTHER; note = bicyclic nucleic acid (BNA)
  modified_base 2..3: mod_base = OTHER; note = 5-methyl
  modified_base 6: mod_base = OTHER; note = 5-methyl
  modified_base 9: mod_base = OTHER; note = 5-methyl
  modified_base 21: mod_base = OTHER; note = 5-methyl
  source 1..25: mol_type = other DNA
tccaacatcaaggaagatggcattt

SEQ ID NO: 9780 - DNA, 24 bp, synthetic construct
  misc_feature 1..24: note = Description of Artificial Sequence: Synthetic Antisense oligonucleotide
  modified_base 1..2: mod_base = OTHER; note = bicyclic nucleic acid (BNA)
  modified_base 2..3: mod_base = OTHER; note = 5-methyl
  modified_base 6: mod_base = OTHER; note = 5-methyl
  modified_base 9: mod_base = OTHER; note = 5-methyl
  modified_base 21: mod_base = OTHER; note = 5-methyl
  source 1..24: mol_type = other DNA
tccaacatcaaggaagatggcatt

SEQ ID NO: 9781 - DNA, 23 bp, synthetic construct
  misc_feature 1..23: note = Description of Artificial Sequence: Synthetic Antisense oligonucleotide
  modified_base 1..2: mod_base = OTHER; note = bicyclic nucleic acid (BNA)
  modified_base 2..3: mod_base = OTHER; note = 5-methyl
  modified_base 6: mod_base = OTHER; note = 5-methyl
  modified_base 9: mod_base = OTHER; note = 5-methyl
  modified_base 21: mod_base = OTHER; note = 5-methyl
  source 1..23: mol_type = other DNA
tccaacatcaaggaagatggcat

SEQ ID NO: 9782 - DNA, 22 bp, synthetic construct
  misc_feature 1..22: note = Description of Artificial Sequence: Synthetic Antisense oligonucleotide
  modified_base 1..2: mod_base = OTHER; note = bicyclic nucleic acid (BNA)
  modified_base 2..3: mod_base = OTHER; note = 5-methyl
  modified_base 6: mod_base = OTHER; note = 5-methyl
  modified_base 9: mod_base = OTHER; note = 5-methyl
  modified_base 21: mod_base = OTHER; note = 5-methyl
  source 1..22: mol_type = other DNA
tccaacatcaaggaagatggca

SEQ ID NO: 9783 - DNA, 21 bp, synthetic construct
  misc_feature 1..21: note = Description of Artificial Sequence: Synthetic Antisense oligonucleotide
  modified_base 1..2: mod_base = OTHER; note = bicyclic nucleic acid (BNA)
  modified_base 2..3: mod_base = OTHER; note = 5-methyl
  modified_base 6: mod_base = OTHER; note = 5-methyl
  modified_base 9: mod_base = OTHER; note = 5-methyl
  modified_base 21: mod_base = OTHER; note = 5-methyl
  source 1..21: mol_type = other DNA
tccaacatcaaggaagatggc

SEQ ID NO: 9784 - DNA, 20 bp, synthetic construct
  misc_feature 1..20: note = Description of Artificial Sequence: Synthetic Antisense oligonucleotide
  modified_base 1..2: mod_base = OTHER; note = bicyclic nucleic acid (BNA)
  modified_base 2..3: mod_base = OTHER; note = 5-methyl
  modified_base 6: mod_base = OTHER; note = 5-methyl
  modified_base 9: mod_base = OTHER; note = 5-methyl
  source 1..20: mol_type = other DNA
tccaacatcaaggaagatgg

SEQ ID NO: 9785 - DNA, 19 bp, synthetic construct
  misc_feature 1..19: note = Description of Artificial Sequence: Synthetic Antisense oligonucleotide
  modified_base 1..2: mod_base = OTHER; note = bicyclic nucleic acid (BNA)
  modified_base 2..3: mod_base = OTHER; note = 5-methyl
  modified_base 6: mod_base = OTHER; note = 5-methyl
  modified_base 9: mod_base = OTHER; note = 5-methyl
  source 1..19: mol_type = other DNA
tccaacatcaaggaagatg

SEQ ID NO: 9786 - DNA, 18 bp, synthetic construct
  misc_feature 1..18: note = Description of Artificial Sequence: Synthetic Antisense oligonucleotide
  modified_base 1..2: mod_base = OTHER; note = bicyclic nucleic acid (BNA)
  modified_base 2..3: mod_base = OTHER; note = 5-methyl
  modified_base 6: mod_base = OTHER; note = 5-methyl
  modified_base 9: mod_base = OTHER; note = 5-methyl
  source 1..18: mol_type = other DNA
tccaacatcaaggaagat

SEQ ID NO: 9787 - DNA, 17 bp, synthetic construct
  misc_feature 1..17: note = Description of Artificial Sequence: Synthetic Antisense oligonucleotide
  modified_base 1..2: mod_base = OTHER; note = bicyclic nucleic acid (BNA)
  modified_base 2..3: mod_base = OTHER; note = 5-methyl
  modified_base 6: mod_base = OTHER; note = 5-methyl
  modified_base 9: mod_base = OTHER; note = 5-methyl
  source 1..17: mol_type = other DNA
tccaacatcaaggaaga

SEQ ID NO: 9788 - DNA, 16 bp, synthetic construct
  misc_feature 1..16: note = Description of Artificial Sequence: Synthetic Antisense oligonucleotide
  modified_base 1..2: mod_base = OTHER; note = bicyclic nucleic acid (BNA)
  modified_base 2..3: mod_base = OTHER; note = 5-methyl
  modified_base 6: mod_base = OTHER; note = 5-methyl
  modified_base 9: mod_base = OTHER; note = 5-methyl
  source 1..16: mol_type = other DNA
tccaacatcaaggaag

SEQ ID NO: 9789 - DNA, 28 bp, synthetic construct
  misc_feature 1..28: note = Description of Artificial Sequence: Synthetic Antisense oligonucleotide
  modified_base 1..2: mod_base = OTHER; note = 5-methyl
  modified_base 5: mod_base = OTHER; note = 5-methyl
  modified_base 8: mod_base = OTHER; note = 5-methyl
  modified_base 20: mod_base = OTHER; note = 5-methyl
  modified_base 25: mod_base = OTHER; note = 5-methyl
  modified_base 1..2: mod_base = OTHER; note = bicyclic nucleic acid (BNA)
  source 1..28: mol_type = other DNA
ccaacatcaaggaagatggcatttctag

SEQ ID NO: 9790 - DNA, 27 bp, synthetic construct
  misc_feature 1..27: note = Description of Artificial Sequence: Synthetic Antisense oligonucleotide
  modified_base 1..2: mod_base = OTHER; note = 5-methyl
  modified_base 5: mod_base = OTHER; note = 5-methyl
  modified_base 8: mod_base = OTHER; note = 5-methyl
  modified_base 20: mod_base = OTHER; note = 5-methyl
  modified_base 25: mod_base = OTHER; note = 5-methyl
  modified_base 1..2: mod_base = OTHER; note = bicyclic nucleic acid (BNA)
  source 1..27: mol_type = other DNA
ccaacatcaaggaagatggcatttcta

SEQ ID NO: 9791 - DNA, 26 bp, synthetic construct
  misc_feature 1..26: note = Description of Artificial Sequence: Synthetic Antisense oligonucleotide
  modified_base 1..2: mod_base = OTHER; note = 5-methyl
  modified_base 5: mod_base = OTHER; note = 5-methyl
  modified_base 8: mod_base = OTHER; note = 5-methyl
  modified_base 20: mod_base = OTHER; note = 5-methyl
  modified_base 25: mod_base = OTHER; note = 5-methyl
  modified_base 1..2: mod_base = OTHER; note = bicyclic nucleic acid (BNA)
  source 1..26: mol_type = other DNA
ccaacatcaaggaagatggcatttct

SEQ ID NO: 9792 - DNA, 25 bp, synthetic construct
  misc_feature 1..25: note = Description of Artificial Sequence: Synthetic Antisense oligonucleotide
  modified_base 1..2: mod_base = OTHER; note = 5-methyl
  modified_base 5: mod_base = OTHER; note = 5-methyl
  modified_base 8: mod_base = OTHER; note = 5-methyl
  modified_base 20: mod_base = OTHER; note = 5-methyl
  modified_base 25: mod_base = OTHER; note = 5-methyl
  modified_base 1..2: mod_base = OTHER; note = bicyclic nucleic acid (BNA)
  source 1..25: mol_type = other DNA
ccaacatcaaggaagatggcatttc

SEQ ID NO: 9793 - DNA, 24 bp, synthetic construct
  misc_feature 1..24: note = Description of Artificial Sequence: Synthetic Antisense oligonucleotide
  modified_base 1..2: mod_base = OTHER; note = 5-methyl
  modified_base 5: mod_base = OTHER; note = 5-methyl
  modified_base 8: mod_base = OTHER; note = 5-methyl
  modified_base 20: mod_base = OTHER; note = 5-methyl
  modified_base 1..2: mod_base = OTHER; note = bicyclic nucleic acid (BNA)
  source 1..24: mol_type = other DNA
ccaacatcaaggaagatggcattt

SEQ ID NO: 9794 - DNA, 23 bp, synthetic construct
  misc_feature 1..23: note = Description of Artificial Sequence: Synthetic Antisense oligonucleotide
  modified_base 1..2: mod_base = OTHER; note = 5-methyl
  modified_base 5: mod_base = OTHER; note = 5-methyl
  modified_base 8: mod_base = OTHER; note = 5-methyl
  modified_base 20: mod_base = OTHER; note = 5-methyl
  modified_base 1..2: mod_base = OTHER; note = bicyclic nucleic acid (BNA)
  source 1..23: mol_type = other DNA
ccaacatcaaggaagatggcatt

SEQ ID NO: 9795 - DNA, 22 bp, synthetic construct
  misc_feature 1..22: note = Description of Artificial Sequence: Synthetic Antisense oligonucleotide
  modified_base 1..2: mod_base = OTHER; note = 5-methyl
  modified_base 5: mod_base = OTHER; note = 5-methyl
  modified_base 8: mod_base = OTHER; note = 5-methyl
  modified_base 20: mod_base = OTHER; note = 5-methyl
  modified_base 1..2: mod_base = OTHER; note = bicyclic nucleic acid (BNA)
  source 1..22: mol_type = other DNA
ccaacatcaaggaagatggcat

SEQ ID NO: 9796 - DNA, 21 bp, synthetic construct
  misc_feature 1..21: note = Description of Artificial Sequence: Synthetic Antisense oligonucleotide
  modified_base 1..2: mod_base = OTHER; note = 5-methyl
  modified_base 5: mod_base = OTHER; note = 5-methyl
  modified_base 8: mod_base = OTHER; note = 5-methyl
  modified_base 20: mod_base = OTHER; note = 5-methyl
  modified_base 1..2: mod_base = OTHER; note = bicyclic nucleic acid (BNA)
  source 1..21: mol_type = other DNA
ccaacatcaaggaagatggca

SEQ ID NO: 9797 - DNA, 20 bp, synthetic construct
  misc_feature 1..20: note = Description of Artificial Sequence: Synthetic Antisense oligonucleotide
  modified_base 1..2: mod_base = OTHER; note = 5-methyl
  modified_base 5: mod_base = OTHER; note = 5-methyl
  modified_base 8: mod_base = OTHER; note = 5-methyl
  modified_base 20: mod_base = OTHER; note = 5-methyl
  modified_base 1..2: mod_base = OTHER; note = bicyclic nucleic acid (BNA)
  source 1..20: mol_type = other DNA
ccaacatcaaggaagatggc

SEQ ID NO: 9798 - DNA, 19 bp, synthetic construct
  misc_feature 1..19: note = Description of Artificial Sequence: Synthetic Antisense oligonucleotide
  modified_base 1..2: mod_base = OTHER; note = 5-methyl
  modified_base 5: mod_base = OTHER; note = 5-methyl
  modified_base 8: mod_base = OTHER; note = 5-methyl
  modified_base 1..2: mod_base = OTHER; note = bicyclic nucleic acid (BNA)
  source 1..19: mol_type = other DNA
ccaacatcaaggaagatgg

SEQ ID NO: 9799 - DNA, 18 bp, synthetic construct
  misc_feature 1..18: note = Description of Artificial Sequence: Synthetic Antisense oligonucleotide
  modified_base 1..2: mod_base = OTHER; note = 5-methyl
  modified_base 5: mod_base = OTHER; note = 5-methyl
  modified_base 8: mod_base = OTHER; note = 5-methyl
  modified_base 1..2: mod_base = OTHER; note = bicyclic nucleic acid (BNA)
  source 1..18: mol_type = other DNA
ccaacatcaaggaagatg

SEQ ID NO: 9800 - DNA, 17 bp, synthetic construct
  misc_feature 1..17: note = Description of Artificial Sequence: Synthetic Antisense oligonucleotide
  modified_base 1..2: mod_base = OTHER; note = 5-methyl
  modified_base 5: mod_base = OTHER; note = 5-methyl
  modified_base 8: mod_base = OTHER; note = 5-methyl
  modified_base 1..2: mod_base = OTHER; note = bicyclic nucleic acid (BNA)
  source 1..17: mol_type = other DNA
ccaacatcaaggaagat

SEQ ID NO: 9801 - DNA, 16 bp, synthetic construct
  misc_feature 1..16: note = Description of Artificial Sequence: Synthetic Antisense oligonucleotide
  modified_base 1..2: mod_base = OTHER; note = 5-methyl
  modified_base 5: mod_base = OTHER; note = 5-methyl
  modified_base 8: mod_base = OTHER; note = 5-methyl
  modified_base 1..2: mod_base = OTHER; note = bicyclic nucleic acid (BNA)
  source 1..16: mol_type = other DNA
ccaacatcaaggaaga

SEQ ID NO: 9802 - DNA, 15 bp, synthetic construct
  misc_feature 1..15: note = Description of Artificial Sequence: Synthetic Antisense oligonucleotide
  modified_base 1..2: mod_base = OTHER; note = 5-methyl
  modified_base 5: mod_base = OTHER; note = 5-methyl
  modified_base 8: mod_base = OTHER; note = 5-methyl
  modified_base 1..2: mod_base = OTHER; note = bicyclic nucleic acid (BNA)
  source 1..15: mol_type = other DNA
ccaacatcaaggaag

SEQ ID NO: 9803 - DNA, 27 bp, synthetic construct
  misc_feature 1..27: note = Description of Artificial Sequence: Synthetic Antisense oligonucleotide
  modified_base 1: mod_base = OTHER; note = 5-methyl
  modified_base 4: mod_base = OTHER; note = 5-methyl
  modified_base 7: mod_base = OTHER; note = 5-methyl
  modified_base 19: mod_base = OTHER; note = 5-methyl
  modified_base 24: mod_base = OTHER; note = 5-methyl
  modified_base 1..2: mod_base = OTHER; note = bicyclic nucleic acid (BNA)
  source 1..27: mol_type = other DNA
caacatcaaggaagatggcatttctag

SEQ ID NO: 9804 - DNA, 26 bp, synthetic construct
  misc_feature 1..26: note = Description of Artificial Sequence: Synthetic Antisense oligonucleotide
  modified_base 1: mod_base = OTHER; note = 5-methyl
  modified_base 4: mod_base = OTHER; note = 5-methyl
  modified_base 7: mod_base = OTHER; note = 5-methyl
  modified_base 19: mod_base = OTHER; note = 5-methyl
  modified_base 24: mod_base = OTHER; note = 5-methyl
  modified_base 1..2: mod_base = OTHER; note = bicyclic nucleic acid (BNA)
  source 1..26: mol_type = other DNA
caacatcaaggaagatggcatttcta

SEQ ID NO: 9805 - DNA, 25 bp, synthetic construct
  misc_feature 1..25: note = Description of Artificial Sequence: Synthetic Antisense oligonucleotide
  modified_base 1: mod_base = OTHER; note = 5-methyl
  modified_base 4: mod_base = OTHER; note = 5-methyl
  modified_base 7: mod_base = OTHER; note = 5-methyl
  modified_base 19: mod_base = OTHER; note = 5-methyl
  modified_base 24: mod_base = OTHER; note = 5-methyl
  modified_base 1..2: mod_base = OTHER; note = bicyclic nucleic acid (BNA)
  source 1..25: mol_type = other DNA
caacatcaaggaagatggcatttct

SEQ ID NO: 9806 - DNA, 24 bp, synthetic construct
  misc_feature 1..24: note = Description of Artificial Sequence: Synthetic Antisense oligonucleotide
  modified_base 1: mod_base = OTHER; note = 5-methyl
  modified_base 4: mod_base = OTHER; note = 5-methyl
  modified_base 7: mod_base = OTHER; note = 5-methyl
  modified_base 19: mod_base = OTHER; note = 5-methyl
  modified_base 24: mod_base = OTHER; note = 5-methyl
  modified_base 1..2: mod_base = OTHER; note = bicyclic nucleic acid (BNA)
  source 1..24: mol_type = other DNA
caacatcaaggaagatggcatttc

SEQ ID NO: 9807 - DNA, 23 bp, synthetic construct
  misc_feature 1..23: note = Description of Artificial Sequence: Synthetic Antisense oligonucleotide
  modified_base 1: mod_base = OTHER; note = 5-methyl
  modified_base 4: mod_base = OTHER; note = 5-methyl
  modified_base 7: mod_base = OTHER; note = 5-methyl
  modified_base 19: mod_base = OTHER; note = 5-methyl
  modified_base 1..2: mod_base = OTHER; note = bicyclic nucleic acid (BNA)
  source 1..23: mol_type = other DNA
caacatcaaggaagatggcattt

SEQ ID NO: 9808 - DNA, 22 bp, synthetic construct
  misc_feature 1..22: note = Description of Artificial Sequence: Synthetic Antisense oligonucleotide
  modified_base 1: mod_base = OTHER; note = 5-methyl
  modified_base 4: mod_base = OTHER; note = 5-methyl
  modified_base 7: mod_base = OTHER; note = 5-methyl
  modified_base 19: mod_base = OTHER; note = 5-methyl
  modified_base 1..2: mod_base = OTHER; note = bicyclic nucleic acid (BNA)
  source 1..22: mol_type = other DNA
caacatcaaggaagatggcatt

SEQ ID NO: 9809 - DNA, 21 bp, synthetic construct
  misc_feature 1..21: note = Description of Artificial Sequence: Synthetic Antisense oligonucleotide
  modified_base 1: mod_base = OTHER; note = 5-methyl
  modified_base 4: mod_base = OTHER; note = 5-methyl
  modified_base 7: mod_base = OTHER; note = 5-methyl
  modified_base 19: mod_base = OTHER; note = 5-methyl
  modified_base 1..2: mod_base = OTHER; note = bicyclic nucleic acid (BNA)
  source 1..21: mol_type = other DNA
caacatcaaggaagatggcat

SEQ ID NO: 9810 - DNA, 20 bp, synthetic construct
  misc_feature 1..20: note = Description of Artificial Sequence: Synthetic Antisense oligonucleotide
  modified_base 1: mod_base = OTHER; note = 5-methyl
  modified_base 4: mod_base = OTHER; note = 5-methyl
  modified_base 7: mod_base = OTHER; note = 5-methyl
  modified_base 19: mod_base = OTHER; note = 5-methyl
  modified_base 1..2: mod_base = OTHER; note = bicyclic nucleic acid (BNA)
  source 1..20: mol_type = other DNA
caacatcaaggaagatggca

SEQ ID NO: 9811 - DNA, 19 bp, synthetic construct
  misc_feature 1..19: note = Description of Artificial Sequence: Synthetic Antisense oligonucleotide
  modified_base 1: mod_base = OTHER; note = 5-methyl
  modified_base 4: mod_base = OTHER; note = 5-methyl
  modified_base 7: mod_base = OTHER; note = 5-methyl
  modified_base 19: mod_base = OTHER; note = 5-methyl
  modified_base 1..2: mod_base = OTHER; note = bicyclic nucleic acid (BNA)
  source 1..19: mol_type = other DNA
caacatcaaggaagatggc

SEQ ID NO: 9812 - DNA, 18 bp, synthetic construct
  misc_feature 1..18: note = Description of Artificial Sequence: Synthetic Antisense oligonucleotide
  modified_base 1: mod_base = OTHER; note = 5-methyl
  modified_base 4: mod_base = OTHER; note = 5-methyl
  modified_base 7: mod_base = OTHER; note = 5-methyl
  modified_base 1..2: mod_base = OTHER; note = bicyclic nucleic acid (BNA)
  source 1..18: mol_type = other DNA
caacatcaaggaagatgg

SEQ ID NO: 9813 - DNA, 17 bp, synthetic construct
  misc_feature 1..17: note = Description of Artificial Sequence: Synthetic Antisense oligonucleotide
  modified_base 1: mod_base = OTHER; note = 5-methyl
  modified_base 4: mod_base = OTHER; note = 5-methyl
  modified_base 7: mod_base = OTHER; note = 5-methyl
  modified_base 1..2: mod_base = OTHER; note = bicyclic nucleic acid (BNA)
  source 1..17: mol_type = other DNA
caacatcaaggaagatg

SEQ ID NO: 9814 - DNA, 16 bp, synthetic construct
  misc_feature 1..16: note = Description of Artificial Sequence: Synthetic Antisense oligonucleotide
  modified_base 1: mod_base = OTHER; note = 5-methyl
  modified_base 4: mod_base = OTHER; note = 5-methyl
  modified_base 7: mod_base = OTHER; note = 5-methyl
  modified_base 1..2: mod_base = OTHER; note = bicyclic nucleic acid (BNA)
  source 1..16: mol_type = other DNA
caacatcaaggaagat

SEQ ID NO: 9815 - DNA, 15 bp, synthetic construct
  misc_feature 1..15: note = Description of Artificial Sequence: Synthetic Antisense oligonucleotide
  modified_base 1: mod_base = OTHER; note = 5-methyl
  modified_base 4: mod_base = OTHER; note = 5-methyl
  modified_base 7: mod_base = OTHER; note = 5-methyl
  modified_base 1..2: mod_base = OTHER; note = bicyclic nucleic acid (BNA)
  source 1..15: mol_type = other DNA
caacatcaaggaaga

SEQ ID NO: 9816 - DNA, 14 bp, synthetic construct
  misc_feature 1..14: note = Description of Artificial Sequence: Synthetic Antisense oligonucleotide
  modified_base 1: mod_base = OTHER; note = 5-methyl
  modified_base 4: mod_base = OTHER; note = 5-methyl
  modified_base 7: mod_base = OTHER; note = 5-methyl
  modified_base 1..2: mod_base = OTHER; note = bicyclic nucleic acid (BNA)
  source 1..14: mol_type = other DNA
caacatcaaggaag

SEQ ID NO: 9817 - DNA, 26 bp, synthetic construct
  misc_feature 1..26: note = Description of Artificial Sequence: Synthetic Antisense oligonucleotide
  modified_base 1..2: mod_base = OTHER; note = bicyclic nucleic acid (BNA)
  modified_base 3: mod_base = OTHER; note = 5-methyl
  modified_base 6: mod_base = OTHER; note = 5-methyl
  modified_base 18: mod_base = OTHER; note = 5-methyl
  modified_base 23: mod_base = OTHER; note = 5-methyl
  source 1..26: mol_type = other DNA
aacatcaaggaagatggcatttctag

SEQ ID NO: 9818 - DNA, 25 bp, synthetic construct
  misc_feature 1..25: note = Description of Artificial Sequence: Synthetic Antisense oligonucleotide
  modified_base 1..2: mod_base = OTHER; note = bicyclic nucleic acid (BNA)
  modified_base 3: mod_base = OTHER; note = 5-methyl
  modified_base 6: mod_base = OTHER; note = 5-methyl
  modified_base 18: mod_base = OTHER; note = 5-methyl
  modified_base 23: mod_base = OTHER; note = 5-methyl
  source 1..25: mol_type = other DNA
aacatcaaggaagatggcatttcta

SEQ ID NO: 9819 - DNA, 24 bp, synthetic construct
  misc_feature 1..24: note = Description of Artificial Sequence: Synthetic Antisense oligonucleotide
  modified_base 1..2: mod_base = OTHER; note = bicyclic nucleic acid (BNA)
  modified_base 3: mod_base = OTHER; note = 5-methyl
  modified_base 6: mod_base = OTHER; note = 5-methyl
  modified_base 18: mod_base = OTHER; note = 5-methyl
  modified_base 23: mod_base = OTHER; note = 5-methyl
  source 1..24: mol_type = other DNA
aacatcaaggaagatggcatttct

SEQ ID NO: 9820 - DNA, 23 bp, synthetic construct
  misc_feature 1..23: note = Description of Artificial Sequence: Synthetic Antisense oligonucleotide
  modified_base 1..2: mod_base = OTHER; note = bicyclic nucleic acid (BNA)
  modified_base 3: mod_base = OTHER; note = 5-methyl
  modified_base 6: mod_base = OTHER; note = 5-methyl
  modified_base 18: mod_base = OTHER; note = 5-methyl
  modified_base 23: mod_base = OTHER; note = 5-methyl
  source 1..23: mol_type = other DNA
aacatcaaggaagatggcatttc

SEQ ID NO: 9821 - DNA, 22 bp, synthetic construct
  misc_feature 1..22: note = Description of Artificial Sequence: Synthetic Antisense oligonucleotide
  modified_base 1..2: mod_base = OTHER; note = bicyclic nucleic acid (BNA)
  modified_base 3: mod_base = OTHER; note = 5-methyl
  modified_base 6: mod_base = OTHER; note = 5-methyl
  modified_base 18: mod_base = OTHER; note = 5-methyl
  source 1..22: mol_type = other DNA
aacatcaaggaagatggcattt

SEQ ID NO: 9822 - DNA, 21 bp, synthetic construct
  misc_feature 1..21: note = Description of Artificial Sequence: Synthetic Antisense oligonucleotide
  modified_base 1..2: mod_base = OTHER; note = bicyclic nucleic acid (BNA)
  modified_base 3: mod_base = OTHER; note = 5-methyl
  modified_base 6: mod_base = OTHER; note = 5-methyl
  modified_base 18: mod_base = OTHER; note = 5-methyl
  source 1..21: mol_type = other DNA
aacatcaaggaagatggcatt

SEQ ID NO: 9823 - DNA, 20 bp, synthetic construct
  misc_feature 1..20: note = Description of Artificial Sequence: Synthetic Antisense oligonucleotide
  modified_base 1..2: mod_base = OTHER; note = bicyclic nucleic acid (BNA)
  modified_base 3: mod_base = OTHER; note = 5-methyl
  modified_base 6: mod_base = OTHER; note = 5-methyl
  modified_base 18: mod_base = OTHER; note = 5-methyl
  source 1..20: mol_type = other DNA
aacatcaaggaagatggcat

SEQ ID NO: 9824 - DNA, 19 bp, synthetic construct
  misc_feature 1..19: note = Description of Artificial Sequence: Synthetic Antisense oligonucleotide
  modified_base 1..2: mod_base = OTHER; note = bicyclic nucleic acid (BNA)
  modified_base 3: mod_base = OTHER; note = 5-methyl
  modified_base 6: mod_base = OTHER; note = 5-methyl
  modified_base 18: mod_base = OTHER; note = 5-methyl
  source 1..19: mol_type = other DNA
aacatcaaggaagatggca

SEQ ID NO: 9825 - DNA, 18 bp, synthetic construct
  misc_feature 1..18: note = Description of Artificial Sequence: Synthetic Antisense oligonucleotide
  modified_base 1..2: mod_base = OTHER; note = bicyclic nucleic acid (BNA)
  modified_base 3: mod_base = OTHER; note = 5-methyl
  modified_base 6: mod_base = OTHER; note = 5-methyl
  modified_base 18: mod_base = OTHER; note = 5-methyl
  source 1..18: mol_type = other DNA
aacatcaaggaagatggc

SEQ ID NO: 9826 - DNA, 17 bp, synthetic construct
  misc_feature 1..17: note = Description of Artificial Sequence: Synthetic Antisense oligonucleotide
  modified_base 1..2: mod_base = OTHER; note = bicyclic nucleic acid (BNA)
  modified_base 3: mod_base = OTHER; note = 5-methyl
  modified_base 6: mod_base = OTHER; note = 5-methyl
  source 1..17: mol_type = other DNA
aacatcaaggaagatgg

SEQ ID NO: 9827 - DNA, 16 bp, synthetic construct
  misc_feature 1..16: note = Description of Artificial Sequence: Synthetic Antisense oligonucleotide
  modified_base 1..2: mod_base = OTHER; note = bicyclic nucleic acid (BNA)
  modified_base 3: mod_base = OTHER; note = 5-methyl
  modified_base 6: mod_base = OTHER; note = 5-methyl
  source 1..16: mol_type = other DNA
aacatcaaggaagatg

SEQ ID NO: 9828 - DNA, 15 bp, synthetic construct
  misc_feature 1..15: note = Description of Artificial Sequence: Synthetic Antisense oligonucleotide
  modified_base 1..2: mod_base = OTHER; note = bicyclic nucleic acid (BNA)
  modified_base 3: mod_base = OTHER; note = 5-methyl
  modified_base 6: mod_base = OTHER; note = 5-methyl
  source 1..15: mol_type = other DNA
aacatcaaggaagat

SEQ ID NO: 9829 - DNA, 14 bp, synthetic construct
  misc_feature 1..14: note = Description of Artificial Sequence: Synthetic Antisense oligonucleotide
  modified_base 1..2: mod_base = OTHER; note = bicyclic nucleic acid (BNA)
  modified_base 3: mod_base = OTHER; note = 5-methyl
  modified_base 6: mod_base = OTHER; note = 5-methyl
  source 1..14: mol_type = other DNA
aacatcaaggaaga

SEQ ID NO: 9830 - DNA, 13 bp, synthetic construct
  misc_feature 1..13: note = Description of Artificial Sequence: Synthetic Antisense oligonucleotide
  modified_base 1..2: mod_base = OTHER; note = bicyclic nucleic acid (BNA)
  modified_base 3: mod_base = OTHER; note = 5-methyl
  modified_base 6: mod_base = OTHER; note = 5-methyl
  source 1..13: mol_type = other DNA
aacatcaaggaag

SEQ ID NO: 9831 - DNA, 25 bp, synthetic construct
  misc_feature 1..25: note = Description of Artificial Sequence: Synthetic Antisense oligonucleotide
  modified_base 1..2: mod_base = OTHER; note = bicyclic nucleic acid (BNA)
  modified_base 2: mod_base = OTHER; note = 5-methyl
  modified_base 5: mod_base = OTHER; note = 5-methyl
  modified_base 17: mod_base = OTHER; note = 5-methyl
  modified_base 22: mod_base = OTHER; note = 5-methyl
  source 1..25: mol_type = other DNA
acatcaaggaagatggcatttctag

SEQ ID NO: 9832 - DNA, 24 bp, synthetic construct
  misc_feature 1..24: note = Description of Artificial Sequence: Synthetic Antisense oligonucleotide
  modified_base 1..2: mod_base = OTHER; note = bicyclic nucleic acid (BNA)
  modified_base 2: mod_base = OTHER; note = 5-methyl
  modified_base 5: mod_base = OTHER; note = 5-methyl
  modified_base 17: mod_base = OTHER; note = 5-methyl
  modified_base 22: mod_base = OTHER; note = 5-methyl
  source 1..24: mol_type = other DNA
acatcaaggaagatggcatttcta

SEQ ID NO: 9833 - DNA, 23 bp, synthetic construct
  misc_feature 1..23: note = Description of Artificial Sequence: Synthetic Antisense oligonucleotide
  modified_base 1..2: mod_base = OTHER; note = bicyclic nucleic acid (BNA)
  modified_base 2: mod_base = OTHER; note = 5-methyl
  modified_base 5: mod_base = OTHER; note = 5-methyl
  modified_base 17: mod_base = OTHER; note = 5-methyl
  modified_base 22: mod_base = OTHER; note = 5-methyl
  source 1..23: mol_type = other DNA
acatcaaggaagatggcatttct

SEQ ID NO: 9834 - DNA, 22 bp, synthetic construct
  misc_feature 1..22: note = Description of Artificial Sequence: Synthetic Antisense oligonucleotide
  modified_base 1..2: mod_base = OTHER; note = bicyclic nucleic acid (BNA)
  modified_base 2: mod_base = OTHER; note = 5-methyl
  modified_base 5: mod_base = OTHER; note = 5-methyl
  modified_base 17: mod_base = OTHER; note = 5-methyl
  modified_base 22: mod_base = OTHER; note = 5-methyl
  source 1..22: mol_type = other DNA
acatcaaggaagatggcatttc

SEQ ID NO: 9835 - DNA, 21 bp, synthetic construct
  misc_feature 1..21: note = Description of Artificial Sequence: Synthetic Antisense oligonucleotide
  modified_base 1..2: mod_base = OTHER; note = bicyclic nucleic acid (BNA)
  modified_base 2: mod_base = OTHER; note = 5-methyl
  modified_base 5: mod_base = OTHER; note = 5-methyl
  modified_base 17: mod_base = OTHER; note = 5-methyl
  source 1..21: mol_type = other DNA
acatcaaggaagatggcattt

SEQ ID NO: 9836 - DNA, 20 bp, synthetic construct
  misc_feature 1..20: note = Description of Artificial Sequence: Synthetic Antisense oligonucleotide
  modified_base 1..2: mod_base = OTHER; note = bicyclic nucleic acid (BNA)
  modified_base 2: mod_base = OTHER; note = 5-methyl
  modified_base 5: mod_base = OTHER; note = 5-methyl
  modified_base 17: mod_base = OTHER; note = 5-methyl
  source 1..20: mol_type = other DNA
acatcaaggaagatggcatt

SEQ ID NO: 9837 - DNA, 19 bp, synthetic construct
  misc_feature 1..19: note = Description of Artificial Sequence: Synthetic Antisense oligonucleotide
  modified_base 1..2: mod_base = OTHER; note = bicyclic nucleic acid (BNA)
  modified_base 2: mod_base = OTHER; note = 5-methyl
  modified_base 5: mod_base = OTHER; note = 5-methyl
  modified_base 17: mod_base = OTHER; note = 5-methyl
  source 1..19: mol_type = other DNA
acatcaaggaagatggcat

SEQ ID NO: 9838 - DNA, 18 bp, synthetic construct
  misc_feature 1..18: note = Description of Artificial Sequence: Synthetic Antisense oligonucleotide
  modified_base 1..2: mod_base = OTHER; note = bicyclic nucleic acid (BNA)
  modified_base 2: mod_base = OTHER; note = 5-methyl
  modified_base 5: mod_base = OTHER; note = 5-methyl
  modified_base 17: mod_base = OTHER; note = 5-methyl
  source 1..18: mol_type = other DNA
acatcaaggaagatggca

SEQ ID NO: 9839 - DNA, 17 bp, synthetic construct
  misc_feature 1..17: note = Description of Artificial Sequence: Synthetic Antisense oligonucleotide
  modified_base 1..2: mod_base = OTHER; note = bicyclic nucleic acid (BNA)
  modified_base 2: mod_base = OTHER; note = 5-methyl
  modified_base 5: mod_base = OTHER; note = 5-methyl
  modified_base 17: mod_base = OTHER; note = 5-methyl
  source 1..17: mol_type = other DNA
acatcaaggaagatggc

SEQ ID NO: 9840 - DNA, 16 bp, synthetic construct
  misc_feature 1..16: note = Description of Artificial Sequence: Synthetic Antisense oligonucleotide
  modified_base 1..2: mod_base = OTHER; note = bicyclic nucleic acid (BNA)
  modified_base 2: mod_base = OTHER; note = 5-methyl
  modified_base 5: mod_base = OTHER; note = 5-methyl
  source 1..16: mol_type = other DNA
acatcaaggaagatgg

SEQ ID NO: 9841 - DNA, 15 bp, synthetic construct
  misc_feature 1..15: note = Description of Artificial Sequence: Synthetic Antisense oligonucleotide
  modified_base 1..2: mod_base = OTHER; note = bicyclic nucleic acid (BNA)
  modified_base 2: mod_base = OTHER; note = 5-methyl
  modified_base 5: mod_base = OTHER; note = 5-methyl
  source 1..15: mol_type = other DNA
acatcaaggaagatg

SEQ ID NO: 9842 - DNA, 14 bp, synthetic construct
  misc_feature 1..14: note = Description of Artificial Sequence: Synthetic Antisense oligonucleotide
  modified_base 1..2: mod_base = OTHER; note = bicyclic nucleic acid (BNA)
  modified_base 2: mod_base = OTHER; note = 5-methyl
  modified_base 5: mod_base = OTHER; note = 5-methyl
  source 1..14: mol_type = other DNA
acatcaaggaagat

SEQ ID NO: 9843 - DNA, 13 bp, synthetic construct
  misc_feature 1..13: note = Description of Artificial Sequence: Synthetic Antisense oligonucleotide
  modified_base 1..2: mod_base = OTHER; note = bicyclic nucleic acid (BNA)
  modified_base 2: mod_base = OTHER; note = 5-methyl
  modified_base 5: mod_base = OTHER; note = 5-methyl
  source 1..13: mol_type = other DNA
acatcaaggaaga

SEQ ID NO: 9844 - DNA, 12 bp, synthetic construct
  misc_feature 1..12: note = Description of Artificial Sequence: Synthetic Antisense oligonucleotide
  modified_base 1..2: mod_base = OTHER; note = bicyclic nucleic acid (BNA)
  modified_base 2: mod_base = OTHER; note = 5-methyl
  modified_base 5: mod_base = OTHER; note = 5-methyl
  source 1..12: mol_type = other DNA
acatcaaggaag

SEQ ID NO: 9845 - DNA, 24 bp, synthetic construct
  misc_feature 1..24: note = Description of Artificial Sequence: Synthetic Antisense oligonucleotide
  modified_base 1: mod_base = OTHER; note = 5-methyl
  modified_base 4: mod_base = OTHER; note = 5-methyl
  modified_base 16: mod_base = OTHER; note = 5-methyl
  modified_base 21: mod_base = OTHER; note = 5-methyl
  modified_base 1..2: mod_base = OTHER; note = bicyclic nucleic acid (BNA)
  source 1..24: mol_type = other DNA
catcaaggaagatggcatttctag

SEQ ID NO: 9846 - DNA, 23 bp, synthetic construct
  misc_feature 1..23: note = Description of Artificial Sequence: Synthetic Antisense oligonucleotide
  modified_base 1: mod_base = OTHER; note = 5-methyl
  modified_base 4: mod_base = OTHER; note = 5-methyl
  modified_base 16: mod_base = OTHER; note = 5-methyl
  modified_base 21: mod_base = OTHER; note = 5-methyl
  modified_base 1..2: mod_base = OTHER; note = bicyclic nucleic acid (BNA)
  source 1..23: mol_type = other DNA
catcaaggaagatggcatttcta

SEQ ID NO: 9847 - DNA, 22 bp, synthetic construct
  misc_feature 1..22: note = Description of Artificial Sequence: Synthetic Antisense oligonucleotide
  modified_base 1: mod_base = OTHER; note = 5-methyl
  modified_base 4: mod_base = OTHER; note = 5-methyl
  modified_base 16: mod_base = OTHER; note = 5-methyl
  modified_base 21: mod_base = OTHER; note = 5-methyl
  modified_base 1..2: mod_base = OTHER; note = bicyclic nucleic acid (BNA)
  source 1..22: mol_type = other DNA
catcaaggaagatggcatttct

SEQ ID NO: 9848 - DNA, 21 bp, synthetic construct
  misc_feature 1..21: note = Description of Artificial Sequence: Synthetic Antisense oligonucleotide
  modified_base 1: mod_base = OTHER; note = 5-methyl
  modified_base 4: mod_base = OTHER; note = 5-methyl
  modified_base 16: mod_base = OTHER; note = 5-methyl
  modified_base 21: mod_base = OTHER; note = 5-methyl
  modified_base 1..2: mod_base = OTHER; note = bicyclic nucleic acid (BNA)
  source 1..21: mol_type = other DNA
catcaaggaagatggcatttc

SEQ ID NO: 9849 - DNA, 20 bp, synthetic construct
  misc_feature 1..20: note = Description of Artificial Sequence: Synthetic Antisense oligonucleotide
  modified_base 1: mod_base = OTHER; note = 5-methyl
  modified_base 4: mod_base = OTHER; note = 5-methyl
  modified_base 16: mod_base = OTHER; note = 5-methyl
  modified_base 1..2: mod_base = OTHER; note = bicyclic nucleic acid (BNA)
  source 1..20: mol_type = other DNA
catcaaggaagatggcattt

SEQ ID NO: 9850 - DNA, 19 bp, synthetic construct
  misc_feature 1..19: note = Description of Artificial Sequence: Synthetic Antisense oligonucleotide
  modified_base 1: mod_base = OTHER; note = 5-methyl
  modified_base 4: mod_base = OTHER; note = 5-methyl
  modified_base 16: mod_base = OTHER; note = 5-methyl
  modified_base 1..2: mod_base = OTHER; note = bicyclic nucleic acid (BNA)
  source 1..19: mol_type = other DNA
catcaaggaagatggcatt

SEQ ID NO: 9851 - DNA, 18 bp, synthetic construct
  misc_feature 1..18: note = Description of Artificial Sequence: Synthetic Antisense oligonucleotide
  modified_base 1: mod_base = OTHER; note = 5-methyl
  modified_base 4: mod_base = OTHER; note = 5-methyl
  modified_base 16: mod_base = OTHER; note = 5-methyl
  modified_base 1..2: mod_base = OTHER; note = bicyclic nucleic acid (BNA)
  source 1..18: mol_type = other DNA
catcaaggaagatggcat

SEQ ID NO: 9852 - DNA, 17 bp, synthetic construct
  misc_feature 1..17: note = Description of Artificial Sequence: Synthetic Antisense oligonucleotide
  modified_base 1: mod_base = OTHER; note = 5-methyl
  modified_base 4: mod_base = OTHER; note = 5-methyl
  modified_base 16: mod_base = OTHER; note = 5-methyl
  modified_base 1..2: mod_base = OTHER; note = bicyclic nucleic acid (BNA)
  source 1..17: mol_type = other DNA
catcaaggaagatggca

SEQ ID NO: 9853 - DNA, 16 bp, synthetic construct
  misc_feature 1..16: note = Description of Artificial Sequence: Synthetic Antisense oligonucleotide
  modified_base 1: mod_base = OTHER; note = 5-methyl
  modified_base 4: mod_base = OTHER; note = 5-methyl
  modified_base 16: mod_base = OTHER; note = 5-methyl
  modified_base 1..2: mod_base = OTHER; note = bicyclic nucleic acid (BNA)
  source 1..16: mol_type = other DNA
catcaaggaagatggc

SEQ ID NO: 9854 - DNA, 15 bp, synthetic construct
  misc_feature 1..15: note = Description of Artificial Sequence: Synthetic Antisense oligonucleotide
  modified_base 1: mod_base = OTHER; note = 5-methyl
  modified_base 4: mod_base = OTHER; note = 5-methyl
  modified_base 1..2: mod_base = OTHER; note = bicyclic nucleic acid (BNA)
  source 1..15: mol_type = other DNA
catcaaggaagatgg

SEQ ID NO: 9855 - DNA, 14 bp, synthetic construct
  misc_feature 1..14: note = Description of Artificial Sequence: Synthetic Antisense oligonucleotide
  modified_base 1: mod_base = OTHER; note = 5-methyl
  modified_base 4: mod_base = OTHER; note = 5-methyl
  modified_base 1..2: mod_base = OTHER; note = bicyclic nucleic acid (BNA)
  source 1..14: mol_type = other DNA
catcaaggaagatg

SEQ ID NO: 9856 - DNA, 13 bp, synthetic construct
  misc_feature 1..13: note = Description of Artificial Sequence: Synthetic Antisense oligonucleotide
  modified_base 1: mod_base = OTHER; note = 5-methyl
  modified_base 4: mod_base = OTHER; note = 5-methyl
  modified_base 1..2: mod_base = OTHER; note = bicyclic nucleic acid (BNA)
  source 1..13: mol_type = other DNA
catcaaggaagat

SEQ ID NO: 9857 - DNA, 12 bp, synthetic construct
  misc_feature 1..12: note = Description of Artificial Sequence: Synthetic Antisense oligonucleotide
  modified_base 1: mod_base = OTHER; note = 5-methyl
  modified_base 4: mod_base = OTHER; note = 5-methyl
  modified_base 1..2: mod_base = OTHER; note = bicyclic nucleic acid (BNA)
  source 1..12: mol_type = other DNA
catcaaggaaga

SEQ ID NO: 9858 - DNA, 11 bp, synthetic construct
  misc_feature 1..11: note = Description of Artificial Sequence: Synthetic Antisense oligonucleotide
  modified_base 1: mod_base = OTHER; note = 5-methyl
  modified_base 4: mod_base = OTHER; note = 5-methyl
  modified_base 1..2: mod_base = OTHER; note = bicyclic nucleic acid (BNA)
  source 1..11: mol_type = other DNA
catcaaggaag

SEQ ID NO: 9859 - DNA, 23 bp, synthetic construct
  misc_feature 1..23: note = Description of Artificial Sequence: Synthetic Antisense oligonucleotide
  modified_base 1..2: mod_base = OTHER; note = bicyclic nucleic acid (BNA)
  modified_base 3: mod_base = OTHER; note = 5-methyl
  modified_base 15: mod_base = OTHER; note = 5-methyl
  modified_base 20: mod_base = OTHER; note = 5-methyl
  source 1..23: mol_type = other DNA
atcaaggaagatggcatttctag

SEQ ID NO: 9860 - DNA, 22 bp, synthetic construct
  misc_feature 1..22: note = Description of Artificial Sequence: Synthetic Antisense oligonucleotide
  modified_base 1..2: mod_base = OTHER; note = bicyclic nucleic acid (BNA)
  modified_base 3: mod_base = OTHER; note = 5-methyl
  modified_base 15: mod_base = OTHER; note = 5-methyl
  modified_base 20: mod_base = OTHER; note = 5-methyl
  source 1..22: mol_type = other DNA
atcaaggaagatggcatttcta

SEQ ID NO: 9861 - DNA, 21 bp, synthetic construct
  misc_feature 1..21: note = Description of Artificial Sequence: Synthetic Antisense oligonucleotide
  modified_base 1..2: mod_base = OTHER; note = bicyclic nucleic acid (BNA)
  modified_base 3: mod_base = OTHER; note = 5-methyl
  modified_base 15: mod_base = OTHER; note = 5-methyl
  modified_base 20: mod_base = OTHER; note = 5-methyl
  source 1..21: mol_type = other DNA
atcaaggaagatggcatttct

SEQ ID NO: 9862 - DNA, 20 bp, synthetic construct
  misc_feature 1..20: note = Description of Artificial Sequence: Synthetic Antisense oligonucleotide
  modified_base 1..2: mod_base = OTHER; note = bicyclic nucleic acid (BNA)
  modified_base 3: mod_base = OTHER; note = 5-methyl
  modified_base 15: mod_base = OTHER; note = 5-methyl
  modified_base 20: mod_base = OTHER; note = 5-methyl
  source 1..20: mol_type = other DNA
atcaaggaagatggcatttc

SEQ ID NO: 9863 - DNA, 19 bp, synthetic construct
  misc_feature 1..19: note = Description of Artificial Sequence: Synthetic Antisense oligonucleotide
  modified_base 1..2: mod_base = OTHER; note = bicyclic nucleic acid (BNA)
  modified_base 3: mod_base = OTHER; note = 5-methyl
  modified_base 15: mod_base = OTHER; note = 5-methyl
  source 1..19: mol_type = other DNA
atcaaggaagatggcattt

SEQ ID NO: 9864 - DNA, 18 bp, synthetic construct
  misc_feature 1..18: note = Description of Artificial Sequence: Synthetic Antisense oligonucleotide
  modified_base 1..2: mod_base = OTHER; note = bicyclic nucleic acid (BNA)
  modified_base 3: mod_base = OTHER; note = 5-methyl
  modified_base 15: mod_base = OTHER; note = 5-methyl
  source 1..18: mol_type = other DNA
atcaaggaagatggcatt

SEQ ID NO: 9865 - DNA, 17 bp, synthetic construct
  misc_feature 1..17: note = Description of Artificial Sequence: Synthetic Antisense oligonucleotide
  modified_base 1..2: mod_base = OTHER; note = bicyclic nucleic acid (BNA)
  modified_base 3: mod_base = OTHER; note = 5-methyl
  modified_base 15: mod_base = OTHER; note = 5-methyl
  source 1..17: mol_type = other DNA
atcaaggaagatggcat

SEQ ID NO: 9866 - DNA, 16 bp, synthetic construct
  misc_feature 1..16: note = Description of Artificial Sequence: Synthetic Antisense oligonucleotide
  modified_base 1..2: mod_base = OTHER; note = bicyclic nucleic acid (BNA)
  modified_base 3: mod_base = OTHER; note = 5-methyl
  modified_base 15: mod_base = OTHER; note = 5-methyl
  source 1..16: mol_type = other DNA
atcaaggaagatggca

SEQ ID NO: 9867 - DNA, 15 bp, synthetic construct
  misc_feature 1..15: note = Description of Artificial Sequence: Synthetic Antisense oligonucleotide
  modified_base 1..2: mod_base = OTHER; note = bicyclic nucleic acid (BNA)
  modified_base 3: mod_base = OTHER; note = 5-methyl
  modified_base 15: mod_base = OTHER; note = 5-methyl
  source 1..15: mol_type = other DNA
atcaaggaagatggc

SEQ ID NO: 9868 - DNA, 14 bp, synthetic construct
  misc_feature 1..14: note = Description of Artificial Sequence: Synthetic Antisense oligonucleotide
  modified_base 1..2: mod_base = OTHER; note = bicyclic nucleic acid (BNA)
  modified_base 3: mod_base = OTHER; note = 5-methyl
  source 1..14: mol_type = other DNA
atcaaggaagatgg

SEQ ID NO: 9869 - DNA, 13 bp, synthetic construct
  misc_feature 1..13: note = Description of Artificial Sequence: Synthetic Antisense oligonucleotide
  modified_base 1..2: mod_base = OTHER; note = bicyclic nucleic acid (BNA)
  modified_base 3: mod_base = OTHER; note = 5-methyl
  source 1..13: mol_type = other DNA
atcaaggaagatg

SEQ ID NO: 9870 - DNA, 12 bp, synthetic construct
  misc_feature 1..12: note = Description of Artificial Sequence: Synthetic Antisense oligonucleotide
  modified_base 1..2: mod_base = OTHER; note = bicyclic nucleic acid (BNA)
  modified_base 3: mod_base = OTHER; note = 5-methyl
  source 1..12: mol_type = other DNA
atcaaggaagat

SEQ ID NO: 9871 - DNA, 11 bp, synthetic construct
  misc_feature 1..11: note = Description of Artificial Sequence: Synthetic Antisense oligonucleotide
  modified_base 1..2: mod_base = OTHER; note = bicyclic nucleic acid (BNA)
  modified_base 3: mod_base = OTHER; note = 5-methyl
  source 1..11: mol_type = other DNA
atcaaggaaga

SEQ ID NO: 9872 - DNA, 10 bp, synthetic construct
  misc_feature 1..10: note = Description of Artificial Sequence: Synthetic Antisense oligonucleotide
  modified_base 1..2: mod_base = OTHER; note = bicyclic nucleic acid (BNA)
  modified_base 3: mod_base = OTHER; note = 5-methyl
  source 1..10: mol_type = other DNA
atcaaggaag

SEQ ID NO: 9873 - DNA, 18 bp, synthetic construct
  misc_feature 1..18: note = Description of Artificial Sequence: Synthetic Antisense oligonucleotide
  modified_base 9: mod_base = OTHER; note = 5-methyl
  modified_base 13..14: mod_base = OTHER; note = 5-methyl
  modified_base 18: mod_base = OTHER; note = 5-methyl
  modified_base 17..18: mod_base = OTHER; note = bicyclic nucleic acid (BNA)
  source 1..18: mol_type = other DNA
ggtaagttctgtccaagc

SEQ ID NO: 9874 - DNA, 18 bp, synthetic construct
  misc_feature 1..18: note = Description of Artificial Sequence: Synthetic Antisense oligonucleotide
  modified_base 8: mod_base = OTHER; note = 5-methyl
  modified_base 12..13: mod_base = OTHER; note = 5-methyl
  modified_base 17..18: mod_base = OTHER; note = 5-methyl
  modified_base 17..18: mod_base = OTHER; note = bicyclic nucleic acid (BNA)
  source 1..18: mol_type = other DNA
gtaagttctgtccaagcc

SEQ ID NO: 9875 - DNA, 18 bp, synthetic construct
  misc_feature 1..18: note = Description of Artificial Sequence: Synthetic Antisense oligonucleotide
  modified_base 4: mod_base = OTHER; note = 5-methyl
  modified_base 13: mod_base = OTHER; note = 5-methyl
  modified_base 17..18: mod_base = OTHER; note = 5-methyl
  modified_base 17..18: mod_base = OTHER; note = bicyclic nucleic acid (BNA)
  source 1..18: mol_type = other DNA
agtcggtaagttctgtcc

SEQ ID NO: 9876 - DNA, 18 bp, synthetic construct
  misc_feature 1..18: note = Description of Artificial Sequence: Synthetic Antisense oligonucleotide
  modified_base 1: mod_base = OTHER; note = 5-methyl
  modified_base 5..6: mod_base = OTHER; note = 5-methyl
  modified_base 10..12: mod_base = OTHER; note = 5-methyl
  modified_base 17..18: mod_base = OTHER; note = bicyclic nucleic acid (BNA)
  source 1..18: mol_type = other DNA
ctgtccaagcccggttga

SEQ ID NO: 9877 - DNA, 15 bp, synthetic construct
  misc_feature 1..15: note = Description of Artificial Sequence: Synthetic Antisense oligonucleotide
  modified_base 7: mod_base = OTHER; note = 5-methyl
  modified_base 11..12: mod_base = OTHER; note = 5-methyl
  modified_base 14..15: mod_base = OTHER; note = bicyclic nucleic acid (BNA)
  source 1..15: mol_type = other DNA
taagttctgtccaag

SEQ ID NO: 9878 - DNA, 20 bp, synthetic construct
  misc_feature 1..20: note = Description of Artificial Sequence: Synthetic Antisense oligonucleotide
  modified_base 3: mod_base = OTHER; note = 5-methyl
  modified_base 7..8: mod_base = OTHER; note = 5-methyl
  modified_base 12..14: mod_base = OTHER; note = 5-methyl
  modified_base 19..20: mod_base = OTHER; note = bicyclic nucleic acid (BNA)
  source 1..20: mol_type = other DNA
ttctgtccaagcccggttga

SEQ ID NO: 9879 - DNA, 19 bp, synthetic construct
  misc_feature 1..19: note = Description of Artificial Sequence: Synthetic Antisense oligonucleotide
  modified_base 3: mod_base = OTHER; note = 5-methyl
  modified_base 7..8: mod_base = OTHER; note = 5-methyl
  modified_base 12..14: mod_base = OTHER; note = 5-methyl
  modified_base 18..19: mod_base = OTHER; note = bicyclic nucleic acid (BNA)
  source 1..19: mol_type = other DNA
ttctgtccaagcccggttg

SEQ ID NO: 9880 - DNA, 18 bp, synthetic construct
  misc_feature 1..18: note = Description of Artificial Sequence: Synthetic Antisense oligonucleotide
  modified_base 3: mod_base = OTHER; note = 5-methyl
  modified_base 7..8: mod_base = OTHER; note = 5-methyl
  modified_base 12..14: mod_base = OTHER; note = 5-methyl
  modified_base 17..18: mod_base = OTHER; note = bicyclic nucleic acid (BNA)
  source 1..18: mol_type = other DNA
ttctgtccaagcccggtt

SEQ ID NO: 9881 - DNA, 17 bp, synthetic construct
  misc_feature 1..17: note = Description of Artificial Sequence: Synthetic Antisense oligonucleotide
  modified_base 3: mod_base = OTHER; note = 5-methyl
  modified_base 7..8: mod_base = OTHER; note = 5-methyl
  modified_base 12..14: mod_base = OTHER; note = 5-methyl
  modified_base 16..17: mod_base = OTHER; note = bicyclic nucleic acid (BNA)
  source 1..17: mol_type = other DNA
ttctgtccaagcccggt

SEQ ID NO: 9882 - DNA, 16 bp, synthetic construct
  misc_feature 1..16: note = Description of Artificial Sequence: Synthetic Antisense oligonucleotide
  modified_base 3: mod_base = OTHER; note = 5-methyl
  modified_base 7..8: mod_base = OTHER; note = 5-methyl
  modified_base 12..14: mod_base = OTHER; note = 5-methyl
  modified_base 15..16: mod_base = OTHER; note = bicyclic nucleic acid (BNA)
  source 1..16: mol_type = other DNA
ttctgtccaagcccgg

SEQ ID NO: 9883 - DNA, 15 bp, synthetic construct
  misc_feature 1..15: note = Description of Artificial Sequence: Synthetic Antisense oligonucleotide
  modified_base 3: mod_base = OTHER; note = 5-methyl
  modified_base 7..8: mod_base = OTHER; note = 5-methyl
  modified_base 12..14: mod_base = OTHER; note = 5-methyl
  modified_base 14..15: mod_base = OTHER; note = bicyclic nucleic acid (BNA)
  source 1..15: mol_type = other DNA
ttctgtccaagcccg

SEQ ID NO: 9884 - DNA, 14 bp, synthetic construct
  misc_feature 1..14: note = Description of Artificial Sequence: Synthetic Antisense oligonucleotide
  modified_base 3: mod_base = OTHER; note = 5-methyl
  modified_base 7..8: mod_base = OTHER; note = 5-methyl
  modified_base 12..14: mod_base = OTHER; note = 5-methyl
  modified_base 13..14: mod_base = OTHER; note = bicyclic nucleic acid (BNA)
  source 1..14: mol_type = other DNA
ttctgtccaagccc

SEQ ID NO: 9885 - DNA, 13 bp, synthetic construct
  misc_feature 1..13: note = Description of Artificial Sequence: Synthetic Antisense oligonucleotide
  modified_base 3: mod_base = OTHER; note = 5-methyl
  modified_base 7..8: mod_base = OTHER; note = 5-methyl
  modified_base 12..13: mod_base = OTHER; note = 5-methyl
  modified_base 12..13: mod_base = OTHER; note = bicyclic nucleic acid (BNA)
  source 1..13: mol_type = other DNA
ttctgtccaagcc

SEQ ID NO: 9886 - DNA, 12 bp, synthetic construct
  misc_feature 1..12: note = Description of Artificial Sequence: Synthetic Antisense oligonucleotide
  modified_base 3: mod_base = OTHER; note = 5-methyl
  modified_base 7..8: mod_base = OTHER; note = 5-methyl
  modified_base 12: mod_base = OTHER; note = 5-methyl
  modified_base 11..12: mod_base = OTHER; note = bicyclic nucleic acid (BNA)
  source 1..12: mol_type = other DNA
ttctgtccaagc

SEQ ID NO: 9887 - DNA, 11 bp, synthetic construct
  misc_feature 1..11: note = Description of Artificial Sequence: Synthetic Antisense oligonucleotide
  modified_base 3: mod_base = OTHER; note = 5-methyl
  modified_base 7..8: mod_base = OTHER; note = 5-methyl
  modified_base 10..11: mod_base = OTHER; note = bicyclic nucleic acid (BNA)
  source 1..11: mol_type = other DNA
ttctgtccaag

SEQ ID NO: 9888 - DNA, 10 bp, synthetic construct
  misc_feature 1..10: note = Description of Artificial Sequence: Synthetic Antisense oligonucleotide
  modified_base 3: mod_base = OTHER; note = 5-methyl
  modified_base 7..8: mod_base = OTHER; note = 5-methyl
  modified_base 9..10: mod_base = OTHER; note = bicyclic nucleic acid (BNA)
  source 1..10: mol_type = other DNA
ttctgtccaa

SEQ ID NO: 9889-9890 - skipped (2 entries)

SEQ ID NO: 9891 - DNA, 19 bp, synthetic construct
  misc_feature 1..19: note = Description of Artificial Sequence: Synthetic Antisense oligonucleotide
  modified_base 2: mod_base = OTHER; note = 5-methyl
  modified_base 6..7: mod_base = OTHER; note = 5-methyl
  modified_base 11..13: mod_base = OTHER; note = 5-methyl
  modified_base 18..19: mod_base = OTHER; note = bicyclic nucleic acid (BNA)
  source 1..19: mol_type = other DNA
tctgtccaagcccggttga

SEQ ID NO: 9892 - DNA, 18 bp, synthetic construct
  misc_feature 1..18: note = Description of Artificial Sequence: Synthetic Antisense oligonucleotide
  modified_base 2: mod_base = OTHER; note = 5-methyl
  modified_base 6..7: mod_base = OTHER; note = 5-methyl
  modified_base 11..13: mod_base = OTHER; note = 5-methyl
  modified_base 17..18: mod_base = OTHER; note = bicyclic nucleic acid (BNA)
  source 1..18: mol_type = other DNA
tctgtccaagcccggttg

SEQ ID NO: 9893 - DNA, 17 bp, synthetic construct
  misc_feature 1..17: note = Description of Artificial Sequence: Synthetic Antisense oligonucleotide
  modified_base 2: mod_base = OTHER; note = 5-methyl
  modified_base 6..7: mod_base = OTHER; note = 5-methyl
  modified_base 11..13: mod_base = OTHER; note = 5-methyl
  modified_base 16..17: mod_base = OTHER; note = bicyclic nucleic acid (BNA)
  source 1..17: mol_type = other DNA
tctgtccaagcccggtt

SEQ ID NO: 9894 - DNA, 16 bp, synthetic construct
  misc_feature 1..16: note = Description of Artificial Sequence: Synthetic Antisense oligonucleotide
  modified_base 2: mod_base = OTHER; note = 5-methyl
  modified_base 6..7: mod_base = OTHER; note = 5-methyl
  modified_base 11..13: mod_base = OTHER; note = 5-methyl
  modified_base 15..16: mod_base = OTHER; note = bicyclic nucleic acid (BNA)
  source 1..16: mol_type = other DNA
tctgtccaagcccggt

SEQ ID NO: 9895 - DNA, 15 bp, synthetic construct
  misc_feature 1..15: note = Description of Artificial Sequence: Synthetic Antisense oligonucleotide
  modified_base 2: mod_base = OTHER; note = 5-methyl
  modified_base 6..7: mod_base = OTHER; note = 5-methyl
  modified_base 11..13: mod_base = OTHER; note = 5-methyl
  modified_base 14..15: mod_base = OTHER; note = bicyclic nucleic acid (BNA)
  source 1..15: mol_type = other DNA
tctgtccaagcccgg

SEQ ID NO: 9896 - DNA, 14 bp, synthetic construct
  misc_feature 1..14: note = Description of Artificial Sequence: Synthetic Antisense oligonucleotide
  modified_base 2: mod_base = OTHER; note = 5-methyl
  modified_base 6..7: mod_base = OTHER; note = 5-methyl
  modified_base 11..13: mod_base = OTHER; note = 5-methyl
  modified_base 13..14: mod_base = OTHER; note = bicyclic nucleic acid (BNA)
  source 1..14: mol_type = other DNA
tctgtccaagcccg

SEQ ID NO: 9897 - DNA, 13 bp, synthetic construct
  misc_feature 1..13: note = Description of Artificial Sequence: Synthetic Antisense oligonucleotide
  modified_base 2: mod_base = OTHER; note = 5-methyl
  modified_base 6..7: mod_base = OTHER; note = 5-methyl
  modified_base 11..13: mod_base = OTHER; note = 5-methyl
  modified_base 12..13: mod_base = OTHER; note = bicyclic nucleic acid (BNA)
  source 1..13: mol_type = other DNA
tctgtccaagccc

SEQ ID NO: 9898 - DNA, 12 bp, synthetic construct
  misc_feature 1..12: note = Description of Artificial Sequence: Synthetic Antisense oligonucleotide
  modified_base 2: mod_base = OTHER; note = 5-methyl
  modified_base 6..7: mod_base = OTHER; note = 5-methyl
  modified_base 11..12: mod_base = OTHER; note = 5-methyl
  modified_base 11..12: mod_base = OTHER; note = bicyclic nucleic acid (BNA)
  source 1..12: mol_type = other DNA
tctgtccaagcc

SEQ ID NO: 9899 - DNA, 11 bp, synthetic construct
  misc_feature 1..11: note = Description of Artificial Sequence: Synthetic Antisense oligonucleotide
  modified_base 2: mod_base = OTHER; note = 5-methyl
  modified_base 6..7: mod_base = OTHER; note = 5-methyl
  modified_base 11: mod_base = OTHER; note = 5-methyl
  modified_base 10..11: mod_base = OTHER; note = bicyclic nucleic acid (BNA)
  source 1..11: mol_type = other DNA
tctgtccaagc

SEQ ID NO: 9900 - DNA, 10 bp, synthetic construct
  misc_feature 1..10: note = Description of Artificial Sequence: Synthetic Antisense oligonucleotide
  modified_base 2: mod_base = OTHER; note = 5-methyl
  modified_base 6..7: mod_base = OTHER; note = 5-methyl
  modified_base 9..10: mod_base = OTHER; note = bicyclic nucleic acid (BNA)
  source 1..10: mol_type = other DNA
tctgtccaag

SEQ ID NO: 9901-9902 - skipped (2 entries)

SEQ ID NO: 9903 - DNA, 17 bp, synthetic construct
  misc_feature 1..17: note = Description of Artificial Sequence: Synthetic Antisense oligonucleotide
  modified_base 1: mod_base = OTHER; note = 5-methyl
  modified_base 5..6: mod_base = OTHER; note = 5-methyl
  modified_base 10..12: mod_base = OTHER; note = 5-methyl
  modified_base 16..17: mod_base = OTHER; note = bicyclic nucleic acid (BNA)
  source 1..17: mol_type = other DNA
ctgtccaagcccggttg

SEQ ID NO: 9904 - DNA, 16 bp, synthetic construct
  misc_feature 1..16: note = Description of Artificial Sequence: Synthetic Antisense oligonucleotide
  modified_base 1: mod_base = OTHER; note = 5-methyl
  modified_base 5..6: mod_base = OTHER; note = 5-methyl
  modified_base 10..12: mod_base = OTHER; note = 5-methyl
  modified_base 15..16: mod_base = OTHER; note = bicyclic nucleic acid (BNA)
  source 1..16: mol_type = other DNA
ctgtccaagcccggtt

SEQ ID NO: 9905 - DNA, 15 bp, synthetic construct
  misc_feature 1..15: note = Description of Artificial Sequence: Synthetic Antisense oligonucleotide
  modified_base 1: mod_base = OTHER; note = 5-methyl
  modified_base 5..6: mod_base = OTHER; note = 5-methyl
  modified_base 10..12: mod_base = OTHER; note = 5-methyl
  modified_base 14..15: mod_base = OTHER; note = bicyclic nucleic acid (BNA)
  source 1..15: mol_type = other DNA
ctgtccaagcccggt

SEQ ID NO: 9906 - DNA, 14 bp, synthetic construct
  misc_feature 1..14: note = Description of Artificial Sequence: Synthetic Antisense oligonucleotide
  modified_base 1: mod_base = OTHER; note = 5-methyl
  modified_base 5..6: mod_base = OTHER; note = 5-methyl
  modified_base 10..12: mod_base = OTHER; note = 5-methyl
  modified_base 13..14: mod_base = OTHER; note = bicyclic nucleic acid (BNA)
  source 1..14: mol_type = other DNA
ctgtccaagcccgg

SEQ ID NO: 9907 - DNA, 13 bp, synthetic construct
  misc_feature 1..13: note = Description of Artificial Sequence: Synthetic Antisense oligonucleotide
  modified_base 1: mod_base = OTHER; note = 5-methyl
  modified_base 5..6: mod_base = OTHER; note = 5-methyl
  modified_base 10..12: mod_base = OTHER; note = 5-methyl
  modified_base 12..13: mod_base = OTHER; note = bicyclic nucleic acid (BNA)
  source 1..13: mol_type = other DNA
ctgtccaagcccg

SEQ ID NO: 9908 - DNA, 12 bp, synthetic construct
  misc_feature 1..12: note = Description of Artificial Sequence: Synthetic Antisense oligonucleotide
  modified_base 1: mod_base = OTHER; note = 5-methyl
  modified_base 5..6: mod_base = OTHER; note = 5-methyl
  modified_base 10..12: mod_base = OTHER; note = 5-methyl
  modified_base 11..12: mod_base = OTHER; note = bicyclic nucleic acid (BNA)
  source 1..12: mol_type = other DNA
ctgtccaagccc

SEQ ID NO: 9909 - DNA, 11 bp, synthetic construct
  misc_feature 1..11: note = Description of Artificial Sequence: Synthetic Antisense oligonucleotide
  modified_base 1: mod_base = OTHER; note = 5-methyl
  modified_base 5..6: mod_base = OTHER; note = 5-methyl
  modified_base 10..11: mod_base = OTHER; note = 5-methyl
  modified_base 10..11: mod_base = OTHER; note = bicyclic nucleic acid (BNA)
  source 1..11: mol_type = other DNA
ctgtccaagcc

SEQ ID NO: 9910 - DNA, 10 bp, synthetic construct
  misc_feature 1..10: note = Description of Artificial Sequence: Synthetic Antisense oligonucleotide
  modified_base 1: mod_base = OTHER; note = 5-methyl
  modified_base 5..6: mod_base = OTHER; note = 5-methyl
  modified_base 10: mod_base = OTHER; note = 5-methyl
  modified_base 9..10: mod_base = OTHER; note = bicyclic nucleic acid (BNA)
  source 1..10: mol_type = other DNA
ctgtccaagc

SEQ ID NO: 9911-9912 - skipped (2 entries)

SEQ ID NO: 9913 - DNA, 20 bp, synthetic construct
  misc_feature 1..20: note = Description of Artificial Sequence: Synthetic Antisense oligonucleotide
  modified_base 4: mod_base = OTHER; note = 5-methyl
  modified_base 8..9: mod_base = OTHER; note = 5-methyl
  modified_base 13..15: mod_base = OTHER; note = 5-methyl
  modified_base 19..20: mod_base = OTHER; note = bicyclic nucleic acid (BNA)
  source 1..20: mol_type = other DNA
gttctgtccaagcccggttg

SEQ ID NO: 9914 - DNA, 19 bp, synthetic construct
  misc_feature 1..19: note = Description of Artificial Sequence: Synthetic Antisense oligonucleotide
  modified_base 4: mod_base = OTHER; note = 5-methyl
  modified_base 8..9: mod_base = OTHER; note = 5-methyl
  modified_base 13..15: mod_base = OTHER; note = 5-methyl
  modified_base 18..19: mod_base = OTHER; note = bicyclic nucleic acid (BNA)
  source 1..19: mol_type = other DNA
gttctgtccaagcccggtt

SEQ ID NO: 9915 - DNA, 18 bp, synthetic construct
  misc_feature 1..18: note = Description of Artificial Sequence: Synthetic Antisense oligonucleotide
  modified_base 4: mod_base = OTHER; note = 5-methyl
  modified_base 8..9: mod_base = OTHER; note = 5-methyl
  modified_base 13..15: mod_base = OTHER; note = 5-methyl
  modified_base 17..18: mod_base = OTHER; note = bicyclic nucleic acid (BNA)
  source 1..18: mol_type = other DNA
gttctgtccaagcccggt

SEQ ID NO: 9916 - DNA, 17 bp, synthetic construct
  misc_feature 1..17: note = Description of Artificial Sequence: Synthetic Antisense oligonucleotide
  modified_base 4: mod_base = OTHER; note = 5-methyl
  modified_base 8..9: mod_base = OTHER; note = 5-methyl
  modified_base 13..15: mod_base = OTHER; note = 5-methyl
  modified_base 16..17: mod_base = OTHER; note = bicyclic nucleic acid (BNA)
  source 1..17: mol_type = other DNA
gttctgtccaagcccgg

SEQ ID NO: 9917 - DNA, 16 bp, synthetic construct
  misc_feature 1..16: note = Description of Artificial Sequence: Synthetic Antisense oligonucleotide
  modified_base 4: mod_base = OTHER; note = 5-methyl
  modified_base 8..9: mod_base = OTHER; note = 5-methyl
  modified_base 13..15: mod_base = OTHER; note = 5-methyl
  modified_base 15..16: mod_base = OTHER; note = bicyclic nucleic acid (BNA)
  source 1..16: mol_type = other DNA
gttctgtccaagcccg

SEQ ID NO: 9918 - DNA, 15 bp, synthetic construct
  misc_feature 1..15: note = Description of Artificial Sequence: Synthetic Antisense oligonucleotide
  modified_base 4: mod_base = OTHER; note = 5-methyl
  modified_base 8..9: mod_base = OTHER; note = 5-methyl
  modified_base 13..15: mod_base = OTHER; note = 5-methyl
  modified_base 14..15: mod_base = OTHER; note = bicyclic nucleic acid (BNA)
  source 1..15: mol_type = other DNA
gttctgtccaagccc

SEQ ID NO: 9919 - DNA, 14 bp, synthetic construct
  misc_feature 1..14: note = Description of Artificial Sequence: Synthetic Antisense oligonucleotide
  modified_base 4: mod_base = OTHER; note = 5-methyl
  modified_base 8..9: mod_base = OTHER; note = 5-methyl
  modified_base 13..14: mod_base = OTHER; note = 5-methyl
  modified_base 13..14: mod_base = OTHER; note = bicyclic nucleic acid (BNA)
  source 1..14: mol_type = other DNA
gttctgtccaagcc

SEQ ID NO: 9920 - DNA, 13 bp, synthetic construct
  misc_feature 1..13: note = Description of Artificial Sequence: Synthetic Antisense oligonucleotide
  modified_base 4: mod_base = OTHER; note = 5-methyl
  modified_base 8..9: mod_base = OTHER; note = 5-methyl
  modified_base 13: mod_base = OTHER; note = 5-methyl
  modified_base 12..13: mod_base = OTHER; note = bicyclic nucleic acid (BNA)
  source 1..13: mol_type = other DNA
gttctgtccaagc

SEQ ID NO: 9921 - DNA, 12 bp, synthetic construct
  misc_feature 1..12: note = Description of Artificial Sequence: Synthetic Antisense oligonucleotide
  modified_base 4: mod_base = OTHER; note = 5-methyl
  modified_base 8..9: mod_base = OTHER; note = 5-methyl
  modified_base 11..12: mod_base = OTHER; note = bicyclic nucleic acid (BNA)
  source 1..12: mol_type = other DNA
gttctgtccaag

SEQ ID NO: 9922 - DNA, 11 bp, synthetic construct
  misc_feature 1..11: note = Description of Artificial Sequence: Synthetic Antisense oligonucleotide
  modified_base 4: mod_base = OTHER; note = 5-methyl
  modified_base 8..9: mod_base = OTHER; note = 5-methyl
  modified_base 10..11: mod_base = OTHER; note = bicyclic nucleic acid (BNA)
  source 1..11: mol_type = other DNA
gttctgtccaa

SEQ ID NO: 9923 - DNA, 10 bp, synthetic construct
  misc_feature 1..10: note = Description of Artificial Sequence: Synthetic Antisense oligonucleotide
  modified_base 4: mod_base = OTHER; note = 5-methyl
  modified_base 8..9: mod_base = OTHER; note = 5-methyl
  modified_base 9..10: mod_base = OTHER; note = bicyclic nucleic acid (BNA)
  source 1..10: mol_type = other DNA
gttctgtcca

SEQ ID NO: 9924-9925 - skipped (2 entries)

SEQ ID NO: 9926 - DNA, 20 bp, synthetic construct
  misc_feature 1..20: note = Description of Artificial Sequence: Synthetic Antisense oligonucleotide
  modified_base 5: mod_base = OTHER; note = 5-methyl
  modified_base 9..10: mod_base = OTHER; note = 5-methyl
  modified_base 14..16: mod_base = OTHER; note = 5-methyl
  modified_base 19..20: mod_base = OTHER; note = bicyclic nucleic acid (BNA)
  source 1..20: mol_type = other DNA
agttctgtccaagcccggtt

SEQ ID NO: 9927 - DNA, 19 bp, synthetic construct
  misc_feature 1..19: note = Description of Artificial Sequence: Synthetic Antisense oligonucleotide
  modified_base 5: mod_base = OTHER; note = 5-methyl
  modified_base 9..10: mod_base = OTHER; note = 5-methyl
  modified_base 14..16: mod_base = OTHER; note = 5-methyl
  modified_base 18..19: mod_base = OTHER; note = bicyclic nucleic acid (BNA)
  source 1..19: mol_type = other DNA
agttctgtccaagcccggt

SEQ ID NO: 9928 - DNA, 18 bp, synthetic construct
  misc_feature 1..18: note = Description of Artificial Sequence: Synthetic Antisense oligonucleotide
  modified_base 5: mod_base = OTHER; note = 5-methyl
  modified_base 9..10: mod_base = OTHER; note = 5-methyl
  modified_base 14..16: mod_base = OTHER; note = 5-methyl
  modified_base 17..18: mod_base = OTHER; note = bicyclic nucleic acid (BNA)
  source 1..18: mol_type = other DNA
agttctgtccaagcccgg

SEQ ID NO: 9929 - DNA, 17 bp, synthetic construct
  misc_feature 1..17: note = Description of Artificial Sequence: Synthetic Antisense oligonucleotide
  modified_base 5: mod_base = OTHER; note = 5-methyl
  modified_base 9..10: mod_base = OTHER; note = 5-methyl
  modified_base 14..16: mod_base = OTHER; note = 5-methyl
  modified_base 16..17: mod_base = OTHER; note = bicyclic nucleic acid (BNA)
  source 1..17: mol_type = other DNA
agttctgtccaagcccg

SEQ ID NO: 9930 - DNA, 16 bp, synthetic construct
  misc_feature 1..16: note = Description of Artificial Sequence: Synthetic Antisense oligonucleotide
  modified_base 5: mod_base = OTHER; note = 5-methyl
  modified_base 9..10: mod_base = OTHER; note = 5-methyl
  modified_base 14..16: mod_base = OTHER; note = 5-methyl
  modified_base 15..16: mod_base = OTHER; note = bicyclic nucleic acid (BNA)
  source 1..16: mol_type = other DNA
agttctgtccaagccc

SEQ ID NO: 9931 - DNA, 15 bp, synthetic construct
  misc_feature 1..15: note = Description of Artificial Sequence: Synthetic Antisense oligonucleotide
  modified_base 5: mod_base = OTHER; note = 5-methyl
  modified_base 9..10: mod_base = OTHER; note = 5-methyl
  modified_base 14..15: mod_base = OTHER; note = 5-methyl
  modified_base 14..15: mod_base = OTHER; note = bicyclic nucleic acid (BNA)
  source 1..15: mol_type = other DNA
agttctgtccaagcc

SEQ ID NO: 9932 - DNA, 14 bp, synthetic construct
  misc_feature 1..14: note = Description of Artificial Sequence: Synthetic Antisense oligonucleotide
  modified_base 5: mod_base = OTHER; note = 5-methyl
  modified_base 9..10: mod_base = OTHER; note = 5-methyl
  modified_base 14: mod_base = OTHER; note = 5-methyl
  modified_base 13..14: mod_base = OTHER; note = bicyclic nucleic acid (BNA)
  source 1..14: mol_type = other DNA
agttctgtccaagc

SEQ ID NO: 9933 - DNA, 13 bp, synthetic construct
  misc_feature 1..13: note = Description of Artificial Sequence: Synthetic Antisense oligonucleotide
  modified_base 5: mod_base = OTHER; note = 5-methyl
  modified_base 9..10: mod_base = OTHER; note = 5-methyl
  modified_base 12..13: mod_base = OTHER; note = bicyclic nucleic acid (BNA)
  source 1..13: mol_type = other DNA
agttctgtccaag

SEQ ID NO: 9934 - DNA, 12 bp, synthetic construct
  misc_feature 1..12: note = Description of Artificial Sequence: Synthetic Antisense oligonucleotide
  modified_base 5: mod_base = OTHER; note = 5-methyl
  modified_base 9..10: mod_base = OTHER; note = 5-methyl
  modified_base 11..12: mod_base = OTHER; note = bicyclic nucleic acid (BNA)
  source 1..12: mol_type = other DNA
agttctgtccaa

SEQ ID NO: 9935 - DNA, 11 bp, synthetic construct
  misc_feature 1..11: note = Description of Artificial Sequence: Synthetic Antisense oligonucleotide
  modified_base 5: mod_base = OTHER; note = 5-methyl
  modified_base 9..10: mod_base = OTHER; note = 5-methyl
  modified_base 10..11: mod_base = OTHER; note = bicyclic nucleic acid (BNA)
  source 1..11: mol_type = other DNA
agttctgtcca

SEQ ID NO: 9936 - DNA, 10 bp, synthetic construct
  misc_feature 1..10: note = Description of Artificial Sequence: Synthetic Antisense oligonucleotide
  modified_base 5: mod_base = OTHER; note = 5-methyl
  modified_base 9..10: mod_base = OTHER; note = 5-methyl
  modified_base 9..10: mod_base = OTHER; note = bicyclic nucleic acid (BNA)
  source 1..10: mol_type = other DNA
agttctgtcc

SEQ ID NO: 9937-9938 - skipped (2 entries)

SEQ ID NO: 9939 - DNA, 20 bp, synthetic construct
  misc_feature 1..20: note = Description of Artificial Sequence: Synthetic Antisense oligonucleotide
  modified_base 6: mod_base = OTHER; note = 5-methyl
  modified_base 10..11: mod_base = OTHER; note = 5-methyl
  modified_base 15..17: mod_base = OTHER; note = 5-methyl
  modified_base 19..20: mod_base = OTHER; note = bicyclic nucleic acid (BNA)
  source 1..20: mol_type = other DNA
aagttctgtccaagcccggt

SEQ ID NO: 9940 - DNA, 19 bp, synthetic construct
  misc_feature 1..19: note = Description of Artificial Sequence: Synthetic Antisense oligonucleotide
  modified_base 6: mod_base = OTHER; note = 5-methyl
  modified_base 10..11: mod_base = OTHER; note = 5-methyl
  modified_base 15..17: mod_base = OTHER; note = 5-methyl
  modified_base 18..19: mod_base = OTHER; note = bicyclic nucleic acid (BNA)
  source 1..19: mol_type = other DNA
aagttctgtccaagcccgg

SEQ ID NO: 9941 - DNA, 18 bp, synthetic construct
  misc_feature 1..18: note = Description of Artificial Sequence: Synthetic Antisense oligonucleotide
  modified_base 6: mod_base = OTHER; note = 5-methyl
  modified_base 10..11: mod_base = OTHER; note = 5-methyl
  modified_base 15..17: mod_base = OTHER; note = 5-methyl
  modified_base 17..18: mod_base = OTHER; note = bicyclic nucleic acid (BNA)
  source 1..18: mol_type = other DNA
aagttctgtccaagcccg

SEQ ID NO: 9942 - DNA, 17 bp, synthetic construct
  misc_feature 1..17: note = Description of Artificial Sequence: Synthetic Antisense oligonucleotide
  modified_base 6: mod_base = OTHER; note = 5-methyl
  modified_base 10..11: mod_base = OTHER; note = 5-methyl
  modified_base 15..17: mod_base = OTHER; note = 5-methyl
  modified_base 16..17: mod_base = OTHER; note = bicyclic nucleic acid (BNA)
  source 1..17: mol_type = other DNA
aagttctgtccaagccc

SEQ ID NO: 9943 - DNA, 16 bp, synthetic construct
  misc_feature 1..16: note = Description of Artificial Sequence: Synthetic Antisense oligonucleotide
  modified_base 6: mod_base = OTHER; note = 5-methyl
  modified_base 10..11: mod_base = OTHER; note = 5-methyl
  modified_base 15..16: mod_base = OTHER; note = 5-methyl
  modified_base 15..16: mod_base = OTHER; note = bicyclic nucleic acid (BNA)
  source 1..16: mol_type = other DNA
aagttctgtccaagcc

SEQ ID NO: 9944 - DNA, 15 bp, synthetic construct
  misc_feature 1..15: note = Description of Artificial Sequence: Synthetic Antisense oligonucleotide
  modified_base 6: mod_base = OTHER; note = 5-methyl
  modified_base 10..11: mod_base = OTHER; note = 5-methyl
  modified_base 15: mod_base = OTHER; note = 5-methyl
  modified_base 14..15: mod_base = OTHER; note = bicyclic nucleic acid (BNA)
  source 1..15: mol_type = other DNA
aagttctgtccaagc

SEQ ID NO: 9945 - DNA, 14 bp, synthetic construct
  misc_feature 1..14: note = Description of Artificial Sequence: Synthetic Antisense oligonucleotide
  modified_base 6: mod_base = OTHER; note = 5-methyl
  modified_base 10..11: mod_base = OTHER; note = 5-methyl
  modified_base 13..14: mod_base = OTHER; note = bicyclic nucleic acid (BNA)
  source 1..14: mol_type = other DNA
aagttctgtccaag

SEQ ID NO: 9946 - DNA, 13 bp, synthetic construct
  misc_feature 1..13: note = Description of Artificial Sequence: Synthetic Antisense oligonucleotide
  modified_base 6: mod_base = OTHER; note = 5-methyl
  modified_base 10..11: mod_base = OTHER; note = 5-methyl
  modified_base 12..13: mod_base = OTHER; note = bicyclic nucleic acid (BNA)
  source 1..13: mol_type = other DNA
aagttctgtccaa

SEQ ID NO: 9947 - DNA, 12 bp, synthetic construct
  misc_feature 1..12: note = Description of Artificial Sequence: Synthetic Antisense oligonucleotide
  modified_base 6: mod_base = OTHER; note = 5-methyl
  modified_base 10..11: mod_base = OTHER; note = 5-methyl
  modified_base 11..12: mod_base = OTHER; note = bicyclic nucleic acid (BNA)
  source 1..12: mol_type = other DNA
aagttctgtcca

SEQ ID NO: 9948 - DNA, 11 bp, synthetic construct
  misc_feature 1..11: note = Description of Artificial Sequence: Synthetic Antisense oligonucleotide
  modified_base 6: mod_base = OTHER; note = 5-methyl
  modified_base 10..11: mod_base = OTHER; note = 5-methyl
  modified_base 10..11: mod_base = OTHER; note = bicyclic nucleic acid (BNA)
  source 1..11: mol_type = other DNA
aagttctgtcc

SEQ ID NO: 9949 - DNA, 10 bp, synthetic construct
  misc_feature 1..10: note = Description of Artificial Sequence: Synthetic Antisense oligonucleotide
  modified_base 6: mod_base = OTHER; note = 5-methyl
  modified_base 10: mod_base = OTHER; note = 5-methyl
  modified_base 9..10: mod_base = OTHER; note = bicyclic nucleic acid (BNA)
  source 1..10: mol_type = other DNA
aagttctgtc

SEQ ID NO: 9950-9951 - skipped (2 entries)

SEQ ID NO: 9952 - DNA, 20 bp, synthetic construct
  misc_feature 1..20: note = Description of Artificial Sequence: Synthetic Antisense oligonucleotide
  modified_base 7: mod_base = OTHER; note = 5-methyl
  modified_base 11..12: mod_base = OTHER; note = 5-methyl
  modified_base 16..18: mod_base = OTHER; note = 5-methyl
  modified_base 19..20: mod_base = OTHER; note = bicyclic nucleic acid (BNA)
  source 1..20: mol_type = other DNA
taagttctgtccaagcccgg

SEQ ID NO: 9953 - DNA, 19 bp, synthetic construct
  misc_feature 1..19: note = Description of Artificial Sequence: Synthetic Antisense oligonucleotide
  modified_base 7: mod_base = OTHER; note = 5-methyl
  modified_base 11..12: mod_base = OTHER; note = 5-methyl
  modified_base 16..18: mod_base = OTHER; note = 5-methyl
  modified_base 18..19: mod_base = OTHER; note = bicyclic nucleic acid (BNA)
  source 1..19: mol_type = other DNA
taagttctgtccaagcccg

SEQ ID NO: 9954 - DNA, 18 bp, synthetic construct
  misc_feature 1..18: note = Description of Artificial Sequence: Synthetic Antisense oligonucleotide
  modified_base 7: mod_base = OTHER; note = 5-methyl
  modified_base 11..12: mod_base = OTHER; note = 5-methyl
  modified_base 16..18: mod_base = OTHER; note = 5-methyl
  modified_base 17..18: mod_base = OTHER; note = bicyclic nucleic acid (BNA)
  source 1..18: mol_type = other DNA
taagttctgtccaagccc

SEQ ID NO: 9955 - DNA, 17 bp, synthetic construct
  misc_feature 1..17: note = Description of Artificial Sequence: Synthetic Antisense oligonucleotide
  modified_base 7: mod_base = OTHER; note = 5-methyl
  modified_base 11..12: mod_base = OTHER; note = 5-methyl
  modified_base 16..17: mod_base = OTHER; note = 5-methyl
  modified_base 16..17: mod_base = OTHER; note = bicyclic nucleic acid (BNA)
  source 1..17: mol_type = other DNA
taagttctgtccaagcc

SEQ ID NO: 9956 - DNA, 16 bp, synthetic construct
  misc_feature 1..16: note = Description of Artificial Sequence: Synthetic Antisense oligonucleotide
  modified_base 7: mod_base = OTHER; note = 5-methyl
  modified_base 11..12: mod_base = OTHER; note = 5-methyl
  modified_base 16: mod_base = OTHER; note = 5-methyl
  modified_base 15..16: mod_base = OTHER; note = bicyclic nucleic acid (BNA)
  source 1..16: mol_type = other DNA
taagttctgtccaagc

SEQ ID NO: 9957 - DNA, 14 bp, synthetic construct
  misc_feature 1..14: note = Description of Artificial Sequence: Synthetic Antisense oligonucleotide
  modified_base 7: mod_base = OTHER; note = 5-methyl
  modified_base 11..12: mod_base = OTHER; note = 5-methyl
  modified_base 13..14: mod_base = OTHER; note = bicyclic nucleic acid (BNA)
  source 1..14: mol_type = other DNA
taagttctgtccaa

SEQ ID NO: 9958 - DNA, 13 bp, synthetic construct
  misc_feature 1..13: note = Description of Artificial Sequence: Synthetic Antisense oligonucleotide
  modified_base 7: mod_base = OTHER; note = 5-methyl
  modified_base 11..12: mod_base = OTHER; note = 5-methyl
  modified_base 12..13: mod_base = OTHER; note = bicyclic nucleic acid (BNA)
  source 1..13: mol_type = other DNA
taagttctgtcca

SEQ ID NO: 9959 - DNA, 12 bp, synthetic construct
  misc_feature 1..12: note = Description of Artificial Sequence: Synthetic Antisense oligonucleotide
  modified_base 7: mod_base = OTHER; note = 5-methyl
  modified_base 11..12: mod_base = OTHER; note = 5-methyl
  modified_base 11..12: mod_base = OTHER; note = bicyclic nucleic acid (BNA)
  source 1..12: mol_type = other DNA
taagttctgtcc

SEQ ID NO: 9960 - DNA, 11 bp, synthetic construct
  misc_feature 1..11: note = Description of Artificial Sequence: Synthetic Antisense oligonucleotide
  modified_base 7: mod_base = OTHER; note = 5-methyl
  modified_base 11: mod_base = OTHER; note = 5-methyl
  modified_base 10..11: mod_base = OTHER; note = bicyclic nucleic acid (BNA)
  source 1..11: mol_type = other DNA
taagttctgtc

SEQ ID NO: 9961 - DNA, 10 bp, synthetic construct
  misc_feature 1..10: note = Description of Artificial Sequence: Synthetic Antisense oligonucleotide
  modified_base 7: mod_base = OTHER; note = 5-methyl
  modified_base 9..10: mod_base = OTHER; note = bicyclic nucleic acid (BNA)
  source 1..10: mol_type = other DNA
taagttctgt

SEQ ID NO: 9962-9963 - skipped (2 entries)

SEQ ID NO: 9964 - DNA, 20 bp, synthetic construct
  misc_feature 1..20: note = Description of Artificial Sequence: Synthetic Antisense oligonucleotide
  modified_base 8: mod_base = OTHER; note = 5-methyl
  modified_base 12..13: mod_base = OTHER; note = 5-methyl
  modified_base 17..19: mod_base = OTHER; note = 5-methyl
  modified_base 19..20: mod_base = OTHER; note = bicyclic nucleic acid (BNA)
  source 1..20: mol_type = other DNA
gtaagttctgtccaagcccg

SEQ ID NO: 9965 - DNA, 19 bp, synthetic construct
  misc_feature 1..19: note = Description of Artificial Sequence: Synthetic Antisense oligonucleotide
  modified_base 8: mod_base = OTHER; note = 5-methyl
  modified_base 12..13: mod_base = OTHER; note = 5-methyl
  modified_base 17..19: mod_base = OTHER; note = 5-methyl
  modified_base 18..19: mod_base = OTHER; note = bicyclic nucleic acid (BNA)
  source 1..19: mol_type = other DNA
gtaagttctgtccaagccc

SEQ ID NO: 9966 - DNA, 17 bp, synthetic construct
  misc_feature 1..17: note = Description of Artificial Sequence: Synthetic Antisense oligonucleotide
  modified_base 8: mod_base = OTHER; note = 5-methyl
  modified_base 12..13: mod_base = OTHER; note = 5-methyl
  modified_base 17: mod_base = OTHER; note = 5-methyl
  modified_base 16..17: mod_base = OTHER; note = bicyclic nucleic acid (BNA)
  source 1..17: mol_type = other DNA
gtaagttctgtccaagc

SEQ ID NO: 9967 - DNA, 16 bp, synthetic construct
  misc_feature 1..16: note = Description of Artificial Sequence: Synthetic Antisense oligonucleotide
  modified_base 8: mod_base = OTHER; note = 5-methyl
  modified_base 12..13: mod_base = OTHER; note = 5-methyl
  modified_base 15..16: mod_base = OTHER; note = bicyclic nucleic acid (BNA)
  source 1..16: mol_type = other DNA
gtaagttctgtccaag

SEQ ID NO: 9968 - DNA, 15 bp, synthetic construct
  misc_feature 1..15: note = Description of Artificial Sequence: Synthetic Antisense oligonucleotide
  modified_base 8: mod_base = OTHER; note = 5-methyl
  modified_base 12..13: mod_base = OTHER; note = 5-methyl
  modified_base 14..15: mod_base = OTHER; note = bicyclic nucleic acid (BNA)
  source 1..15: mol_type = other DNA
gtaagttctgtccaa

SEQ ID NO: 9969 - DNA, 14 bp, synthetic construct
  misc_feature 1..14: note = Description of Artificial Sequence: Synthetic Antisense oligonucleotide
  modified_base 8: mod_base = OTHER; note = 5-methyl
  modified_base 12..13: mod_base = OTHER; note = 5-methyl
  modified_base 13..14: mod_base = OTHER; note = bicyclic nucleic acid (BNA)
  source 1..14: mol_type = other DNA
gtaagttctgtcca

SEQ ID NO: 9970 - DNA, 13 bp, synthetic construct
  misc_feature 1..13: note = Description of Artificial Sequence: Synthetic Antisense oligonucleotide
  modified_base 8: mod_base = OTHER; note = 5-methyl
  modified_base 12..13: mod_base = OTHER; note = 5-methyl
  modified_base 12..13: mod_base = OTHER; note = bicyclic nucleic acid (BNA)
  source 1..13: mol_type = other DNA
gtaagttctgtcc

SEQ ID NO: 9971 - DNA, 12 bp, synthetic construct
  misc_feature 1..12: note = Description of Artificial Sequence: Synthetic Antisense oligonucleotide
  modified_base 8: mod_base = OTHER; note = 5-methyl
  modified_base 12: mod_base = OTHER; note = 5-methyl
  modified_base 11..12: mod_base = OTHER; note = bicyclic nucleic acid (BNA)
  source 1..12: mol_type = other DNA
gtaagttctgtc

SEQ ID NO: 9972 - DNA, 11 bp, synthetic construct
  misc_feature 1..11: note = Description of Artificial Sequence: Synthetic Antisense oligonucleotide
  modified_base 8: mod_base = OTHER; note = 5-methyl
  modified_base 10..11: mod_base = OTHER; note = bicyclic nucleic acid (BNA)
  source 1..11: mol_type = other DNA
gtaagttctgt

SEQ ID NO: 9973 - DNA, 10 bp, synthetic construct
  misc_feature 1..10: note = Description of Artificial Sequence: Synthetic Antisense oligonucleotide
  modified_base 8: mod_base = OTHER; note = 5-methyl
  modified_base 9..10: mod_base = OTHER; note = bicyclic nucleic acid (BNA)
  source 1..10: mol_type = other DNA
gtaagttctg

SEQ ID NO: 9974-9975 - skipped (2 entries)

SEQ ID NO: 9976 - DNA, 20 bp, synthetic construct
  misc_feature 1..20: note = Description of Artificial Sequence: Synthetic Antisense oligonucleotide
  modified_base 9: mod_base = OTHER; note = 5-methyl
  modified_base 13..14: mod_base = OTHER; note = 5-methyl
  modified_base 18..20: mod_base = OTHER; note = 5-methyl
  modified_base 19..20: mod_base = OTHER; note = bicyclic nucleic acid (BNA)
  source 1..20: mol_type = other DNA
ggtaagttctgtccaagccc

SEQ ID NO: 9977 - DNA, 19 bp, synthetic construct
  misc_feature 1..19: note = Description of Artificial Sequence: Synthetic Antisense oligonucleotide
  modified_base 9: mod_base = OTHER; note = 5-methyl
  modified_base 13..14: mod_base = OTHER; note = 5-methyl
  modified_base 18..19: mod_base = OTHER; note = 5-methyl
  modified_base 18..19: mod_base = OTHER; note = bicyclic nucleic acid (BNA)
  source 1..19: mol_type = other DNA
ggtaagttctgtccaagcc

SEQ ID NO: 9978 - DNA, 17 bp, synthetic construct
  misc_feature 1..17: note = Description of Artificial Sequence: Synthetic Antisense oligonucleotide
  modified_base 9: mod_base = OTHER; note = 5-methyl
  modified_base 13..14: mod_base = OTHER; note = 5-methyl
  modified_base 16..17: mod_base = OTHER; note = bicyclic nucleic acid (BNA)
  source 1..17: mol_type = other DNA
ggtaagttctgtccaag

SEQ ID NO: 9979 - DNA, 16 bp, synthetic construct
  misc_feature 1..16: note = Description of Artificial Sequence: Synthetic Antisense oligonucleotide
  modified_base 9: mod_base = OTHER; note = 5-methyl
  modified_base 13..14: mod_base = OTHER; note = 5-methyl
  modified_base 15..16: mod_base = OTHER; note = bicyclic nucleic acid (BNA)
  source 1..16: mol_type = other DNA
ggtaagttctgtccaa

SEQ ID NO: 9980 - DNA, 15 bp, synthetic construct
  misc_feature 1..15: note = Description of Artificial Sequence: Synthetic Antisense oligonucleotide
  modified_base 9: mod_base = OTHER; note = 5-methyl
  modified_base 13..14: mod_base = OTHER; note = 5-methyl
  modified_base 14..15: mod_base = OTHER; note = bicyclic nucleic acid (BNA)
  source 1..15: mol_type = other DNA
ggtaagttctgtcca

SEQ ID NO: 9981 - DNA, 14 bp, synthetic construct
  misc_feature 1..14: note = Description of Artificial Sequence: Synthetic Antisense oligonucleotide
  modified_base 9: mod_base = OTHER; note = 5-methyl
  modified_base 13..14: mod_base = OTHER; note = 5-methyl
  modified_base 13..14: mod_base = OTHER; note = bicyclic nucleic acid (BNA)
  source 1..14: mol_type = other DNA
ggtaagttctgtcc

SEQ ID NO: 9982 - DNA, 13 bp, synthetic construct
  misc_feature 1..13: note = Description of Artificial Sequence: Synthetic Antisense oligonucleotide
  modified_base 9: mod_base = OTHER; note = 5-methyl
  modified_base 13: mod_base = OTHER; note = 5-methyl
  modified_base 12..13: mod_base = OTHER; note = bicyclic nucleic acid (BNA)
  source 1..13: mol_type = other DNA
ggtaagttctgtc

SEQ ID NO: 9983 - DNA, 12 bp, synthetic construct
  misc_feature 1..12: note = Description of Artificial Sequence: Synthetic Antisense oligonucleotide
  modified_base 9: mod_base = OTHER; note = 5-methyl
  modified_base 11..12: mod_base = OTHER; note = bicyclic nucleic acid (BNA)
  source 1..12: mol_type = other DNA
ggtaagttctgt

SEQ ID NO: 9984 - DNA, 11 bp, synthetic construct
  misc_feature 1..11: note = Description of Artificial Sequence: Synthetic Antisense oligonucleotide
  modified_base 9: mod_base = OTHER; note = 5-methyl
  modified_base 10..11: mod_base = OTHER; note = bicyclic nucleic acid (BNA)
  source 1..11: mol_type = other DNA
ggtaagttctg

SEQ ID NO: 9985 - DNA, 10 bp, synthetic construct
  misc_feature 1..10: note = Description of Artificial Sequence: Synthetic Antisense oligonucleotide
  modified_base 9: mod_base = OTHER; note = 5-methyl
  modified_base 9..10: mod_base = OTHER; note = bicyclic nucleic acid (BNA)
  source 1..10: mol_type = other DNA
ggtaagttct

SEQ ID NO: 9986 - skipped

SEQ ID NO: 9987 - DNA, 20 bp, synthetic construct
  misc_feature 1..20: note = Description of Artificial Sequence: Synthetic Antisense oligonucleotide
  modified_base 1: mod_base = OTHER; note = 5-methyl
  modified_base 10: mod_base = OTHER; note = 5-methyl
  modified_base 14..15: mod_base = OTHER; note = 5-methyl
  modified_base 19..20: mod_base = OTHER; note = 5-methyl
  modified_base 19..20: mod_base = OTHER; note = bicyclic nucleic acid (BNA)
  source 1..20: mol_type = other DNA
cggtaagttctgtccaagcc

SEQ ID NO: 9988 - DNA, 19 bp, synthetic construct
  misc_feature 1..19: note = Description of Artificial Sequence: Synthetic Antisense oligonucleotide
  modified_base 1: mod_base = OTHER; note = 5-methyl
  modified_base 10: mod_base = OTHER; note = 5-methyl
  modified_base 14..15: mod_base = OTHER; note = 5-methyl
  modified_base 19: mod_base = OTHER; note = 5-methyl
  modified_base 18..19: mod_base = OTHER; note = bicyclic nucleic acid (BNA)
  source 1..19: mol_type = other DNA
cggtaagttctgtccaagc

SEQ ID NO: 9989 - DNA, 18 bp, synthetic construct
  misc_feature 1..18: note = Description of Artificial Sequence: Synthetic Antisense oligonucleotide
  modified_base 1: mod_base = OTHER; note = 5-methyl
  modified_base 10: mod_base = OTHER; note = 5-methyl
  modified_base 14..15: mod_base = OTHER; note = 5-methyl
  modified_base 17..18: mod_base = OTHER; note = bicyclic nucleic acid (BNA)
  source 1..18: mol_type = other DNA
cggtaagttctgtccaag

SEQ ID NO: 9990 - DNA, 17 bp, synthetic construct
  misc_feature 1..17: note = Description of Artificial Sequence: Synthetic Antisense oligonucleotide
  modified_base 1: mod_base = OTHER; note = 5-methyl
  modified_base 10: mod_base = OTHER; note = 5-methyl
  modified_base 14..15: mod_base = OTHER; note = 5-methyl
  modified_base 16..17: mod_base = OTHER; note = bicyclic nucleic acid (BNA)
  source 1..17: mol_type = other DNA
cggtaagttctgtccaa

SEQ ID NO: 9991 - DNA, 16 bp, synthetic construct
  misc_feature 1..16: note = Description of Artificial Sequence: Synthetic Antisense oligonucleotide
  modified_base 1: mod_base = OTHER; note = 5-methyl
  modified_base 10: mod_base = OTHER; note = 5-methyl
  modified_base 14..15: mod_base = OTHER; note = 5-methyl
  modified_base 15..16: mod_base = OTHER; note = bicyclic nucleic acid (BNA)
  source 1..16: mol_type = other DNA
cggtaagttctgtcca

SEQ ID NO: 9992 - DNA, 15 bp, synthetic construct
  misc_feature 1..15: note = Description of Artificial Sequence: Synthetic Antisense oligonucleotide
  modified_base 1: mod_base = OTHER; note = 5-methyl
  modified_base 10: mod_base = OTHER; note = 5-methyl
  modified_base 14..15: mod_base = OTHER; note = 5-methyl
  modified_base 14..15: mod_base = OTHER; note = bicyclic nucleic acid (BNA)
  source 1..15: mol_type = other DNA
cggtaagttctgtcc

SEQ ID NO: 9993 - DNA, 14 bp, synthetic construct
  misc_feature 1..14: note = Description of Artificial Sequence: Synthetic Antisense oligonucleotide
  modified_base 1: mod_base = OTHER; note = 5-methyl
  modified_base 10: mod_base = OTHER; note = 5-methyl
  modified_base 14: mod_base = OTHER; note = 5-methyl
  modified_base 13..14: mod_base = OTHER; note = bicyclic nucleic acid (BNA)
  source 1..14: mol_type = other DNA
cggtaagttctgtc

SEQ ID NO: 9994 - DNA, 13 bp, synthetic construct
  misc_feature 1..13: note = Description of Artificial Sequence: Synthetic Antisense oligonucleotide
  modified_base 1: mod_base = OTHER; note = 5-methyl
  modified_base 10: mod_base = OTHER; note = 5-methyl
  modified_base 12..13: mod_base = OTHER; note = bicyclic nucleic acid (BNA)
  source 1..13: mol_type = other DNA
cggtaagttctgt

SEQ ID NO: 9995 - DNA, 12 bp, synthetic construct
  misc_feature 1..12: note = Description of Artificial Sequence: Synthetic Antisense oligonucleotide
  modified_base 1: mod_base = OTHER; note = 5-methyl
  modified_base 10: mod_base = OTHER; note = 5-methyl
  modified_base 11..12: mod_base = OTHER; note = bicyclic nucleic acid (BNA)
  source 1..12: mol_type = other DNA
cggtaagttctg

SEQ ID NO: 9996 - DNA, 11 bp, synthetic construct
  misc_feature 1..11: note = Description of Artificial Sequence: Synthetic Antisense oligonucleotide
  modified_base 1: mod_base = OTHER; note = 5-methyl
  modified_base 10: mod_base = OTHER; note = 5-methyl
  modified_base 10..11: mod_base = OTHER; note = bicyclic nucleic acid (BNA)
  source 1..11: mol_type = other DNA
cggtaagttct

SEQ ID NO: 9997 - DNA, 10 bp, synthetic construct
  misc_feature 1..10: note = Description of Artificial Sequence: Synthetic Antisense oligonucleotide
  modified_base 1: mod_base = OTHER; note = 5-methyl
  modified_base 10: mod_base = OTHER; note = 5-methyl
  modified_base 9..10: mod_base = OTHER; note = bicyclic nucleic acid (BNA)
  source 1..10: mol_type = other DNA
cggtaagttc

SEQ ID NO: 9998-9999 - skipped (2 entries)

SEQ ID NO: 10000 - DNA, 20 bp, synthetic construct
  misc_feature 1..20: note = Description of Artificial Sequence: Synthetic Antisense oligonucleotide
  modified_base 2: mod_base = OTHER; note = 5-methyl
  modified_base 11: mod_base = OTHER; note = 5-methyl
  modified_base 15..16: mod_base = OTHER; note = 5-methyl
  modified_base 20: mod_base = OTHER; note = 5-methyl
  modified_base 19..20: mod_base = OTHER; note = bicyclic nucleic acid (BNA)
  source 1..20: mol_type = other DNA
tcggtaagttctgtccaagc

SEQ ID NO: 10001 - DNA, 19 bp, synthetic construct
  misc_feature 1..19: note = Description of Artificial Sequence: Synthetic Antisense oligonucleotide
  modified_base 2: mod_base = OTHER; note = 5-methyl
  modified_base 11: mod_base = OTHER; note = 5-methyl
  modified_base 15..16: mod_base = OTHER; note = 5-methyl
  modified_base 18..19: mod_base = OTHER; note = bicyclic nucleic acid (BNA)
  source 1..19: mol_type = other DNA
tcggtaagttctgtccaag

SEQ ID NO: 10002 - DNA, 18 bp, synthetic construct
  misc_feature 1..18: note = Description of Artificial Sequence: Synthetic Antisense oligonucleotide
  modified_base 2: mod_base = OTHER; note = 5-methyl
  modified_base 11: mod_base = OTHER; note = 5-methyl
  modified_base 15..16: mod_base = OTHER; note = 5-methyl
  modified_base 17..18: mod_base = OTHER; note = bicyclic nucleic acid (BNA)
  source 1..18: mol_type = other DNA
tcggtaagttctgtccaa

SEQ ID NO: 10003 - DNA, 17 bp, synthetic construct
  misc_feature 1..17: note = Description of Artificial Sequence: Synthetic Antisense oligonucleotide
  modified_base 2: mod_base = OTHER; note = 5-methyl
  modified_base 11: mod_base = OTHER; note = 5-methyl
  modified_base 15..16: mod_base = OTHER; note = 5-methyl
  modified_base 16..17: mod_base = OTHER; note = bicyclic nucleic acid (BNA)
  source 1..17: mol_type = other DNA
tcggtaagttctgtcca

SEQ ID NO: 10004 - DNA, 16 bp, synthetic construct
  misc_feature 1..16: note = Description of Artificial Sequence: Synthetic Antisense oligonucleotide
  modified_base 2: mod_base = OTHER; note = 5-methyl
  modified_base 11: mod_base = OTHER; note = 5-methyl
  modified_base 15..16: mod_base = OTHER; note = 5-methyl
  modified_base 15..16: mod_base = OTHER; note = bicyclic nucleic acid (BNA)
  source 1..16: mol_type = other DNA
tcggtaagttctgtcc

SEQ ID NO: 10005 - DNA, 15 bp, synthetic construct
  misc_feature 1..15: note = Description of Artificial Sequence: Synthetic Antisense oligonucleotide
  modified_base 2: mod_base = OTHER; note = 5-methyl
  modified_base 11: mod_base = OTHER; note = 5-methyl
  modified_base 15: mod_base = OTHER; note = 5-methyl
  modified_base 14..15: mod_base = OTHER; note = bicyclic nucleic acid (BNA)
  source 1..15: mol_type = other DNA
tcggtaagttctgtc

SEQ ID NO: 10006 - DNA, 14 bp, synthetic construct
  misc_feature 1..14: note = Description of Artificial Sequence: Synthetic Antisense oligonucleotide
  modified_base 2: mod_base = OTHER; note = 5-methyl
  modified_base 11: mod_base = OTHER; note = 5-methyl
  modified_base 13..14: mod_base = OTHER; note = bicyclic nucleic acid (BNA)
  source 1..14: mol_type = other DNA
tcggtaagttctgt

SEQ ID NO: 10007 - DNA, 13 bp, synthetic construct
  misc_feature 1..13: note = Description of Artificial Sequence: Synthetic Antisense oligonucleotide
  modified_base 2: mod_base = OTHER; note = 5-methyl
  modified_base 11: mod_base = OTHER; note = 5-methyl
  modified_base 12..13: mod_base = OTHER; note = bicyclic nucleic acid (BNA)
  source 1..13: mol_type = other DNA
tcggtaagttctg

SEQ ID NO: 10008 - DNA, 12 bp, synthetic construct
  misc_feature 1..12: note = Description of Artificial Sequence: Synthetic Antisense oligonucleotide
  modified_base 2: mod_base = OTHER; note = 5-methyl
  modified_base 11: mod_base = OTHER; note = 5-methyl
  modified_base 11..12: mod_base = OTHER; note = bicyclic nucleic acid (BNA)
  source 1..12: mol_type = other DNA
tcggtaagttct

SEQ ID NO: 10009 - DNA, 11 bp, synthetic construct
  misc_feature 1..11: note = Description of Artificial Sequence: Synthetic Antisense oligonucleotide
  modified_base 2: mod_base = OTHER; note = 5-methyl
  modified_base 11: mod_base = OTHER; note = 5-methyl
  modified_base 10..11: mod_base = OTHER; note = bicyclic nucleic acid (BNA)
  source 1..11: mol_type = other DNA
tcggtaagttc

SEQ ID NO: 10010 - DNA, 10 bp, synthetic construct
  misc_feature 1..10: note = Description of Artificial Sequence: Synthetic Antisense oligonucleotide
  modified_base 2: mod_base = OTHER; note = 5-methyl
  modified_base 9..10: mod_base = OTHER; note = bicyclic nucleic acid (BNA)
  source 1..10: mol_type = other DNA
tcggtaagtt

SEQ ID NO: 10011 - skipped

SEQ ID NO: 10012 - DNA, 20 bp, synthetic construct
  misc_feature 1..20: note = Description of Artificial Sequence: Synthetic Antisense oligonucleotide
  modified_base 3: mod_base = OTHER; note = 5-methyl
  modified_base 12: mod_base = OTHER; note = 5-methyl
  modified_base 16..17: mod_base = OTHER; note = 5-methyl
  modified_base 19..20: mod_base = OTHER; note = bicyclic nucleic acid (BNA)
  source 1..20: mol_type = other DNA
gtcggtaagttctgtccaag

SEQ ID NO: 10013 - DNA, 19 bp, synthetic construct
  misc_feature 1..19: note = Description of Artificial Sequence: Synthetic Antisense oligonucleotide
  modified_base 3: mod_base = OTHER; note = 5-methyl
  modified_base 12: mod_base = OTHER; note = 5-methyl
  modified_base 16..17: mod_base = OTHER; note = 5-methyl
  modified_base 18..19: mod_base = OTHER; note = bicyclic nucleic acid (BNA)
  source 1..19: mol_type = other DNA
gtcggtaagttctgtccaa

SEQ ID NO: 10014 - DNA, 18 bp, synthetic construct
  misc_feature 1..18: note = Description of Artificial Sequence: Synthetic Antisense oligonucleotide
  modified_base 3: mod_base = OTHER; note = 5-methyl
  modified_base 12: mod_base = OTHER; note = 5-methyl
  modified_base 16..17: mod_base = OTHER; note = 5-methyl
  modified_base 17..18: mod_base = OTHER; note = bicyclic nucleic acid (BNA)
  source 1..18: mol_type = other DNA
gtcggtaagttctgtcca

SEQ ID NO: 10015 - DNA, 17 bp, synthetic construct
  misc_feature 1..17: note = Description of Artificial Sequence: Synthetic Antisense oligonucleotide
  modified_base 3: mod_base = OTHER; note = 5-methyl
  modified_base 12: mod_base = OTHER; note = 5-methyl
  modified_base 16..17: mod_base = OTHER; note = 5-methyl
  modified_base 16..17: mod_base = OTHER; note = bicyclic nucleic acid (BNA)
  source 1..17: mol_type = other DNA
gtcggtaagttctgtcc

SEQ ID NO: 10016 - DNA, 16 bp, synthetic construct
  misc_feature 1..16: note = Description of Artificial Sequence: Synthetic Antisense oligonucleotide
  modified_base 3: mod_base = OTHER; note = 5-methyl
  modified_base 12: mod_base = OTHER; note = 5-methyl
  modified_base 16: mod_base = OTHER; note = 5-methyl
  modified_base 15..16: mod_base = OTHER; note = bicyclic nucleic acid (BNA)
  source 1..16: mol_type = other DNA
gtcggtaagttctgtc

SEQ ID NO: 10017 - DNA, 15 bp, synthetic construct
  misc_feature 1..15: note = Description of Artificial Sequence: Synthetic Antisense oligonucleotide
  modified_base 3: mod_base = OTHER; note = 5-methyl
  modified_base 12: mod_base = OTHER; note = 5-methyl
  modified_base 14..15: mod_base = OTHER; note = bicyclic nucleic acid (BNA)
  source 1..15: mol_type = other DNA
gtcggtaagttctgt

SEQ ID NO: 10018 - DNA, 14 bp, synthetic construct
  misc_feature 1..14: note = Description of Artificial Sequence: Synthetic Antisense oligonucleotide
  modified_base 3: mod_base = OTHER; note = 5-methyl
  modified_base 12: mod_base = OTHER; note = 5-methyl
  modified_base 13..14: mod_base = OTHER; note = bicyclic nucleic acid (BNA)
  source 1..14: mol_type = other DNA
gtcggtaagttctg

SEQ ID NO: 10019 - DNA, 13 bp, synthetic construct
  misc_feature 1..13: note = Description of Artificial Sequence: Synthetic Antisense oligonucleotide
  modified_base 3: mod_base = OTHER; note = 5-methyl
  modified_base 12: mod_base = OTHER; note = 5-methyl
  modified_base 12..13: mod_base = OTHER; note = bicyclic nucleic acid (BNA)
  source 1..13: mol_type = other DNA
gtcggtaagttct

SEQ ID NO: 10020 - DNA, 12 bp, synthetic construct
  misc_feature 1..12: note = Description of Artificial Sequence: Synthetic Antisense oligonucleotide
  modified_base 3: mod_base = OTHER; note = 5-methyl
  modified_base 12: mod_base = OTHER; note = 5-methyl
  modified_base 11..12: mod_base = OTHER; note = bicyclic nucleic acid (BNA)
  source 1..12: mol_type = other DNA
gtcggtaagttc

SEQ ID NO: 10021 - DNA, 11 bp, synthetic construct
  misc_feature 1..11: note = Description of Artificial Sequence: Synthetic Antisense oligonucleotide
  modified_base 3: mod_base = OTHER; note = 5-methyl
  modified_base 10..11: mod_base = OTHER; note = bicyclic nucleic acid (BNA)
  source 1..11: mol_type = other DNA
gtcggtaagtt

SEQ ID NO: 10022 - DNA, 10 bp, synthetic construct
  misc_feature 1..10: note = Description of Artificial Sequence: Synthetic Antisense oligonucleotide
  modified_base 3: mod_base = OTHER; note = 5-methyl
  modified_base 9..10: mod_base = OTHER; note = bicyclic nucleic acid (BNA)
  source 1..10: mol_type = other DNA
gtcggtaagt

SEQ ID NO: 10023 - DNA, 20 bp, synthetic construct
  misc_feature 1..20: note = Description of Artificial Sequence: Synthetic Antisense oligonucleotide
  modified_base 4: mod_base = OTHER; note = 5-methyl
  modified_base 13: mod_base = OTHER; note = 5-methyl
  modified_base 17..18: mod_base = OTHER; note = 5-methyl
  modified_base 19..20: mod_base = OTHER; note = bicyclic nucleic acid (BNA)
  source 1..20: mol_type = other DNA
agtcggtaagttctgtccaa

SEQ ID NO: 10024 - DNA, 19 bp, synthetic construct
  misc_feature 1..19: note = Description of Artificial Sequence: Synthetic Antisense oligonucleotide
  modified_base 4: mod_base = OTHER; note = 5-methyl
  modified_base 13: mod_base = OTHER; note = 5-methyl
  modified_base 17..18: mod_base = OTHER; note = 5-methyl
  modified_base 18..19: mod_base = OTHER; note = bicyclic nucleic acid (BNA)
  source 1..19: mol_type = other DNA
agtcggtaagttctgtcca

SEQ ID NO: 10025 - DNA, 17 bp, synthetic construct
  misc_feature 1..17: note = Description of Artificial Sequence: Synthetic Antisense oligonucleotide
  modified_base 4: mod_base = OTHER; note = 5-methyl
  modified_base 13: mod_base = OTHER; note = 5-methyl
  modified_base 17: mod_base = OTHER; note = 5-methyl
  modified_base 16..17: mod_base = OTHER; note = bicyclic nucleic acid (BNA)
  source 1..17: mol_type = other DNA
agtcggtaagttctgtc

SEQ ID NO: 10026 - DNA, 16 bp, synthetic construct
  misc_feature 1..16: note = Description of Artificial Sequence: Synthetic Antisense oligonucleotide
  modified_base 4: mod_base = OTHER; note = 5-methyl
  modified_base 13: mod_base = OTHER; note = 5-methyl
  modified_base 15..16: mod_base = OTHER; note = bicyclic nucleic acid (BNA)
  source 1..16: mol_type = other DNA
agtcggtaagttctgt

SEQ ID NO: 10027 - DNA, 15 bp, synthetic construct
  misc_feature 1..15: note = Description of Artificial Sequence: Synthetic Antisense oligonucleotide
  modified_base 4: mod_base = OTHER; note = 5-methyl
  modified_base 13: mod_base = OTHER; note = 5-methyl
  modified_base 14..15: mod_base = OTHER; note = bicyclic nucleic acid (BNA)
  source 1..15: mol_type = other DNA
agtcggtaagttctg

SEQ ID NO: 10028 - DNA, 14 bp, synthetic construct
  misc_feature 1..14: note = Description of Artificial Sequence: Synthetic Antisense oligonucleotide
  modified_base 4: mod_base = OTHER; note = 5-methyl
  modified_base 13: mod_base = OTHER; note = 5-methyl
  modified_base 13..14: mod_base = OTHER; note = bicyclic nucleic acid (BNA)
  source 1..14: mol_type = other DNA
agtcggtaagttct

SEQ ID NO: 10029 - DNA, 13 bp, synthetic construct
  misc_feature 1..13: note = Description of Artificial Sequence: Synthetic Antisense oligonucleotide
  modified_base 4: mod_base = OTHER; note = 5-methyl
  modified_base 13: mod_base = OTHER; note = 5-methyl
  modified_base 12..13: mod_base = OTHER; note = bicyclic nucleic acid (BNA)
  source 1..13: mol_type = other DNA
agtcggtaagttc

SEQ ID NO: 10030 - DNA, 12 bp, synthetic construct
  misc_feature 1..12: note = Description of Artificial Sequence: Synthetic Antisense oligonucleotide
  modified_base 4: mod_base = OTHER; note = 5-methyl
  modified_base 11..12: mod_base = OTHER; note = bicyclic nucleic acid (BNA)
  source 1..12: mol_type = other DNA
agtcggtaagtt

SEQ ID NO: 10031 - DNA, 11 bp, synthetic construct
  misc_feature 1..11: note = Description of Artificial Sequence: Synthetic Antisense oligonucleotide
  modified_base 4: mod_base = OTHER; note = 5-methyl
  modified_base 10..11: mod_base = OTHER; note = bicyclic nucleic acid (BNA)
  source 1..11: mol_type = other DNA
agtcggtaagt

SEQ ID NO: 10032 - DNA, 20 bp, synthetic construct
  misc_feature 1..20: note = Description of Artificial Sequence: Synthetic Antisense oligonucleotide
  modified_base 1: mod_base = OTHER; note = 5-methyl
  modified_base 5: mod_base = OTHER; note = 5-methyl
  modified_base 14: mod_base = OTHER; note = 5-methyl
  modified_base 18..19: mod_base = OTHER; note = 5-methyl
  modified_base 19..20: mod_base = OTHER; note = bicyclic nucleic acid (BNA)
  source 1..20: mol_type = other DNA
cagtcggtaagttctgtcca

SEQ ID NO: 10033 - DNA, 19 bp, synthetic construct
  misc_feature 1..19: note = Description of Artificial Sequence: Synthetic Antisense oligonucleotide
  modified_base 1: mod_base = OTHER; note = 5-methyl
  modified_base 5: mod_base = OTHER; note = 5-methyl
  modified_base 14: mod_base = OTHER; note = 5-methyl
  modified_base 18..19: mod_base = OTHER; note = 5-methyl
  modified_base 18..19: mod_base = OTHER; note = bicyclic nucleic acid (BNA)
  source 1..19: mol_type = other DNA
cagtcggtaagttctgtcc

SEQ ID NO: 10034 - DNA, 18 bp, synthetic construct
  misc_feature 1..18: note = Description of Artificial Sequence: Synthetic Antisense oligonucleotide
  modified_base 1: mod_base = OTHER; note = 5-methyl
  modified_base 5: mod_base = OTHER; note = 5-methyl
  modified_base 14: mod_base = OTHER; note = 5-methyl
  modified_base 18: mod_base = OTHER; note = 5-methyl
  modified_base 17..18: mod_base = OTHER; note = bicyclic nucleic acid (BNA)
  source 1..18: mol_type = other DNA
cagtcggtaagttctgtc

SEQ ID NO: 10035 - DNA, 17 bp, synthetic construct
  misc_feature 1..17: note = Description of Artificial Sequence: Synthetic Antisense oligonucleotide
  modified_base 1: mod_base = OTHER; note = 5-methyl
  modified_base 5: mod_base = OTHER; note = 5-methyl
  modified_base 14: mod_base = OTHER; note = 5-methyl
  modified_base 16..17: mod_base = OTHER; note = bicyclic nucleic acid (BNA)
  source 1..17: mol_type = other DNA
cagtcggtaagttctgt

SEQ ID NO: 10036 - DNA, 16 bp, synthetic construct
  misc_feature 1..16: note = Description of Artificial Sequence: Synthetic Antisense oligonucleotide
  modified_base 1: mod_base = OTHER; note = 5-methyl
  modified_base 5: mod_base = OTHER; note = 5-methyl
  modified_base 14: mod_base = OTHER; note = 5-methyl
  modified_base 15..16: mod_base = OTHER; note = bicyclic nucleic acid (BNA)
  source 1..16: mol_type = other DNA
cagtcggtaagttctg

SEQ ID NO: 10037 - DNA, 15 bp, synthetic construct
  misc_feature 1..15: note = Description of Artificial Sequence: Synthetic Antisense oligonucleotide
  modified_base 1: mod_base = OTHER; note = 5-methyl
  modified_base 5: mod_base = OTHER; note = 5-methyl
  modified_base 14: mod_base = OTHER; note = 5-methyl
  modified_base 14..15: mod_base = OTHER; note = bicyclic nucleic acid (BNA)
  source 1..15: mol_type = other DNA
cagtcggtaagttct

SEQ ID NO: 10038 - DNA, 14 bp, synthetic construct
  misc_feature 1..14: note = Description of Artificial Sequence: Synthetic Antisense oligonucleotide
  modified_base 1: mod_base = OTHER; note = 5-methyl
  modified_base 5: mod_base = OTHER; note = 5-methyl
  modified_base 14: mod_base = OTHER; note = 5-methyl
  modified_base 13..14: mod_base = OTHER; note = bicyclic nucleic acid (BNA)
  source 1..14: mol_type = other DNA
cagtcggtaagttc

SEQ ID NO: 10039 - DNA, 13 bp, synthetic construct
  misc_feature 1..13: note = Description of Artificial Sequence: Synthetic Antisense oligonucleotide
  modified_base 1: mod_base = OTHER; note = 5-methyl
  modified_base 5: mod_base = OTHER; note = 5-methyl
  modified_base 12..13: mod_base = OTHER; note = bicyclic nucleic acid (BNA)
  source 1..13: mol_type = other DNA
cagtcggtaagtt

SEQ ID NO: 10040 - DNA, 12 bp, synthetic construct
  misc_feature 1..12: note = Description of Artificial Sequence: Synthetic Antisense oligonucleotide
  modified_base 1: mod_base = OTHER; note = 5-methyl
  modified_base 5: mod_base = OTHER; note = 5-methyl
  modified_base 11..12: mod_base = OTHER; note = bicyclic nucleic acid (BNA)
  source 1..12: mol_type = other DNA
cagtcggtaagt

SEQ ID NO: 10041 - DNA, 20 bp, synthetic construct
  misc_feature 1..20: note = Description of Artificial Sequence: Synthetic Antisense oligonucleotide
  modified_base 1..2: mod_base = OTHER; note = 5-methyl
  modified_base 6: mod_base = OTHER; note = 5-methyl
  modified_base 15: mod_base = OTHER; note = 5-methyl
  modified_base 19..20: mod_base = OTHER; note = 5-methyl
  modified_base 19..20: mod_base = OTHER; note = bicyclic nucleic acid (BNA)
  source 1..20: mol_type = other DNA
ccagtcggtaagttctgtcc

SEQ ID NO: 10042 - DNA, 19 bp, synthetic construct
  misc_feature 1..19: note = Description of Artificial Sequence: Synthetic Antisense oligonucleotide
  modified_base 1..2: mod_base = OTHER; note = 5-methyl
  modified_base 6: mod_base = OTHER; note = 5-methyl
  modified_base 15: mod_base = OTHER; note = 5-methyl
  modified_base 19: mod_base = OTHER; note = 5-methyl
  modified_base 18..19: mod_base = OTHER; note = bicyclic nucleic acid (BNA)
  source 1..19: mol_type = other DNA
ccagtcggtaagttctgtc

SEQ ID NO: 10043 - DNA, 18 bp, synthetic construct
  misc_feature 1..18: note = Description of Artificial Sequence: Synthetic Antisense oligonucleotide
  modified_base 1..2: mod_base = OTHER; note = 5-methyl
  modified_base 6: mod_base = OTHER; note = 5-methyl
  modified_base 15: mod_base = OTHER; note = 5-methyl
  modified_base 17..18: mod_base = OTHER; note = bicyclic nucleic acid (BNA)
  source 1..18: mol_type = other DNA
ccagtcggtaagttctgt

SEQ ID NO: 10044 - DNA, 17 bp, synthetic construct
  misc_feature 1..17: note = Description of Artificial Sequence: Synthetic Antisense oligonucleotide
  modified_base 1..2: mod_base = OTHER; note = 5-methyl
  modified_base 6: mod_base = OTHER; note = 5-methyl
  modified_base 15: mod_base = OTHER; note = 5-methyl
  modified_base 16..17: mod_base = OTHER; note = bicyclic nucleic acid (BNA)
  source 1..17: mol_type = other DNA
ccagtcggtaagttctg

SEQ ID NO: 10045 - DNA, 16 bp, synthetic construct
  misc_feature 1..16: note = Description of Artificial Sequence: Synthetic Antisense oligonucleotide
  modified_base 1..2: mod_base = OTHER; note = 5-methyl
  modified_base 6: mod_base = OTHER; note = 5-methyl
  modified_base 15: mod_base = OTHER; note = 5-methyl
  modified_base 15..16: mod_base = OTHER; note = bicyclic nucleic acid (BNA)
  source 1..16: mol_type = other DNA
ccagtcggtaagttct

SEQ ID NO: 10046 - DNA, 15 bp, synthetic construct
  misc_feature 1..15: note = Description of Artificial Sequence: Synthetic Antisense oligonucleotide
  modified_base 1..2: mod_base = OTHER; note = 5-methyl
  modified_base 6: mod_base = OTHER; note = 5-methyl
  modified_base 15: mod_base = OTHER; note = 5-methyl
  modified_base 14..15: mod_base = OTHER; note = bicyclic nucleic acid (BNA)
  source 1..15: mol_type = other DNA
ccagtcggtaagttc

SEQ ID NO: 10047 - DNA, 14 bp, synthetic construct
  misc_feature 1..14: note = Description of Artificial Sequence: Synthetic Antisense oligonucleotide
  modified_base 1..2: mod_base = OTHER; note = 5-methyl
  modified_base 6: mod_base = OTHER; note = 5-methyl
  modified_base 13..14: mod_base = OTHER; note = bicyclic nucleic acid (BNA)
  source 1..14: mol_type = other DNA
ccagtcggtaagtt

SEQ ID NO: 10048 - DNA, 13 bp, synthetic construct
  misc_feature 1..13: note = Description of Artificial Sequence: Synthetic Antisense oligonucleotide
  modified_base 1..2: mod_base = OTHER; note = 5-methyl
  modified_base 6: mod_base = OTHER; note = 5-methyl
  modified_base 12..13: mod_base = OTHER; note = bicyclic nucleic acid (BNA)
  source 1..13: mol_type = other DNA
ccagtcggtaagt

SEQ ID NO: 10049 - DNA, 20 bp, synthetic construct
  misc_feature 1..20: note = Description of Artificial Sequence: Synthetic Antisense oligonucleotide
  modified_base 2..3: mod_base = OTHER; note = 5-methyl
  modified_base 7: mod_base = OTHER; note = 5-methyl
  modified_base 16: mod_base = OTHER; note = 5-methyl
  modified_base 20: mod_base = OTHER; note = 5-methyl
  modified_base 19..20: mod_base = OTHER; note = bicyclic nucleic acid (BNA)
  source 1..20: mol_type = other DNA
gccagtcggtaagttctgtc

SEQ ID NO: 10050 - DNA, 19 bp, synthetic construct
  misc_feature 1..19: note = Description of Artificial Sequence: Synthetic Antisense oligonucleotide
  modified_base 2..3: mod_base = OTHER; note = 5-methyl
  modified_base 7: mod_base = OTHER; note = 5-methyl
  modified_base 16: mod_base = OTHER; note = 5-methyl
  modified_base 18..19: mod_base = OTHER; note = bicyclic nucleic acid (BNA)
  source 1..19: mol_type = other DNA
gccagtcggtaagttctgt

SEQ ID NO: 10051 - DNA, 18 bp, synthetic construct
  misc_feature 1..18: note = Description of Artificial Sequence: Synthetic Antisense oligonucleotide
  modified_base 2..3: mod_base = OTHER; note = 5-methyl
  modified_base 7: mod_base = OTHER; note = 5-methyl
  modified_base 16: mod_base = OTHER; note = 5-methyl
  modified_base 17..18: mod_base = OTHER; note = bicyclic nucleic acid (BNA)
  source 1..18: mol_type = other DNA
gccagtcggtaagttctg

SEQ ID NO: 10052 - DNA, 17 bp, synthetic construct
  misc_feature 1..17: note = Description of Artificial Sequence: Synthetic Antisense oligonucleotide
  modified_base 2..3: mod_base = OTHER; note = 5-methyl
  modified_base 7: mod_base = OTHER; note = 5-methyl
  modified_base 16: mod_base = OTHER; note = 5-methyl
  modified_base 16..17: mod_base = OTHER; note = bicyclic nucleic acid (BNA)
  source 1..17: mol_type = other DNA
gccagtcggtaagttct

SEQ ID NO: 10053 - DNA, 16 bp, synthetic construct
  misc_feature 1..16: note = Description of Artificial Sequence: Synthetic Antisense oligonucleotide
  modified_base 2..3: mod_base = OTHER; note = 5-methyl
  modified_base 7: mod_base = OTHER; note = 5-methyl
  modified_base 16: mod_base = OTHER; note = 5-methyl
  modified_base 15..16: mod_base = OTHER; note = bicyclic nucleic acid (BNA)
  source 1..16: mol_type = other DNA
gccagtcggtaagttc

SEQ ID NO: 10054 - DNA, 15 bp, synthetic construct
  misc_feature 1..15: note = Description of Artificial Sequence: Synthetic Antisense oligonucleotide
  modified_base 2..3: mod_base = OTHER; note = 5-methyl
  modified_base 7: mod_base = OTHER; note = 5-methyl
  modified_base 14..15: mod_base = OTHER; note = bicyclic nucleic acid (BNA)
  source 1..15: mol_type = other DNA
gccagtcggtaagtt

SEQ ID NO: 10055 - DNA, 14 bp, synthetic construct
  misc_feature 1..14: note = Description of Artificial Sequence: Synthetic Antisense oligonucleotide
  modified_base 2..3: mod_base = OTHER; note = 5-methyl
  modified_base 7: mod_base = OTHER; note = 5-methyl
  modified_base 13..14: mod_base = OTHER; note = bicyclic nucleic acid (BNA)
  source 1..14: mol_type = other DNA
gccagtcggtaagt

SEQ ID NO: 10056 - DNA, 20 bp, synthetic construct
  misc_feature 1..20: note = Description of Artificial Sequence: Synthetic Antisense oligonucleotide
  modified_base 2: mod_base = OTHER; note = 5-methyl
  modified_base 14: mod_base = OTHER; note = 5-methyl
  modified_base 19: mod_base = OTHER; note = 5-methyl
  modified_base 19..20: mod_base = OTHER; note = bicyclic nucleic acid (BNA)
  source 1..20: mol_type = other DNA
tcaaggaagatggcatttct

SEQ ID NO: 10057 - DNA, 22 bp, synthetic construct
  misc_feature 1..22: note = Description of Artificial Sequence: Synthetic Antisense oligonucleotide
  modified_base 2: mod_base = OTHER; note = 5-methyl
  modified_base 14: mod_base = OTHER; note = 5-methyl
  modified_base 19: mod_base = OTHER; note = 5-methyl
  modified_base 21..22: mod_base = OTHER; note = bicyclic nucleic acid (BNA)
  source 1..22: mol_type = other DNA
tcaaggaagatggcatttctag

SEQ ID NO: 10058 - DNA, 16 bp, synthetic construct
  misc_feature 1..16: note = Description of Artificial Sequence: Synthetic Antisense oligonucleotide
  modified_base 2: mod_base = OTHER; note = 5-methyl
  modified_base 14: mod_base = OTHER; note = 5-methyl
  modified_base 15..16: mod_base = OTHER; note = bicyclic nucleic acid (BNA)
  source 1..16: mol_type = other DNA
tcaaggaagatggcat

SEQ ID NO: 10059 - DNA, 15 bp, synthetic construct
  misc_feature 1..15: note = Description of Artificial Sequence: Synthetic Antisense oligonucleotide
  modified_base 9: mod_base = OTHER; note = 5-methyl
  modified_base 14: mod_base = OTHER; note = 5-methyl
  modified_base 14..15: mod_base = OTHER; note = bicyclic nucleic acid (BNA)
  source 1..15: mol_type = other DNA
gaagatggcatttct

SEQ ID NO: 10060 - DNA, 21 bp, synthetic construct
  misc_feature 1..21: note = Description of Artificial Sequence: Synthetic Antisense oligonucleotide
  modified_base 2: mod_base = OTHER; note = 5-methyl
  modified_base 14: mod_base = OTHER; note = 5-methyl
  modified_base 19: mod_base = OTHER; note = 5-methyl
  modified_base 20..21: mod_base = OTHER; note = bicyclic nucleic acid (BNA)
  source 1..21: mol_type = other DNA
tcaaggaagatggcatttcta

SEQ ID NO: 10061 - DNA, 19 bp, synthetic construct
  misc_feature 1..19: note = Description of Artificial Sequence: Synthetic Antisense oligonucleotide
  modified_base 2: mod_base = OTHER; note = 5-methyl
  modified_base 14: mod_base = OTHER; note = 5-methyl
  modified_base 19: mod_base = OTHER; note = 5-methyl
  modified_base 18..19: mod_base = OTHER; note = bicyclic nucleic acid (BNA)
  source 1..19: mol_type = other DNA
tcaaggaagatggcatttc

SEQ ID NO: 10062 - DNA, 18 bp, synthetic construct
  misc_feature 1..18: note = Description of Artificial Sequence: Synthetic Antisense oligonucleotide
  modified_base 2: mod_base = OTHER; note = 5-methyl
  modified_base 14: mod_base = OTHER; note = 5-methyl
  modified_base 17..18: mod_base = OTHER; note = bicyclic nucleic acid (BNA)
  source 1..18: mol_type = other DNA
tcaaggaagatggcattt

SEQ ID NO: 10063 - DNA, 17 bp, synthetic construct
  misc_feature 1..17: note = Description of Artificial Sequence: Synthetic Antisense oligonucleotide
  modified_base 2: mod_base = OTHER; note = 5-methyl
  modified_base 14: mod_base = OTHER; note = 5-methyl
  modified_base 16..17: mod_base = OTHER; note = bicyclic nucleic acid (BNA)
  source 1..17: mol_type = other DNA
tcaaggaagatggcatt

SEQ ID NO: 10064 - DNA, 15 bp, synthetic construct
  misc_feature 1..15: note = Description of Artificial Sequence: Synthetic Antisense oligonucleotide
  modified_base 2: mod_base = OTHER; note = 5-methyl
  modified_base 14: mod_base = OTHER; note = 5-methyl
  modified_base 14..15: mod_base = OTHER; note = bicyclic nucleic acid (BNA)
  source 1..15: mol_type = other DNA
tcaaggaagatggca

SEQ ID NO: 10065 - DNA, 14 bp, synthetic construct
  misc_feature 1..14: note = Description of Artificial Sequence: Synthetic Antisense oligonucleotide
  modified_base 2: mod_base = OTHER; note = 5-methyl
  modified_base 14: mod_base = OTHER; note = 5-methyl
  modified_base 13..14: mod_base = OTHER; note = bicyclic nucleic acid (BNA)
  source 1..14: mol_type = other DNA
tcaaggaagatggc

SEQ ID NO: 10066 - DNA, 13 bp, synthetic construct
  misc_feature 1..13: note = Description of Artificial Sequence: Synthetic Antisense oligonucleotide
  modified_base 2: mod_base = OTHER; note = 5-methyl
  modified_base 12..13: mod_base = OTHER; note = bicyclic nucleic acid (BNA)
  source 1..13: mol_type = other DNA
tcaaggaagatgg

SEQ ID NO: 10067 - DNA, 12 bp, synthetic construct
  misc_feature 1..12: note = Description of Artificial Sequence: Synthetic Antisense oligonucleotide
  modified_base 2: mod_base = OTHER; note = 5-methyl
  modified_base 11..12: mod_base = OTHER; note = bicyclic nucleic acid (BNA)
  source 1..12: mol_type = other DNA
tcaaggaagatg

SEQ ID NO: 10068 - DNA, 11 bp, synthetic construct
  misc_feature 1..11: note = Description of Artificial Sequence: Synthetic Antisense oligonucleotide
  modified_base 2: mod_base = OTHER; note = 5-methyl
  modified_base 10..11: mod_base = OTHER; note = bicyclic nucleic acid (BNA)
  source 1..11: mol_type = other DNA
tcaaggaagat

SEQ ID NO: 10069 - DNA, 10 bp, synthetic construct
  misc_feature 1..10: note = Description of Artificial Sequence: Synthetic Antisense oligonucleotide
  modified_base 2: mod_base = OTHER; note = 5-methyl
  modified_base 9..10: mod_base = OTHER; note = bicyclic nucleic acid (BNA)
  source 1..10: mol_type = other DNA
tcaaggaaga

SEQ ID NO: 10070 - skipped

SEQ ID NO: 10071 - DNA, 21 bp, synthetic construct
  misc_feature 1..21: note = Description of Artificial Sequence: Synthetic Antisense oligonucleotide
  modified_base 1: mod_base = OTHER; note = 5-methyl
  modified_base 13: mod_base = OTHER; note = 5-methyl
  modified_base 18: mod_base = OTHER; note = 5-methyl
  modified_base 20..21: mod_base = OTHER; note = bicyclic nucleic acid (BNA)
  source 1..21: mol_type = other DNA
caaggaagatggcatttctag

SEQ ID NO: 10072 - DNA, 20 bp, synthetic construct
  misc_feature 1..20: note = Description of Artificial Sequence: Synthetic Antisense oligonucleotide
  modified_base 1: mod_base = OTHER; note = 5-methyl
  modified_base 13: mod_base = OTHER; note = 5-methyl
  modified_base 18: mod_base = OTHER; note = 5-methyl
  modified_base 19..20: mod_base = OTHER; note = bicyclic nucleic acid (BNA)
  source 1..20: mol_type = other DNA
caaggaagatggcatttcta

SEQ ID NO: 10073 - DNA, 19 bp, synthetic construct
  misc_feature 1..19: note = Description of Artificial Sequence: Synthetic Antisense oligonucleotide
  modified_base 1: mod_base = OTHER; note = 5-methyl
  modified_base 13: mod_base = OTHER; note = 5-methyl
  modified_base 18: mod_base = OTHER; note = 5-methyl
  modified_base 18..19: mod_base = OTHER; note = bicyclic nucleic acid (BNA)
  source 1..19: mol_type = other DNA
caaggaagatggcatttct

SEQ ID NO: 10074 - DNA, 18 bp, synthetic construct
  misc_feature 1..18: note = Description of Artificial Sequence: Synthetic Antisense oligonucleotide
  modified_base 1: mod_base = OTHER; note = 5-methyl
  modified_base 13: mod_base = OTHER; note = 5-methyl
  modified_base 18: mod_base = OTHER; note = 5-methyl
  modified_base 17..18: mod_base = OTHER; note = bicyclic nucleic acid (BNA)
  source 1..18: mol_type = other DNA
caaggaagatggcatttc

SEQ ID NO: 10075 - DNA, 17 bp, synthetic construct
  misc_feature 1..17: note = Description of Artificial Sequence: Synthetic Antisense oligonucleotide
  modified_base 1: mod_base = OTHER; note = 5-methyl
  modified_base 13: mod_base = OTHER; note = 5-methyl
  modified_base 16..17: mod_base = OTHER; note = bicyclic nucleic acid (BNA)
  source 1..17: mol_type = other DNA
caaggaagatggcattt

SEQ ID NO: 10076 - DNA, 16 bp, synthetic construct
  misc_feature 1..16: note = Description of Artificial Sequence: Synthetic Antisense oligonucleotide
  modified_base 1: mod_base = OTHER; note = 5-methyl
  modified_base 13: mod_base = OTHER; note = 5-methyl
  modified_base 15..16: mod_base = OTHER; note = bicyclic nucleic acid (BNA)
  source 1..16: mol_type = other DNA
caaggaagatggcatt

SEQ ID NO: 10077 - DNA, 15 bp, synthetic construct
  misc_feature 1..15: note = Description of Artificial Sequence: Synthetic Antisense oligonucleotide
  modified_base 1: mod_base = OTHER; note = 5-methyl
  modified_base 13: mod_base = OTHER; note = 5-methyl
  modified_base 14..15: mod_base = OTHER; note = bicyclic nucleic acid (BNA)
  source 1..15: mol_type = other DNA
caaggaagatggcat

SEQ ID NO: 10078 - DNA, 14 bp, synthetic construct
  misc_feature 1..14: note = Description of Artificial Sequence: Synthetic Antisense oligonucleotide
  modified_base 1: mod_base = OTHER; note = 5-methyl
  modified_base 13: mod_base = OTHER; note = 5-methyl
  modified_base 13..14: mod_base = OTHER; note = bicyclic nucleic acid (BNA)
  source 1..14: mol_type = other DNA
caaggaagatggca

SEQ ID NO: 10079 - DNA, 13 bp, synthetic construct
  misc_feature 1..13: note = Description of Artificial Sequence: Synthetic Antisense oligonucleotide
  modified_base 1: mod_base = OTHER; note = 5-methyl
  modified_base 13: mod_base = OTHER; note = 5-methyl
  modified_base 12..13: mod_base = OTHER; note = bicyclic nucleic acid (BNA)
  source 1..13: mol_type = other DNA
caaggaagatggc

SEQ ID NO: 10080 - DNA, 12 bp, synthetic construct
  misc_feature 1..12: note = Description of Artificial Sequence: Synthetic Antisense oligonucleotide
  modified_base 1: mod_base = OTHER; note = 5-methyl
  modified_base 11..12: mod_base = OTHER; note = bicyclic nucleic acid (BNA)
  source 1..12: mol_type = other DNA
caaggaagatgg

SEQ ID NO: 10081 - DNA, 11 bp, synthetic construct
  misc_feature 1..11: note = Description of Artificial Sequence: Synthetic Antisense oligonucleotide
  modified_base 1: mod_base = OTHER; note = 5-methyl
  modified_base 10..11: mod_base = OTHER; note = bicyclic nucleic acid (BNA)
  source 1..11: mol_type = other DNA
caaggaagatg

SEQ ID NO: 10082 - DNA, 10 bp, synthetic construct
  misc_feature 1..10: note = Description of Artificial Sequence: Synthetic Antisense oligonucleotide
  modified_base 1: mod_base = OTHER; note = 5-methyl
  modified_base 9..10: mod_base = OTHER; note = bicyclic nucleic acid (BNA)
  source 1..10: mol_type = other DNA
caaggaagat

SEQ ID NO: 10083 - DNA, 20 bp, synthetic construct
  misc_feature 1..20: note = Description of Artificial Sequence: Synthetic Antisense oligonucleotide
  modified_base 12: mod_base = OTHER; note = 5-methyl
  modified_base 17: mod_base = OTHER; note = 5-methyl
  modified_base 19..20: mod_base = OTHER; note = bicyclic nucleic acid (BNA)
  source 1..20: mol_type = other DNA
aaggaagatggcatttctag

SEQ ID NO: 10084 - DNA, 19 bp, synthetic construct
  misc_feature 1..19: note = Description of Artificial Sequence: Synthetic Antisense oligonucleotide
  modified_base 12: mod_base = OTHER; note = 5-methyl
  modified_base 17: mod_base = OTHER; note = 5-methyl
  modified_base 18..19: mod_base = OTHER; note = bicyclic nucleic acid (BNA)
  source 1..19: mol_type = other DNA
aaggaagatggcatttcta

SEQ ID NO: 10085 - DNA, 18 bp, synthetic construct
  misc_feature 1..18: note = Description of Artificial Sequence: Synthetic Antisense oligonucleotide
  modified_base 12: mod_base = OTHER; note = 5-methyl
  modified_base 17: mod_base = OTHER; note = 5-methyl
  modified_base 17..18: mod_base = OTHER; note = bicyclic nucleic acid (BNA)
  source 1..18: mol_type = other DNA
aaggaagatggcatttct

SEQ ID NO: 10086 - DNA, 17 bp, synthetic construct
  misc_feature 1..17: note = Description of Artificial Sequence: Synthetic Antisense oligonucleotide
  modified_base 12: mod_base = OTHER; note = 5-methyl
  modified_base 17: mod_base = OTHER; note = 5-methyl
  modified_base 16..17: mod_base = OTHER; note = bicyclic nucleic acid (BNA)
  source 1..17: mol_type = other DNA
aaggaagatggcatttc

SEQ ID NO: 10087 - DNA, 16 bp, synthetic construct
  misc_feature 1..16: note = Description of Artificial Sequence: Synthetic Antisense oligonucleotide
  modified_base 12: mod_base = OTHER; note = 5-methyl
  modified_base 15..16: mod_base = OTHER; note = bicyclic nucleic acid (BNA)
  source 1..16: mol_type = other DNA
aaggaagatggcattt

SEQ ID NO: 10088 - DNA, 15 bp, synthetic construct
  misc_feature 1..15: note = Description of Artificial Sequence: Synthetic Antisense oligonucleotide
  modified_base 12: mod_base = OTHER; note = 5-methyl
  modified_base 14..15: mod_base = OTHER; note = bicyclic nucleic acid (BNA)
  source 1..15: mol_type = other DNA
aaggaagatggcatt

SEQ ID NO: 10089 - DNA, 14 bp, synthetic construct
  misc_feature 1..14: note = Description of Artificial Sequence: Synthetic Antisense oligonucleotide
  modified_base 12: mod_base = OTHER; note = 5-methyl
  modified_base 13..14: mod_base = OTHER; note = bicyclic nucleic acid (BNA)
  source 1..14: mol_type = other DNA
aaggaagatggcat

SEQ ID NO: 10090 - DNA, 13 bp, synthetic construct
  misc_feature 1..13: note = Description of Artificial Sequence: Synthetic Antisense oligonucleotide
  modified_base 12: mod_base = OTHER; note = 5-methyl
  modified_base 12..13: mod_base = OTHER; note = bicyclic nucleic acid (BNA)
  source 1..13: mol_type = other DNA
aaggaagatggca

SEQ ID NO: 10091 - DNA, 12 bp, synthetic construct
  misc_feature 1..12: note = Description of Artificial Sequence: Synthetic Antisense oligonucleotide
  modified_base 11..12: mod_base = OTHER; note = bicyclic nucleic acid (BNA)
  modified_base 12: mod_base = OTHER; note = 5-methyl
  source 1..12: mol_type = other DNA
aaggaagatggc

SEQ ID NO: 10092 - DNA, 19 bp, synthetic construct
  misc_feature 1..19: note = Description of Artificial Sequence: Synthetic Antisense oligonucleotide
  modified_base 11: mod_base = OTHER; note = 5-methyl
  modified_base 16: mod_base = OTHER; note = 5-methyl
  modified_base 18..19: mod_base = OTHER; note = bicyclic nucleic acid (BNA)
  source 1..19: mol_type = other DNA
aggaagatggcatttctag

SEQ ID NO: 10093 - DNA, 18 bp, synthetic construct
  misc_feature 1..18: note = Description of Artificial Sequence: Synthetic Antisense oligonucleotide
  modified_base 11: mod_base = OTHER; note = 5-methyl
  modified_base 16: mod_base = OTHER; note = 5-methyl
  modified_base 17..18: mod_base = OTHER; note = bicyclic nucleic acid (BNA)
  source 1..18: mol_type = other DNA
aggaagatggcatttcta

SEQ ID NO: 10094 - DNA, 17 bp, synthetic construct
  misc_feature 1..17: note = Description of Artificial Sequence: Synthetic Antisense oligonucleotide
  modified_base 11: mod_base = OTHER; note = 5-methyl
  modified_base 16: mod_base = OTHER; note = 5-methyl
  modified_base 16..17: mod_base = OTHER; note = bicyclic nucleic acid (BNA)
  source 1..17: mol_type = other DNA
aggaagatggcatttct

SEQ ID NO: 10095 - DNA, 16 bp, synthetic construct
  misc_feature 1..16: note = Description of Artificial Sequence: Synthetic Antisense oligonucleotide
  modified_base 11: mod_base = OTHER; note = 5-methyl
  modified_base 16: mod_base = OTHER; note = 5-methyl
  modified_base 15..16: mod_base = OTHER; note = bicyclic nucleic acid (BNA)
  source 1..16: mol_type = other DNA
aggaagatggcatttc

SEQ ID NO: 10096 - DNA, 15 bp, synthetic construct
  misc_feature 1..15: note = Description of Artificial Sequence: Synthetic Antisense oligonucleotide
  modified_base 11: mod_base = OTHER; note = 5-methyl
  modified_base 14..15: mod_base = OTHER; note = bicyclic nucleic acid (BNA)
  source 1..15: mol_type = other DNA
aggaagatggcattt

SEQ ID NO: 10097 - DNA, 14 bp, synthetic construct
  misc_feature 1..14: note = Description of Artificial Sequence: Synthetic Antisense oligonucleotide
  modified_base 11: mod_base = OTHER; note = 5-methyl
  modified_base 13..14: mod_base = OTHER; note = bicyclic nucleic acid (BNA)
  source 1..14: mol_type = other DNA
aggaagatggcatt

SEQ ID NO: 10098 - DNA, 13 bp, synthetic construct
  misc_feature 1..13: note = Description of Artificial Sequence: Synthetic Antisense oligonucleotide
  modified_base 11: mod_base = OTHER; note = 5-methyl
  modified_base 12..13: mod_base = OTHER; note = bicyclic nucleic acid (BNA)
  source 1..13: mol_type = other DNA
aggaagatggcat

SEQ ID NO: 10099 - DNA, 12 bp, synthetic construct
  misc_feature 1..12: note = Description of Artificial Sequence: Synthetic Antisense oligonucleotide
  modified_base 11: mod_base = OTHER; note = 5-methyl
  modified_base 11..12: mod_base = OTHER; note = bicyclic nucleic acid (BNA)
  source 1..12: mol_type = other DNA
aggaagatggca

SEQ ID NO: 10100 - DNA, 18 bp, synthetic construct
  misc_feature 1..18: note = Description of Artificial Sequence: Synthetic Antisense oligonucleotide
  modified_base 10: mod_base = OTHER; note = 5-methyl
  modified_base 15: mod_base = OTHER; note = 5-methyl
  modified_base 17..18: mod_base = OTHER; note = bicyclic nucleic acid (BNA)
  source 1..18: mol_type = other DNA
ggaagatggcatttctag

SEQ ID NO: 10101 - DNA, 17 bp, synthetic construct
  misc_feature 1..17: note = Description of Artificial Sequence: Synthetic Antisense oligonucleotide
  modified_base 10: mod_base = OTHER; note = 5-methyl
  modified_base 15: mod_base = OTHER; note = 5-methyl
  modified_base 16..17: mod_base = OTHER; note = bicyclic nucleic acid (BNA)
  source 1..17: mol_type = other DNA
ggaagatggcatttcta

SEQ ID NO: 10102 - DNA, 16 bp, synthetic construct
  misc_feature 1..16: note = Description of Artificial Sequence: Synthetic Antisense oligonucleotide
  modified_base 10: mod_base = OTHER; note = 5-methyl
  modified_base 15: mod_base = OTHER; note = 5-methyl
  modified_base 15..16: mod_base = OTHER; note = bicyclic nucleic acid (BNA)
  source 1..16: mol_type = other DNA
ggaagatggcatttct

SEQ ID NO: 10103 - DNA, 15 bp, synthetic construct
  misc_feature 1..15: note = Description of Artificial Sequence: Synthetic Antisense oligonucleotide
  modified_base 10: mod_base = OTHER; note = 5-methyl
  modified_base 15: mod_base = OTHER; note = 5-methyl
  modified_base 14..15: mod_base = OTHER; note = bicyclic nucleic acid (BNA)
  source 1..15: mol_type = other DNA
ggaagatggcatttc

SEQ ID NO: 10104 - DNA, 14 bp, synthetic construct
  misc_feature 1..14: note = Description of Artificial Sequence: Synthetic Antisense oligonucleotide
  modified_base 10: mod_base = OTHER; note = 5-methyl
  modified_base 13..14: mod_base = OTHER; note = bicyclic nucleic acid (BNA)
  source 1..14: mol_type = other DNA
ggaagatggcattt

SEQ ID NO: 10105 - DNA, 13 bp, synthetic construct
  misc_feature 1..13: note = Description of Artificial Sequence: Synthetic Antisense oligonucleotide
  modified_base 10: mod_base = OTHER; note = 5-methyl
  modified_base 12..13: mod_base = OTHER; note = bicyclic nucleic acid (BNA)
  source 1..13: mol_type = other DNA
ggaagatggcatt

SEQ ID NO: 10106 - DNA, 12 bp, synthetic construct
  misc_feature 1..12: note = Description of Artificial Sequence: Synthetic Antisense oligonucleotide
  modified_base 10: mod_base = OTHER; note = 5-methyl
  modified_base 11..12: mod_base = OTHER; note = bicyclic nucleic acid (BNA)
  source 1..12: mol_type = other DNA
ggaagatggcat

SEQ ID NO: 10107 - DNA, 11 bp, synthetic construct
  misc_feature 1..11: note = Description of Artificial Sequence: Synthetic Antisense oligonucleotide
  modified_base 10: mod_base = OTHER; note = 5-methyl
  modified_base 10..11: mod_base = OTHER; note = bicyclic nucleic acid (BNA)
  source 1..11: mol_type = other DNA
ggaagatggca

SEQ ID NO: 10108 - DNA, 10 bp, synthetic construct
  misc_feature 1..10: note = Description of Artificial Sequence: Synthetic Antisense oligonucleotide
  modified_base 9..10: mod_base = OTHER; note = bicyclic nucleic acid (BNA)
  modified_base 10: mod_base = OTHER; note = 5-methyl
  source 1..10: mol_type = other DNA
ggaagatggc

SEQ ID NO: 10109 - DNA, 17 bp, synthetic construct
  misc_feature 1..17: note = Description of Artificial Sequence: Synthetic Antisense oligonucleotide
  modified_base 9: mod_base = OTHER; note = 5-methyl
  modified_base 14: mod_base = OTHER; note = 5-methyl
  modified_base 16..17: mod_base = OTHER; note = bicyclic nucleic acid (BNA)
  source 1..17: mol_type = other DNA
gaagatggcatttctag

SEQ ID NO: 10110 - DNA, 16 bp, synthetic construct
  misc_feature 1..16: note = Description of Artificial Sequence: Synthetic Antisense oligonucleotide
  modified_base 9: mod_base = OTHER; note = 5-methyl
  modified_base 14: mod_base = OTHER; note = 5-methyl
  modified_base 15..16: mod_base = OTHER; note = bicyclic nucleic acid (BNA)
  source 1..16: mol_type = other DNA
gaagatggcatttcta

SEQ ID NO: 10111 - DNA, 14 bp, synthetic construct
  misc_feature 1..14: note = Description of Artificial Sequence: Synthetic Antisense oligonucleotide
  modified_base 9: mod_base = OTHER; note = 5-methyl
  modified_base 14: mod_base = OTHER; note = 5-methyl
  modified_base 13..14: mod_base = OTHER; note = bicyclic nucleic acid (BNA)
  source 1..14: mol_type = other DNA
gaagatggcatttc

SEQ ID NO: 10112 - DNA, 13 bp, synthetic construct
  misc_feature 1..13: note = Description of Artificial Sequence: Synthetic Antisense oligonucleotide
  modified_base 9: mod_base = OTHER; note = 5-methyl
  modified_base 12..13: mod_base = OTHER; note = bicyclic nucleic acid (BNA)
  source 1..13: mol_type = other DNA
gaagatggcattt

SEQ ID NO: 10113 - DNA, 12 bp, synthetic construct
  misc_feature 1..12: note = Description of Artificial Sequence: Synthetic Antisense oligonucleotide
  modified_base 9: mod_base = OTHER; note = 5-methyl
  modified_base 11..12: mod_base = OTHER; note = bicyclic nucleic acid (BNA)
  source 1..12: mol_type = other DNA
gaagatggcatt

SEQ ID NO: 10114 - DNA, 11 bp, synthetic construct
  misc_feature 1..11: note = Description of Artificial Sequence: Synthetic Antisense oligonucleotide
  modified_base 9: mod_base = OTHER; note = 5-methyl
  modified_base 10..11: mod_base = OTHER; note = bicyclic nucleic acid (BNA)
  source 1..11: mol_type = other DNA
gaagatggcat

SEQ ID NO: 10115 - DNA, 10 bp, synthetic construct
  misc_feature 1..10: note = Description of Artificial Sequence: Synthetic Antisense oligonucleotide
  modified_base 9: mod_base = OTHER; note = 5-methyl
  modified_base 9..10: mod_base = OTHER; note = bicyclic nucleic acid (BNA)
  source 1..10: mol_type = other DNA
gaagatggca

SEQ ID NO: 10116 - skipped

SEQ ID NO: 10117 - DNA, 16 bp, synthetic construct
  misc_feature 1..16: note = Description of Artificial Sequence: Synthetic Antisense oligonucleotide
  modified_base 8: mod_base = OTHER; note = 5-methyl
  modified_base 13: mod_base = OTHER; note = 5-methyl
  modified_base 15..16: mod_base = OTHER; note = bicyclic nucleic acid (BNA)
  source 1..16: mol_type = other DNA
aagatggcatttctag

SEQ ID NO: 10118 - DNA, 15 bp, synthetic construct
  misc_feature 1..15: note = Description of Artificial Sequence: Synthetic Antisense oligonucleotide
  modified_base 8: mod_base = OTHER; note = 5-methyl
  modified_base 13: mod_base = OTHER; note = 5-methyl
  modified_base 14..15: mod_base = OTHER; note = bicyclic nucleic acid (BNA)
  source 1..15: mol_type = other DNA
aagatggcatttcta

SEQ ID NO: 10119 - DNA, 14 bp, synthetic construct
  misc_feature 1..14: note = Description of Artificial Sequence: Synthetic Antisense oligonucleotide
  modified_base 8: mod_base = OTHER; note = 5-methyl
  modified_base 13: mod_base = OTHER; note = 5-methyl
  modified_base 13..14: mod_base = OTHER; note = bicyclic nucleic acid (BNA)
  source 1..14: mol_type = other DNA
aagatggcatttct

SEQ ID NO: 10120 - DNA, 13 bp, synthetic construct
  misc_feature 1..13: note = Description of Artificial Sequence: Synthetic Antisense oligonucleotide
  modified_base 8: mod_base = OTHER; note = 5-methyl
  modified_base 13: mod_base = OTHER; note = 5-methyl
  modified_base 12..13: mod_base = OTHER; note = bicyclic nucleic acid (BNA)
  source 1..13: mol_type = other DNA
aagatggcatttc

SEQ ID NO: 10121 - DNA, 12 bp, synthetic construct
  misc_feature 1..12: note = Description of Artificial Sequence: Synthetic Antisense oligonucleotide
  modified_base 8: mod_base = OTHER; note = 5-methyl
  modified_base 11..12: mod_base = OTHER; note = bicyclic nucleic acid (BNA)
  source 1..12: mol_type = other DNA
aagatggcattt

SEQ ID NO: 10122 - DNA, 11 bp, synthetic construct
  misc_feature 1..11: note = Description of Artificial Sequence: Synthetic Antisense oligonucleotide
  modified_base 8: mod_base = OTHER; note = 5-methyl
  modified_base 10..11: mod_base = OTHER; note = bicyclic nucleic acid (BNA)
  source 1..11: mol_type = other DNA
aagatggcatt

SEQ ID NO: 10123 - DNA, 10 bp, synthetic construct
  misc_feature 1..10: note = Description of Artificial Sequence: Synthetic Antisense oligonucleotide
  modified_base 8: mod_base = OTHER; note = 5-methyl
  modified_base 9..10: mod_base = OTHER; note = bicyclic nucleic acid (BNA)
  source 1..10: mol_type = other DNA
aagatggcat

SEQ ID NO: 10124-10125 - skipped (2 entries)

SEQ ID NO: 10126 - DNA, 15 bp, synthetic construct
  misc_feature 1..15: note = Description of Artificial Sequence: Synthetic Antisense oligonucleotide
  modified_base 7: mod_base = OTHER; note = 5-methyl
  modified_base 12: mod_base = OTHER; note = 5-methyl
  modified_base 14..15: mod_base = OTHER; note = bicyclic nucleic acid (BNA)
  source 1..15: mol_type = other DNA
agatggcatttctag

SEQ ID NO: 10127 - DNA, 14 bp, synthetic construct
  misc_feature 1..14: note = Description of Artificial Sequence: Synthetic Antisense oligonucleotide
  modified_base 7: mod_base = OTHER; note = 5-methyl
  modified_base 12: mod_base = OTHER; note = 5-methyl
  modified_base 13..14: mod_base = OTHER; note = bicyclic nucleic acid (BNA)
  source 1..14: mol_type = other DNA
agatggcatttcta

SEQ ID NO: 10128 - DNA, 13 bp, synthetic construct
  misc_feature 1..13: note = Description of Artificial Sequence: Synthetic Antisense oligonucleotide
  modified_base 7: mod_base = OTHER; note = 5-methyl
  modified_base 12: mod_base = OTHER; note = 5-methyl
  modified_base 12..13: mod_base = OTHER; note = bicyclic nucleic acid (BNA)
  source 1..13: mol_type = other DNA
agatggcatttct

SEQ ID NO: 10129 - DNA, 12 bp, synthetic construct
  misc_feature 1..12: note = Description of Artificial Sequence: Synthetic Antisense oligonucleotide
  modified_base 7: mod_base = OTHER; note = 5-methyl
  modified_base 12: mod_base = OTHER; note = 5-methyl
  modified_base 11..12: mod_base = OTHER; note = bicyclic nucleic acid (BNA)
  source 1..12: mol_type = other DNA
agatggcatttc

SEQ ID NO: 10130 - DNA, 11 bp, synthetic construct
  misc_feature 1..11: note = Description of Artificial Sequence: Synthetic Antisense oligonucleotide
  modified_base 7: mod_base = OTHER; note = 5-methyl
  modified_base 10..11: mod_base = OTHER; note = bicyclic nucleic acid (BNA)
  source 1..11: mol_type = other DNA
agatggcattt

SEQ ID NO: 10131 - DNA, 10 bp, synthetic construct
  misc_feature 1..10: note = Description of Artificial Sequence: Synthetic Antisense oligonucleotide
  modified_base 7: mod_base = OTHER; note = 5-methyl
  modified_base 9..10: mod_base = OTHER; note = bicyclic nucleic acid (BNA)
  source 1..10: mol_type = other DNA
agatggcatt

SEQ ID NO: 10132-10133 - skipped (2 entries)

SEQ ID NO: 10134 - DNA, 30 bp, synthetic construct; identical to SEQ ID NO: 8
  misc_feature 1..30: note = Description of Artificial Sequence: Synthetic Antisense oligonucleotide
  modified_base 1: mod_base = OTHER; note = 5-methyl
  modified_base 3..4: mod_base = OTHER; note = 5-methyl
  modified_base 7: mod_base = OTHER; note = 5-methyl
  modified_base 10: mod_base = OTHER; note = 5-methyl
  modified_base 22: mod_base = OTHER; note = 5-methyl
  modified_base 27: mod_base = OTHER; note = 5-methyl
  modified_base 29..30: mod_base = OTHER; note = bicyclic nucleic acid (BNA)
  source 1..30: mol_type = other DNA

SEQ ID NO: 10135 - DNA, 29 bp, synthetic construct
  misc_feature 1..29: note = Description of Artificial Sequence: Synthetic Antisense oligonucleotide
  modified_base 1: mod_base = OTHER; note = 5-methyl
  modified_base 3..4: mod_base = OTHER; note = 5-methyl
  modified_base 7: mod_base = OTHER; note = 5-methyl
  modified_base 10: mod_base = OTHER; note = 5-methyl
  modified_base 22: mod_base = OTHER; note = 5-methyl
  modified_base 27: mod_base = OTHER; note = 5-methyl
  modified_base 28..29: mod_base = OTHER; note = bicyclic nucleic acid (BNA)
  source 1..29: mol_type = other DNA
ctccaacatcaaggaagatggcatttcta

SEQ ID NO: 10136 - DNA, 28 bp, synthetic construct
  misc_feature 1..28: note = Description of Artificial Sequence: Synthetic Antisense oligonucleotide
  modified_base 1: mod_base = OTHER; note = 5-methyl
  modified_base 3..4: mod_base = OTHER; note = 5-methyl
  modified_base 7: mod_base = OTHER; note = 5-methyl
  modified_base 10: mod_base = OTHER; note = 5-methyl
  modified_base 22: mod_base = OTHER; note = 5-methyl
  modified_base 27: mod_base = OTHER; note = 5-methyl
  modified_base 27..28: mod_base = OTHER; note = bicyclic nucleic acid (BNA)
  source 1..28: mol_type = other DNA
ctccaacatcaaggaagatggcatttct

SEQ ID NO: 10137 - DNA, 27 bp, synthetic construct
  misc_feature 1..27: note = Description of Artificial Sequence: Synthetic Antisense oligonucleotide
  modified_base 1: mod_base = OTHER; note = 5-methyl
  modified_base 3..4: mod_base = OTHER; note = 5-methyl
  modified_base 7: mod_base = OTHER; note = 5-methyl
  modified_base 10: mod_base = OTHER; note = 5-methyl
  modified_base 22: mod_base = OTHER; note = 5-methyl
  modified_base 27: mod_base = OTHER; note = 5-methyl
  modified_base 26..27: mod_base = OTHER; note = bicyclic nucleic acid (BNA)
  source 1..27: mol_type = other DNA
ctccaacatcaaggaagatggcatttc

SEQ ID NO: 10138 - DNA, 26 bp, synthetic construct
  misc_feature 1..26: note = Description of Artificial Sequence: Synthetic Antisense oligonucleotide
  modified_base 1: mod_base = OTHER; note = 5-methyl
  modified_base 3..4: mod_base = OTHER; note = 5-methyl
  modified_base 7: mod_base = OTHER; note = 5-methyl
  modified_base 10: mod_base = OTHER; note = 5-methyl
  modified_base 22: mod_base = OTHER; note = 5-methyl
  modified_base 25..26: mod_base = OTHER; note = bicyclic nucleic acid (BNA)
  source 1..26: mol_type = other DNA
ctccaacatcaaggaagatggcattt

SEQ ID NO: 10139 - DNA, 25 bp, synthetic construct
  misc_feature 1..25: note = Description of Artificial Sequence: Synthetic Antisense oligonucleotide
  modified_base 1: mod_base = OTHER; note = 5-methyl
  modified_base 3..4: mod_base = OTHER; note = 5-methyl
  modified_base 7: mod_base = OTHER; note = 5-methyl
  modified_base 10: mod_base = OTHER; note = 5-methyl
  modified_base 22: mod_base = OTHER; note = 5-methyl
  modified_base 24..25: mod_base = OTHER; note = bicyclic nucleic acid (BNA)
  source 1..25: mol_type = other DNA
ctccaacatcaaggaagatggcatt

SEQ ID NO: 10140 - DNA, 24 bp, synthetic construct
  misc_feature 1..24: note = Description of Artificial Sequence: Synthetic Antisense oligonucleotide
  modified_base 1: mod_base = OTHER; note = 5-methyl
  modified_base 3..4: mod_base = OTHER; note = 5-methyl
  modified_base 7: mod_base = OTHER; note = 5-methyl
  modified_base 10: mod_base = OTHER; note = 5-methyl
  modified_base 22: mod_base = OTHER; note = 5-methyl
  modified_base 23..24: mod_base = OTHER; note = bicyclic nucleic acid (BNA)
  source 1..24: mol_type = other DNA
ctccaacatcaaggaagatggcat

SEQ ID NO: 10141 - DNA, 23 bp, synthetic construct
  misc_feature 1..23: note = Description of Artificial Sequence: Synthetic Antisense oligonucleotide
  modified_base 1: mod_base = OTHER; note = 5-methyl
  modified_base 3..4: mod_base = OTHER; note = 5-methyl
  modified_base 7: mod_base = OTHER; note = 5-methyl
  modified_base 10: mod_base = OTHER; note = 5-methyl
  modified_base 22: mod_base = OTHER; note = 5-methyl
  modified_base 22..23: mod_base = OTHER; note = bicyclic nucleic acid (BNA)
  source 1..23: mol_type = other DNA
ctccaacatcaaggaagatggca

SEQ ID NO: 10142 - DNA, 22 bp, synthetic construct
  misc_feature 1..22: note = Description of Artificial Sequence: Synthetic Antisense oligonucleotide
  modified_base 1: mod_base = OTHER; note = 5-methyl
  modified_base 3..4: mod_base = OTHER; note = 5-methyl
  modified_base 7: mod_base = OTHER; note = 5-methyl
  modified_base 10: mod_base = OTHER; note = 5-methyl
  modified_base 22: mod_base = OTHER; note = 5-methyl
  modified_base 21..22: mod_base = OTHER; note = bicyclic nucleic acid (BNA)
  source 1..22: mol_type = other DNA
ctccaacatcaaggaagatggc

SEQ ID NO: 10143 - DNA, 21 bp, synthetic construct
  misc_feature 1..21: note = Description of Artificial Sequence: Synthetic Antisense oligonucleotide
  modified_base 1: mod_base = OTHER; note = 5-methyl
  modified_base 3..4: mod_base = OTHER; note = 5-methyl
  modified_base 7: mod_base = OTHER; note = 5-methyl
  modified_base 10: mod_base = OTHER; note = 5-methyl
  modified_base 20..21: mod_base = OTHER; note = bicyclic nucleic acid (BNA)
  source 1..21: mol_type = other DNA
ctccaacatcaaggaagatgg

SEQ ID NO: 10144 - DNA, 20 bp, synthetic construct
  misc_feature 1..20: note = Description of Artificial Sequence: Synthetic Antisense oligonucleotide
  modified_base 1: mod_base = OTHER; note = 5-methyl
  modified_base 3..4: mod_base = OTHER; note = 5-methyl
  modified_base 7: mod_base = OTHER; note = 5-methyl
  modified_base 10: mod_base = OTHER; note = 5-methyl
  modified_base 19..20: mod_base = OTHER; note = bicyclic nucleic acid (BNA)
  source 1..20: mol_type = other DNA
ctccaacatcaaggaagatg

SEQ ID NO: 10145 - DNA, 19 bp, synthetic construct
  misc_feature 1..19: note = Description of Artificial Sequence: Synthetic Antisense oligonucleotide
  modified_base 1: mod_base = OTHER; note = 5-methyl
  modified_base 3..4: mod_base = OTHER; note = 5-methyl
  modified_base 7: mod_base = OTHER; note = 5-methyl
  modified_base 10: mod_base = OTHER; note = 5-methyl
  modified_base 18..19: mod_base = OTHER; note = bicyclic nucleic acid (BNA)
  source 1..19: mol_type = other DNA
ctccaacatcaaggaagat

SEQ ID NO: 10146 - DNA, 18 bp, synthetic construct
  misc_feature 1..18: note = Description of Artificial Sequence: Synthetic Antisense oligonucleotide
  modified_base 1: mod_base = OTHER; note = 5-methyl
  modified_base 3..4: mod_base = OTHER; note = 5-methyl
  modified_base 7: mod_base = OTHER; note = 5-methyl
  modified_base 10: mod_base = OTHER; note = 5-methyl
  modified_base 17..18: mod_base = OTHER; note = bicyclic nucleic acid (BNA)
  source 1..18: mol_type = other DNA
ctccaacatcaaggaaga

SEQ ID NO: 10147 - DNA, 17 bp, synthetic construct
  misc_feature 1..17: note = Description of Artificial Sequence: Synthetic Antisense oligonucleotide
  modified_base 1: mod_base = OTHER; note = 5-methyl
  modified_base 3..4: mod_base = OTHER; note = 5-methyl
  modified_base 7: mod_base = OTHER; note = 5-methyl
  modified_base 10: mod_base = OTHER; note = 5-methyl
  modified_base 16..17: mod_base = OTHER; note = bicyclic nucleic acid (BNA)
  source 1..17: mol_type = other DNA
ctccaacatcaaggaag

SEQ ID NO: 10148 - DNA, 29 bp, synthetic construct
  misc_feature 1..29: note = Description of Artificial Sequence: Synthetic Antisense oligonucleotide
  modified_base 2..3: mod_base = OTHER; note = 5-methyl
  modified_base 6: mod_base = OTHER; note = 5-methyl
  modified_base 9: mod_base = OTHER; note = 5-methyl
  modified_base 21: mod_base = OTHER; note = 5-methyl
  modified_base 26: mod_base = OTHER; note = 5-methyl
  modified_base 28..29: mod_base = OTHER; note = bicyclic nucleic acid (BNA)
  source 1..29: mol_type = other DNA
tccaacatcaaggaagatggcatttctag

SEQ ID NO: 10149 - DNA, 28 bp, synthetic construct
  misc_feature 1..28: note = Description of Artificial Sequence: Synthetic Antisense oligonucleotide
  modified_base 2..3: mod_base = OTHER; note = 5-methyl
  modified_base 6: mod_base = OTHER; note = 5-methyl
  modified_base 9: mod_base = OTHER; note = 5-methyl
  modified_base 21: mod_base = OTHER; note = 5-methyl
  modified_base 26: mod_base = OTHER; note = 5-methyl
  modified_base 27..28: mod_base = OTHER; note = bicyclic nucleic acid (BNA)
  source 1..28: mol_type = other DNA
tccaacatcaaggaagatggcatttcta

SEQ ID NO: 10150 - DNA, 27 bp, synthetic construct
  misc_feature 1..27: note = Description of Artificial Sequence: Synthetic Antisense oligonucleotide
  modified_base 2..3: mod_base = OTHER; note = 5-methyl
  modified_base 6: mod_base = OTHER; note = 5-methyl
  modified_base 9: mod_base = OTHER; note = 5-methyl
  modified_base 21: mod_base = OTHER; note = 5-methyl
  modified_base 26: mod_base = OTHER; note = 5-methyl
  modified_base 26..27: mod_base = OTHER; note = bicyclic nucleic acid (BNA)
  source 1..27: mol_type = other DNA
tccaacatcaaggaagatggcatttct

SEQ ID NO: 10151 - DNA, 26 bp, synthetic construct
  misc_feature 1..26: note = Description of Artificial Sequence: Synthetic Antisense oligonucleotide
  modified_base 2..3: mod_base = OTHER; note = 5-methyl
  modified_base 6: mod_base = OTHER; note = 5-methyl
  modified_base 9: mod_base = OTHER; note = 5-methyl
  modified_base 21: mod_base = OTHER; note = 5-methyl
  modified_base 26: mod_base = OTHER; note = 5-methyl
  modified_base 25..26: mod_base = OTHER; note = bicyclic nucleic acid (BNA)
  source 1..26: mol_type = other DNA
tccaacatcaaggaagatggcatttc

SEQ ID NO: 10152 - DNA, 25 bp, synthetic construct
  misc_feature 1..25: note = Description of Artificial Sequence: Synthetic Antisense oligonucleotide
  modified_base 2..3: mod_base = OTHER; note = 5-methyl
  modified_base 6: mod_base = OTHER; note = 5-methyl
  modified_base 9: mod_base = OTHER; note = 5-methyl
  modified_base 21: mod_base = OTHER; note = 5-methyl
  modified_base 24..25: mod_base = OTHER; note = bicyclic nucleic acid (BNA)
  source 1..25: mol_type = other DNA
tccaacatcaaggaagatggcattt

SEQ ID NO: 10153 - DNA, 24 bp, synthetic construct
  misc_feature 1..24: note = Description of Artificial Sequence: Synthetic Antisense oligonucleotide
  modified_base 2..3: mod_base = OTHER; note = 5-methyl
  modified_base 6: mod_base = OTHER; note = 5-methyl
  modified_base 9: mod_base = OTHER; note = 5-methyl
  modified_base 21: mod_base = OTHER; note = 5-methyl
  modified_base 23..24: mod_base = OTHER; note = bicyclic nucleic acid (BNA)
  source 1..24: mol_type = other DNA
tccaacatcaaggaagatggcatt

SEQ ID NO: 10154 - DNA, 23 bp, synthetic construct
  misc_feature 1..23: note = Description of Artificial Sequence: Synthetic Antisense oligonucleotide
  modified_base 2..3: mod_base = OTHER; note = 5-methyl
  modified_base 6: mod_base = OTHER; note = 5-methyl
  modified_base 9: mod_base = OTHER; note = 5-methyl
  modified_base 21: mod_base = OTHER; note = 5-methyl
  modified_base 22..23: mod_base = OTHER; note = bicyclic nucleic acid (BNA)
  source 1..23: mol_type = other DNA
tccaacatcaaggaagatggcat

SEQ ID NO: 10155 - DNA, 22 bp, synthetic construct
  misc_feature 1..22: note = Description of Artificial Sequence: Synthetic Antisense oligonucleotide
  modified_base 2..3: mod_base = OTHER; note = 5-methyl
  modified_base 6: mod_base = OTHER; note = 5-methyl
  modified_base 9: mod_base = OTHER; note = 5-methyl
  modified_base 21: mod_base = OTHER; note = 5-methyl
  modified_base 21..22: mod_base = OTHER; note = bicyclic nucleic acid (BNA)
  source 1..22: mol_type = other DNA
tccaacatcaaggaagatggca

SEQ ID NO: 10156 - DNA, 21 bp, synthetic construct
  misc_feature 1..21: note = Description of Artificial Sequence: Synthetic Antisense oligonucleotide
  modified_base 2..3: mod_base = OTHER; note = 5-methyl
  modified_base 6: mod_base = OTHER; note = 5-methyl
  modified_base 9: mod_base = OTHER; note = 5-methyl
  modified_base 21: mod_base = OTHER; note = 5-methyl
  modified_base 20..21: mod_base = OTHER; note = bicyclic nucleic acid (BNA)
  source 1..21: mol_type = other DNA
tccaacatcaaggaagatggc

SEQ ID NO: 10157 - DNA, 20 bp, synthetic construct
  misc_feature 1..20: note = Description of Artificial Sequence: Synthetic Antisense oligonucleotide
  modified_base 2..3: mod_base = OTHER; note = 5-methyl
  modified_base 6: mod_base = OTHER; note = 5-methyl
  modified_base 9: mod_base = OTHER; note = 5-methyl
  modified_base 19..20: mod_base = OTHER; note = bicyclic nucleic acid (BNA)
  source 1..20: mol_type = other DNA
tccaacatcaaggaagatgg

SEQ ID NO: 10158 - DNA, 19 bp, synthetic construct
  misc_feature 1..19: note = Description of Artificial Sequence: Synthetic Antisense oligonucleotide
  modified_base 2..3: mod_base = OTHER; note = 5-methyl
  modified_base 6: mod_base = OTHER; note = 5-methyl
  modified_base 9: mod_base = OTHER; note = 5-methyl
  modified_base 18..19: mod_base = OTHER; note = bicyclic nucleic acid (BNA)
  source 1..19: mol_type = other DNA
tccaacatcaaggaagatg

SEQ ID NO: 10159 - DNA, 18 bp, synthetic construct
  misc_feature 1..18: note = Description of Artificial Sequence: Synthetic Antisense oligonucleotide
  modified_base 2..3: mod_base = OTHER; note = 5-methyl
  modified_base 6: mod_base = OTHER; note = 5-methyl
  modified_base 9: mod_base = OTHER; note = 5-methyl
  modified_base 17..18: mod_base = OTHER; note = bicyclic nucleic acid (BNA)
  source 1..18: mol_type = other DNA
tccaacatcaaggaagat

SEQ ID NO: 10160 - DNA, 17 bp, synthetic construct
  misc_feature 1..17: note = Description of Artificial Sequence: Synthetic Antisense oligonucleotide
  modified_base 2..3: mod_base = OTHER; note = 5-methyl
  modified_base 6: mod_base = OTHER; note = 5-methyl
  modified_base 9: mod_base = OTHER; note = 5-methyl
  modified_base 16..17: mod_base = OTHER; note = bicyclic nucleic acid (BNA)
  source 1..17: mol_type = other DNA
tccaacatcaaggaaga

SEQ ID NO: 10161 - DNA, 16 bp, synthetic construct
  misc_feature 1..16: note = Description of Artificial Sequence: Synthetic Antisense oligonucleotide
  modified_base 2..3: mod_base = OTHER; note = 5-methyl
  modified_base 6: mod_base = OTHER; note = 5-methyl
  modified_base 9: mod_base = OTHER; note = 5-methyl
  modified_base 15..16: mod_base = OTHER; note = bicyclic nucleic acid (BNA)
  source 1..16: mol_type = other DNA
tccaacatcaaggaag

SEQ ID NO: 10162 - DNA, 28 bp, synthetic construct
  misc_feature 1..28: note = Description of Artificial Sequence: Synthetic Antisense oligonucleotide
  modified_base 1..2: mod_base = OTHER; note = 5-methyl
  modified_base 5: mod_base = OTHER; note = 5-methyl
  modified_base 8: mod_base = OTHER; note = 5-methyl
  modified_base 20: mod_base = OTHER; note = 5-methyl
  modified_base 25: mod_base = OTHER; note = 5-methyl
  modified_base 27..28: mod_base = OTHER; note = bicyclic nucleic acid (BNA)
  source 1..28: mol_type = other DNA
ccaacatcaaggaagatggcatttctag

SEQ ID NO: 10163 - DNA, 27 bp, synthetic construct
  misc_feature 1..27: note = Description of Artificial Sequence: Synthetic Antisense oligonucleotide
  modified_base 1..2: mod_base = OTHER; note = 5-methyl
  modified_base 5: mod_base = OTHER; note = 5-methyl
  modified_base 8: mod_base = OTHER; note = 5-methyl
  modified_base 20: mod_base = OTHER; note = 5-methyl
  modified_base 25: mod_base = OTHER; note = 5-methyl
  modified_base 26..27: mod_base = OTHER; note = bicyclic nucleic acid (BNA)
  source 1..27: mol_type = other DNA
ccaacatcaaggaagatggcatttcta

SEQ ID NO: 10164 - DNA, 26 bp, synthetic construct
  misc_feature 1..26: note = Description of Artificial Sequence: Synthetic Antisense oligonucleotide
  modified_base 1..2: mod_base = OTHER; note = 5-methyl
  modified_base 5: mod_base = OTHER; note = 5-methyl
  modified_base 8: mod_base = OTHER; note = 5-methyl
  modified_base 20: mod_base = OTHER; note = 5-methyl
  modified_base 25: mod_base = OTHER; note = 5-methyl
  modified_base 25..26: mod_base = OTHER; note = bicyclic nucleic acid (BNA)
  source 1..26: mol_type = other DNA
ccaacatcaaggaagatggcatttct

SEQ ID NO: 10165 - DNA, 25 bp, synthetic construct
  misc_feature 1..25: note = Description of Artificial Sequence: Synthetic Antisense oligonucleotide
  modified_base 1..2: mod_base = OTHER; note = 5-methyl
  modified_base 5: mod_base = OTHER; note = 5-methyl
  modified_base 8: mod_base = OTHER; note = 5-methyl
  modified_base 20: mod_base = OTHER; note = 5-methyl
  modified_base 25: mod_base = OTHER; note = 5-methyl
  modified_base 24..25: mod_base = OTHER; note = bicyclic nucleic acid (BNA)
  source 1..25: mol_type = other DNA
ccaacatcaaggaagatggcatttc

SEQ ID NO: 10166 - DNA, 24 bp, synthetic construct
  misc_feature 1..24: note = Description of Artificial Sequence: Synthetic Antisense oligonucleotide
  modified_base 1..2: mod_base = OTHER; note = 5-methyl
  modified_base 5: mod_base = OTHER; note = 5-methyl
  modified_base 8: mod_base = OTHER; note = 5-methyl
  modified_base 20: mod_base = OTHER; note = 5-methyl
  modified_base 23..24: mod_base = OTHER; note = bicyclic nucleic acid (BNA)
  source 1..24: mol_type = other DNA
ccaacatcaaggaagatggcattt

SEQ ID NO: 10167 - DNA, 23 bp, synthetic construct
  misc_feature 1..23: note = Description of Artificial Sequence: Synthetic Antisense oligonucleotide
  modified_base 1..2: mod_base = OTHER; note = 5-methyl
  modified_base 5: mod_base = OTHER; note = 5-methyl
  modified_base 8: mod_base = OTHER; note = 5-methyl
  modified_base 20: mod_base = OTHER; note = 5-methyl
  modified_base 22..23: mod_base = OTHER; note = bicyclic nucleic acid (BNA)
  source 1..23: mol_type = other DNA
ccaacatcaaggaagatggcatt

SEQ ID NO: 10168 - DNA, 22 bp, synthetic construct
  misc_feature 1..22: note = Description of Artificial Sequence: Synthetic Antisense oligonucleotide
  modified_base 1..2: mod_base = OTHER; note = 5-methyl
  modified_base 5: mod_base = OTHER; note = 5-methyl
  modified_base 8: mod_base = OTHER; note = 5-methyl
  modified_base 20: mod_base = OTHER; note = 5-methyl
  modified_base 21..22: mod_base = OTHER; note = bicyclic nucleic acid (BNA)
  source 1..22: mol_type = other DNA
ccaacatcaaggaagatggcat

SEQ ID NO: 10169 - DNA, 21 bp, synthetic construct
  misc_feature 1..21: note = Description of Artificial Sequence: Synthetic Antisense oligonucleotide
  modified_base 1..2: mod_base = OTHER; note = 5-methyl
  modified_base 5: mod_base = OTHER; note = 5-methyl
  modified_base 8: mod_base = OTHER; note = 5-methyl
  modified_base 20: mod_base = OTHER; note = 5-methyl
  modified_base 20..21: mod_base = OTHER; note = bicyclic nucleic acid (BNA)
  source 1..21: mol_type = other DNA
ccaacatcaaggaagatggca

SEQ ID NO: 10170 - DNA, 20 bp, synthetic construct
  misc_feature 1..20: note = Description of Artificial Sequence: Synthetic Antisense oligonucleotide
  modified_base 1..2: mod_base = OTHER; note = 5-methyl
  modified_base 5: mod_base = OTHER; note = 5-methyl
  modified_base 8: mod_base = OTHER; note = 5-methyl
  modified_base 20: mod_base = OTHER; note = 5-methyl
  modified_base 19..20: mod_base = OTHER; note = bicyclic nucleic acid (BNA)
  source 1..20: mol_type = other DNA
ccaacatcaaggaagatggc

SEQ ID NO: 10171 - DNA, 19 bp, synthetic construct
  misc_feature 1..19: note = Description of Artificial Sequence: Synthetic Antisense oligonucleotide
  modified_base 1..2: mod_base = OTHER; note = 5-methyl
  modified_base 5: mod_base = OTHER; note = 5-methyl
  modified_base 8: mod_base = OTHER; note = 5-methyl
  modified_base 18..19: mod_base = OTHER; note = bicyclic nucleic acid (BNA)
  source 1..19: mol_type = other DNA
ccaacatcaaggaagatgg

SEQ ID NO: 10172 - DNA, 18 bp, synthetic construct
  misc_feature 1..18: note = Description of Artificial Sequence: Synthetic Antisense oligonucleotide
  modified_base 1..2: mod_base = OTHER; note = 5-methyl
  modified_base 5: mod_base = OTHER; note = 5-methyl
  modified_base 8: mod_base = OTHER; note = 5-methyl
  modified_base 17..18: mod_base = OTHER; note = bicyclic nucleic acid (BNA)
  source 1..18: mol_type = other DNA
ccaacatcaaggaagatg

SEQ ID NO: 10173 - DNA, 17 bp, synthetic construct
  misc_feature 1..17: note = Description of Artificial Sequence: Synthetic Antisense oligonucleotide
  modified_base 1..2: mod_base = OTHER; note = 5-methyl
  modified_base 5: mod_base = OTHER; note = 5-methyl
  modified_base 8: mod_base = OTHER; note = 5-methyl
  modified_base 16..17: mod_base = OTHER; note = bicyclic nucleic acid (BNA)
  source 1..17: mol_type = other DNA
ccaacatcaaggaagat

SEQ ID NO: 10174 - DNA, 16 bp, synthetic construct
  misc_feature 1..16: note = Description of Artificial Sequence: Synthetic Antisense oligonucleotide
  modified_base 1..2: mod_base = OTHER; note = 5-methyl
  modified_base 5: mod_base = OTHER; note = 5-methyl
  modified_base 8: mod_base = OTHER; note = 5-methyl
  modified_base 15..16: mod_base = OTHER; note = bicyclic nucleic acid (BNA)
  source 1..16: mol_type = other DNA
ccaacatcaaggaaga

SEQ ID NO: 10175 - DNA, 15 bp, synthetic construct
  misc_feature 1..15: note = Description of Artificial Sequence: Synthetic Antisense oligonucleotide
  modified_base 1..2: mod_base = OTHER; note = 5-methyl
  modified_base 5: mod_base = OTHER; note = 5-methyl
  modified_base 8: mod_base = OTHER; note = 5-methyl
  modified_base 14..15: mod_base = OTHER; note = bicyclic nucleic acid (BNA)
  source 1..15: mol_type = other DNA
ccaacatcaaggaag

SEQ ID NO: 10176 - DNA, 27 bp, synthetic construct
  misc_feature 1..27: note = Description of Artificial Sequence: Synthetic Antisense oligonucleotide
  modified_base 1: mod_base = OTHER; note = 5-methyl
  modified_base 4: mod_base = OTHER; note = 5-methyl
  modified_base 7: mod_base = OTHER; note = 5-methyl
  modified_base 19: mod_base = OTHER; note = 5-methyl
  modified_base 24: mod_base = OTHER; note = 5-methyl
  modified_base 26..27: mod_base = OTHER; note = bicyclic nucleic acid (BNA)
  source 1..27: mol_type = other DNA
caacatcaaggaagatggcatttctag

SEQ ID NO: 10177 - DNA, 26 bp, synthetic construct
  misc_feature 1..26: note = Description of Artificial Sequence: Synthetic Antisense oligonucleotide
  modified_base 1: mod_base = OTHER; note = 5-methyl
  modified_base 4: mod_base = OTHER; note = 5-methyl
  modified_base 7: mod_base = OTHER; note = 5-methyl
  modified_base 19: mod_base = OTHER; note = 5-methyl
  modified_base 24: mod_base = OTHER; note = 5-methyl
  modified_base 25..26: mod_base = OTHER; note = bicyclic nucleic acid (BNA)
  source 1..26: mol_type = other DNA
caacatcaaggaagatggcatttcta

SEQ ID NO: 10178 - DNA, 25 bp, synthetic construct
  misc_feature 1..25: note = Description of Artificial Sequence: Synthetic Antisense oligonucleotide
  modified_base 1: mod_base = OTHER; note = 5-methyl
  modified_base 4: mod_base = OTHER; note = 5-methyl
  modified_base 7: mod_base = OTHER; note = 5-methyl
  modified_base 19: mod_base = OTHER; note = 5-methyl
  modified_base 24: mod_base = OTHER; note = 5-methyl
  modified_base 24..25: mod_base = OTHER; note = bicyclic nucleic acid (BNA)
  source 1..25: mol_type = other DNA
caacatcaaggaagatggcatttct

SEQ ID NO: 10179 - DNA, 24 bp, synthetic construct
  misc_feature 1..24: note = Description of Artificial Sequence: Synthetic Antisense oligonucleotide
  modified_base 1: mod_base = OTHER; note = 5-methyl
  modified_base 4: mod_base = OTHER; note = 5-methyl
  modified_base 7: mod_base = OTHER; note = 5-methyl
  modified_base 19: mod_base = OTHER; note = 5-methyl
  modified_base 24: mod_base = OTHER; note = 5-methyl
  modified_base 23..24: mod_base = OTHER; note = bicyclic nucleic acid (BNA)
  source 1..24: mol_type = other DNA
caacatcaaggaagatggcatttc

SEQ ID NO: 10180 - DNA, 23 bp, synthetic construct
  misc_feature 1..23: note = Description of Artificial Sequence: Synthetic Antisense oligonucleotide
  modified_base 1: mod_base = OTHER; note = 5-methyl
  modified_base 4: mod_base = OTHER; note = 5-methyl
  modified_base 7: mod_base = OTHER; note = 5-methyl
  modified_base 19: mod_base = OTHER; note = 5-methyl
  modified_base 22..23: mod_base = OTHER; note = bicyclic nucleic acid (BNA)
  source 1..23: mol_type = other DNA
caacatcaaggaagatggcattt

SEQ ID NO: 10181 - DNA, 22 bp, synthetic construct
  misc_feature 1..22: note = Description of Artificial Sequence: Synthetic Antisense oligonucleotide
  modified_base 1: mod_base = OTHER; note = 5-methyl
  modified_base 4: mod_base = OTHER; note = 5-methyl
  modified_base 7: mod_base = OTHER; note = 5-methyl
  modified_base 19: mod_base = OTHER; note = 5-methyl
  modified_base 21..22: mod_base = OTHER; note = bicyclic nucleic acid (BNA)
  source 1..22: mol_type = other DNA
caacatcaaggaagatggcatt

SEQ ID NO: 10182 - DNA, 21 bp, synthetic construct
  misc_feature 1..21: note = Description of Artificial Sequence: Synthetic Antisense oligonucleotide
  modified_base 1: mod_base = OTHER; note = 5-methyl
  modified_base 4: mod_base = OTHER; note = 5-methyl
  modified_base 7: mod_base = OTHER; note = 5-methyl
  modified_base 19: mod_base = OTHER; note = 5-methyl
  modified_base 20..21: mod_base = OTHER; note = bicyclic nucleic acid (BNA)
  source 1..21: mol_type = other DNA
caacatcaaggaagatggcat

SEQ ID NO: 10183 - DNA, 20 bp, synthetic construct
  misc_feature 1..20: note = Description of Artificial Sequence: Synthetic Antisense oligonucleotide
  modified_base 1: mod_base = OTHER; note = 5-methyl
  modified_base 4: mod_base = OTHER; note = 5-methyl
  modified_base 7: mod_base = OTHER; note = 5-methyl
  modified_base 19: mod_base = OTHER; note = 5-methyl
  modified_base 19..20: mod_base = OTHER; note = bicyclic nucleic acid (BNA)
  source 1..20: mol_type = other DNA
caacatcaaggaagatggca

SEQ ID NO: 10184 - DNA, 19 bp, synthetic construct
  misc_feature 1..19: note = Description of Artificial Sequence: Synthetic Antisense oligonucleotide
  modified_base 1: mod_base = OTHER; note = 5-methyl
  modified_base 4: mod_base = OTHER; note = 5-methyl
  modified_base 7: mod_base = OTHER; note = 5-methyl
  modified_base 19: mod_base = OTHER; note = 5-methyl
  modified_base 18..19: mod_base = OTHER; note = bicyclic nucleic acid (BNA)
  source 1..19: mol_type = other DNA
caacatcaaggaagatggc

SEQ ID NO: 10185 - DNA, 18 bp, synthetic construct
  misc_feature 1..18: note = Description of Artificial Sequence: Synthetic Antisense oligonucleotide
  modified_base 1: mod_base = OTHER; note = 5-methyl
  modified_base 4: mod_base = OTHER; note = 5-methyl
  modified_base 7: mod_base = OTHER; note = 5-methyl
  modified_base 17..18: mod_base = OTHER; note = bicyclic nucleic acid (BNA)
  source 1..18: mol_type = other DNA
caacatcaaggaagatgg

SEQ ID NO: 10186 - DNA, 17 bp, synthetic construct
  misc_feature 1..17: note = Description of Artificial Sequence: Synthetic Antisense oligonucleotide
  modified_base 1: mod_base = OTHER; note = 5-methyl
  modified_base 4: mod_base = OTHER; note = 5-methyl
  modified_base 7: mod_base = OTHER; note = 5-methyl
  modified_base 16..17: mod_base = OTHER; note = bicyclic nucleic acid (BNA)
  source 1..17: mol_type = other DNA
caacatcaaggaagatg

SEQ ID NO: 10187 - DNA, 16 bp, synthetic construct
  misc_feature 1..16: note = Description of Artificial Sequence: Synthetic Antisense oligonucleotide
  modified_base 1: mod_base = OTHER; note = 5-methyl
  modified_base 4: mod_base = OTHER; note = 5-methyl
  modified_base 7: mod_base = OTHER; note = 5-methyl
  modified_base 15..16: mod_base = OTHER; note = bicyclic nucleic acid (BNA)
  source 1..16: mol_type = other DNA
caacatcaaggaagat

SEQ ID NO: 10188 - DNA, 15 bp, synthetic construct
  misc_feature 1..15: note = Description of Artificial Sequence: Synthetic Antisense oligonucleotide
  modified_base 1: mod_base = OTHER; note = 5-methyl
  modified_base 4: mod_base = OTHER; note = 5-methyl
  modified_base 7: mod_base = OTHER; note = 5-methyl
  modified_base 14..15: mod_base = OTHER; note = bicyclic nucleic acid (BNA)
  source 1..15: mol_type = other DNA
caacatcaaggaaga

SEQ ID NO: 10189 - DNA, 14 bp, synthetic construct
  misc_feature 1..14: note = Description of Artificial Sequence: Synthetic Antisense oligonucleotide
  modified_base 1: mod_base = OTHER; note = 5-methyl
  modified_base 4: mod_base = OTHER; note = 5-methyl
  modified_base 7: mod_base = OTHER; note = 5-methyl
  modified_base 13..14: mod_base = OTHER; note = bicyclic nucleic acid (BNA)
  source 1..14: mol_type = other DNA
caacatcaaggaag

SEQ ID NO: 10190 - DNA, 26 bp, synthetic construct
  misc_feature 1..26: note = Description of Artificial Sequence: Synthetic Antisense oligonucleotide
  modified_base 3: mod_base = OTHER; note = 5-methyl
  modified_base 6: mod_base = OTHER; note = 5-methyl
  modified_base 18: mod_base = OTHER; note = 5-methyl
  modified_base 23: mod_base = OTHER; note = 5-methyl
  modified_base 25..26: mod_base = OTHER; note = bicyclic nucleic acid (BNA)
  source 1..26: mol_type = other DNA
aacatcaaggaagatggcatttctag

SEQ ID NO: 10191 - DNA, 25 bp, synthetic construct
  misc_feature 1..25: note = Description of Artificial Sequence: Synthetic Antisense oligonucleotide
  modified_base 3: mod_base = OTHER; note = 5-methyl
  modified_base 6: mod_base = OTHER; note = 5-methyl
  modified_base 18: mod_base = OTHER; note = 5-methyl
  modified_base 23: mod_base = OTHER; note = 5-methyl
  modified_base 24..25: mod_base = OTHER; note = bicyclic nucleic acid (BNA)
  source 1..25: mol_type = other DNA
aacatcaaggaagatggcatttcta

SEQ ID NO: 10192 - DNA, 24 bp, synthetic construct
  misc_feature 1..24: note = Description of Artificial Sequence: Synthetic Antisense oligonucleotide
  modified_base 3: mod_base = OTHER; note = 5-methyl
  modified_base 6: mod_base = OTHER; note = 5-methyl
  modified_base 18: mod_base = OTHER; note = 5-methyl
  modified_base 23: mod_base = OTHER; note = 5-methyl
  modified_base 23..24: mod_base = OTHER; note = bicyclic nucleic acid (BNA)
  source 1..24: mol_type = other DNA
aacatcaaggaagatggcatttct

SEQ ID NO: 10193 - DNA, 23 bp, synthetic construct
  misc_feature 1..23: note = Description of Artificial Sequence: Synthetic Antisense oligonucleotide
  modified_base 3: mod_base = OTHER; note = 5-methyl
  modified_base 6: mod_base = OTHER; note = 5-methyl
  modified_base 18: mod_base = OTHER; note = 5-methyl
  modified_base 23: mod_base = OTHER; note = 5-methyl
  modified_base 22..23: mod_base = OTHER; note = bicyclic nucleic acid (BNA)
  source 1..23: mol_type = other DNA
aacatcaaggaagatggcatttc

SEQ ID NO: 10194 - DNA, 22 bp, synthetic construct
  misc_feature 1..22: note = Description of Artificial Sequence: Synthetic Antisense oligonucleotide
  modified_base 3: mod_base = OTHER; note = 5-methyl
  modified_base 6: mod_base = OTHER; note = 5-methyl
  modified_base 18: mod_base = OTHER; note = 5-methyl
  modified_base 21..22: mod_base = OTHER; note = bicyclic nucleic acid (BNA)
  source 1..22: mol_type = other DNA
aacatcaaggaagatggcattt

SEQ ID NO: 10195 - DNA, 21 bp, synthetic construct
  misc_feature 1..21: note = Description of Artificial Sequence: Synthetic Antisense oligonucleotide
  modified_base 3: mod_base = OTHER; note = 5-methyl
  modified_base 6: mod_base = OTHER; note = 5-methyl
  modified_base 18: mod_base = OTHER; note = 5-methyl
  modified_base 20..21: mod_base = OTHER; note = bicyclic nucleic acid (BNA)
  source 1..21: mol_type = other DNA
aacatcaaggaagatggcatt

SEQ ID NO: 10196 - DNA, 20 bp, synthetic construct
  misc_feature 1..20: note = Description of Artificial Sequence: Synthetic Antisense oligonucleotide
  modified_base 3: mod_base = OTHER; note = 5-methyl
  modified_base 6: mod_base = OTHER; note = 5-methyl
  modified_base 18: mod_base = OTHER; note = 5-methyl
  modified_base 19..20: mod_base = OTHER; note = bicyclic nucleic acid (BNA)
  source 1..20: mol_type = other DNA
aacatcaaggaagatggcat

SEQ ID NO: 10197 - DNA, 19 bp, synthetic construct
  misc_feature 1..19: note = Description of Artificial Sequence: Synthetic Antisense oligonucleotide
  modified_base 3: mod_base = OTHER; note = 5-methyl
  modified_base 6: mod_base = OTHER; note = 5-methyl
  modified_base 18: mod_base = OTHER; note = 5-methyl
  modified_base 18..19: mod_base = OTHER; note = bicyclic nucleic acid (BNA)
  source 1..19: mol_type = other DNA
aacatcaaggaagatggca

SEQ ID NO: 10198 - DNA, 18 bp, synthetic construct
  misc_feature 1..18: note = Description of Artificial Sequence: Synthetic Antisense oligonucleotide
  modified_base 3: mod_base = OTHER; note = 5-methyl
  modified_base 6: mod_base = OTHER; note = 5-methyl
  modified_base 18: mod_base = OTHER; note = 5-methyl
  modified_base 17..18: mod_base = OTHER; note = bicyclic nucleic acid (BNA)
  source 1..18: mol_type = other DNA
aacatcaaggaagatggc

SEQ ID NO: 10199 - DNA, 17 bp, synthetic construct
  misc_feature 1..17: note = Description of Artificial Sequence: Synthetic Antisense oligonucleotide
  modified_base 3: mod_base = OTHER; note = 5-methyl
  modified_base 6: mod_base = OTHER; note = 5-methyl
  modified_base 16..17: mod_base = OTHER; note = bicyclic nucleic acid (BNA)
  source 1..17: mol_type = other DNA
aacatcaaggaagatgg

SEQ ID NO: 10200 - DNA, 16 bp, synthetic construct
  misc_feature 1..16: note = Description of Artificial Sequence: Synthetic Antisense oligonucleotide
  modified_base 3: mod_base = OTHER; note = 5-methyl
  modified_base 6: mod_base = OTHER; note = 5-methyl
  modified_base 15..16: mod_base = OTHER; note = bicyclic nucleic acid (BNA)
  source 1..16: mol_type = other DNA
aacatcaaggaagatg

SEQ ID NO: 10201 - DNA, 15 bp, synthetic construct
  misc_feature 1..15: note = Description of Artificial Sequence: Synthetic Antisense oligonucleotide
  modified_base 3: mod_base = OTHER; note = 5-methyl
  modified_base 6: mod_base = OTHER; note = 5-methyl
  modified_base 14..15: mod_base = OTHER; note = bicyclic nucleic acid (BNA)
  source 1..15: mol_type = other DNA
aacatcaaggaagat

SEQ ID NO: 10202 - DNA, 14 bp, synthetic construct
  misc_feature 1..14: note = Description of Artificial Sequence: Synthetic Antisense oligonucleotide
  modified_base 3: mod_base = OTHER; note = 5-methyl
  modified_base 6: mod_base = OTHER; note = 5-methyl
  modified_base 13..14: mod_base = OTHER; note = bicyclic nucleic acid (BNA)
  source 1..14: mol_type = other DNA
aacatcaaggaaga

SEQ ID NO: 10203 - DNA, 13 bp, synthetic construct
  misc_feature 1..13: note = Description of Artificial Sequence: Synthetic Antisense oligonucleotide
  modified_base 3: mod_base = OTHER; note = 5-methyl
  modified_base 6: mod_base = OTHER; note = 5-methyl
  modified_base 12..13: mod_base = OTHER; note = bicyclic nucleic acid (BNA)
  source 1..13: mol_type = other DNA
aacatcaaggaag

SEQ ID NO: 10204 - DNA, 25 bp, synthetic construct
  misc_feature 1..25: note = Description of Artificial Sequence: Synthetic Antisense oligonucleotide
  modified_base 2: mod_base = OTHER; note = 5-methyl
  modified_base 5: mod_base = OTHER; note = 5-methyl
  modified_base 17: mod_base = OTHER; note = 5-methyl
  modified_base 22: mod_base = OTHER; note = 5-methyl
  modified_base 24..25: mod_base = OTHER; note = bicyclic nucleic acid (BNA)
  source 1..25: mol_type = other DNA
acatcaaggaagatggcatttctag

SEQ ID NO: 10205 - DNA, 24 bp, synthetic construct
  misc_feature 1..24: note = Description of Artificial Sequence: Synthetic Antisense oligonucleotide
  modified_base 2: mod_base = OTHER; note = 5-methyl
  modified_base 5: mod_base = OTHER; note = 5-methyl
  modified_base 17: mod_base = OTHER; note = 5-methyl
  modified_base 22: mod_base = OTHER; note = 5-methyl
  modified_base 23..24: mod_base = OTHER; note = bicyclic nucleic acid (BNA)
  source 1..24: mol_type = other DNA
acatcaaggaagatggcatttcta

SEQ ID NO: 10206 - DNA, 23 bp, synthetic construct
  misc_feature 1..23: note = Description of Artificial Sequence: Synthetic Antisense oligonucleotide
  modified_base 2: mod_base = OTHER; note = 5-methyl
  modified_base 5: mod_base = OTHER; note = 5-methyl
  modified_base 17: mod_base = OTHER; note = 5-methyl
  modified_base 22: mod_base = OTHER; note = 5-methyl
  modified_base 22..23: mod_base = OTHER; note = bicyclic nucleic acid (BNA)
  source 1..23: mol_type = other DNA
acatcaaggaagatggcatttct

SEQ ID NO: 10207 - DNA, 22 bp, synthetic construct
  misc_feature 1..22: note = Description of Artificial Sequence: Synthetic Antisense oligonucleotide
  modified_base 2: mod_base = OTHER; note = 5-methyl
  modified_base 5: mod_base = OTHER; note = 5-methyl
  modified_base 17: mod_base = OTHER; note = 5-methyl
  modified_base 22: mod_base = OTHER; note = 5-methyl
  modified_base 21..22: mod_base = OTHER; note = bicyclic nucleic acid (BNA)
  source 1..22: mol_type = other DNA
acatcaaggaagatggcatttc

SEQ ID NO: 10208 - DNA, 21 bp, synthetic construct
  misc_feature 1..21: note = Description of Artificial Sequence: Synthetic Antisense oligonucleotide
  modified_base 2: mod_base = OTHER; note = 5-methyl
  modified_base 5: mod_base = OTHER; note = 5-methyl
  modified_base 17: mod_base = OTHER; note = 5-methyl
  modified_base 20..21: mod_base = OTHER; note = bicyclic nucleic acid (BNA)
  source 1..21: mol_type = other DNA
acatcaaggaagatggcattt

SEQ ID NO: 10209 - DNA, 20 bp, synthetic construct
  misc_feature 1..20: note = Description of Artificial Sequence: Synthetic Antisense oligonucleotide
  modified_base 2: mod_base = OTHER; note = 5-methyl
  modified_base 5: mod_base = OTHER; note = 5-methyl
  modified_base 17: mod_base = OTHER; note = 5-methyl
  modified_base 19..20: mod_base = OTHER; note = bicyclic nucleic acid (BNA)
  source 1..20: mol_type = other DNA
acatcaaggaagatggcatt

SEQ ID NO: 10210 - DNA, 19 bp, synthetic construct
  misc_feature 1..19: note = Description of Artificial Sequence: Synthetic Antisense oligonucleotide
  modified_base 2: mod_base = OTHER; note = 5-methyl
  modified_base 5: mod_base = OTHER; note = 5-methyl
  modified_base 17: mod_base = OTHER; note = 5-methyl
  modified_base 18..19: mod_base = OTHER; note = bicyclic nucleic acid (BNA)
  source 1..19: mol_type = other DNA
acatcaaggaagatggcat

SEQ ID NO: 10211 - DNA, 18 bp, synthetic construct
  misc_feature 1..18: note = Description of Artificial Sequence: Synthetic Antisense oligonucleotide
  modified_base 2: mod_base = OTHER; note = 5-methyl
  modified_base 5: mod_base = OTHER; note = 5-methyl
  modified_base 17: mod_base = OTHER; note = 5-methyl
  modified_base 17..18: mod_base = OTHER; note = bicyclic nucleic acid (BNA)
  source 1..18: mol_type = other DNA
acatcaaggaagatggca

SEQ ID NO: 10212 - DNA, 17 bp, synthetic construct
  misc_feature 1..17: note = Description of Artificial Sequence: Synthetic Antisense oligonucleotide
  modified_base 2: mod_base = OTHER; note = 5-methyl
  modified_base 5: mod_base = OTHER; note = 5-methyl
  modified_base 17: mod_base = OTHER; note = 5-methyl
  modified_base 16..17: mod_base = OTHER; note = bicyclic nucleic acid (BNA)
  source 1..17: mol_type = other DNA
acatcaaggaagatggc

SEQ ID NO: 10213 - DNA, 16 bp, synthetic construct
  misc_feature 1..16: note = Description of Artificial Sequence: Synthetic Antisense oligonucleotide
  modified_base 2: mod_base = OTHER; note = 5-methyl
  modified_base 5: mod_base = OTHER; note = 5-methyl
  modified_base 15..16: mod_base = OTHER; note = bicyclic nucleic acid (BNA)
  source 1..16: mol_type = other DNA
acatcaaggaagatgg

SEQ ID NO: 10214 - DNA, 15 bp, synthetic construct
  misc_feature 1..15: note = Description of Artificial Sequence: Synthetic Antisense oligonucleotide
  modified_base 2: mod_base = OTHER; note = 5-methyl
  modified_base 5: mod_base = OTHER; note = 5-methyl
  modified_base 14..15: mod_base = OTHER; note = bicyclic nucleic acid (BNA)
  source 1..15: mol_type = other DNA
acatcaaggaagatg

SEQ ID NO: 10215 - DNA, 14 bp, synthetic construct
  misc_feature 1..14: note = Description of Artificial Sequence: Synthetic Antisense oligonucleotide
  modified_base 2: mod_base = OTHER; note = 5-methyl
  modified_base 5: mod_base = OTHER; note = 5-methyl
  modified_base 13..14: mod_base = OTHER; note = bicyclic nucleic acid (BNA)
  source 1..14: mol_type = other DNA
acatcaaggaagat

SEQ ID NO: 10216 - DNA, 13 bp, synthetic construct
  misc_feature 1..13: note = Description of Artificial Sequence: Synthetic Antisense oligonucleotide
  modified_base 2: mod_base = OTHER; note = 5-methyl
  modified_base 5: mod_base = OTHER; note = 5-methyl
  modified_base 12..13: mod_base = OTHER; note = bicyclic nucleic acid (BNA)
  source 1..13: mol_type = other DNA
acatcaaggaaga

SEQ ID NO: 10217 - DNA, 12 bp, synthetic construct
  misc_feature 1..12: note = Description of Artificial Sequence: Synthetic Antisense oligonucleotide
  modified_base 2: mod_base = OTHER; note = 5-methyl
  modified_base 5: mod_base = OTHER; note = 5-methyl
  modified_base 11..12: mod_base = OTHER; note = bicyclic nucleic acid (BNA)
  source 1..12: mol_type = other DNA
acatcaaggaag

SEQ ID NO: 10218 - DNA, 24 bp, synthetic construct
  misc_feature 1..24: note = Description of Artificial Sequence: Synthetic Antisense oligonucleotide
  modified_base 1: mod_base = OTHER; note = 5-methyl
  modified_base 4: mod_base = OTHER; note = 5-methyl
  modified_base 16: mod_base = OTHER; note = 5-methyl
  modified_base 21: mod_base = OTHER; note = 5-methyl
  modified_base 23..24: mod_base = OTHER; note = bicyclic nucleic acid (BNA)
  source 1..24: mol_type = other DNA
catcaaggaagatggcatttctag

SEQ ID NO: 10219 - DNA, 23 bp, synthetic construct
  misc_feature 1..23: note = Description of Artificial Sequence: Synthetic Antisense oligonucleotide
  modified_base 1: mod_base = OTHER; note = 5-methyl
  modified_base 4: mod_base = OTHER; note = 5-methyl
  modified_base 16: mod_base = OTHER; note = 5-methyl
  modified_base 21: mod_base = OTHER; note = 5-methyl
  modified_base 22..23: mod_base = OTHER; note = bicyclic nucleic acid (BNA)
  source 1..23: mol_type = other DNA
catcaaggaagatggcatttcta

SEQ ID NO: 10220 - DNA, 22 bp, synthetic construct
  misc_feature 1..22: note = Description of Artificial Sequence: Synthetic Antisense oligonucleotide
  modified_base 1: mod_base = OTHER; note = 5-methyl
  modified_base 4: mod_base = OTHER; note = 5-methyl
  modified_base 16: mod_base = OTHER; note = 5-methyl
  modified_base 21: mod_base = OTHER; note = 5-methyl
  modified_base 21..22: mod_base = OTHER; note = bicyclic nucleic acid (BNA)
  source 1..22: mol_type = other DNA
catcaaggaagatggcatttct

SEQ ID NO: 10221 - DNA, 21 bp, synthetic construct
  misc_feature 1..21: note = Description of Artificial Sequence: Synthetic Antisense oligonucleotide
  modified_base 1: mod_base = OTHER; note = 5-methyl
  modified_base 4: mod_base = OTHER; note = 5-methyl
  modified_base 16: mod_base = OTHER; note = 5-methyl
  modified_base 21: mod_base = OTHER; note = 5-methyl
  modified_base 20..21: mod_base = OTHER; note = bicyclic nucleic acid (BNA)
  source 1..21: mol_type = other DNA
catcaaggaagatggcatttc

SEQ ID NO: 10222 - DNA, 20 bp, synthetic construct
  misc_feature 1..20: note = Description of Artificial Sequence: Synthetic Antisense oligonucleotide
  modified_base 1: mod_base = OTHER; note = 5-methyl
  modified_base 4: mod_base = OTHER; note = 5-methyl
  modified_base 16: mod_base = OTHER; note = 5-methyl
  modified_base 19..20: mod_base = OTHER; note = bicyclic nucleic acid (BNA)
  source 1..20: mol_type = other DNA
catcaaggaagatggcattt

SEQ ID NO: 10223 - DNA, 19 bp, synthetic construct
  misc_feature 1..19: note = Description of Artificial Sequence: Synthetic Antisense oligonucleotide
  modified_base 1: mod_base = OTHER; note = 5-methyl
  modified_base 4: mod_base = OTHER; note = 5-methyl
  modified_base 16: mod_base = OTHER; note = 5-methyl
  modified_base 18..19: mod_base = OTHER; note = bicyclic nucleic acid (BNA)
  source 1..19: mol_type = other DNA
catcaaggaagatggcatt

SEQ ID NO: 10224 - DNA, 18 bp, synthetic construct
  misc_feature 1..18: note = Description of Artificial Sequence: Synthetic Antisense oligonucleotide
  modified_base 1: mod_base = OTHER; note = 5-methyl
  modified_base 4: mod_base = OTHER; note = 5-methyl
  modified_base 16: mod_base = OTHER; note = 5-methyl
  modified_base 17..18: mod_base = OTHER; note = bicyclic nucleic acid (BNA)
  source 1..18: mol_type = other DNA
catcaaggaagatggcat

SEQ ID NO: 10225 - DNA, 17 bp, synthetic construct
  misc_feature 1..17: note = Description of Artificial Sequence: Synthetic Antisense oligonucleotide
  modified_base 1: mod_base = OTHER; note = 5-methyl
  modified_base 4: mod_base = OTHER; note = 5-methyl
  modified_base 16: mod_base = OTHER; note = 5-methyl
  modified_base 16..17: mod_base = OTHER; note = bicyclic nucleic acid (BNA)
  source 1..17: mol_type = other DNA
catcaaggaagatggca

SEQ ID NO: 10226 - DNA, 16 bp, synthetic construct
  misc_feature 1..16: note = Description of Artificial Sequence: Synthetic Antisense oligonucleotide
  modified_base 1: mod_base = OTHER; note = 5-methyl
  modified_base 4: mod_base = OTHER; note = 5-methyl
  modified_base 16: mod_base = OTHER; note = 5-methyl
  modified_base 15..16: mod_base = OTHER; note = bicyclic nucleic acid (BNA)
  source 1..16: mol_type = other DNA
catcaaggaagatggc

SEQ ID NO: 10227 - DNA, 15 bp, synthetic construct
  misc_feature 1..15: note = Description of Artificial Sequence: Synthetic Antisense oligonucleotide
  modified_base 1: mod_base = OTHER; note = 5-methyl
  modified_base 4: mod_base = OTHER; note = 5-methyl
  modified_base 14..15: mod_base = OTHER; note = bicyclic nucleic acid (BNA)
  source 1..15: mol_type = other DNA
catcaaggaagatgg

SEQ ID NO: 10228 - DNA, 14 bp, synthetic construct
  misc_feature 1..14: note = Description of Artificial Sequence: Synthetic Antisense oligonucleotide
  modified_base 1: mod_base = OTHER; note = 5-methyl
  modified_base 4: mod_base = OTHER; note = 5-methyl
  modified_base 13..14: mod_base = OTHER; note = bicyclic nucleic acid (BNA)
  source 1..14: mol_type = other DNA
catcaaggaagatg

SEQ ID NO: 10229 - DNA, 13 bp, synthetic construct
  misc_feature 1..13: note = Description of Artificial Sequence: Synthetic Antisense oligonucleotide
  modified_base 1: mod_base = OTHER; note = 5-methyl
  modified_base 4: mod_base = OTHER; note = 5-methyl
  modified_base 12..13: mod_base = OTHER; note = bicyclic nucleic acid (BNA)
  source 1..13: mol_type = other DNA
catcaaggaagat

SEQ ID NO: 10230 - DNA, 12 bp, synthetic construct
  misc_feature 1..12: note = Description of Artificial Sequence: Synthetic Antisense oligonucleotide
  modified_base 1: mod_base = OTHER; note = 5-methyl
  modified_base 4: mod_base = OTHER; note = 5-methyl
  modified_base 11..12: mod_base = OTHER; note = bicyclic nucleic acid (BNA)
  source 1..12: mol_type = other DNA
catcaaggaaga

SEQ ID NO: 10231 - DNA, 11 bp, synthetic construct
  misc_feature 1..11: note = Description of Artificial Sequence: Synthetic Antisense oligonucleotide
  modified_base 1: mod_base = OTHER; note = 5-methyl
  modified_base 4: mod_base = OTHER; note = 5-methyl
  modified_base 10..11: mod_base = OTHER; note = bicyclic nucleic acid (BNA)
  source 1..11: mol_type = other DNA
catcaaggaag

SEQ ID NO: 10232 - DNA, 23 bp, synthetic construct
  misc_feature 1..23: note = Description of Artificial Sequence: Synthetic Antisense oligonucleotide
  modified_base 3: mod_base = OTHER; note = 5-methyl
  modified_base 15: mod_base = OTHER; note = 5-methyl
  modified_base 20: mod_base = OTHER; note = 5-methyl
  modified_base 22..23: mod_base = OTHER; note = bicyclic nucleic acid (BNA)
  source 1..23: mol_type = other DNA
atcaaggaagatggcatttctag

SEQ ID NO: 10233 - DNA, 22 bp, synthetic construct
  misc_feature 1..22: note = Description of Artificial Sequence: Synthetic Antisense oligonucleotide
  modified_base 3: mod_base = OTHER; note = 5-methyl
  modified_base 15: mod_base = OTHER; note = 5-methyl
  modified_base 20: mod_base = OTHER; note = 5-methyl
  modified_base 21..22: mod_base = OTHER; note = bicyclic nucleic acid (BNA)
  source 1..22: mol_type = other DNA
atcaaggaagatggcatttcta

SEQ ID NO: 10234 - DNA, 21 bp, synthetic construct
  misc_feature 1..21: note = Description of Artificial Sequence: Synthetic Antisense oligonucleotide
  modified_base 3: mod_base = OTHER; note = 5-methyl
  modified_base 15: mod_base = OTHER; note = 5-methyl
  modified_base 20: mod_base = OTHER; note = 5-methyl
  modified_base 20..21: mod_base = OTHER; note = bicyclic nucleic acid (BNA)
  source 1..21: mol_type = other DNA
atcaaggaagatggcatttct

SEQ ID NO: 10235 - DNA, 20 bp, synthetic construct
  misc_feature 1..20: note = Description of Artificial Sequence: Synthetic Antisense oligonucleotide
  modified_base 3: mod_base = OTHER; note = 5-methyl
  modified_base 15: mod_base = OTHER; note = 5-methyl
  modified_base 20: mod_base = OTHER; note = 5-methyl
  modified_base 19..20: mod_base = OTHER; note = bicyclic nucleic acid (BNA)
  source 1..20: mol_type = other DNA
atcaaggaagatggcatttc

SEQ ID NO: 10236 - DNA, 19 bp, synthetic construct
  misc_feature 1..19: note = Description of Artificial Sequence: Synthetic Antisense oligonucleotide
  modified_base 3: mod_base = OTHER; note = 5-methyl
  modified_base 15: mod_base = OTHER; note = 5-methyl
  modified_base 18..19: mod_base = OTHER; note = bicyclic nucleic acid (BNA)
  source 1..19: mol_type = other DNA
atcaaggaagatggcattt

SEQ ID NO: 10237 - DNA, 18 bp, synthetic construct
  misc_feature 1..18: note = Description of Artificial Sequence: Synthetic Antisense oligonucleotide
  modified_base 3: mod_base = OTHER; note = 5-methyl
  modified_base 15: mod_base = OTHER; note = 5-methyl
  modified_base 17..18: mod_base = OTHER; note = bicyclic nucleic acid (BNA)
  source 1..18: mol_type = other DNA
atcaaggaagatggcatt

SEQ ID NO: 10238 - DNA, 17 bp, synthetic construct
  misc_feature 1..17: note = Description of Artificial Sequence: Synthetic Antisense oligonucleotide
  modified_base 3: mod_base = OTHER; note = 5-methyl
  modified_base 15: mod_base = OTHER; note = 5-methyl
  modified_base 16..17: mod_base = OTHER; note = bicyclic nucleic acid (BNA)
  source 1..17: mol_type = other DNA
atcaaggaagatggcat

SEQ ID NO: 10239 - DNA, 16 bp, synthetic construct
  misc_feature 1..16: note = Description of Artificial Sequence: Synthetic Antisense oligonucleotide
  modified_base 3: mod_base = OTHER; note = 5-methyl
  modified_base 15: mod_base = OTHER; note = 5-methyl
  modified_base 15..16: mod_base = OTHER; note = bicyclic nucleic acid (BNA)
  source 1..16: mol_type = other DNA
atcaaggaagatggca

SEQ ID NO: 10240 - DNA, 15 bp, synthetic construct
  misc_feature 1..15: note = Description of Artificial Sequence: Synthetic Antisense oligonucleotide
  modified_base 3: mod_base = OTHER; note = 5-methyl
  modified_base 15: mod_base = OTHER; note = 5-methyl
  modified_base 14..15: mod_base = OTHER; note = bicyclic nucleic acid (BNA)
  source 1..15: mol_type = other DNA
atcaaggaagatggc

SEQ ID NO: 10241 - DNA, 14 bp, synthetic construct
  misc_feature 1..14: note = Description of Artificial Sequence: Synthetic Antisense oligonucleotide
  modified_base 3: mod_base = OTHER; note = 5-methyl
  modified_base 13..14: mod_base = OTHER; note = bicyclic nucleic acid (BNA)
  source 1..14: mol_type = other DNA
atcaaggaagatgg

SEQ ID NO: 10242 - DNA, 13 bp, synthetic construct
  misc_feature 1..13: note = Description of Artificial Sequence: Synthetic Antisense oligonucleotide
  modified_base 3: mod_base = OTHER; note = 5-methyl
  modified_base 12..13: mod_base = OTHER; note = bicyclic nucleic acid (BNA)
  source 1..13: mol_type = other DNA
atcaaggaagatg

SEQ ID NO: 10243 - DNA, 12 bp, synthetic construct
  misc_feature 1..12: note = Description of Artificial Sequence: Synthetic Antisense oligonucleotide
  modified_base 3: mod_base = OTHER; note = 5-methyl
  modified_base 11..12: mod_base = OTHER; note = bicyclic nucleic acid (BNA)
  source 1..12: mol_type = other DNA
atcaaggaagat

SEQ ID NO: 10244 - DNA, 11 bp, synthetic construct
  misc_feature 1..11: note = Description of Artificial Sequence: Synthetic Antisense oligonucleotide
  modified_base 3: mod_base = OTHER; note = 5-methyl
  modified_base 10..11: mod_base = OTHER; note = bicyclic nucleic acid (BNA)
  source 1..11: mol_type = other DNA
atcaaggaaga

SEQ ID NO: 10245 - DNA, 10 bp, synthetic construct
  misc_feature 1..10: note = Description of Artificial Sequence: Synthetic Antisense oligonucleotide
  modified_base 3: mod_base = OTHER; note = 5-methyl
  modified_base 9..10: mod_base = OTHER; note = bicyclic nucleic acid (BNA)
  source 1..10: mol_type = other DNA
atcaaggaag

SEQ ID NO: 10246 - DNA, 18 bp, synthetic construct
  misc_feature 1..18: note = Description of Artificial Sequence: Synthetic Antisense oligonucleotide
  modified_base 1..2: mod_base = OTHER; note = bicyclic nucleic acid (BNA)
  modified_base 17..18: mod_base = OTHER; note = bicyclic nucleic acid (BNA)
  modified_base 9: mod_base = OTHER; note = 5-methyl
  modified_base 13..14: mod_base = OTHER; note = 5-methyl
  modified_base 18: mod_base = OTHER; note = 5-methyl
  source 1..18: mol_type = other DNA
ggtaagttctgtccaagc

SEQ ID NO: 10247 - DNA, 18 bp, synthetic construct
  misc_feature 1..18: note = Description of Artificial Sequence: Synthetic Antisense oligonucleotide
  modified_base 1..2: mod_base = OTHER; note = bicyclic nucleic acid (BNA)
  modified_base 17..18: mod_base = OTHER; note = bicyclic nucleic acid (BNA)
  modified_base 8: mod_base = OTHER; note = 5-methyl
  modified_base 12..13: mod_base = OTHER; note = 5-methyl
  modified_base 17..18: mod_base = OTHER; note = 5-methyl
  source 1..18: mol_type = other DNA
gtaagttctgtccaagcc

SEQ ID NO: 10248 - DNA, 18 bp, synthetic construct
  misc_feature 1..18: note = Description of Artificial Sequence: Synthetic Antisense oligonucleotide
  modified_base 1..2: mod_base = OTHER; note = bicyclic nucleic acid (BNA)
  modified_base 17..18: mod_base = OTHER; note = bicyclic nucleic acid (BNA)
  modified_base 4: mod_base = OTHER; note = 5-methyl
  modified_base 13: mod_base = OTHER; note = 5-methyl
  modified_base 17..18: mod_base = OTHER; note = 5-methyl
  source 1..18: mol_type = other DNA
agtcggtaagttctgtcc

SEQ ID NO: 10249 - DNA, 18 bp, synthetic construct
  misc_feature 1..18: note = Description of Artificial Sequence: Synthetic Antisense oligonucleotide
  modified_base 1: mod_base = OTHER; note = 5-methyl
  modified_base 5..6: mod_base = OTHER; note = 5-methyl
  modified_base 10..12: mod_base = OTHER; note = 5-methyl
  modified_base 1..2: mod_base = OTHER; note = bicyclic nucleic acid (BNA)
  modified_base 17..18: mod_base = OTHER; note = bicyclic nucleic acid (BNA)
  source 1..18: mol_type = other DNA
ctgtccaagcccggttga

SEQ ID NO: 10250 - DNA, 15 bp, synthetic construct
  misc_feature 1..15: note = Description of Artificial Sequence: Synthetic Antisense oligonucleotide
  modified_base 1..2: mod_base = OTHER; note = bicyclic nucleic acid (BNA)
  modified_base 14..15: mod_base = OTHER; note = bicyclic nucleic acid (BNA)
  modified_base 7: mod_base = OTHER; note = 5-methyl
  modified_base 11..12: mod_base = OTHER; note = 5-methyl
  source 1..15: mol_type = other DNA
taagttctgtccaag

SEQ ID NO: 10251 - DNA, 20 bp, synthetic construct
  misc_feature 1..20: note = Description of Artificial Sequence: Synthetic Antisense oligonucleotide
  modified_base 1..2: mod_base = OTHER; note = bicyclic nucleic acid (BNA)
  modified_base 19..20: mod_base = OTHER; note = bicyclic nucleic acid (BNA)
  modified_base 3: mod_base = OTHER; note = 5-methyl
  modified_base 7..8: mod_base = OTHER; note = 5-methyl
  modified_base 12..14: mod_base = OTHER; note = 5-methyl
  source 1..20: mol_type = other DNA
ttctgtccaagcccggttga

SEQ ID NO: 10252 - DNA, 19 bp, synthetic construct
  misc_feature 1..19: note = Description of Artificial Sequence: Synthetic Antisense oligonucleotide
  modified_base 1..2: mod_base = OTHER; note = bicyclic nucleic acid (BNA)
  modified_base 18..19: mod_base = OTHER; note = bicyclic nucleic acid (BNA)
  modified_base 3: mod_base = OTHER; note = 5-methyl
  modified_base 7..8: mod_base = OTHER; note = 5-methyl
  modified_base 12..14: mod_base = OTHER; note = 5-methyl
  source 1..19: mol_type = other DNA
ttctgtccaagcccggttg

SEQ ID NO: 10253 - DNA, 18 bp, synthetic construct
  misc_feature 1..18: note = Description of Artificial Sequence: Synthetic Antisense oligonucleotide
  modified_base 1..2: mod_base = OTHER; note = bicyclic nucleic acid (BNA)
  modified_base 17..18: mod_base = OTHER; note = bicyclic nucleic acid (BNA)
  modified_base 3: mod_base = OTHER; note = 5-methyl
  modified_base 7..8: mod_base = OTHER; note = 5-methyl
  modified_base 12..14: mod_base = OTHER; note = 5-methyl
  source 1..18: mol_type = other DNA
ttctgtccaagcccggtt

SEQ ID NO: 10254 - DNA, 17 bp, synthetic construct
  misc_feature 1..17: note = Description of Artificial Sequence: Synthetic Antisense oligonucleotide
  modified_base 1..2: mod_base = OTHER; note = bicyclic nucleic acid (BNA)
  modified_base 16..17: mod_base = OTHER; note = bicyclic nucleic acid (BNA)
  modified_base 3: mod_base = OTHER; note = 5-methyl
  modified_base 7..8: mod_base = OTHER; note = 5-methyl
  modified_base 12..14: mod_base = OTHER; note = 5-methyl
  source 1..17: mol_type = other DNA
ttctgtccaagcccggt

SEQ ID NO: 10255 - DNA, 16 bp, synthetic construct
  misc_feature 1..16: note = Description of Artificial Sequence: Synthetic Antisense oligonucleotide
  modified_base 1..2: mod_base = OTHER; note = bicyclic nucleic acid (BNA)
  modified_base 15..16: mod_base = OTHER; note = bicyclic nucleic acid (BNA)
  modified_base 3: mod_base = OTHER; note = 5-methyl
  modified_base 7..8: mod_base = OTHER; note = 5-methyl
  modified_base 12..14: mod_base = OTHER; note = 5-methyl
  source 1..16: mol_type = other DNA
ttctgtccaagcccgg

SEQ ID NO: 10256 - DNA, 15 bp, synthetic construct
  misc_feature 1..15: note = Description of Artificial Sequence: Synthetic Antisense oligonucleotide
  modified_base 1..2: mod_base = OTHER; note = bicyclic nucleic acid (BNA)
  modified_base 14..15: mod_base = OTHER; note = bicyclic nucleic acid (BNA)
  modified_base 3: mod_base = OTHER; note = 5-methyl
  modified_base 7..8: mod_base = OTHER; note = 5-methyl
  modified_base 12..14: mod_base = OTHER; note = 5-methyl
  source 1..15: mol_type = other DNA
ttctgtccaagcccg

SEQ ID NO: 10257 - DNA, 14 bp, synthetic construct
  misc_feature 1..14: note = Description of Artificial Sequence: Synthetic Antisense oligonucleotide
  modified_base 1..2: mod_base = OTHER; note = bicyclic nucleic acid (BNA)
  modified_base 13..14: mod_base = OTHER; note = bicyclic nucleic acid (BNA)
  modified_base 3: mod_base = OTHER; note = 5-methyl
  modified_base 7..8: mod_base = OTHER; note = 5-methyl
  modified_base 12..14: mod_base = OTHER; note = 5-methyl
  source 1..14: mol_type = other DNA
ttctgtccaagccc

SEQ ID NO: 10258 - DNA, 13 bp, synthetic construct
  misc_feature 1..13: note = Description of Artificial Sequence: Synthetic Antisense oligonucleotide
  modified_base 1..2: mod_base = OTHER; note = bicyclic nucleic acid (BNA)
  modified_base 12..13: mod_base = OTHER; note = bicyclic nucleic acid (BNA)
  modified_base 3: mod_base = OTHER; note = 5-methyl
  modified_base 7..8: mod_base = OTHER; note = 5-methyl
  modified_base 12..13: mod_base = OTHER; note = 5-methyl
  source 1..13: mol_type = other DNA
ttctgtccaagcc

SEQ ID NO: 10259 - DNA, 12 bp, synthetic construct
  misc_feature 1..12: note = Description of Artificial Sequence: Synthetic Antisense oligonucleotide
  modified_base 1..2: mod_base = OTHER; note = bicyclic nucleic acid (BNA)
  modified_base 11..12: mod_base = OTHER; note = bicyclic nucleic acid (BNA)
  modified_base 3: mod_base = OTHER; note = 5-methyl
  modified_base 7..8: mod_base = OTHER; note = 5-methyl
  modified_base 12: mod_base = OTHER; note = 5-methyl
  source 1..12: mol_type = other DNA
ttctgtccaagc

SEQ ID NO: 10260 - DNA, 11 bp, synthetic construct
  misc_feature 1..11: note = Description of Artificial Sequence: Synthetic Antisense oligonucleotide
  modified_base 1..2: mod_base = OTHER; note = bicyclic nucleic acid (BNA)
  modified_base 10..11: mod_base = OTHER; note = bicyclic nucleic acid (BNA)
  modified_base 3: mod_base = OTHER; note = 5-methyl
  modified_base 7..8: mod_base = OTHER; note = 5-methyl
  source 1..11: mol_type = other DNA
ttctgtccaag

SEQ ID NO: 10261 - DNA, 10 bp, synthetic construct
  misc_feature 1..10: note = Description of Artificial Sequence: Synthetic Antisense oligonucleotide
  modified_base 1..2: mod_base = OTHER; note = bicyclic nucleic acid (BNA)
  modified_base 9..10: mod_base = OTHER; note = bicyclic nucleic acid (BNA)
  modified_base 3: mod_base = OTHER; note = 5-methyl
  modified_base 7..8: mod_base = OTHER; note = 5-methyl
  source 1..10: mol_type = other DNA
ttctgtccaa

SEQ ID NO: 10262-10263 - skipped (2 entries)

SEQ ID NO: 10264 - DNA, 19 bp, synthetic construct
  misc_feature 1..19: note = Description of Artificial Sequence: Synthetic Antisense oligonucleotide
  modified_base 1..2: mod_base = OTHER; note = bicyclic nucleic acid (BNA)
  modified_base 18..19: mod_base = OTHER; note = bicyclic nucleic acid (BNA)
  modified_base 2: mod_base = OTHER; note = 5-methyl
  modified_base 6..7: mod_base = OTHER; note = 5-methyl
  modified_base 11..13: mod_base = OTHER; note = 5-methyl
  source 1..19: mol_type = other DNA
tctgtccaagcccggttga

SEQ ID NO: 10265 - DNA, 18 bp, synthetic construct
  misc_feature 1..18: note = Description of Artificial Sequence: Synthetic Antisense oligonucleotide
  modified_base 1..2: mod_base = OTHER; note = bicyclic nucleic acid (BNA)
  modified_base 17..18: mod_base = OTHER; note = bicyclic nucleic acid (BNA)
  modified_base 2: mod_base = OTHER; note = 5-methyl
  modified_base 6..7: mod_base = OTHER; note = 5-methyl
  modified_base 11..13: mod_base = OTHER; note = 5-methyl
  source 1..18: mol_type = other DNA
tctgtccaagcccggttg

SEQ ID NO: 10266 - DNA, 17 bp, synthetic construct
  misc_feature 1..17: note = Description of Artificial Sequence: Synthetic Antisense oligonucleotide
  modified_base 1..2: mod_base = OTHER; note = bicyclic nucleic acid (BNA)
  modified_base 16..17: mod_base = OTHER; note = bicyclic nucleic acid (BNA)
  modified_base 2: mod_base = OTHER; note = 5-methyl
  modified_base 6..7: mod_base = OTHER; note = 5-methyl
  modified_base 11..13: mod_base = OTHER; note = 5-methyl
  source 1..17: mol_type = other DNA
tctgtccaagcccggtt

SEQ ID NO: 10267 - DNA, 16 bp, synthetic construct
  misc_feature 1..16: note = Description of Artificial Sequence: Synthetic Antisense oligonucleotide
  modified_base 1..2: mod_base = OTHER; note = bicyclic nucleic acid (BNA)
  modified_base 15..16: mod_base = OTHER; note = bicyclic nucleic acid (BNA)
  modified_base 2: mod_base = OTHER; note = 5-methyl
  modified_base 6..7: mod_base = OTHER; note = 5-methyl
  modified_base 11..13: mod_base = OTHER; note = 5-methyl
  source 1..16: mol_type = other DNA
tctgtccaagcccggt

SEQ ID NO: 10268 - DNA, 15 bp, synthetic construct
  misc_feature 1..15: note = Description of Artificial Sequence: Synthetic Antisense oligonucleotide
  modified_base 1..2: mod_base = OTHER; note = bicyclic nucleic acid (BNA)
  modified_base 14..15: mod_base = OTHER; note = bicyclic nucleic acid (BNA)
  modified_base 2: mod_base = OTHER; note = 5-methyl
  modified_base 6..7: mod_base = OTHER; note = 5-methyl
  modified_base 11..13: mod_base = OTHER; note = 5-methyl
  source 1..15: mol_type = other DNA
tctgtccaagcccgg

SEQ ID NO: 10269 - DNA, 14 bp, synthetic construct
  misc_feature 1..14: note = Description of Artificial Sequence: Synthetic Antisense oligonucleotide
  modified_base 1..2: mod_base = OTHER; note = bicyclic nucleic acid (BNA)
  modified_base 13..14: mod_base = OTHER; note = bicyclic nucleic acid (BNA)
  modified_base 2: mod_base = OTHER; note = 5-methyl
  modified_base 6..7: mod_base = OTHER; note = 5-methyl
  modified_base 11..13: mod_base = OTHER; note = 5-methyl
  source 1..14: mol_type = other DNA
tctgtccaagcccg

SEQ ID NO: 10270 - DNA, 13 bp, synthetic construct
  misc_feature 1..13: note = Description of Artificial Sequence: Synthetic Antisense oligonucleotide
  modified_base 1..2: mod_base = OTHER; note = bicyclic nucleic acid (BNA)
  modified_base 12..13: mod_base = OTHER; note = bicyclic nucleic acid (BNA)
  modified_base 2: mod_base = OTHER; note = 5-methyl
  modified_base 6..7: mod_base = OTHER; note = 5-methyl
  modified_base 11..13: mod_base = OTHER; note = 5-methyl
  source 1..13: mol_type = other DNA
tctgtccaagccc

SEQ ID NO: 10271 - DNA, 12 bp, synthetic construct
  misc_feature 1..12: note = Description of Artificial Sequence: Synthetic Antisense oligonucleotide
  modified_base 1..2: mod_base = OTHER; note = bicyclic nucleic acid (BNA)
  modified_base 11..12: mod_base = OTHER; note = bicyclic nucleic acid (BNA)
  modified_base 2: mod_base = OTHER; note = 5-methyl
  modified_base 6..7: mod_base = OTHER; note = 5-methyl
  modified_base 11..12: mod_base = OTHER; note = 5-methyl
  source 1..12: mol_type = other DNA
tctgtccaagcc

SEQ ID NO: 10272 - DNA, 11 bp, synthetic construct
  misc_feature 1..11: note = Description of Artificial Sequence: Synthetic Antisense oligonucleotide
  modified_base 1..2: mod_base = OTHER; note = bicyclic nucleic acid (BNA)
  modified_base 10..11: mod_base = OTHER; note = bicyclic nucleic acid (BNA)
  modified_base 2: mod_base = OTHER; note = 5-methyl
  modified_base 6..7: mod_base = OTHER; note = 5-methyl
  modified_base 11: mod_base = OTHER; note = 5-methyl
  source 1..11: mol_type = other DNA
tctgtccaagc

SEQ ID NO: 10273 - DNA, 10 bp, synthetic construct
  misc_feature 1..10: note = Description of Artificial Sequence: Synthetic Antisense oligonucleotide
  modified_base 1..2: mod_base = OTHER; note = bicyclic nucleic acid (BNA)
  modified_base 9..10: mod_base = OTHER; note = bicyclic nucleic acid (BNA)
  modified_base 2: mod_base = OTHER; note = 5-methyl
  modified_base 6..7: mod_base = OTHER; note = 5-methyl
  source 1..10: mol_type = other DNA
tctgtccaag

SEQ ID NO: 10274-10275 - skipped (2 entries)

SEQ ID NO: 10276 - DNA, 17 bp, synthetic construct
  misc_feature 1..17: note = Description of Artificial Sequence: Synthetic Antisense oligonucleotide
  modified_base 1: mod_base = OTHER; note = 5-methyl
  modified_base 5..6: mod_base = OTHER; note = 5-methyl
  modified_base 10..12: mod_base = OTHER; note = 5-methyl
  modified_base 1..2: mod_base = OTHER; note = bicyclic nucleic acid (BNA)
  modified_base 16..17: mod_base = OTHER; note = bicyclic nucleic acid (BNA)
  source 1..17: mol_type = other DNA
ctgtccaagcccggttg

SEQ ID NO: 10277 - DNA, 16 bp, synthetic construct
  misc_feature 1..16: note = Description of Artificial Sequence: Synthetic Antisense oligonucleotide
  modified_base 1: mod_base = OTHER; note = 5-methyl
  modified_base 5..6: mod_base = OTHER; note = 5-methyl
  modified_base 10..12: mod_base = OTHER; note = 5-methyl
  modified_base 1..2: mod_base = OTHER; note = bicyclic nucleic acid (BNA)
  modified_base 15..16: mod_base = OTHER; note = bicyclic nucleic acid (BNA)
  source 1..16: mol_type = other DNA
ctgtccaagcccggtt

SEQ ID NO: 10278 - DNA, 15 bp, synthetic construct
  misc_feature 1..15: note = Description of Artificial Sequence: Synthetic Antisense oligonucleotide
  modified_base 1: mod_base = OTHER; note = 5-methyl
  modified_base 5..6: mod_base = OTHER; note = 5-methyl
  modified_base 10..12: mod_base = OTHER; note = 5-methyl
  modified_base 1..2: mod_base = OTHER; note = bicyclic nucleic acid (BNA)
  modified_base 14..15: mod_base = OTHER; note = bicyclic nucleic acid (BNA)
  source 1..15: mol_type = other DNA
ctgtccaagcccggt

SEQ ID NO: 10279 - DNA, 14 bp, synthetic construct
  misc_feature 1..14: note = Description of Artificial Sequence: Synthetic Antisense oligonucleotide
  modified_base 1: mod_base = OTHER; note = 5-methyl
  modified_base 5..6: mod_base = OTHER; note = 5-methyl
  modified_base 10..12: mod_base = OTHER; note = 5-methyl
  modified_base 1..2: mod_base = OTHER; note = bicyclic nucleic acid (BNA)
  modified_base 13..14: mod_base = OTHER; note = bicyclic nucleic acid (BNA)
  source 1..14: mol_type = other DNA
ctgtccaagcccgg

SEQ ID NO: 10280 - DNA, 13 bp, synthetic construct
  misc_feature 1..13: note = Description of Artificial Sequence: Synthetic Antisense oligonucleotide
  modified_base 1: mod_base = OTHER; note = 5-methyl
  modified_base 5..6: mod_base = OTHER; note = 5-methyl
  modified_base 10..12: mod_base = OTHER; note = 5-methyl
  modified_base 1..2: mod_base = OTHER; note = bicyclic nucleic acid (BNA)
  modified_base 12..13: mod_base = OTHER; note = bicyclic nucleic acid (BNA)
  source 1..13: mol_type = other DNA
ctgtccaagcccg

SEQ ID NO: 10281 - DNA, 12 bp, synthetic construct
  misc_feature 1..12: note = Description of Artificial Sequence: Synthetic Antisense oligonucleotide
  modified_base 1: mod_base = OTHER; note = 5-methyl
  modified_base 5..6: mod_base = OTHER; note = 5-methyl
  modified_base 10..12: mod_base = OTHER; note = 5-methyl
  modified_base 1..2: mod_base = OTHER; note = bicyclic nucleic acid (BNA)
  modified_base 11..12: mod_base = OTHER; note = bicyclic nucleic acid (BNA)
  source 1..12: mol_type = other DNA
ctgtccaagccc

SEQ ID NO: 10282 - DNA, 11 bp, synthetic construct
  misc_feature 1..11: note = Description of Artificial Sequence: Synthetic Antisense oligonucleotide
  modified_base 1: mod_base = OTHER; note = 5-methyl
  modified_base 5..6: mod_base = OTHER; note = 5-methyl
  modified_base 10..11: mod_base = OTHER; note = 5-methyl
  modified_base 1..2: mod_base = OTHER; note = bicyclic nucleic acid (BNA)
  modified_base 10..11: mod_base = OTHER; note = bicyclic nucleic acid (BNA)
  source 1..11: mol_type = other DNA
ctgtccaagcc

SEQ ID NO: 10283 - DNA, 10 bp, synthetic construct
  misc_feature 1..10: note = Description of Artificial Sequence: Synthetic Antisense oligonucleotide
  modified_base 1: mod_base = OTHER; note = 5-methyl
  modified_base 5..6: mod_base = OTHER; note = 5-methyl
  modified_base 10: mod_base = OTHER; note = 5-methyl
  modified_base 1..2: mod_base = OTHER; note = bicyclic nucleic acid (BNA)
  modified_base 9..10: mod_base = OTHER; note = bicyclic nucleic acid (BNA)
  source 1..10: mol_type = other DNA
ctgtccaagc

SEQ ID NO: 10284-10285 - skipped (2 entries)

SEQ ID NO: 10286 - DNA, 20 bp, synthetic construct
  misc_feature 1..20: note = Description of Artificial Sequence: Synthetic Antisense oligonucleotide
  modified_base 1..2: mod_base = OTHER; note = bicyclic nucleic acid (BNA)
  modified_base 19..20: mod_base = OTHER; note = bicyclic nucleic acid (BNA)
  modified_base 4: mod_base = OTHER; note = 5-methyl
  modified_base 8..9: mod_base = OTHER; note = 5-methyl
  modified_base 13..15: mod_base = OTHER; note = 5-methyl
  source 1..20: mol_type = other DNA
gttctgtccaagcccggttg

SEQ ID NO: 10287 - DNA, 19 bp, synthetic construct
  misc_feature 1..19: note = Description of Artificial Sequence: Synthetic Antisense oligonucleotide
  modified_base 1..2: mod_base = OTHER; note = bicyclic nucleic acid (BNA)
  modified_base 18..19: mod_base = OTHER; note = bicyclic nucleic acid (BNA)
  modified_base 4: mod_base = OTHER; note = 5-methyl
  modified_base 8..9: mod_base = OTHER; note = 5-methyl
  modified_base 13..15: mod_base = OTHER; note = 5-methyl
  source 1..19: mol_type = other DNA
gttctgtccaagcccggtt

SEQ ID NO: 10288 - DNA, 18 bp, synthetic construct
  misc_feature 1..18: note = Description of Artificial Sequence: Synthetic Antisense oligonucleotide
  modified_base 1..2: mod_base = OTHER; note = bicyclic nucleic acid (BNA)
  modified_base 17..18: mod_base = OTHER; note = bicyclic nucleic acid (BNA)
  modified_base 4: mod_base = OTHER; note = 5-methyl
  modified_base 8..9: mod_base = OTHER; note = 5-methyl
  modified_base 13..15: mod_base = OTHER; note = 5-methyl
  source 1..18: mol_type = other DNA
gttctgtccaagcccggt

SEQ ID NO: 10289 - DNA, 17 bp, synthetic construct
  misc_feature 1..17: note = Description of Artificial Sequence: Synthetic Antisense oligonucleotide
  modified_base 1..2: mod_base = OTHER; note = bicyclic nucleic acid (BNA)
  modified_base 16..17: mod_base = OTHER; note = bicyclic nucleic acid (BNA)
  modified_base 4: mod_base = OTHER; note = 5-methyl
  modified_base 8..9: mod_base = OTHER; note = 5-methyl
  modified_base 13..15: mod_base = OTHER; note = 5-methyl
  source 1..17: mol_type = other DNA
gttctgtccaagcccgg

SEQ ID NO: 10290 - DNA, 16 bp, synthetic construct
  misc_feature 1..16: note = Description of Artificial Sequence: Synthetic Antisense oligonucleotide
  modified_base 1..2: mod_base = OTHER; note = bicyclic nucleic acid (BNA)
  modified_base 15..16: mod_base = OTHER; note = bicyclic nucleic acid (BNA)
  modified_base 4: mod_base = OTHER; note = 5-methyl
  modified_base 8..9: mod_base = OTHER; note = 5-methyl
  modified_base 13..15: mod_base = OTHER; note = 5-methyl
  source 1..16: mol_type = other DNA
gttctgtccaagcccg

SEQ ID NO: 10291 - DNA, 15 bp, synthetic construct
  misc_feature 1..15: note = Description of Artificial Sequence: Synthetic Antisense oligonucleotide
  modified_base 1..2: mod_base = OTHER; note = bicyclic nucleic acid (BNA)
  modified_base 14..15: mod_base = OTHER; note = bicyclic nucleic acid (BNA)
  modified_base 4: mod_base = OTHER; note = 5-methyl
  modified_base 8..9: mod_base = OTHER; note = 5-methyl
  modified_base 13..15: mod_base = OTHER; note = 5-methyl
  source 1..15: mol_type = other DNA
gttctgtccaagccc

SEQ ID NO: 10292 - DNA, 14 bp, synthetic construct
  misc_feature 1..14: note = Description of Artificial Sequence: Synthetic Antisense oligonucleotide
  modified_base 1..2: mod_base = OTHER; note = bicyclic nucleic acid (BNA)
  modified_base 13..14: mod_base = OTHER; note = bicyclic nucleic acid (BNA)
  modified_base 4: mod_base = OTHER; note = 5-methyl
  modified_base 8..9: mod_base = OTHER; note = 5-methyl
  modified_base 13..14: mod_base = OTHER; note = 5-methyl
  source 1..14: mol_type = other DNA
gttctgtccaagcc

SEQ ID NO: 10293 - DNA, 13 bp, synthetic construct
  misc_feature 1..13: note = Description of Artificial Sequence: Synthetic Antisense oligonucleotide
  modified_base 1..2: mod_base = OTHER; note = bicyclic nucleic acid (BNA)
  modified_base 12..13: mod_base = OTHER; note = bicyclic nucleic acid (BNA)
  modified_base 4: mod_base = OTHER; note = 5-methyl
  modified_base 8..9: mod_base = OTHER; note = 5-methyl
  modified_base 13: mod_base = OTHER; note = 5-methyl
  source 1..13: mol_type = other DNA
gttctgtccaagc

SEQ ID NO: 10294 - DNA, 12 bp, synthetic construct
  misc_feature 1..12: note = Description of Artificial Sequence: Synthetic Antisense oligonucleotide
  modified_base 1..2: mod_base = OTHER; note = bicyclic nucleic acid (BNA)
  modified_base 11..12: mod_base = OTHER; note = bicyclic nucleic acid (BNA)
  modified_base 4: mod_base = OTHER; note = 5-methyl
  modified_base 8..9: mod_base = OTHER; note = 5-methyl
  source 1..12: mol_type = other DNA
gttctgtccaag

SEQ ID NO: 10295 - DNA, 11 bp, synthetic construct
  misc_feature 1..11: note = Description of Artificial Sequence: Synthetic Antisense oligonucleotide
  modified_base 1..2: mod_base = OTHER; note = bicyclic nucleic acid (BNA)
  modified_base 10..11: mod_base = OTHER; note = bicyclic nucleic acid (BNA)
  modified_base 4: mod_base = OTHER; note = 5-methyl
  modified_base 8..9: mod_base = OTHER; note = 5-methyl
  source 1..11: mol_type = other DNA
gttctgtccaa

SEQ ID NO: 10296 - DNA, 10 bp, synthetic construct
  misc_feature 1..10: note = Description of Artificial Sequence: Synthetic Antisense oligonucleotide
  modified_base 1..2: mod_base = OTHER; note = bicyclic nucleic acid (BNA)
  modified_base 9..10: mod_base = OTHER; note = bicyclic nucleic acid (BNA)
  modified_base 4: mod_base = OTHER; note = 5-methyl
  modified_base 8..9: mod_base = OTHER; note = 5-methyl
  source 1..10: mol_type = other DNA
gttctgtcca

SEQ ID NO: 10297-10298 - skipped (2 entries)

SEQ ID NO: 10299 - DNA, 20 bp, synthetic construct
  misc_feature 1..20: note = Description of Artificial Sequence: Synthetic Antisense oligonucleotide
  modified_base 1..2: mod_base = OTHER; note = bicyclic nucleic acid (BNA)
  modified_base 19..20: mod_base = OTHER; note = bicyclic nucleic acid (BNA)
  modified_base 5: mod_base = OTHER; note = 5-methyl
  modified_base 9..10: mod_base = OTHER; note = 5-methyl
  modified_base 14..16: mod_base = OTHER; note = 5-methyl
  source 1..20: mol_type = other DNA
agttctgtccaagcccggtt

SEQ ID NO: 10300 - DNA, 19 bp, synthetic construct
  misc_feature 1..19: note = Description of Artificial Sequence: Synthetic Antisense oligonucleotide
  modified_base 1..2: mod_base = OTHER; note = bicyclic nucleic acid (BNA)
  modified_base 18..19: mod_base = OTHER; note = bicyclic nucleic acid (BNA)
  modified_base 5: mod_base = OTHER; note = 5-methyl
  modified_base 9..10: mod_base = OTHER; note = 5-methyl
  modified_base 14..16: mod_base = OTHER; note = 5-methyl
  source 1..19: mol_type = other DNA
agttctgtccaagcccggt

SEQ ID NO: 10301 - DNA, 18 bp, synthetic construct
  misc_feature 1..18: note = Description of Artificial Sequence: Synthetic Antisense oligonucleotide
  modified_base 1..2: mod_base = OTHER; note = bicyclic nucleic acid (BNA)
  modified_base 17..18: mod_base = OTHER; note = bicyclic nucleic acid (BNA)
  modified_base 5: mod_base = OTHER; note = 5-methyl
  modified_base 9..10: mod_base = OTHER; note = 5-methyl
  modified_base 14..16: mod_base = OTHER; note = 5-methyl
  source 1..18: mol_type = other DNA
agttctgtccaagcccgg

SEQ ID NO: 10302 - DNA, 17 bp, synthetic construct
  misc_feature 1..17: note = Description of Artificial Sequence: Synthetic Antisense oligonucleotide
  modified_base 1..2: mod_base = OTHER; note = bicyclic nucleic acid (BNA)
  modified_base 16..17: mod_base = OTHER; note = bicyclic nucleic acid (BNA)
  modified_base 5: mod_base = OTHER; note = 5-methyl
  modified_base 9..10: mod_base = OTHER; note = 5-methyl
  modified_base 14..16: mod_base = OTHER; note = 5-methyl
  source 1..17: mol_type = other DNA
agttctgtccaagcccg

SEQ ID NO: 10303 - DNA, 16 bp, synthetic construct
  misc_feature 1..16: note = Description of Artificial Sequence: Synthetic Antisense oligonucleotide
  modified_base 1..2: mod_base = OTHER; note = bicyclic nucleic acid (BNA)
  modified_base 15..16: mod_base = OTHER; note = bicyclic nucleic acid (BNA)
  modified_base 5: mod_base = OTHER; note = 5-methyl
  modified_base 9..10: mod_base = OTHER; note = 5-methyl
  modified_base 14..16: mod_base = OTHER; note = 5-methyl
  source 1..16: mol_type = other DNA
agttctgtccaagccc

SEQ ID NO: 10304 - DNA, 15 bp, synthetic construct
  misc_feature 1..15: note = Description of Artificial Sequence: Synthetic Antisense oligonucleotide
  modified_base 1..2: mod_base = OTHER; note = bicyclic nucleic acid (BNA)
  modified_base 14..15: mod_base = OTHER; note = bicyclic nucleic acid (BNA)
  modified_base 5: mod_base = OTHER; note = 5-methyl
  modified_base 9..10: mod_base = OTHER; note = 5-methyl
  modified_base 14..15: mod_base = OTHER; note = 5-methyl
  source 1..15: mol_type = other DNA
agttctgtccaagcc

SEQ ID NO: 10305 - DNA, 14 bp, synthetic construct
  misc_feature 1..14: note = Description of Artificial Sequence: Synthetic Antisense oligonucleotide
  modified_base 1..2: mod_base = OTHER; note = bicyclic nucleic acid (BNA)
  modified_base 13..14: mod_base = OTHER; note = bicyclic nucleic acid (BNA)
  modified_base 5: mod_base = OTHER; note = 5-methyl
  modified_base 9..10: mod_base = OTHER; note = 5-methyl
  modified_base 14: mod_base = OTHER; note = 5-methyl
  source 1..14: mol_type = other DNA
agttctgtccaagc

SEQ ID NO: 10306 - DNA, 13 bp, synthetic construct
  misc_feature 1..13: note = Description of Artificial Sequence: Synthetic Antisense oligonucleotide
  modified_base 1..2: mod_base = OTHER; note = bicyclic nucleic acid (BNA)
  modified_base 12..13: mod_base = OTHER; note = bicyclic nucleic acid (BNA)
  modified_base 5: mod_base = OTHER; note = 5-methyl
  modified_base 9..10: mod_base = OTHER; note = 5-methyl
  source 1..13: mol_type = other DNA
agttctgtccaag

SEQ ID NO: 10307 - DNA, 12 bp, synthetic construct
  misc_feature 1..12: note = Description of Artificial Sequence: Synthetic Antisense oligonucleotide
  modified_base 1..2: mod_base = OTHER; note = bicyclic nucleic acid (BNA)
  modified_base 11..12: mod_base = OTHER; note = bicyclic nucleic acid (BNA)
  modified_base 5: mod_base = OTHER; note = 5-methyl
  modified_base 9..10: mod_base = OTHER; note = 5-methyl
  source 1..12: mol_type = other DNA
agttctgtccaa

SEQ ID NO: 10308 - DNA, 11 bp, synthetic construct
  misc_feature 1..11: note = Description of Artificial Sequence: Synthetic Antisense oligonucleotide
  modified_base 1..2: mod_base = OTHER; note = bicyclic nucleic acid (BNA)
  modified_base 10..11: mod_base = OTHER; note = bicyclic nucleic acid (BNA)
  modified_base 5: mod_base = OTHER; note = 5-methyl
  modified_base 9..10: mod_base = OTHER; note = 5-methyl
  source 1..11: mol_type = other DNA
agttctgtcca

SEQ ID NO: 10309 - DNA, 10 bp, synthetic construct
  misc_feature 1..10: note = Description of Artificial Sequence: Synthetic Antisense oligonucleotide
  modified_base 1..2: mod_base = OTHER; note = bicyclic nucleic acid (BNA)
  modified_base 9..10: mod_base = OTHER; note = bicyclic nucleic acid (BNA)
  modified_base 5: mod_base = OTHER; note = 5-methyl
  modified_base 9..10: mod_base = OTHER; note = 5-methyl
  source 1..10: mol_type = other DNA
agttctgtcc

SEQ ID NO: 10310-10311 - skipped (2 entries)

SEQ ID NO: 10312 - DNA, 20 bp, synthetic construct
  misc_feature 1..20: note = Description of Artificial Sequence: Synthetic Antisense oligonucleotide
  modified_base 1..2: mod_base = OTHER; note = bicyclic nucleic acid (BNA)
  modified_base 19..20: mod_base = OTHER; note = bicyclic nucleic acid (BNA)
  modified_base 6: mod_base = OTHER; note = 5-methyl
  modified_base 10..11: mod_base = OTHER; note = 5-methyl
  modified_base 15..17: mod_base = OTHER; note = 5-methyl
  source 1..20: mol_type = other DNA
aagttctgtccaagcccggt

SEQ ID NO: 10313 - DNA, 19 bp, synthetic construct
  misc_feature 1..19: note = Description of Artificial Sequence: Synthetic Antisense oligonucleotide
  modified_base 1..2: mod_base = OTHER; note = bicyclic nucleic acid (BNA)
  modified_base 18..19: mod_base = OTHER; note = bicyclic nucleic acid (BNA)
  modified_base 6: mod_base = OTHER; note = 5-methyl
  modified_base 10..11: mod_base = OTHER; note = 5-methyl
  modified_base 15..17: mod_base = OTHER; note = 5-methyl
  source 1..19: mol_type = other DNA
aagttctgtccaagcccgg

SEQ ID NO: 10314 - DNA, 18 bp, synthetic construct
  misc_feature 1..18: note = Description of Artificial Sequence: Synthetic Antisense oligonucleotide
  modified_base 1..2: mod_base = OTHER; note = bicyclic nucleic acid (BNA)
  modified_base 17..18: mod_base = OTHER; note = bicyclic nucleic acid (BNA)
  modified_base 6: mod_base = OTHER; note = 5-methyl
  modified_base 10..11: mod_base = OTHER; note = 5-methyl
  modified_base 15..17: mod_base = OTHER; note = 5-methyl
  source 1..18: mol_type = other DNA
aagttctgtccaagcccg

SEQ ID NO: 10315 - DNA, 17 bp, synthetic construct
  misc_feature 1..17: note = Description of Artificial Sequence: Synthetic Antisense oligonucleotide
  modified_base 1..2: mod_base = OTHER; note = bicyclic nucleic acid (BNA)
  modified_base 16..17: mod_base = OTHER; note = bicyclic nucleic acid (BNA)
  modified_base 6: mod_base = OTHER; note = 5-methyl
  modified_base 10..11: mod_base = OTHER; note = 5-methyl
  modified_base 15..17: mod_base = OTHER; note = 5-methyl
  source 1..17: mol_type = other DNA
aagttctgtccaagccc

SEQ ID NO: 10316 - DNA, 16 bp, synthetic construct
  misc_feature 1..16: note = Description of Artificial Sequence: Synthetic Antisense oligonucleotide
  modified_base 1..2: mod_base = OTHER; note = bicyclic nucleic acid (BNA)
  modified_base 15..16: mod_base = OTHER; note = bicyclic nucleic acid (BNA)
  modified_base 6: mod_base = OTHER; note = 5-methyl
  modified_base 10..11: mod_base = OTHER; note = 5-methyl
  modified_base 15..16: mod_base = OTHER; note = 5-methyl
  source 1..16: mol_type = other DNA
aagttctgtccaagcc

SEQ ID NO: 10317 - DNA, 15 bp, synthetic construct
  misc_feature 1..15: note = Description of Artificial Sequence: Synthetic Antisense oligonucleotide
  modified_base 1..2: mod_base = OTHER; note = bicyclic nucleic acid (BNA)
  modified_base 14..15: mod_base = OTHER; note = bicyclic nucleic acid (BNA)
  modified_base 6: mod_base = OTHER; note = 5-methyl
  modified_base 10..11: mod_base = OTHER; note = 5-methyl
  modified_base 15: mod_base = OTHER; note = 5-methyl
  source 1..15: mol_type = other DNA
aagttctgtccaagc

SEQ ID NO: 10318 - DNA, 14 bp, synthetic construct
  misc_feature 1..14: note = Description of Artificial Sequence: Synthetic Antisense oligonucleotide
  modified_base 1..2: mod_base = OTHER; note = bicyclic nucleic acid (BNA)
  modified_base 13..14: mod_base = OTHER; note = bicyclic nucleic acid (BNA)
  modified_base 6: mod_base = OTHER; note = 5-methyl
  modified_base 10..11: mod_base = OTHER; note = 5-methyl
  source 1..14: mol_type = other DNA
aagttctgtccaag

SEQ ID NO: 10319 - DNA, 13 bp, synthetic construct
  misc_feature 1..13: note = Description of Artificial Sequence: Synthetic Antisense oligonucleotide
  modified_base 1..2: mod_base = OTHER; note = bicyclic nucleic acid (BNA)
  modified_base 12..13: mod_base = OTHER; note = bicyclic nucleic acid (BNA)
  modified_base 6: mod_base = OTHER; note = 5-methyl
  modified_base 10..11: mod_base = OTHER; note = 5-methyl
  source 1..13: mol_type = other DNA
aagttctgtccaa

SEQ ID NO: 10320 - DNA, 12 bp, synthetic construct
  misc_feature 1..12: note = Description of Artificial Sequence: Synthetic Antisense oligonucleotide
  modified_base 1..2: mod_base = OTHER; note = bicyclic nucleic acid (BNA)
  modified_base 11..12: mod_base = OTHER; note = bicyclic nucleic acid (BNA)
  modified_base 6: mod_base = OTHER; note = 5-methyl
  modified_base 10..11: mod_base = OTHER; note = 5-methyl
  source 1..12: mol_type = other DNA
aagttctgtcca

SEQ ID NO: 10321 - DNA, 11 bp, synthetic construct
  misc_feature 1..11: note = Description of Artificial Sequence: Synthetic Antisense oligonucleotide
  modified_base 1..2: mod_base = OTHER; note = bicyclic nucleic acid (BNA)
  modified_base 10..11: mod_base = OTHER; note = bicyclic nucleic acid (BNA)
  modified_base 6: mod_base = OTHER; note = 5-methyl
  modified_base 10..11: mod_base = OTHER; note = 5-methyl
  source 1..11: mol_type = other DNA
aagttctgtcc

SEQ ID NO: 10322 - DNA, 10 bp, synthetic construct
  misc_feature 1..10: note = Description of Artificial Sequence: Synthetic Antisense oligonucleotide
  modified_base 1..2: mod_base = OTHER; note = bicyclic nucleic acid (BNA)
  modified_base 9..10: mod_base = OTHER; note = bicyclic nucleic acid (BNA)
  modified_base 6: mod_base = OTHER; note = 5-methyl
  modified_base 10: mod_base = OTHER; note = 5-methyl
  source 1..10: mol_type = other DNA
aagttctgtc

SEQ ID NO: 10323-10324 - skipped (2 entries)

SEQ ID NO: 10325 - DNA, 20 bp, synthetic construct
  misc_feature 1..20: note = Description of Artificial Sequence: Synthetic Antisense oligonucleotide
  modified_base 1..2: mod_base = OTHER; note = bicyclic nucleic acid (BNA)
  modified_base 19..20: mod_base = OTHER; note = bicyclic nucleic acid (BNA)
  modified_base 7: mod_base = OTHER; note = 5-methyl
  modified_base 11..12: mod_base = OTHER; note = 5-methyl
  modified_base 16..18: mod_base = OTHER; note = 5-methyl
  source 1..20: mol_type = other DNA
taagttctgtccaagcccgg

SEQ ID NO: 10326 - DNA, 19 bp, synthetic construct
  misc_feature 1..19: note = Description of Artificial Sequence: Synthetic Antisense oligonucleotide
  modified_base 1..2: mod_base = OTHER; note = bicyclic nucleic acid (BNA)
  modified_base 18..19: mod_base = OTHER; note = bicyclic nucleic acid (BNA)
  modified_base 7: mod_base = OTHER; note = 5-methyl
  modified_base 11..12: mod_base = OTHER; note = 5-methyl
  modified_base 16..18: mod_base = OTHER; note = 5-methyl
  source 1..19: mol_type = other DNA
taagttctgtccaagcccg

SEQ ID NO: 10327 - DNA, 18 bp, synthetic construct
  misc_feature 1..18: note = Description of Artificial Sequence: Synthetic Antisense oligonucleotide
  modified_base 1..2: mod_base = OTHER; note = bicyclic nucleic acid (BNA)
  modified_base 17..18: mod_base = OTHER; note = bicyclic nucleic acid (BNA)
  modified_base 7: mod_base = OTHER; note = 5-methyl
  modified_base 11..12: mod_base = OTHER; note = 5-methyl
  modified_base 16..18: mod_base = OTHER; note = 5-methyl
  source 1..18: mol_type = other DNA
taagttctgtccaagccc

SEQ ID NO: 10328 - DNA, 17 bp, synthetic construct
  misc_feature 1..17: note = Description of Artificial Sequence: Synthetic Antisense oligonucleotide
  modified_base 1..2: mod_base = OTHER; note = bicyclic nucleic acid (BNA)
  modified_base 16..17: mod_base = OTHER; note = bicyclic nucleic acid (BNA)
  modified_base 7: mod_base = OTHER; note = 5-methyl
  modified_base 11..12: mod_base = OTHER; note = 5-methyl
  modified_base 16..17: mod_base = OTHER; note = 5-methyl
  source 1..17: mol_type = other DNA
taagttctgtccaagcc

SEQ ID NO: 10329 - DNA, 16 bp, synthetic construct
  misc_feature 1..16: note = Description of Artificial Sequence: Synthetic Antisense oligonucleotide
  modified_base 1..2: mod_base = OTHER; note = bicyclic nucleic acid (BNA)
  modified_base 15..16: mod_base = OTHER; note = bicyclic nucleic acid (BNA)
  modified_base 7: mod_base = OTHER; note = 5-methyl
  modified_base 11..12: mod_base = OTHER; note = 5-methyl
  modified_base 16: mod_base = OTHER; note = 5-methyl
  source 1..16: mol_type = other DNA
taagttctgtccaagc

SEQ ID NO: 10330 - DNA, 14 bp, synthetic construct
  misc_feature 1..14: note = Description of Artificial Sequence: Synthetic Antisense oligonucleotide
  modified_base 1..2: mod_base = OTHER; note = bicyclic nucleic acid (BNA)
  modified_base 13..14: mod_base = OTHER; note = bicyclic nucleic acid (BNA)
  modified_base 7: mod_base = OTHER; note = 5-methyl
  modified_base 11..12: mod_base = OTHER; note = 5-methyl
  source 1..14: mol_type = other DNA
taagttctgtccaa

SEQ ID NO: 10331 - DNA, 13 bp, synthetic construct
  misc_feature 1..13: note = Description of Artificial Sequence: Synthetic Antisense oligonucleotide
  modified_base 1..2: mod_base = OTHER; note = bicyclic nucleic acid (BNA)
  modified_base 12..13: mod_base = OTHER; note = bicyclic nucleic acid (BNA)
  modified_base 7: mod_base = OTHER; note = 5-methyl
  modified_base 11..12: mod_base = OTHER; note = 5-methyl
  source 1..13: mol_type = other DNA
taagttctgtcca

SEQ ID NO: 10332 - DNA, 12 bp, synthetic construct
  misc_feature 1..12: note = Description of Artificial Sequence: Synthetic Antisense oligonucleotide
  modified_base 1..2: mod_base = OTHER; note = bicyclic nucleic acid (BNA)
  modified_base 11..12: mod_base = OTHER; note = bicyclic nucleic acid (BNA)
  modified_base 7: mod_base = OTHER; note = 5-methyl
  modified_base 11..12: mod_base = OTHER; note = 5-methyl
  source 1..12: mol_type = other DNA
taagttctgtcc

SEQ ID NO: 10333 - DNA, 11 bp, synthetic construct
  misc_feature 1..11: note = Description of Artificial Sequence: Synthetic Antisense oligonucleotide
  modified_base 1..2: mod_base = OTHER; note = bicyclic nucleic acid (BNA)
  modified_base 10..11: mod_base = OTHER; note = bicyclic nucleic acid (BNA)
  modified_base 7: mod_base = OTHER; note = 5-methyl
  modified_base 11: mod_base = OTHER; note = 5-methyl
  source 1..11: mol_type = other DNA
taagttctgtc

SEQ ID NO: 10334 - DNA, 10 bp, synthetic construct
  misc_feature 1..10: note = Description of Artificial Sequence: Synthetic Antisense oligonucleotide
  modified_base 1..2: mod_base = OTHER; note = bicyclic nucleic acid (BNA)
  modified_base 9..10: mod_base = OTHER; note = bicyclic nucleic acid (BNA)
  modified_base 7: mod_base = OTHER; note = 5-methyl
  source 1..10: mol_type = other DNA
taagttctgt

SEQ ID NO: 10335-10336 - skipped (2 entries)

SEQ ID NO: 10337 - DNA, 20 bp, synthetic construct
  misc_feature 1..20: note = Description of Artificial Sequence: Synthetic Antisense oligonucleotide
  modified_base 1..2: mod_base = OTHER; note = bicyclic nucleic acid (BNA)
  modified_base 19..20: mod_base = OTHER; note = bicyclic nucleic acid (BNA)
  modified_base 8: mod_base = OTHER; note = 5-methyl
  modified_base 12..13: mod_base = OTHER; note = 5-methyl
  modified_base 17..19: mod_base = OTHER; note = 5-methyl
  source 1..20: mol_type = other DNA
gtaagttctgtccaagcccg

SEQ ID NO: 10338 - DNA, 19 bp, synthetic construct
  misc_feature 1..19: note = Description of Artificial Sequence: Synthetic Antisense oligonucleotide
  modified_base 1..2: mod_base = OTHER; note = bicyclic nucleic acid (BNA)
  modified_base 18..19: mod_base = OTHER; note = bicyclic nucleic acid (BNA)
  modified_base 8: mod_base = OTHER; note = 5-methyl
  modified_base 12..13: mod_base = OTHER; note = 5-methyl
  modified_base 17..19: mod_base = OTHER; note = 5-methyl
  source 1..19: mol_type = other DNA
gtaagttctgtccaagccc

SEQ ID NO: 10339 - DNA, 17 bp, synthetic construct
  misc_feature 1..17: note = Description of Artificial Sequence: Synthetic Antisense oligonucleotide
  modified_base 1..2: mod_base = OTHER; note = bicyclic nucleic acid (BNA)
  modified_base 16..17: mod_base = OTHER; note = bicyclic nucleic acid (BNA)
  modified_base 8: mod_base = OTHER; note = 5-methyl
  modified_base 12..13: mod_base = OTHER; note = 5-methyl
  modified_base 17: mod_base = OTHER; note = 5-methyl
  source 1..17: mol_type = other DNA
gtaagttctgtccaagc

(The sequence listing continues in the following parts.)